United States Patent Application Publication US 2005/0228172 A9 - sequence listing, part 27

SEQ ID NO: 86351 - DNA, 806 bp, Homo sapiens
tttgggaggctgaggtaggaggactgcttgagcccaggagttcaagcacagcctgggcaacataataagaccccatctctatttaaaaaagaaagagtgggtatgctagaattaatatgtaaagtcagaaaactcaccaaatgcttatgtttcatcagacatcccaaagaatattcactttctttaaaaggctcaaaagagtgggcatgcgaggctgggcgtggaaagaatactcaatttcttgaagtgatgaagaatgtgctggtaagagaagctcagggttggctgttctctgtaggccagggctgacatagggtatacggtcacagagctgggcttactagtagcagagggacaataggatgccagagtcaaagtagcagaattattgtgctgagcagaaaggttggagaggtagccagggtctgaccagcagagaaatttggcgatcattaatagagcatgggttcctggggacaagatagatggcactcaacaaatacgttgttcaatgcattaaaaaacaaacaacaacaacaacaacaaaaagaaattaaggatggatgattaggaggtggagggcagccaccctgataaaaagttacaattccttactgtttctgcacccgctcagcttaaaaaaaaattcatctttaytgaggtacaatttacctacattaaaattcacccattttaaatatatactttaatgagttttacagatatgtacagttgttcagccattaacacaagatatgcaacatttccatcatgcccccaaatttccttgtggacagtggtgcgct

SEQ ID NO: 86352 - DNA, 849 bp, Homo sapiens
  misc_feature (1)...(849): n = A,T,C or G
caaaagcaataactaatttcattatgcaatttccaatatatatatttaacattgtgtcactaaaaaagataaaaaatatatgtgatgactataatatgatcaataataatttcatattattgatcaacactatctcctcaaacagaagtcctgatccaccagtttcataatatgaaactctcttaagaaacaataaaatttagcaaaatcctcattcttcatgtgatttcattaaataatatttaattttaagtttattcaaaagaattttttattctctctattgtgaatgaacatcacaaataacaaaatagtccagatttgttattatggtaatttaataccataatcactgttgctgtcagtgaaatgattttctgaaatgatgaataattcatggtgaagtccaaacaaaatacrtataatcttcactgaattaatgttgtagttttcctggaaaattcagtatatcatacatgctgtgaagatacatagtattaacttgtaaataggtttgcacttaaatgattttcaataggtngctcacccatatgagtgtctgctggggacatttgaaagtcattcaggaacatacaagactgttgaacaggactgtcctgcacattcctggaaattaaccatgcctggtccttacttgctaaatatcagaagcttcccaccataaccttgacaacccaaaatactaccatcaatttccaaaagaccccctggggggcagtgtagccctgttgagaaccactgttcatctctaactggatactgtttttgaaatctctgttgagataatcatgtggtttttgtctttggttctgtttatatgctggatta

SEQ ID NO: 86353 - DNA, 639 bp, Homo sapiens
aacccacaatatcttcgaggtatgcctatacagagtctgtaggaaaaaaggaaacaggagggaatgtaacacataataatttaaatagagtactgaaattgtatggttattcataatgcaatgctacatatatgtgaagaagttgagaatcgtgatattatgtcctttattttacaaacgattttgcaaaggagacccaaaagagaagcagggagtgggtggctcacttaaatgagcattaaatcagacctccgtaagtgatatactataccagtatttcccatttcaagagctagatcaatgtgtagactctcactgctgacttgtggatcggccatgtctgtttttactagtatcactgggactccttgatattgactgctycccgttattgccattgtgatctcctctcacttgcagtcttctctaggcagctgatggagggaatgggtaagccttgtgccactggggaaatgggagaggtgatggttgaaagaattgcagaatggctctgggaatagccatgaatgtagtcctgagctttttctcactgggtaaagcaatgaaacaaggaatcctaacttggagaaaaaaaagtttttttctttttaggaaagataataagagtgtgaggaaagg

SEQ ID NO: 86354 - DNA, 639 bp, Homo sapiens
aacccacaatatcttcgaggtatgcctatacagagtctgtaggaaaaaaggaaacaggagggaatgtaacacataataatttaaatagagtactgaaattgtatggttattcataatgcaatgctacatatatgtgaagaagttgagaatcgtgatattatgtcctttattttacaaacgattttgcaaaggagacccaaaagagaagcagggagtgggtggctcacttaaatgagcattaaatcagacctccgtaagtgatatactataccagtatttcccatttcaagagctagatcaatgtgtagactctcactgctgacttgtggatcggccatgtctgtttttactagtatcactgggactccttgatattgactgcttcccgttattgccattgtgatctsctctcacttgcagtcttctctaggcagctgatggagggaatgggtaagccttgtgccactggggaaatgggagaggtgatggttgaaagaattgcagaatggctctgggaatagccatgaatgtagtcctgagctttttctcactgggtaaagcaatgaaacaaggaatcctaacttggagaaaaaaaagtttttttctttttaggaaagataataagagtgtgaggaaagg

SEQ ID NO: 86355 - DNA, 810 bp, Homo sapiens
atgggagacagccattagtcccatactcatacaaatataatcaactgtgacatgtgctatatggggctagaaagagtatattacagagactcaactccatcaagaccatgtcagagaaggcttctctgagaaagtgatgtttgggctgagatctgggagatgactagaagttaatcagaaaaagtcaagcaactagaaggggtggaaagaagagattcagagtgacagcaatgttttggttgggcaaatattagactccacattgggagtctaatatttaagttagtatctaactttaagaccttggagataattatttttggcatgaatccattatcatacagatattactcttcaataatgaggtcattttaaaaatgcgcagtaaaaaacaagrctaattcaagtccaggaagatggcctgtgttgtgtcactcggaggttcagcatatgagggcttgtgttattgctgtttaaggcagagacaccctagagacatgggagaaccatgttgcatactgcacaacactggtgatgactctgtgccctagcacagcaaaacatcttgacctggcaccatcatctcactcatgtatgtcattttctatgggcactacaatatttttcctcaagtttatgtaagatattttggaactcttctgaaaatttaatatactcctgctgtatcatcactttgtttcctgtctcttacctcaactcaaaagccttttcctaactcattatcacaaaggagaatacaatgtggagatttaactgaattatacaatataggatttctggtatttggca

SEQ ID NO: 86356 - DNA, 789 bp, Homo sapiens
tgagcgaaatgccagaagtcgtgacactgtccttgtactcagacatgtgaatccagtgacacttagtatccttcatctttcattctctctctcccaatttgatatcaataatgtttacagtcaacactatgacaccttgtctaaacattcaaagtactcaaacacatataaacctcagtctacaatttgactatgcctctagatttgtagaaactagggcaaatatacagtcagaagattcagtctcagaaattgatatgcagtaagtgaattatgaaagtacaatgtttccctgcatattttaatgagtatttcagctaaaaagyagattgggctagaaatataatgatgctggacagtatcatcttggggctagaagtctgagatagaatcccttcttcacaaacagaataataatatttcattaaagaaagtatacattatgttccatcatttgctttgtgtttacacaatattagcatcgctgaataatagacatgcatcaagggaggaaaaataagcattcctttcttttggcataatgaaagttctaaattgccatatactttgtatttaattataaattcagaagtgtgtgttatatttataaatgaactattctgcacacatgtcctcaaacacattatggactgaagtcttcaatattcccattctttctcattctgggaaagaaaaataccataaaacttagaaaataaatttctttatactttgtaatggaaatttttggacatacgaaaaagtggcatgagtagggaagtgtacccc

SEQ ID NO: 86357 - DNA, 789 bp, Homo sapiens
tgagcgaaatgccagaagtcgtgacactgtccttgtactcagacatgtgaatccagtgacacttagtatccttcatctttcattctctctctcccaatttgatatcaataatgtttacagtcaacactatgacaccttgtctaaacattcaaagtactcaaacacatataaacctcagtctacaatttgactatgcctctagatttgtagaaactagggcaaatatacagtcagaagattcagtctcagaaattgatatgcagtaagtgaattatgaaagtacaatgtttccctgcatattttaatgagtatttcagctaaaaagtagattgggctagaaatataatgatgctggacagtatcatcttggggctagaagtctgagatagaatcccttcttcacaaacagaataataatatttcattaaagaaagtatacattatgttccatcatttgctttgtgtttacacaatattagcatcgctgaatartagacatgcatcaagggaggaaaaataagcattcctttcttttggcataatgaaagttctaaattgccatatactttgtatttaattataaattcagaagtgtgtgttatatttataaatgaactattctgcacacatgtcctcaaacacattatggactgaagtcttcaatattcccattctttctcattctgggaaagaaaaataccataaaacttagaaaataaatttctttatactttgtaatggaaatttttggacatacgaaaaagtggcatgagtagggaagtgtacccc

SEQ ID NO: 86358 - DNA, 1195 bp, Homo sapiens
  misc_feature (1)...(1195): n = A,T,C or G
tgttttttcaagccattggcattttgaaggaatcaggtccatttacctgcatgaggtcccacctaaccggatttcactgttgcttctttgtgcagttttacttgtttctcttactgtgtagacaatgctagctctaaaggcaggttccaacttttttttagaacaaaakacttcatcagtggtgctgtgtatttcatattgcacaacttttatgatgctaagattaattcatgagttcagaagatgaaactctgatcccttcactataaagttgtccttcagcattttccctcataattttgacatctattgatgaccattgtctgaatcagatttttcacttagaagctgcaaaatgttgattttccaactctctcattcctttcacatttggtagttgagattcctttttattgaactgcctctcatccattaatgctacaaggttactctgccaattcacttcaaaaagtcagaataaaagctgaattatttttctttagtaagtaacttttagaggaacgagttggagtcagaagttgatgccatggtgtatcactgacctcccttcaggaatgaagcactcattccacagctgtgggaaatgttagaagctgctgctcaaagctgaaccctccacaagaatgtcctctgcagaaggcagctgtattacccaaggttatgcaccagcctcttccctgcagacagacggatccaatgactggtcactgggatgggagggggaaaagtcctgaccttttctcaaattgtgacaaatctgaaaggccatcctcatgaccccccacacctaataatatataatcaagacaataaactcaactcattattatgtgaaaaagagatttggtaatttcaacaaatggtttatttggaatttcctatagcactaactatacacggatatgtttacttacaatgcattacattattttgtgctgattgctaatagcaactgggtgagccaaatcataattaaattacaagaaaattaatatgcaatacataattgataagatgaaacaggaaaatcgtacaaaacaatgtataataatgcagctgcaaaagaatcactgttttctcacactattaattttatatgctccaacaagaatgttgtttactgtgttatatttggttcnacagtgcagtcttnttcttgataatcataccatgt

SEQ ID NO: 86359 - DNA, 746 bp, Homo sapiens
ttttgctcttccacccaggctggagtgatgtagcatgatctccgctcactgcaacctccaccctccaggttcaagcgattctcctgcctcagcctcccgagtagctgggattataggcacccgcccccacgtctggctaatttttgtatttttaatagagacgaggtttcgccatgttggccaggctggtctcgaactcctgacctcaggtgatccacctgccttggcctcccaaagtgctgggattacaggcgtgagagaccgtgcccggcctgttcctgggttctttaacatgttctacttgtctatttgtctacttgtctggtactattctatttttctgtgacttgtcttattgtcttctggggcaagtctccccctttgcacttcttcacaactgacttggccaaattcacatttcctttgacccaggaattccactttttagaatgtatcttacagaaatactggaataaaggaaaataatgtatacacaaatttattcactgcagccttgcttataatggccccaaactggaaaaaaacaaaacttccaaaaataggggactggtacattcaaagagtggaatactacactgttttaattttctgtagggactaattctttctttgctgcccaggttggactcaaacacctcggcctcccaaagggctgggattataggcatgagccaccacaccyggcctttatttctttattttaatttttttttttcattcccaca

SEQ ID NO: 86360 - DNA, 650 bp, Homo sapiens
tcagcaagatggggggtggagctgcggggggcatgaagacaagacctggtggtcagggaggggtgactcaccttgcgttatacctctgacctcagaaagtccttaatcttgttcctgtgctgccccctgtaattctagtccacagctgttggttctgagctgaaaaatgagctttttgtgggtactctgagtctttttgtgggagkgggcctgaaggctcagactctaagaaaatggcctcctcccccacgctggcctctgggtagtgggtgggaggctgagggtggaattgacagatggtgcggtgtttaacagatgacgggaaacaaaattactcagctgccgtgtctctccatcttccccatggaaggagatggccttcggactggaaacagacaatgacctcaatcaggaggctgtcagaggacagggaaagagagaagcgacggggtattaggggtattagggcaccatgaacaggtgtacaaaagacctgactcagaatcccatccctgccacacaccagctgggtgatcttcagcagatctcacagagtctctgttttctcatctgtaagatgggtcaatgaaaaaccctgccttatcttcctcactggcttttatgaagattatatggattctgtgtttgaa

SEQ ID NO: 86361 - DNA, 650 bp, Homo sapiens
tcagcaagatggggggtggagctgcggggggcatgaagacaagacctggtggtcagggaggggtgactcaccttgcgttatacctctgacctcagaaagtccttaatcttgttcctgtgctgccccctgtaattctagtccacagctgttggttctgagctgaaaaatgagctttttgtgggtactctgagtctttttgtgggagtgggcctgaaggctcagactctaagaaaatggcctcctcccccacgctggcctctgggtagtgggtgggaggctgagggtggaattgacagatggtgcggtgtttaacagatgacgggaaacaaaattactcagctgccrtgtctctccatcttccccatggaaggagatggccttcggactggaaacagacaatgacctcaatcaggaggctgtcagaggacagggaaagagagaagcgacggggtattaggggtattagggcaccatgaacaggtgtacaaaagacctgactcagaatcccatccctgccacacaccagctgggtgatcttcagcagatctcacagagtctctgttttctcatctgtaagatgggtcaatgaaaaaccctgccttatcttcctcactggcttttatgaagattatatggattctgtgtttgaa

SEQ ID NO: 86362 - DNA, 1360 bp, Homo sapiens
gcatgtatttaaaatcctrtttgaaattcaacctgcctccatgtttctcccactgttggcaatcttgatccccttactctaatataagtttttctatgttgaataacatttatcattttctaacaccctccataatttacttgtttattatgtatatgttttggtccttctccccatgctagaatgtaaatcctaacaaagcaaggattttagctgttttttttttctctcgctagaatatcataaatgcccaaaactgagcatggctcattcttgcaagaaatacttattgggcacttactaaatgctaactattgtgctagtcatactattagacgatgtgttaaaatttatgtgttcactgctctcatggagtttatttctgagtggcagagatggaggctaattaataatcatatacaataaaatataaagttgagatacatatttattctgaagaaataaagtcttatgaaaatataacaaagaaaatatatccagaagtgagttcattgattagaaaagcctttgctcaaatatcagaaagttattcttgaactgagatatgaactacaagcaggagtttacaagggaaagagaacatgcaaatattctgtggctaggaggagcagaaaaaagagagaggactatatggggtagcaggagggtatgagggttcagccggaaaagaccttatgggctgaatgatagttttgtctattgtccaagaaaaatgggaaaccactgatgtgtctcttttttggcggggggtgggagggggcttgattttttttttttttttaatgcagggcaggagacagggggaggcataagaaataggatcataattatgttttgatgagctgactttgactttggctatagtgtggagaattgtaatgagctctgattattcaggatctttttagaatttctgtttatagatggaggttaaaataagttaaacaaggctgggcacgttggcttatccctgtaaccccagcactttgggaggctgaggcaggcggatcactcgaggtcaggagctcaagaccagcctggccaacgtggtgaaaccctgtctctactaaaaatacgaaaattagccgggtgtggtggcatgcacctgtaatcccagctacttgggaggctgaggtgggagactcactttaacccaggaggtagaagttgcagtgagctaagatctcgccactgcactccagcctggatgacagagcaagacaccagcttgaaaaaaaaaaaataaacaaatatattttctcataggagtatttcatggtaaaagtaaaatgtcttacagtataattctaccaataggtaattttcaaagtctattttt

SEQ ID NO: 86363 - DNA, 1360 bp, Homo sapiens
gcatgtatttaaaatcctgtttgaaattcaacctgcctccatgtttctcccactgttggcaatcttgatccycttactctaatataagtttttctatgttgaataacatttatcattttctaacaccctccataatttacttgtttattatgtatatgttttggtccttctccccatgctagaatgtaaatcctaacaaagcaaggattttagctgttttttttttctctcgctagaatatcataaatgcccaaaactgagcatggctcattcttgcaagaaatacttattgggcacttactaaatgctaactattgtgctagtcatactattagacgatgtgttaaaatttatgtgttcactgctctcatggagtttatttctgagtggcagagatggaggctaattaataatcatatacaataaaatataaagttgagatacatatttattctgaagaaataaagtcttatgaaaatataacaaagaaaatatatccagaagtgagttcattgattagaaaagcctttgctcaaatatcagaaagttattcttgaactgagatatgaactacaagcaggagtttacaagggaaagagaacatgcaaatattctgtggctaggaggagcagaaaaaagagagaggactatatggggtagcaggagggtatgagggttcagccggaaaagaccttatgggctgaatgatagttttgtctattgtccaagaaaaatgggaaaccactgatgtgtctcttttttggcggggggtgggagggggcttgattttttttttttttttaatgcagggcaggagacagggggaggcataagaaataggatcataattatgttttgatgagctgactttgactttggctatagtgtggagaattgtaatgagctctgattattcaggatctttttagaatttctgtttatagatggaggttaaaataagttaaacaaggctgggcacgttggcttatccctgtaaccccagcactttgggaggctgaggcaggcggatcactcgaggtcaggagctcaagaccagcctggccaacgtggtgaaaccctgtctctactaaaaatacgaaaattagccgggtgtggtggcatgcacctgtaatcccagctacttgggaggctgaggtgggagactcactttaacccaggaggtagaagttgcagtgagctaagatctcgccactgcactccagcctggatgacagagcaagacaccagcttgaaaaaaaaaaaataaacaaatatattttctcataggagtatttcatggtaaaagtaaaatgtcttacagtataattctaccaataggtaattttcaaagtctattttt

SEQ ID NO: 86364 - DNA, 1241 bp, Homo sapiens
gttttcccagcaccatttattgaataggagatcctttccccattgcttgtttttgtcaggtttgtcaaagaccggatgtttatagatgtgtggtgttatttctgaggcctctgttctgttccattggtctatatcttttttgatactatgcttaaaacagtaccgtgctgttttggttactgtaaccttgtagtataatttgaagtcgggtagtgtgatgcctctagctttgttctttttgcttaggattgtcttggctgtatggggtgttctttgattccatatgaaatttaaagtagttttctctaattctgcgaagaaagtcagtggtaggttgattgtaatagtatttaatctataaattactttgggcagtatggccattttcatgatattgattcttcttatccatgagaatggaatgtttttccacttgttggtgtcctctcttatttccttgagcagttgtttatagttctccttggagaggtccttcacatcccttgctagcttggtattttattctctttatagtgattcacactgattaatttcatcagtcccttcatataggtcagaagtttacccttttctcactacatgttgtaaatggacagtgactaatcatcatttccaagtgaatgacttccaaatctctgtgtctagtgttccagcccttcatttccagatatttattgtatatcctcttcactagtcatacagcacctccacacatctaaaaccaagtttatttctatttcaaaycagcagccattcgtgtggtgtatatttttaatggaccaaccattcatattatgtgagttcaaagccccagagctaactcctacttcttaagctaccctatctgctccatctaggaggagccttcttcatttccactggtcttacccttattcagatctttcttataatctcctgcaacactacagaagtctcctttcccctccttcccagctctgccctgtttgtagcctacaggttgctgatattaatactattactaatgcatagcactggtcaagctcttggtcatttatgtcaacttggtgaagtctagaaactaattttcctggaatcctctgtttctctattgttctgagttaagttggccaagacaggactttgtgtgagaattggaagaaggaatggagcggatgccattgttcatggaagtttatcatggtaaatgatggtgataaaagatgcagaggtgcccgtca

SEQ ID NO: 86365 - DNA, 1241 bp, Homo sapiens
gttttcccagcaccatttattgaataggagatcctttccccattgcttgtttttgtcaggtttgtcaaagaccggatgtttatagatgtgtggtgttatttctgaggcctctgttctgttccattggtctatatcttttttgatactatgcttaaaacagtaccgtgctgttttggttactgtaaccttgtagtataatttgaagtcgggtagtgtgatgcctctagctttgttctttttgcttaggattgtcttggctgtatggggtgttctttgattccatatgaaatttaaagtagttttctctaattctgcgaagaaagtcagtggtaggttgattgtaatagtatttaatctataaattactttgggcagtatggccattttcatgatattgattcttcttatccatgagaatggaatgtttttccacttgttggtgtcctctcttatttccttgagcagttgtttatagttctccttggagaggtccttcacatcccttgctagcttggtattttattctctttatagtgattcacactgattaatttcatcagtcccttcatataggtcagaagtttacccttttctcactacatgttgtaaatggacagtgactaatcatcatttccaagtgaatgacttccaaatctctgtgtctagtgttccagcccttcatttccagatatttattgtatatcctcttcactagtcatacagcacctccacacatctaaaaccaagtttatttctatttcaaaccagcagccattcgtgtggtgtatatttttaatggaccaaccattcatattatgtgagttcaaagccccagagctaactcctacttcttaagctaccctatctgctccatctaggaggagccttcttcatttccactggtcttacccttattcagatctttcttataatctcctgcaacactacagaagtctcctttcccctccttcccagctctgccctgtttgtagcctacaggttgctgatattaatactattactaatgcatagcactggtcaagctcttggtcatttatgtcaacttggtgaagtctagaaactamttttcctggaatcctctgtttctctattgttctgagttaagttggccaagacaggactttgtgtgagaattggaagaaggaatggagcggatgccattgttcatggaagtttatcatggtaaatgatggtgataaaagatgcagaggtgcccgtca

SEQ ID NO: 86366 - DNA, 1241 bp, Homo sapiens
gttttcccagcaccatttattgaataggagatcctttccccattgcttgtttttgtcaggtttgtcaaagaccggatgtttatagatgtgtggtgttatttctgaggcctctgttctgttccattggtctatatcttttttgatactatgcttaaaacagtaccgtgctgttttggttactgtaaccttgtagtataatttgaagtcgggtagtgtgatgcctctagctttgttctttttgcttaggattgtcttggctgtatggggtgttctttgattccatatgaaatttaaagtagttttctctaattctgcgaagaaagtcagtggtaggttgattgtaatagtatttaatctataaattactttgggcagtatggccattttcatgatattgattcttcttatccatgagaatggaatgtttttccacttgttggtgtcctctcttatttccttgagcagttgtttatagttctccttggagaggtccttcacatcccttgctagcttggtattttattctctttatagtgattcacactgattaatttcatcagtcccttcatataggtcagaagtttacccttttctcactacatgttgtaaatggacagtgactaatcatcatttccaagtgaatgacttccaaatctctgtgtctagtgttccagcccttcatttccagatatttattgtatatcctcttcactagtcatacagcacctccacacatctaaaaccaagtttatttctatttcaaaccagcagccattcgtgtggtgtatatttttaatggaccaaccattcatattatgtgagttcaaagccccagagctaactcctacttcttaagctaccctatctgctccatctaggaggagccttcttcatttccactggtcttacccttattcagatctttcttataatctcctgcaacactacagaagtctcctttcccctccttcccagctctgccctgtttgtagcctacaggttgctgatattaatactattactaatgcatagcactggtcaagctcttggtcatttatgtcaacttggtgaagtctagaaactaattttcctggaaycctctgtttctctattgttctgagttaagttggccaagacaggactttgtgtgagaattggaagaaggaatggagcggatgccattgttcatggaagtttatcatggtaaatgatggtgataaaagatgcagaggtgcccgtca

SEQ ID NO: 86367 - DNA, 1241 bp, Homo sapiens
gttttcccagcaccatttattgaataggagatcctttccccattgcttgtttttgtcaggtttgtcaaagaccggatgtttatagatgtgtggtgttatttctgaggcctctgttctgttccattggtctatatcttttttgatactatgcttaaaacagtaccgtgctgttttggttactgtaaccttgtagtataatttgaagtcgggtagtgtgatgcctctagctttgttctttttgcttaggattgtcttggctgtatggggtgttctttgattccatatgaaatttaaagtagttttctctaattctgcgaagaaagtcagtggtaggttgattgtaatagtatttaatctataaattactttgggcagtatggccattttcatgatattgattcttcttatccatgagaatggaatgtttttccacttgttggtgtcctctcttatttccttgagcagttgtttatagttctccttggagaggtccttcacatcccttgctagcttggtattttattctctttatagtgattcacactgattaatttcatcagtcccttcatataggtcagaagtttacccttttctcactacatgttgtaaatggacagtgactaatcatcatttccaagtgaatgacttccaaatctctgtgtctagtgttccagcccttcatttccagatatttattgtatatcctcttcactagtcatacagcacctccacacatctaaaaccaagtttatttctatttcaaaccagcagccattcgtgtggtgtatatttttaatggaccaaccattcatattatgtgagttcaaagccccagagctaactcctacttcttaagctaccctatctgctccatctaggaggagccttcttcatttccactggtcttacccttattcagatctttcttataatctcctgcaacactacagaagtctcctttcccctccttcccagctctgccctgtttgtagcctacaggttgctgatattaatactattactaatgcatagcactggtcaagctcttggtcatttatgtcaacttggtgaagtctagaaactaattttcctggaatcctctgyttctctattgttctgagttaagttggccaagacaggactttgtgtgagaattggaagaaggaatggagcggatgccattgttcatggaagtttatcatggtaaatgatggtgataaaagatgcagaggtgcccgtca

SEQ ID NO: 86368 - DNA, 1241 bp, Homo sapiens
gttttcccagcaccatttattgaataggagatcctttccccattgcttgtttttgtcaggtttgtcaaagaccggatgtttatagatgtgtggtgttatttctgaggcctctgttctgttccattggtctatatcttttttgatactatgcttaaaacagtaccgtgctgttttggttactgtaaccttgtagtataatttgaagtcgggtagtgtgatgcctctagctttgttctttttgcttaggattgtcttggctgtatggggtgttctttgattccatatgaaatttaaagtagttttctctaattctgcgaagaaagtcagtggtaggttgattgtaatagtatttaatctataaattactttgggcagtatggccattttcatgatattgattcttcttatccatgagaatggaatgtttttccacttgttggtgtcctctcttatttccttgagcagttgtttatagttctccttggagaggtccttcacatcccttgctagcttggtattttattctctttatagtgattcacactgattaatttcatcagtcccttcatataggtcagaagtttacccttttctcactacatgttgtaaatggacagtgactaatcatcatttccaagtgaatgacttccaaatctctgtgtctagtgttccagcccttcatttccagatatttattgtatatcctcttcactagtcatacagcacctccacacatctaaaaccaagtttatttctatttcaaaccagcagccattcgtgtggtgtatatttttaatggaccaaccattcatattatgtgagttcaaagccccagagctaactcctacttcttaagctaccctatctgctccatctaggaggagccttcttcatttccactggtcttacccttattcagatctttcttataatctcctgcaacactacagaagtctcctttcccctccttcccagctctgccctgtttgtagcctacaggttgctgatattaatactattactaatgcatagcactggtcaagctcttggtcatttatgtcaacttggtgaagtctagaaactaattttcctggaatcctctgtttctctattgttctgagwtaagttggccaagacaggactttgtgtgagaattggaagaaggaatggagcggatgccattgttcatggaagtttatcatggtaaatgatggtgataaaagatgcagaggtgcccgtca

SEQ ID NO: 86369 - DNA, 527 bp, Homo sapiens
tcacgggcccacacgtgatggacaagagctgtcccctgccaggaaagggttaccgtcacgggcccacgctgtatggccagagctgtcccctgctgggaaagggttaccgtgraagtgtgcagctggtgtcaatacccaggcgtggctttgtctctgccagccacacagagtgacatctgccagctgcaattaaacatctgcccgcccgaagccactgctgagggcatgaaagggatggccgggcgagccccatcaggcacaggagggggtgtgggcgcaggtccgggcagccccctccccttcagaggacaggagagaagccccagcatggcactaccccttccctctgcgagctccatttccctgtccctcgacctcagcggtctgccatgccacaggtgcccgtcctcagcttgggtgacaacggccacccccactcaatgaaataaccgtcagggccccgtgctgtcatctgccctggggtaaaagcagctgccatgaccgtctcggctgttgcagggacctgt

SEQ ID NO: 86370 - DNA, 576 bp, Homo sapiens
ggagacacaggccaccaacaggcgggggtggctttgtgtgaggaggaaggggaggcaggagacaggggacagggggtgtgacggaaggggcagcccaagattgaaggcgcctcccagagatggggcattcgagctgggtcctgaagggcgagtaggagctcggaagatggagaagggacagagagagagaaaaggcaactgtaaagaggtccaggctcctgccctgtaccctggtttcacagggaggtaggggaggctggcggttctggagggtcagccagggaagggcgacccccactgtcttctgtgaagggtgccaaggggtggcctcaaggacagcgtccagccacgaacacaaccaagatcagaacccacacccggggcacagacgcttccacgtgtgtggagcttgcagattctccaaacygaaattcaaggcagacagatgggacttgccctataacccaaggcacatgaagcgtttccccgaccatggcgcctctgctgaagtcaagtaataaacaactccgcacttaaatactcattctcctggaaagggcaaccagggctccccct

SEQ ID NO: 86371 - DNA, 902 bp, Homo sapiens
atagtattatttatgttttctatgtctccttgagtaggttttgggagttataattttctaggaaattgtctatttcctctaaactatcaaacttattggcatagattaccttatggtttttatagtgtatatagttaccatagataaagtttctttattatttctggtgtcatttttggtgccttaaagctttgtctattttattaaggtttttttttttcctttaaagaaatagagttgttattctctatggtttattttctatttctttaatttctgctcttattgttatgatttttttatttggattcactttaagctgaaatttagagagtataaaaagatgtttagttaattgtatattaaccttaccattttagttacacaagtttcctttttttttttttttttttttttgagacagagtctcactgtcgcacaggctggagtgcagtggcgtgatctcagttcactgcaaccgacacctcccgggttcaagtgattcttctgcttcagcctcctgagtagctgggactacaggtgtccgccaccatgcccagctaatttttgtatttttagtagagatggggtttcaccaygttggccaggatggtctcgacctcttgaccttgtgatctgtctgcctcggcctcccaacatgctgggattacaggcatgagccacggcgcgtgatcaagtttccttttttaatgttctcccatgaagtatttttttttcaaattgcaacagaaatcagagtaatgcttgttatacaaaggagataatacaatggaaacgtgcacaaaggcaaaaaaacaacaaaatttcacctgcccgatcactaaacctctgtcagcctcattctgaagcttcattcaatgtttaaagccttgatagacaca

SEQ ID NO: 86372 - DNA, 830 bp, Homo sapiens
tcctttgagctgaacacacaaaattaatcgtgctcgaactctccaaattttgtgagttccctggtaactgactgtatggaagacagaaataaaaatcagaataaacttttattttctgaatcagaaagcagttgctccagcttytggtggtcacattgctaagatgtaaaaaacagaagttaggtgaaataaattaagaataattattttggagaaagagagggtagtgtttgactaaattagaaacattctctgagtcttagaagcgtgaatgatttaaatgaggttccagcatagtattgcatgtggtttctattttagagttttcccacttgaaaacaaactttgaggatttttattgaagtccatcagttttaacttactcaaagcttagcagccaccttttgcttttcttcccgttccccccacctcatgctgtgaagaaagtcatacaccattgtggtgttgattgaaacctttatttctccaggtctcctctcataaactgggctaagaaacacaaaggacatttgacacttcatgactacataagatgtgctgttcctctctctttctgtttgaaagtgacttggcagggtgaagttgagaaccccttggaaaggaggaagccgaaatgcaaacaaagttgaatcatgaagtgatgtcactctgaaccaattggagcagtggtgtcatgtgcctggcagctacttcaaatgcccacaaaacaggagtaatggtttaagctgtttccctcttcccctcccaccaccaatcagcagcagactgctagaggacagatgcaaaacagttattagaccaggcttagt

SEQ ID NO: 86373 - DNA, 662 bp, Homo sapiens
accagtgtgtccctaggtttggcacgttgagacgtcctcacgtttggtgctctgtgaagctgggcagccctcagagaggcaaagaagtcccaagaggccgtcctgcctcagggctctcaggaaagagccgcccgcgtccctggctgggcttccttggtgcacccagctcatttctccttccctctctgtagaactcacattgtccccrtggaaatgccagccagctcccctttcccagtgcaggggggagccaggtgggcctgaggtgggccagttctgccgctaatgggtgagagacttgggccaggtgccttacatccgggagcctcagtttcctcacctcggaaatagggtgataatgtaacagaccccatggggttatgagaaggacttggtgcaggaaagcagcagcacgtgcctggcacagggcagggcctctccagatggcagttcctgtctgtgtcttattcccaccctccgggcacatggggggaactcagtttctccccactgcgcgtcaccctgggagaggtgttttttgtgccaattgccattttaaatccaaatcagcagggatcatgtttgctgttcaaccatgtggcatatttatagtgattttttttgtaatcatggtttttctttctggaatttcaagtttttca

SEQ ID NO: 86374 - DNA, 1313 bp, Homo sapiens
gagcccccagcctctgcactttccaccagctcagtctctagggctttatctttctctgttcattgttacccgttgccagctttagctcagtgttgtgtgagccacacttcttcatcattgaggtgttcctgttgtcagtgggctagctaagggcagaagggcattcgtgggattttaaagaatttatgggaccaacattctttccgccttcagcagataccgattatgtttccaggaggtgggatgtgccagaagccgtcacctctttttgtttctcccctgcctgccttctttctcttttcctctttctcaataaacagatactgtctgtgtgtctgcctcacctaatctaaccctcagattgcagacagtgctttatttagacccaaagcttatgagtcctgattgtgttttcctgctggtcccatctgctgtctgtctttcagtgggcatccaccgttgtggacccagggatggttatgggaagcaaaacgtctcccttaatcataaacagtgtctaccagtggaagcccatcgaccgagggatcagaggcctctcagtagtattgtttattgcagttccttggcaacattgcagagaggcagtcaggttctgaaatacaactgaggttattggcaggctgaggccctggcacaggcaccttctagaatatcagctagtgtcttggctttcctctggggggatcccgttgctgttgtgttacagaaatggtagttgtttactccaacagtctggatgaccgcatagaggaactatttcartagtgactgacatcattttttttttaacctcgtaaacctttcacagttcaggggccttggatcttattttgaagacaggtgcaaattggaaatagcatttgaatatgacccggcaaagcatgattgcttcttaagctcaagtatgagatctgttttgcaatcagcttgtccaagatggttatctcttcactgtcaaatcaaagtgctctgcatggtgtttagagattgggatggtgaggagagagcaagcctgggtatgtgcatgcatctgtttattctaggcttcgtgcctccaggagcttggaggtcagcttgtagtataataaaatagaaaactatacagccggggagaacagaagcagaatagaaggataaagtgttgttcatatctctcgggcaaattttacccaaattctgacgagcagttactgcacaagcaacaacaaagggacctagagtgtgttcattgccaattctgtccatttggctacataactactgtgaaccaatacaaaaagatatgtataaac

SEQ ID NO: 86375 - DNA, 1522 bp, Homo sapiens
gaaatatactagaagtgagattgctggacctattgagtgcgctgttttttgttttttttccttttttcttgagatggagttctgctctgtcacccaggctggagtgcagtgacatatcttggctcactgcaacctctgcctcccaggttcaagagattctcttgcctcaacctcccaagtagctgggattacaggcgtgtaccaccacccccaactaatttttktatttttagtagagacggggtttcacccatgttggccaggctagtctcaaactcctgacctcaagagatccacccaccttggcctcccaaagtgttgggatcacaggcgtgagccactgcacccggcggagtgcatgttttaacgtaactccagatgtgagtagcagaaatgtggacaccaggaaagatcagcccactagacccaaaagtgttaccactaagtgaggctgcattgctattttatgtgttatgccaaatttgatcccattccatgaacatgaaataatcttaaaaactgggtttgaaataagaaataacagaaactcaacacagaactaatttcaccaaaatactaagttttgttggtcaaacaacaagtatgtggcccttgttgcgcttatacatcttataatttgttttaaaatctgaagtcatcacacagaacagcctaagaattctgtcttgttaatgacttgagcataaactcacattcctcagtctctgtaccaaagggtgagcaccgtacatttccaatgcatgtggggactttaaaaggacagtggagggtctgcgatgctaccgtggagattcctgccctgtagcaggctgaaccagatgacctctggagttccttacaccccttaggatttcaagccctgaatccgagccctatctagctttactgaccaagtaggaggtggaatggtcaattcaatgctttataaaatgtcttttgtttaaaaaaaaaaaaaagtctttgaatgtaagccaggttgaaagcaactgtctcctctggctctccagtggttacacaacctcaaaggagaggctcggatcctctcccttcctgccacatgaggtaggagcccaaagctcggcatctgccctgcccaacctttcacacacagtgccggtatgtgccggcaccttagcatgacccttctggaagctggccaactccattttaacagaaaataagacagccatgaacactcgggctgtcctgatcctggaccaccctgctttcagttttaccacgtttcttctccctccacaagccttacttttggcctggacatagaagaacacaggatctgtccacgacccattcccagagagagatgtggcctgaatccgggctgtgtagttccccgggtttagccggtttagcttggcccctccatacttcctgtattcctgtctggacacacattctcgctgatcctggggaaataaaacatacatgtcaatttcccatgaatgcaggagaaatctggggcctgccaactaaactcacc

SEQ ID NO: 86376 - DNA, 838 bp, Homo sapiens
cctagcacagagatggcacagagaaggtacwcattttatacttttaaaaataaatcacagaacttccatcaagaaaaaccttaaaatatctcaaagaccctgagggacaatctacatttattgagaaacttctcagtattgtatattattatatataataataatattatatacaataacattaacatctacatccagtctgctcactgtcttgtttatttatttttatttatatatattttttgagacagagtctcactctgttgccaggctggagtgcagtggcctgatctcagctcactgcaacctctgccttccaggttcaagcaattctcctgcttctgcctcccaagtagctgggactacaggcgcccgccaccacgcccagccaatttttttgtatttttagcagagttggagtttcaccatgttggccaggacggtctcgatctcttgacctcgtgatccgccctcttcggcctcccaatctgctcaccctcttaatgaaaatttgagatgcacagtgttaaaggaagggaagcattgataaagagaggtaggaagttgagaaagataagtctggaatatgggacacctggaagaggaataatgaagcagaggcttcagtggacactttagagacccagagagtgctgagcgcagtgggaaagacaatggagggtgcagagaagaaggcccggagctactaatctcataatcctgtatcaatcctaaaagtgcgagtgctttccttctatctttgtcctggcctaggttagcatattctgtggactataacactcttatttgcttaaacacaaaatatttcctcctcagt

SEQ ID NO: 86377 - DNA, 998 bp, Homo sapiens
ctctttyttaaaccctgcaaaaggagcttgcaactgggaaaaatgtctactcagcggagtcacaggaagactgtcgacagagctccgtataatacagacatggcaccagtacaataaaccatgttttatatcaaaatacttatgttctagtcaaacattatagaaaatatgtatgatagtgtataaagggggtcttcaatttttggtggatttatatttaaagcaatattagtttcaaatggagaaattatatattttgcaaagagaaagggaagtttaggaaaaggttacataggctatttgtaatatatgcaaaatatagccctttctatcacttaagccatatgaggtatataaaattattaataaaacttgatacacattcaaattatactggtaaaatccaatcttatgagtgtggggtcagttaataagcaaggcttctcaactgttgcccttcaggcttcaagctatggtataaatgataaaaaagcaccaagaaatgtccaaggcaggtactgaggagcttaaatccttcactcaatatttatgaagcacatagttggtgccgatgtaagccgagcccatttcagtgagcagtacggtggacacggggctgtctggctgtggctctggcagttgttagtatgaaatctgggcatgagaactctgcaactacttccctttttatagctagggccaagtatgccctggagatttgggaattgacacctcttcagattctacaacattgacacacagggttctaattattttgcaggaattcacagacactaagttgacttttagttgaacacataatgttaggagaggctttaatgagaattcatggattaatttgtatttattctcttagaaagtctgtcataaacttcttaaaattaaaaattgctccttagtattgagatatatgcaaacctgataaagttcagatcatttatcaggatttccaattcacagcagagaaggaggattgc

SEQ ID NO: 86378 - DNA, 560 bp, Homo sapiens
tattatctcctgtgattttcttttccttcttttccagctgagaactttcatttatttattttttattcaatcattctttaacagatattttattggtagctattatgtgccaagccctggctgggtaaaattttggtaaatatggaaaggagcaaaggacagactttgacttgtagaatataragtcttatgggggagaaaggcatgtaaaaataattaaaatatgataagtactataataaaactatgaaaaaattctatgagaattctacaactccaaaccacttaagacacttctttttaaaaaatttcacatacatgttatttaattctgaacatacaaaggagaaagcaaacaatgaccctactggtgatttttctctctggactttcaaaaagttcatacagaagataatgattctctattctattttttctacacttcgtggcatatttcacacttaatgtcagcgagttctttcctctgcaacccaaatcccttattcagaaggtaaagtggggagggagctcgtgctccactgagtgctaaacacaacaat

SEQ ID NO: 86379 - DNA, 560 bp, Homo sapiens
tattatctcctgtgattttcttttccttcttttccagctgagaactttcatttatttattttttattcaatcattctttaacagatattttattggtagctattatgtgccaagccctggctgggtaaaattttggtaaatatggaaaggagcaaaggacagactttgacttgtagaatatagagtcttatgggggagaaaggcatgtaaaaataattaaaatatgataagtactataataaarctatgaaaaaattctatgagaattctacaactccaaaccacttaagacacttctttttaaaaaatttcacatacatgttatttaattctgaacatacaaaggagaaagcaaacaatgaccctactggtgatttttctctctggactttcaaaaagttcatacagaagataatgattctctattctattttttctacacttcgtggcatatttcacacttaatgtcagcgagttctttcctctgcaacccaaatcccttattcagaaggtaaagtggggagggagctcgtgctccactgagtgctaaacacaacaat

SEQ ID NO: 86380 - DNA, 560 bp, Homo sapiens
tattatctcctgtgattttcttttccttcttttccagctgagaactttcatttatttattttttattcaatcattctttaacagatattttattggtagctattatgtgccaagccctggctgggtaaaattttggtaaatatggaaaggagcaaaggacagactttgacttgtagaatatagagtcttatgggggagaaaggcatgtaaaaataattaaaatatgataagtactataataaaactatgaaaaaattctatgagaattctacaactccaaaccacttaagacacttctttttaaaaaatttcacatacatgttatttaattctgaacatacaaaggagaaagcaaacaatgaccctactggtgatttttctctctggactttcaaaaagttcatacasaagataatgattctctattctattttttctacacttcgtggcatatttcacacttaatgtcagcgagttctttcctctgcaacccaaatcccttattcagaaggtaaagtggggagggagctcgtgctccactgagtgctaaacacaacaat

SEQ ID NO: 86381 - DNA, 560 bp, Homo sapiens
tattatctcctgtgattttcttttccttcttttccagctgagaactttcatttatttattttttattcaatcattctttaacagatattttattggtagctattatgtgccaagccctggctgggtaaaattttggtaaatatggaaaggagcaaaggacagactttgacttgtagaatatagagtcttatgggggagaaaggcatgtaaaaataattaaaatatgataagtactataataaaactatgaaaaaattctatgagaattctacaactccaaaccacttaagacacttctttttaaaaaatttcacatacatgttatttaattctgaacatacaaaggagaaagcaaacaatgaccctactggtgatttttctctctggactttcaaaaagttcatacagaagataatgattctctattctattttttctacacttcgtggcatatttcacacttaatgtcagcgagttctttcctctgcaacccaaatcccttattcaraaggtaaagtggggagggagctcgtgctccactgagtgctaaacacaacaat

SEQ ID NO: 86382 - DNA, 960 bp, Homo sapiens
agttcaaccattgtggaagacagtgtggcgatycctcaaggatctagaactagaaataccatttgacccagtgatcccattactgggtatatacccaaaggattataaatcatgcaactataaagacacatacacacatatgtttattgcagcactattcacaatagcaaagacttggaacctacccaaatgtctatcaatgatagactggataaagaaaatgtggcacatatacaccatggaatactatgcagccataaaaaatgatgagttcatgtcctttgcaggtacatggatgaagctgtaaaccatcattctcagcaaactatcacaaggacagaaaaccaaacaccacatgttctcactcataggtgggaattgaacaatgagatcacttggacacagggcagggaacatcacacactgaggcctgtcagggggtggggcgctgggggagatatagcattaggagaaatacctaatgtaaatgacgagttgatgggtacagcaaaccaatgtggcacatgtatacctatgtatcaaacctgcaccttgtgcacatgtaccctaggacttaaagtacaataaaataataataataataataataatgtttaaaaaatttttaaaactcccattgcactcatttacatttgtatgcccaaacataattttacgtaaattacataccaaagagcataacatcgtgtctgacatatagtaggtactaaaatatatatatagctgcactacattatgaaaatctttctaaggtgcttttatagcattaatgcactctttttaaagactgcactattccatggcccgaataaacccattttattcaatcataacctatgtaagacatttactttgtttcttgttttcggccattacaaacagaataaatagtcttatatactcagctgcagtaaataatcttatatactcaattttgct

SEQ ID NO: 86383 - DNA, 928 bp, Homo sapiens
tgtgtttgcatacatacacacaccctggccatgtgtatgctggacttttggaccacgttctggttaytttctggaagttccgtctctacacgtgggctgcctgacttacacttggtaagttctagtagcttcccacgtataggctttctcactcttacccccgtagcttcgtgattttgcgtcaggctcctaaggtcagaaggtgttgtttacaacatgaaaagcaaaacaagaggaatatccagacaatagcatgaatttcttttcctctgataaggaccagaggtcactcacagctcactgagagagcatctaaaatcatagcaaggccccggctgaggcaactgggaaacacactcatttttagtttagtctattaagaaaaagatcagtcttgaattcatttggtttcaatttacttttcacaaaacacatatgtagtaaaagatcttgggtttgtgttttcctttctgcttgcaaatttcatcccatttaaaacatgaaaggagaaaaataatggtgctaactagagccaaacaaaatatgggtggtcacagtacaaactttcccttagaaagctttacccctacacataatgggtgagaattttccttactagagaaagagaggcatgtcctttggcagtggagtattttgttatcaatgagacacaacacatgcctgcagggatctgcattctcctccacttcttagaaccccagagtctgtaatacaaaaatggaaattagagtaagcagaggtttcattgagtgagaggtgttatcctcctaattttgtcctcttgaaagtagtttaattattttcttgaattgtggagtccttttccagtctgtttctgaatctctcagctatcaacttccaacttctggagttatataactctagaaatcattaattttagatctgg

SEQ ID NO: 86384 - DNA, 603 bp, Homo sapiens
cctgtccactgtgaacacctgggctgaacccccatgagtacagttgctgggcatcatgattttgcacactgtactgcatgttccacatttggcagtgaaggctgattaaaaatagctgggctaatgaacggtctcagactactgcttggggcggtctgtagggctggctctcatggctgtgccccagaactctaagccaaatattaaaaataataatctcttttttggcaggaaaaaaaagaagcaagacttttggtaatttcagattctaaacccctagaaaggataaggattttctacccctgtaggatattaawaatgcttgctattatgataattctcaaagaggaattcaaaatttgttttggcaagaacagcattgtcagaaagcctcctaatcagacatgcatatttgaacgtatacattcaggctttgtttgggaaaataccaggaattattattttgcagtttcaaaactgaaattagcttgggtagttttatcaatatttgaagaaaaaatttgatataactgttcgaaatcccagcgaaaactccaagtttgagttccaggaaaggttcctggtgaggtgacacatatgtat

SEQ ID NO: 86385 - DNA, 603 bp, Homo sapiens
cctgtccactgtgaacacctgggctgaacccccatgagtacagttgctgggcatcatgattttgcacactgtactgcatgttccacatttggcagtgaaggctgattaaaaatagctgggctaatgaacggtctcagactactgcttggggcggtctgtagggctggctctcatggctgtgccccagaactctaagccaaatattaaaaataataatctcttttttggcaggaaaaaaaagaagcaagacttttggtaatttcagattctaaacccctagaaaggataaggattttctacccctgtaggatattaaaaatgcttgctattatgataattctcaaagaggaattcaaaatttgttttggcaagaacagcattgtcagaaagcctcctaatcagacatgcatatttgaacgtatacattcaggctttgtttgggaaaataccaggaattattattttgcagtttsaaaactgaaattagcttgggtagttttatcaatatttgaagaaaaaatttgatataactgttcgaaatcccagcgaaaactccaagtttgagttccaggaaaggttcctggtgaggtgacacatatgtat

SEQ ID NO: 86386 - DNA, 1145 bp, Homo sapiens
tgtatgtgataacttaggatattttctaacttagttgttaatgtttgctttcttttataatgaaattggagcagtttcttttatctttttttctgccacataacagagccaactgaaagggcttgaatttctctttgtcaaattgaacccccacttgagttggagtccttctttctacctaataggaagaaargaggcccaaagaatgagtactcttcatggctcttggcctgagacaaggagagcagaaaaggtaaataatagagtaggaggataaaggtgaatggaggggctttaaggagatgtcctgagcctcttcttgcctgcaggctttttttctcttggttggaaccctagatgcggcatgctgctgcagtgtcagtgccccaggctatctggtgtgacagtgctaacttcccttctgtgccaagtttagggcatttccagtagtgagaccactactctttagcctgttgctggatgggaaattaatgcatcataaaacatcatctgtggattttgaattcatatccaggactcctggaagctctctgtggatccccaggaacacaaattctctatttctgaatctctttagccaggcatgaccctataatttactgcagaaatgtaatatcatacaaatctataccagggctgggtttttacagagctggtgtggagatgatccatcttgcgaccttaatgataagagctatacctcaaagattgtgaaaggacagaaagagccttggtcaggggtgacttgatggaactgcctcaccaaatcctgagctgcctgccctggtttcaaatgtgagaaggaagtcaacctcaatctggctaacccattgtaggtaggaatgactttctgttattgtagctgaaccctttcctaagtgattaagtcatcatgtggatatttatcctgattctcttaccactttgtaatcatattcatgtaaaactgtcatttttattattaaataacatttaatttttaagaattatttctacgttgccaactttttaaaaagctacccatcacttgtgtatcttgaaaagcatttcctattgtggtggcccctggctagtttgcactgatggaaaccagtgtaccacagtaccgggtgaaggcaccccct

SEQ ID NO: 86387 - DNA, 733 bp, Homo sapiens
gtaagccagctccagctcctagactacacacctgctgtgggtgagggacaggtaacctgggcaccctctgatccaagagcaccaaggagagatgactctgctgcgggaggggctggggaggaccatgtgttacaggcacaggcctgactgtggctcctggttctgcccttgctggccgtgagttacttcagctttctgagtccctgtttgctcatctgtgaagcaggatgaatggcaggacccacctctttgtcttgttgtaaggctcaaastaggtaatgcacatcaagcactcagcagatagatagtaagagttatccactggtagccactgtgattaaagaataattcagtgacacagtcagtcaacaaacctccaccgagacagcctctgcagatgctggggtgtaagagctgaggctaaatggctccagccctcagggccccaaagccccaagagtctgggtaagagactgtaattgaagggtgagcaaagtgggctgggggcccagggccaggggcaaggggatagagtcagggtagccctcccagggaaggccccatgggtgctgcagctggatacagaaggaggaagagcagtgcctggctggactggagggggacaccgaggcagaggacagtgtggccaaggtcggggtgaggagagcaagggctcttcaggagacacactcgcaggggccttccggtttctggaaaagcccagctctgtggg

SEQ ID NO: 86388 - DNA, 733 bp, Homo sapiens
gtaagccagctccagctcctagactacacacctgctgtgggtgagggacaggtaacctgggcaccctctgatccaagagcaccaaggagagatgactctgctgcgggaggggctggggaggaccatgtgttacaggcacaggcctgactgtggctcctggttctgcccttgctggccgtgagttacttcagctttctgagtccctgtttgctcatctgtgaagcaggatgaatggcaggacccacctctttgtcttgttgtaaggctcaaactaggtaatgcacatcaagcactcagcagatagatagtaagagttatccactggtagccactgtgattaaagaataattcagtgacacagtcagtcaacaaacctccaccgagacagcctctgcagatgctggggtgtaagagctgaggctaaatggctccagccctcagggccccaaagccccaagagtctgggtaagagactgtaattgargggtgagcaaagtgggctgggggcccagggccaggggcaaggggatagagtcagggtagccctcccagggaaggccccatgggtgctgcagctggatacagaaggaggaagagcagtgcctggctggactggagggggacaccgaggcagaggacagtgtggccaaggtcggggtgaggagagcaagggctcttcaggagacacactcgcaggggccttccggtttctggaaaagcccagctctgtggg

SEQ ID NO: 86389 - DNA, 751 bp, Homo sapiens
atgtggggaacacgatgtactatgtccctgcttggagagtcaggatgcacatttacgttttaaaggtcctgagaagtcctgcagcaaagcaacaggcttggtgttaaaattcaactcagggagtctattgagtacagtgagcacagagccctttgcttgaggctgctgacttcatccacctcgtccgtgctttgggaaacgttagcctggtgggtccctatgaaccctggtgatgttagaggacccaagagcctcccagatcccagctctgggcacctgggttccaagactctaggaccaggcccctcctcgatctgccgttctcctaggccttctctgagggcagcctgcatcggcagcacttaaggaccccacaaccytaaaggactccacatggactcactctcagtgcccccacccacagcagaggccgtctggaacccagagtcagctggccttcagcaacccagcagagacccaggagcgacagggaaccaagagggggccattctgcagccagaagtgctgagtgccccgcctgctgtggacccagcggtcctcacccagggtcagggctgagacctggcaaggtagagatcccagaacccctgggctgagttctgagggaggcagcccattgccaagggcactgcacaggcttgggtagactccaggctatatcactccccttgcgaccttgagcaagtcacttaacctctcctctcccatcaacctcccagtattaactgag

SEQ ID NO: 86390 - DNA, 525 bp, Homo sapiens
tgccccgcccgcccgcagcccgcggagcagctatctccgctttttttctccttcacttcattctcacctcattaactcccttcccagcttctcccaaatttaccaacacctggcgttcgcccggagtcagacacagccccagcccctctcccctcgggaggagcagagacaaagggattcctttctaagggtttggggagttggaaaaggaggcgcccacggtagtgggggcgctggagcagaaaagggacgttcttatctggctctgtgagcttgggcaagccctcagccaccccagcctcggtgtccccttccataagaacgaggaatggggcttcgccgtgcgtcccccgaggaccccgtctccctgcagcctgcggggctcagcgcccctctgctatttgcaccgcgacgccacctgcgtggcgcgttcctgcgcgtgggtagtcagcacgcagagatgggaagccccactgttttctggagcctgwcggcaaaacccacaggaaggcgaggagaagcctg

SEQ ID NO: 86391 - DNA, 334 bp, Homo sapiens
tcttgctcctcccccatcacccaccccgggctccctgccccagcgctccagcccctctgctggcgcccagcaggtaagacaatgtggaccaaggggccggtaaggagactgtcttcagcagccacaagcctggggagcagagcggatattgatttggtatatgggagcaaagggaccaytaaacgtgcggctgttaaattgctctgcctggagccagccagctctgcgggcgggcgggtggcctggcgggcaggcggcggtcagaccagtcggctgctagtgccctgttgggggtggtcttggatacctggcaggacccaaggcagcctggctt

SEQ ID NO: 86392 - DNA, 540 bp, Homo sapiens
tttccatatttctatttttcaatatgttaaagataactctaagctgggctcagtggctcatgcctataatcccagcactttgggagtccaaggcgggagattgtttgaatccaggagttcaagaccagccaaggcaacatagcaagtcctcaattctacttaaaaaataaatacataaataacactaaaaactacatattaggattgcaaaaawttgcttctataaaactatggcctgccactgaaaaggagaaaaaaaagaaagaacaaaattgccaacttaatttaaacctgtacaagcatacaaacagactcaagttctgaaatagataatcaaaaatgttcacctaaccaatgcatcaagtgaattttatctgaatgtgctgtggcataatagtgtttggaggtatttagaagatggtaaatcccagaatctttctaattattctttgagaaaaaataacttgcacattttgaaaataaatatttcaatatataaataaactttcagtgtataaaaacaaatttataaaacaagtt

SEQ ID NO: 86393 - DNA, 1393 bp, Homo sapiens
  misc_feature (1)...(1393): n = A,T,C or G
ggtccctaacaagccacagacttgtaccagtccattgcccaggggttggggacctctgctttaatccatcttgagttaatttttgtatatggtgagaggaagcggtccagtttcaatcttctgcatatggctagccagctatcctaacaccatttattgaatagagaatcctttccccagtgcttgtttttgacaggtttgtcaaagatcagacacttgtaggtatgcggccttatttctgggttctctattctgttccattggtctatgtgcctgtttttgtcccggtaccatgctgttttgattactgtagccctgtaatacagtttgaagccaggtagcatgatgcctccagctttgttctttctgcttaggattgcccctgggctattcgggctctttttggttccatatgaattttaaaataaaaactctcaactttctctttgttcttggaacacactgaagaccacccaatctgtgagtatgccccactttgccattcttgcctcctaaataatcagtgttaagtttagagattcatctctacattttatttgacttcagcaatgtaaactgtgagtcagagctgcagtggtggaggctgcaaccttggcagcrggaaggtcagttcacagggtttcttggcatgctcctcctgtgtccccaccgtctataggtgccctccatcatacgtgtgcctttggcttgtagactggccttatctttccagaactatttttggtcatgcctcatgcnnnnnnnnnnnnnnnnnnnnnnnnnnnnnnnnnnnnnnnnnnnnnnnnnnnnnnnnnnnnnnnnnnnnnnnnnnnnnnnnnnnnnnnnnnnnnnnnnnnnttcagccaccaagtttctggtaatttgttacagcaaccacaggaaatgaatatatccatgccaaaattaatacatgcattccattttatattcttttccaaccttaaaataaaaccaacaagtgcttccagattttcttttatacttctctttgtgcattcagttcagtaaatgttcaaaaggataatacatttataaaatgtgatgccaaattgcataaaattgaccagactgaaggggaaaatttaccattttatgaaataaaatataatttacagatgaccagcattaatttatatcatgtcctgctttgggcttccaaattctgttggcaattttaccctggaaaaatatcatgaaccaaataggaaaactggtattctaaatacatttccttcatgtgacacacttcttgtgtgtggatgtaatgagaattcaaaaaaagaaaaaaaatgacgtgtttttattcctccctttattgccaaaatttaggcagcaaaaacaggcaccaaaggaatgagttaagacagattta

SEQ ID NO: 86394 - DNA, 1393 bp, Homo sapiens
  misc_feature (1)...(1393): n = A,T,C or G
ggtccctaacaagccacagacttgtaccagtccattgcccaggggttggggacctctgctttaatccatcttgagttaatttttgtatatggtgagaggaagcggtccagtttcaatcttctgcatatggctagccagctatcctaacaccatttattgaatagagaatcctttccccagtgcttgtttttgacaggtttgtcaaagatcagacacttgtaggtatgcggccttatttctgggttctctattctgttccattggtctatgtgcctgtttttgtcccggtaccatgctgttttgattactgtagccctgtaatacagtttgaagccaggtagcatgatgcctccagctttgttctttctgcttaggattgcccctgggctattcgggctctttttggttccatatgaattttaaaataaaaactctcaactttctctttgttcttggaacacactgaagaccacccaatctgtgagtatgccccactttgccattcttgcctcctaaataatcagtgttaagtttagagattcatctctacattttatttgacttcagcaatgtaaactgtgagtcagagctgcagtggtggaggctgcaaccttggcagcaggaaggtcagttcacagggtttctyggcatgctcctcctgtgtccccaccgtctataggtgccctccatcatacgtgtgcctttggcttgtagactggccttatctttccagaactatttttggtcatgcctcatgcnnnnnnnnnnnnnnnnnnnnnnnnnnnnnnnnnnnnnnnnnnnnnnnnnnnnnnnnnnnnnnnnnnnnnnnnnnnnnnnnnnnnnnnnnnnnnnnnnnnnttcagccaccaagtttctggtaatttgttacagcaaccacaggaaatgaatatatccatgccaaaattaatacatgcattccattttatattcttttccaaccttaaaataaaaccaacaagtgcttccagattttcttttatacttctctttgtgcattcagttcagtaaatgttcaaaaggataatacatttataaaatgtgatgccaaattgcataaaattgaccagactgaaggggaaaatttaccattttatgaaataaaatataatttacagatgaccagcattaatttatatcatgtcctgctttgggcttccaaattctgttggcaattttaccctggaaaaatatcatgaaccaaataggaaaactggtattctaaatacatttccttcatgtgacacacttcttgtgtgtggatgtaatgagaattcaaaaaaagaaaaaaaatgacgtgtttttattcctccctttattgccaaaatttaggcagcaaaaacaggcaccaaaggaatgagttaagacagattta

SEQ ID NO: 86395 - DNA, 831 bp, Homo sapiens
cttgagcccaggagttgaaggctgcagtgagctatgatcatgccactacactcctgcctgggtgatggagaccatgtctgttgaaaaaaaatcttaaaaattaaaaatcaaaaagaagtccccaaatctgtgggtgccttaaaatctcaaattagggctgggctcgatggctcaggcctgtaatcccaacactttgggaggccaaggcgggtggatcacaagtcaggagttccagaccagcctggccaagatggtgaaaccccatctctactaaacatacaaaaattagcctggcatggtggtaggcacccgtaatcccagctacttgggaggctgaagcagagaattgtttgaaccaaggaggcagaggttgcagtgagtcaaggtcgctccattgcactccagccttggtgacagagcaagactccatctccaaaaaaaaaaaaaaaaaaaaawttatatatatatatataaattaccaagagttgggtgtcatttatttatgcctccacactgtaattccgaggtcgctgctttcctgattctgtgctgatcctggcaagtgacaggtgcacaaaaacctttgttcaattttgaattaaccaggctgtaaaggagtagctttgctttgccaagggctcatggtgccagaggctcaaggaagccagcactttgcagagtacatggatattagtttcagctctctccttttaaagggctgaacctgggagaaagacataacctcacaatttttcctcctgctgaataaaagtccctatgggggaacaggtctgtcttaacatatgaggtttctcctaggttgaactttgc

SEQ ID NO: 86396 - DNA, 831 bp, Homo sapiens
cttgagcccaggagttgaaggctgcagtgagctatgatcatgccactacactcctgcctgggtgatggagaccatgtctgttgaaaaaaaatcttaaaaattaaaaatcaaaaagaagtccccaaatctgtgggtgccttaaaatctcaaattagggctgggctcgatggctcaggcctgtaatcccaacactttgggaggccaaggcgggtggatcacaagtcaggagttccagaccagcctggccaagatggtgaaaccccatctctactaaacatacaaaaattagcctggcatggtggtaggcacccgtaatcccagctacttgggaggctgaagcagagaattgtttgaaccaaggaggcagaggttgcagtgagtcaaggtcgctccattgcactccagccttggtgacagagcaagactccatctccaaaaaaaaaaaaaaaaaaaaaawtatatatatatatataaattaccaagagttgggtgtcatttatttatgcctccacactgtaattccgaggtcgctgctttcctgattctgtgctgatcctggcaagtgacaggtgcacaaaaacctttgttcaattttgaattaaccaggctgtaaaggagtagctttgctttgccaagggctcatggtgccagaggctcaaggaagccagcactttgcagagtacatggatattagtttcagctctctccttttaaagggctgaacctgggagaaagacataacctcacaatttttcctcctgctgaataaaagtccctatgggggaacaggtctgtcttaacatatgaggtttctcctaggttgaactttgc

SEQ ID NO: 86397 - DNA, 540 bp, Homo sapiens
aaagacaagatttgatttactgacatgtgtaaagaaagtgtttctaagaatagaagctgaccagcccttaacttgaaacagaaattgtcagagatgttggagataatgatgccacaatctgccccaggaagtacatgctttgctgggccaccatgatccattctttctacctggctgagatattctactgtctaagcggtgtgtggccaatggtaactcccaatccattcatttcttaattcactcactcattcttgtattcttactgaacttatgttttatgctaactcacttccagacaggtggtgcatacttattgaatcatgaataaattctgcgaccccttcttctgatgccctggtcatgatgaagtgatcttctgccaaggcatcttcctcttcacacagaatgccccagcttgaccttgggcagttctgtctsatgtacagttacggttttcattgcatctggtttttcatatcagttcttgcggcctttgccaatgtgacctggcatcttcgaagatgacactgagcatct

SEQ ID NO: 86398 - DNA, 1735 bp, Homo sapiens
agtgttttatgaagaactgtattgtagcttgaatctttaattaaataaatgttttcttttgcatgtaaaatagaattcagcctttcctaactcaggacagcaatgggctgaagacagtgctgggcccatcctgccacctgctgggaggccttgttccctcaaaagacttggtttggaaggatgattggaaaatagctttacacacccaccctttattgtgtttttattcacaaagccttaatataccgccatacttcatgtagttgatttttcatatctctgataagtttttaaatgtcagtattcctactaaagtctctctctctgtcctgtgttctgtgttctagggtgtatgaagaaagggcttcagcagaaacagaggctgaagctgcctgtgtgctgggggctgagaggccagaggagaatgtggtgagacatagaattggcatggggagtgtccccagacctactgatgactttggctcacagataaccaggtccctgagcaagggtgctgactgcagcctctctgcacaaccaggacaccaccatggggtggggtgcataatgtgtggggacatccacactgttgaaggggaaacagccaggaaaaaagaagcggcagctccattgtcaccacgagacacttccccaatgcatcaggtttgcaaaaccgtgggtgcagagcagtgtccacacaggctaccttttctgttcaaagtaagaaccacaaaaaagggcccagtcacagaggctcatgcctgtaatcccagcactacaagaggccaaggcaggaggatcgattgagcccaggaatttgagaccagcatgggtaatataggaagaccctgtctatacaaaaaaaaaaaaaaaaaaaatttaattagctgggcgtggtggctcatgcttgtagtcctagcaacttaggaggctgagtcgggaggatcccttgagccctggagtttgagactgcagtgagctgtgatggcaccactgcactgggtatcaaagtaagactcaaaaaaacycaaaccaaaaaaccaacaaaacaaaaaagcaccacaaaaaagatatcatagcaatgctgtgtgtacgggagtctccagcaggacacacaaacaatccagcgctgacctctggagagaactgagaggctggggatgcagcagggaggggacgtccactccgtgcctggattcctgtgaacatggggccgtgcacaatgcccacgaaaatgaaaatgaaacctgccagcctgctggccagggacttgtagtgaagcacaaacaccacggacgtgactgttgctggtggaggtcgcagcctctggatgcctcagtggcactgttcttgtagctgagcggaaatgcccacagcatctgcatctggcacgtgcctgggggcctgcagccgcaacaacctcaaccggagatactgatggtgtggaaaggcagagacactgatggtgcgaaaaggaaaaggcgtctgggagggcctgtgagctggagggcagccatcggggaggtggaggagaaccctgaggcgggtttctccacatgagagatgtcacctgaaaccacccggatgctggccaaggctttggcctcctcttgctgcctctgtatttccgaaaatgcatcgctaatggggtgaagggactcaccctcaggcctgccgccccaccaggctgggccaggacaccaggcacccggcactaccccatcacagccccagg

SEQ ID NO: 86399 - DNA, 711 bp, Homo sapiens
gaataaaattttgtacactgcattctgtctgtaactaaaagctaacagagaaagatatatgtacaaccaacacataaaaacatctggtacattctgctgtattttcttttcttattcattttacacctttttctcaggtatttcagagcagacttgctagatttgaatrggctaaaacttttcaatgaggaatatacaattatcttgttaatttttataattattttagttattttgaaagtgcattaaaactaaaggtttataattatgctgaatagaaaagaatatcatatgtgaaacttcacccaaatgaaagaatatttaactactgtattaagaattctctttagcaggattcctttctctctgcaggtagctggctacaggggtctaccaaaacaaatctatttctgcagtaaaggccaacactgggtcactcaggaaagaacagttttggtctgaaaagcacagtacatcttttccctgaatagggtaaattcttatccagttttactgttcaactaaaaattcaattaaaattaatcattttcttttttatgacaaacaaaatctggttactttctaattacttgtccaatatctaatctctataactacctaaaattacatagacatacacatacacacatacataagaaacagtacaattggaagaccatccaatgtgtacatgtgttctttttttaaaaa

SEQ ID NO: 86400 - DNA, 760 bp, Homo sapiens
tcccacccgaatctgcattkcgggagacagttctgggggcaatttagcaacagcggtcactcaacaggtacattatatttgtttttatgataggaggcagaaattgaggctcattttttttctatagataattcagttcttcccccaccatttgttgaaaagaccattctttcccattgaattacagtagcacttgagtaaacatttatttaaccttaatgtgactatttctggattattttgttccattgatctacatgtctatcctactgccaatactacactgacttcaactgttcttctttaaaaaaaaatctagtattccatatctttcccattaaaatattagattatcttatcaatttttaaaaagaaagactaactgaatttttattaggattgcattgaatctataactttggggaggattgacgtgtcaacaatattgagatttccaattaatgtacatggcatgtctcatactttattagatcctcttcaatttctcagcaatattttactattttcagtgtagaaatcatggaaatcttttctcaaattttaccctgaggtattttttaaaatttttattaaaatactattttctgaatgtttatttggaacatattggaatttgtaatttgtaatttatttctatgctatatagaaatacaattgattttgatattggccttttcccatcatatcctcaataaactcacttataacgctagtgttctgtgttttttttgtttttttt

SEQ ID NO: 86401 - DNA, 760 bp, Homo sapiens
tcccacccgaatctgcattgcgggagacagttctgggggcaatttagcaacagcggtcactcaacaggtacattatatttgtttttatgataggaggcagaaattgaggctcattttttttctatagataattcagttcttcccccaccatttgttgaaaagaccattctttcccattgaattacagtagcacttgagtaaacatttatttaaccttaatgtgactatttctggattattttgttccattgatctacatgtctatcctactgccaatactacactgacttcaactgttcttctttaaaaaaaaatctagtattccatatctttcccattaaaatattagattatcttatcaatttttaaaaagaaagactaactgaatttttattaggattgcattgaatctataactttggggaggattgacgtgtcaacaatattgagatttccaattaatgtacatggcatgtctcatactttattagatcctcttcaatttctcagcaatattttactattttcagtgtagaaatcatggaaatcttttctcaaattttaccctgagstattttttaaaatttttattaaaatactattttctgaatgtttatttggaacatattggaatttgtaatttgtaatttatttctatgctatatagaaatacaattgattttgatattggccttttcccatcatatcctcaataaactcacttataacgctagtgttctgtgttttttttgtttttttt

SEQ ID NO: 86402 - DNA, 1130 bp, Homo sapiens
actgatttataaagttatgaatgacttgaaaacaaggcttcactgtgttctgaaaaataataaattaattgccaagataaaatagcctgaacatgtgttgatggagtgtgaaattttagatgctgtataaagaataaccacaactttggttacgcagcaagtcagatatggcttttttatataatgctaatcaagtttccaagtatggaagaaaacctttcagccaagccattggagcttaagaaacctttaccctttatagattttaactgcccgtacctcagtgccctttaaagaatctcttttaaagtgttattagaatactgctttgtaaaaattaaaagtaagcaggagatgagatgttgatcatcttgtgtttacttgttaaaaaatatctaatttggcatatatatacaatgaattttagaacttactcagcatgggatttaatttactgactccatgatttacttgaacagtttttctccttttgaaaatttcagaatactctagaaaattaagaattttaattctcttttgagcttggatattttattttaaatatggccaggttattactttaaaagaaaagatctaaggaaaagttaatagttgaaaataaaactcagagcctttgtgaagtacctgttacaacatttctgaggaattttgtctattctttaaaacaatatagccatcatagatgtgtgcgtgtgtatgtgtaaaatattgattaaaacagtgtttagttgtaaattatcataaaatcatttttgtctgttagcattttcctgttctttcattatcccacagtcaaatcctatttctagccttgaacataaaaaatatttttaaaatgtcttagactagctttattcaatgaaccaaataatgtagattttatctttactacatcaaacatgttaatktatgatgatgagaaagacacttgatacttctttataatcataacacatttgagtaactcattttgaggtgaggagactactcttgtattttcatcttagatagagggtttatgtatatattttggggagagggatggataggagatgtaaagaatttagtgaaaaaaatatttactacatttataacacaaacactaagct

SEQ ID NO: 86403 - DNA, 1130 bp, Homo sapiens
actgatttataaagttatgaatgacttgaaaacaaggcttcactgtgttctgaaaaataataaattaattgccaagataaaatagcctgaacatgtgttgatggagtgtgaaattttagatgctgtataaagaataaccacaactttggttacgcagcaagtcagatatggcttttttatataatgctaatcaagtttccaagtatggaagaaaacctttcagccaagccattggagcttaagaaacctttaccctttatagattttaactgcccgtacctcagtgccctttaaagaatctcttttaaagtgttattagaatactgctttgtaaaaattaaaagtaagcaggagatgagatgttgatcatcttgtgtttacttgttaaaaaatatctaatttggcatatatatacaatgaattttagaacttactcagcatgggatttaatttactgactccatgatttacttgaacagtttttctccttttgaaaatttcagaatactctagaaaattaagaattttaattctcttttgagcttggatattttattttaaatatggccaggttattactttaaaagaaaagatctaaggaaaagttaatagttgaaaataaaactcagagcctttgtgaagtacctgttacaacatttctgaggaattttgtctattctttaaaacaatatagccatcatagatgtgtgcgtgtgtatgtgtaaaatattgattaaaacagtgtttagttgtaaattatcataaaatcatttttgtctgttagcattttcctgttctttcattatcccacagtcaaatcctatttctagccttgaacataaaaaatatttttaaaatgtcttagactagctttattcaatgaaccaaataatgtagattttatctttactacatcaaacatgttaatgtatgatgatgagaaagacacttgatacttctttataatcataacacatttgagtaactcattttgaggtgaggagactastcttgtattttcatcttagatagagggtttatgtatatattttggggagagggatggataggagatgtaaagaatttagtgaaaaaaatatttactacatttataacacaaacactaagct

SEQ ID NO: 86404 - DNA, 1278 bp, Homo sapiens
cctgttcttgtcttcctacaacccggcctccacgcagggccataatgatacctcacacatgctgttccatctgttcctcttttctctttgccaggctaattccaactcattccgtttccagcctacactctttcctcttcattttatccattcaagaatagaatagatgctcctgctaagaacaagtatatttccctctgctttccatttcatagggtctccttccaactgcaagactttatgattctcaaagtctacttagggaagcaagtatttacagagtcatgggatgttagagttggaagaaccattagaggctcaatcacttcatttcaaaaatgacaaaatgtggtgagagtgtgggagtaactaaccccggggcctactgtcaggtgatggtagagcaaagcatccaagtctcacctagttttagtccagaactgtttcccaagactcttcctgatctgctaggaagatgtttcaatctaaggaggcctcacctgcctctcttactgcctcttatacttgctgcagatggggaattctgggtttgctcatgggctttgcttctgtcttggcaaagatttctctgtgatagttctttctttgcacacaktgccacatgccacataatgaacttgttagatgtatcttatgtgttataaataaactcctcagggaaattcctggatcctgggcctctcccactggagcttttgtttgcttgtcttgatgttcaagccaggaagagaactacaagcactgaattatagttccagaggctgaaattcttggtgtagggttgagaaaaattgttatctctattgctttcctcatgcccatcttgacagaggaccagctcaatgggaggattccttctggggttcaggagccctgagaactgagaggactgccaaggaaggaatatgtccgacatagtaagtccatagactatcagagctataagacaaattagagatgctttgagctagggcccttattttgcagatgagaaattgaagcccagagaaattaggaaacttgactagcattgtatatcatggggtaagagaagatcatgaaatttggggtcagaaaacacttgagtgctggttctgctacttaccagctctgtaacctcaagcaagcctcattttcctcctcatcaaaatggaaataatcctatctgccttggagggctattgccaggaataaagaatactctgtctacgataatgcctgctatagggcacatgctcactgaatgctcatgctctt

SEQ ID NO: 86405 - DNA, 1278 bp, Homo sapiens
cctgttcttgtcttcctacaacccggcctccacgcagggccataatgatacctcacacatgctgttccatctgttcctcttttctctttgccaggctaattccaactcattccgtttccagcctacactctttcctcttcattttatccattcaagaatagaatagatgctcctgctaagaacaagtatatttccctctgctttccatttcatagggtctccttccaactgcaagactttatgattctcaaagtctacttagggaagcaagtatttacagagtcatgggatgttagagttggaagaaccattagaggctcaatcacttcatttcaaaaatgacaaaatgtggtgagagtgtgggagtaactaaccccggggcctactgtcaggtgatggtagagcaaagcatccaagtctcacctagttttagtccagaactgtttcccaagactcttcctgatctgctaggaagatgtttcaatctaaggaggcctcacctgcctctcttactgcctcttatacttgctgcagatggggaattctgggtttgctcatgggctttgcttctgtcttggcaaagatttctctgtgatagttctttctttgcacacattgccacatgccacataatgaacttgttagatgtatcttatgtgttataaataaactcctcagggaaattcctggatcctgggcctctcccactggagcttttgtttgcttgtcttgatgttcaagccaggaagagaactacaagcactgaattatagttccagaggctgaaattcttggtgtagggttgagaaaaattgttatctctattgctttcctcatgcccatctkgacagaggaccagctcaatgggaggattccttctggggttcaggagccctgagaactgagaggactgccaaggaaggaatatgtccgacatagtaagtccatagactatcagagctataagacaaattagagatgctttgagctagggcccttattttgcagatgagaaattgaagcccagagaaattaggaaacttgactagcattgtatatcatggggtaagagaagatcatgaaatttggggtcagaaaacacttgagtgctggttctgctacttaccagctctgtaacctcaagcaagcctcattttcctcctcatcaaaatggaaataatcctatctgccttggagggctattgccaggaataaagaatactctgtctacgataatgcctgctatagggcacatgctcactgaatgctcatgctctt

SEQ ID NO: 86406 - DNA, 1417 bp, Homo sapiens
ggtaccatctgcctctggggaggcctcagggaactcatgggggaaggcaaagtgggagcagatgtcttatgtggcagcaraaggaccaagggtcgggggaggagggaggtgctacacacttttaaacaaccaggtctcactcactatctcaacacagagccaaggggtaaagccatccctatgatccaatcacctcccatcaggccccacctccaacattgggaattacagtttgacatgagatttgggcggggacagaaatctaaaccatatcaccaaaggtgggagaagaccaatgtcccagccagaagacaggcagaaagagcaaattctctctcagtcttttccttctactcacatctccaatggcttggatgaggctcactcatgttaaggagggcaatcagtctacagattcagatgttaatctcatccagagatacccccacagacactcagaataatgtttagccaaatgtctgggcacactatggcccattcaagttaacatgtaaaatgaactatcacatatggattcttccaaatacagttcagggcattagttatttaaagattttctaggcactgaagggcatccacagtggttagattaggctagtgtcacttaaaaggatccatttcagatctgaatgtctgtcttggacaacttcacccccttatctttacatcctcagagagggatcttgtagaaatgagggagtaacagcaaacggaaagttggagaaggggacaggccacctgtgaaaggccaatcatgctgggagcagagaggggtaaatccagtccagactggaaagcttgagggaagacagaacagccatattctttgcaatttggagggaggtagaaatcccattgcctatccttttaccctcatcggagtcctacctggagaggctgtaaaaggcacatagtcattggtaggagtagagggatcacaaaatcagaggacctgagcttggagtgcctatggctttgacaggagctttagaatctgaaaggctaaaggggctgttatggccctagcaggaaaggaaaggaagtgggatactgggggatctgctttggtctttctgtagcctttctcaagggctagatgaaaatgaaaatctcaggttgttccgaattggtttctaggccagccctctattactaggctgatgatgctacaacgaatcaaaagatcattgacccctgatagaggtctttactagtgccaaaatctacccagctgcactttctgcatcccacccccaacacacacacacacacacacacacacacacacacacacacacacacacacacatacatgcacacacacacagactcaattttcaacagtatataattggcaatcacagaacatttcagttgaattaagatagagttcaaa

SEQ ID NO: 86407 - DNA, 613 bp, Homo sapiens
tttacattttaagtcagaacttccaaaactctccttatttgctgaaaatctgtttaactgttttcacatgatgtgttaataaatgtcattgtattcacagagattattccaagaagattaaaggtcatgctagcccatttgcrtcttataaatctcaagtgccctcaaactcaggaaaattcctgcaaaagtggaatgtttctcaaatggcctagagaaaattttataaccaaaatacactgctttaaaaaaattttttttttaactaacaatttttaaggaactttccagggggaaacaccaggaggaattcaagcacaagcacaggtgctcggtgcacacatacatacacacacacacacacacacacacagaggaagaaacaagaatctatgaaagtgcttctctgcactcatgagaatggatcacagatgatctgctatctccatttttaaatacagacctcctcatatgaatgatatcctctgagaggcactgaggccctctggaattaagaagcctggaattcttccactactacagcctttatttctaagaaagctttttcctccctgccttccaggatggccattttccccccaaccgcttcctt

SEQ ID NO: 86408 - DNA, 733 bp, Homo sapiens
ttggccaattcaataccagacccctgcttttaatggcctcaactccacttgcttctgtgcctgggaacctgccctaaactttgtcctggaactttgcccagctgttggtatcactgacctcccagagcatgtgaaatagagcctgggttaggatgagactctacagctagagtcccttgctagctgtgtgggtctgggtgtgttaattagcctctctgaggctgtttccacatctgtaaaggaggggtggcttcgtaatctgttcagttggctaggctgagctccattttacagaattcccttccctgtgtatttctggctaggatggcttacaggaaaccttcgggcaacagctttgcagggyggaagtgaagctggcagccattttgtagctcacacggcttgttgcttacctgctggcctacgtctttggtgtggggcctgcgacttttctaccttccctgagatctctgttcagcctcttcaacctctgagtcaggcctgtgtattcagctctatgacagggcaccagcctcccctaaggatgcccaaactgccaaggctggaggtgcaagaactgatgtggctcgcaggctgtcctcgtggtttccacctccccctagtttgcctgggtctttcccaattttaaaactgaaagtcttgaatctctggaaacccctttagtcctggaaatacaggagagttggtccccttgttccagtttgtgctcatg

SEQ ID NO: 86409 - DNA, 733 bp, Homo sapiens
ttggccaattcaataccagacccctgcttttaatggcctcaactccacttgcttctgtgcctgggaacctgccctaaactttgtcctggaactttgcccagctgttggtatcactgacctcccagagcatgtgaaatagagcctgggttaggatgagactctacagctagagtcccttgctagctgtgtgggtctgggtgtgttaattagcctctctgaggctgtttccacatctgtaaaggaggggtggcttcgtaatctgttcagttggctaggctgagctccattttacagaattcccttccctgtgtatttctggctaggatggcttacaggaaaccttcgggcaacagctttgcagggtggaagtgaagctggcagccattttgtagctcacacrgcttgttgcttacctgctggcctacgtctttggtgtggggcctgcgacttttctaccttccctgagatctctgttcagcctcttcaacctctgagtcaggcctgtgtattcagctctatgacagggcaccagcctcccctaaggatgcccaaactgccaaggctggaggtgcaagaactgatgtggctcgcaggctgtcctcgtggtttccacctccccctagtttgcctgggtctttcccaattttaaaactgaaagtcttgaatctctggaaacccctttagtcctggaaatacaggagagttggtccccttgttccagtttgtgctcatg

SEQ ID NO: 86410 - DNA, 733 bp, Homo sapiens
ttggccaattcaataccagacccctgcttttaatggcctcaactccacttgcttctgtgcctgggaacctgccctaaactttgtcctggaactttgcccagctgttggtatcactgacctcccagagcatgtgaaatagagcctgggttaggatgagactctacagctagagtcccttgctagctgtgtgggtctgggtgtgttaattagcctctctgaggctgtttccacatctgtaaaggaggggtggcttcgtaatctgttcagttggctaggctgagctccattttacagaattcccttccctgtgtatttctggctaggatggcttacaggaaaccttcgggcaacagctttgcagggtggaagtgaagctggcagccattttgtagctcacacggcttgttgcttacctgctggcctacgtctttggtgtggggcctgcgacttttctaccttccctgagatctctgttcagcctcttcaacctctgagtcaggcctgtgtattcagctctatgacagggcaccagcctcccctaaggatgcccaaactgccaaggctggaggtgcaagaactgatgtggctcgcaggctgtcctcgtggtttccacctccccctagtttgcctgggtctttcccaattttaaaactgaaagtcttgaatctctggaaaccccttyagtcctggaaatacaggagagttggtccccttgttccagtttgtgctcatg

SEQ ID NO: 86411 - DNA, 356 bp, Homo sapiens
taaaatcatgcataatgttaataatatatatgagaagaggtaatagtaaatgtcaagttttaaactgatgctagttcattcatttaatattttttgatgtgtgtttattgagctaatataatggaacttgcaaccacaacggwttctacacgatttcacccccgaataaataagcacaacatattcaccgtgagttccctggagcactgtctcattttattcatcatttcatttcaagggcctagtgtagagtctgaaacagtttaatcccaataaatacccagatctttttaatggctaactgcttcctgttcttcaggtctcagctcatactacagagagtctcctagccacag

SEQ ID NO: 86412 - DNA, 1136 bp, Homo sapiens
cacatttgaaaaacataatttgcttttatatatatttggcagagctatatggctgtttttgaatgtacaagaaataatgccatctaaaaatttctattttttttwaaaaaaactttggagaaatcatgcaaatagtttatttttctctaccagagaaaatgtcctatttttaaattcaaatatagcctttgtctttagttaataattaacattttataatgctatggaattgtcatcctcttttattaggatatgtatgggattcttctgagatgttgcttttcaactactcttcgtaagacataaaatttgcattacttttccactgctagtaaaggatctatactatttcattctctttctcatgaatattcctcttctgaccaatgacaaacatttgtaggaaggcagagaaagctgcaactcagacagcaaaacactgccaatcttactgcagccaaagactttggcttcattagcacagttttgttacaataaagtcaggagtgatgtttgacaatgagtttcaagttgcaacaagtaaccatgtcttgatctattccttccctgttttcagtaaggatgaacaaccattgagagttaatatgaaattctaaaatatttacgtttagcctacttctagctttagtgcttccttttcattgtcctctggcaattagaagcacatgaccagaattaaatccaacagtgtgggggatggtttttatgtttgtgtctgttttccatatcttcctcatgtacttttaactctgtgtccgggctaagctgtctgctgcatagcatgatttagaaaaaccctacattgaagagtacatatttcaaaataaatagataatttatacagtacttattattttgagttagaaaatgatttactgaatagtttgttcaaatactagctaccaacacccatctatatttatttttagcttattaaataccagatagaatgacttgtgtggcagaaattatgttggagagagagaatcaggatgagaaaacttgtcatattttagaaacattagagaggaaaacaccatttaaattaaacatctatgacataacaaagtgggtccacatgaattacaatctcatatttcccaaaaaagatgatt

SEQ ID NO: 86413 - DNA, 759 bp, Homo sapiens
cctgttttcttcttggtcttctaaggatggggacaattcccaaagggaggcactgctatgtctcatgttaccatgctatctatgtgagtagaagagaaagaaaagtgagattctgttcacttccatttagaatctttacttactcccggccgggtgtggtggctcacgcctgtaatcccagcactttgggaagccgaggcaggcggatcatgaggtcaggagatggagaccatcctggctaacacggtgaaaccccgtctctactaaaaatataaaaagttagccaggcgtggtggcaggcgcctgtagtcccagttactcagaaggcagaggcaggaaaatcgcttgaacacaggagacagaggttgtggtgagctgagatcatgctactgcactccagcctgggtkacagagcaagactctgtctcaaaataataataatagtaaaaagtaaaatctttacttactcccctgaaaactcttatatctacttaagtagatttattgttttccttcaaagcctttatttaacagcatttcttctttgaaaatggaatcaaagagcaggaaacactgagtttcccattaaggttagaatatttaagcattatgaaacacttatgtagtcttcataatgtttctttataacatataaaaacaacatatattaactcattgataaatatgttaatttattgtattataataacagcccttgagaaaaaaagtactattattatcaaacccacttgacagatg

SEQ ID NO: 86414 - DNA, 759 bp, Homo sapiens
cctgttttcttcttggtcttctaaggatggggacaattcccaaagggaggcactgctatgtctcatgttaccatgctatctatgtgagtagaagagaaagaaaagtgagattctgttcacttccatttagaatctttacttactcccggccgggtgtggtggctcacgcctgtaatcccagcactttgggaagccgaggcaggcggatcatgaggtcaggagatggagaccatcctggctaacacggtgaaaccccgtctctactaaaaatataaaaagttagccaggcgtggtggcaggcgcctgtagtcccagttactcagaaggcagaggcaggaaaatcgcttgaacacaggagacagaggttgtggtgagctgagatcatgctactgcactccagcctgggttacagagcaagactctgtctcaaaataataataatagtaaaaagtaaaatctttacttactcccctgaaaactcttatatctacttaagtagatktattgttttccttcaaagcctttatttaacagcatttcttctttgaaaatggaatcaaagagcaggaaacactgagtttcccattaaggttagaatatttaagcattatgaaacacttatgtagtcttcataatgtttctttataacatataaaaacaacatatattaactcattgataaatatgttaatttattgtattataataacagcccttgagaaaaaaagtactattattatcaaacccacttgacagatg

SEQ ID NO: 86415 - DNA, 2196 bp, Homo sapiens
gtaatatctatatgtttatgtatctatagtaatatctatatatatttatatatatgttatatatatatacatatcatatatatttgtcctgtcatttctaaatttatactagttttaagtattgtaaatgtaaaaagtatatttcatttttaaaaatgttttttttttaattttaggaaagggtaaacagacaaacattctataatatgccatttctttatagaaatgtgtatgctaaccaaattactatcaatacttttgataattttgtaattttaatagaacattattttagataaaaatgtgaatttatttttgatgtaaacagttaagaaactttattttaaaatatctaaaataaaagtaaaaaagaatatattccttaaaaagttgagtgtaaactgatctactcatctataaagttgctctataaagttcaaaaacaaaccaatttcccacctgaatagactaggaaacatgagtgtgtgtgtgtgtgtgtgtgtgtgtgtgtgtgtgtgtgtgtgtagaggggagtatttaagttaataccataatttctgtgtatgctctaggttcttttctagttcatgcaatttgatatacaaaattgtataatattgtttctattttactaattatttatctcttctgatctcatattttaaattatattactaatgtctatatataactattatataactaacgtctataactacttgttttgaattatttaggttcaatagtagtatatttccgtcaagtaaaaatgccataaacaagatgaaatacttatatgctgaagacacattaccttttataaatttagaactacagcgttgtactcttaattgttatgcattatattagaagtccatgacagatgctatgggtgatagtcattaggtatttacaacacataaaaagaattttatagtacaatctcaatgagtaccaaccattttattaatgaagaaacttggctccctggttccctccatttgtgacccattcccttctcaatttttattccatactgtgtaaagaaaataggtgcaagtttctaaaaataacacttcttagaaatacaaataggcttcagtcaagtgagtgcatgtagaaagactgctccaacagtactatttttaagatagatttttttcttttttaaaaatagaaaaacatttctaaaagtttatccactccttccctccaatttccttcagcctccaatctcattttaataaatggcacccctttcactaactcaggcaaaaatctagtcagtcaactattctctcttkccataacccagttataaaagccacaaaaccatatgcaaatccatcagctctttcttcagaatatctatcagctccaccttgctatctctatttcaagccacgaaagtccctatttgaatattgccatgtctttccatctgatgtccctgcttttcttcttgtcttcctcaagtatattttatatcagatataaaacaattttacatcttttaacctataaatcagatcactaatcttctttgctcaaatatctccaatggtttctcatatcaatcagaataaaattaaaagtccttatctagacctactacaaggcacttagaccatctatctgctacttttctgatatcatctcctaggatgtttcacttactcagatctggccacaggggccaccttacttgtctttgaacattgctataaaagtttcaaaatgctgattatcaatttatggatttatcttgtgtaccagtaacagactagcattgacctgtgtatgacactttgagtagcatcatttcaaaacattatattttttatcacttatcaccagctgccatattatatcttcatttaccatgtaagccctatgagggcaggaactctgttttgttcattactatatttatagcatttggaagtacttgacccatagtaggtactcaataaatatttaatgaatgaatggatggatggatggatggatggacgcataaatgaatgactgttgatattttggaattctggctagaattcctcattcattataacccaaatgttatttctgatgctcagaatgttaggaccagaaagatctttagagatcattaagtccagattatgcatatagatgagaaaacagcattcaagataagttaaagaactcagaaaa

SEQ ID NO: 86416 - DNA, 2196 bp, Homo sapiens
gtaatatctatatgtttatgtatctatagtaatatctatatatatttatatatatgttatatatatatacatatcatatatatttgtcctgtcatttctaaatttatactagttttaagtattgtaaatgtaaaaagtatatttcatttttaaaaatgttttttttttaattttaggaaagggtaaacagacaaacattctataatatgccatttctttatagaaatgtgtatgctaaccaaattactatcaatacttttgataattttgtaattttaatagaacattattttagataaaaatgtgaatttatttttgatgtaaacagttaagaaactttattttaaaatatctaaaataaaagtaaaaaagaatatattccttaaaaagttgagtgtaaactgatctactcatctataaagttgctctataaagttcaaaaacaaaccaatttcccacctgaatagactaggaaacatgagtgtgtgtgtgtgtgtgtgtgtgtgtgtgtgtgtgtgtgtgtgtagaggggagtatttaagttaataccataatttctgtgtatgctctaggttcttttctagttcatgcaatttgatatacaaaattgtataatattgtttctattttactaattatttatctcttctgatctcatattttaaattatattactaatgtctatatataactattatataactaacgtctataactacttgttttgaattatttaggttcaatagtagtatatttccgtcaagtaaaaatgccataaacaagatgaaatacttatatgctgaagacacattaccttttataaatttagaactacagcgttgtactcttaattgttatgcattatattagaagtccatgacagatgctatgggtgatagtcattaggtatttacaacacataaaaagaattttatagtacaatctcaatgagtaccaaccattttattaatgaagaaacttggctccctggttccctccatttgtgacccattcccttctcaatttttattccatactgtgtaaagaaaataggtgcaagtttctaaaaataacacttcttagaaatacaaataggcttcagtcaagtgagtgcatgtagaaagactgctccaacagtactatttttaagatagatttttttcttttttaaaaatagaaaaacatttctaaaagtttatccactccttccctccaatttccttcagcctccaatctcattttaataaatggcacccctttcactaactcaggcaaaaatctagtcagtcaactattctctctttccataacccagttataaaagccacaaaaccatatgcaaatccatcagctctttcttcagaatatctatcagctccaccttgctatctctatttcaagccacgaaagtccctatttgaatattgccatgtctttccatctgatgtccctgcttttcttcttgtcttcctcaagtatattttatatcagatataaaacaattttacatcttttaacctataaatcagatcaytaatcttctttgctcaaatatctccaatggtttctcatatcaatcagaataaaattaaaagtccttatctagacctactacaaggcacttagaccatctatctgctacttttctgatatcatctcctaggatgtttcacttactcagatctggccacaggggccaccttacttgtctttgaacattgctataaaagtttcaaaatgctgattatcaatttatggatttatcttgtgtaccagtaacagactagcattgacctgtgtatgacactttgagtagcatcatttcaaaacattatattttttatcacttatcaccagctgccatattatatcttcatttaccatgtaagccctatgagggcaggaactctgttttgttcattactatatttatagcatttggaagtacttgacccatagtaggtactcaataaatatttaatgaatgaatggatggatggatggatggatggacgcataaatgaatgactgttgatattttggaattctggctagaattcctcattcattataacccaaatgttatttctgatgctcagaatgttaggaccagaaagatctttagagatcattaagtccagattatgcatatagatgagaaaacagcattcaagataagttaaagaactcagaaaa

SEQ ID NO: 86417 - DNA, 595 bp, Homo sapiens
taattgtggagaaaatatatatacatatgaaacagttatcaatccaaggcaatatcagattaaatatcctatctgatcataacagcatgcaggattgataggaacatgatggagaagtaagatcaggtaggttgattttttgtccttgcaatagtttgctgagaatgatggtttccaacttcatccatgtccctacaaacgacatgaactcatcattttttacggctgtatagtattccatggtgtatatgtgccacctgcacrttgtgcacatgtgccctagaacttaaagtataataaaatatatatatattaaaaaaaagatcaggtaggttgaagaagtcagaagcagttactaggaggtagtgagaaaaggataaaccctttattatctctgcttagaggcaacattgtagagtagaaagatgactggctttccattcctgattttaccacttataaggtaagtgacaatctttctgcaactcaatttcaccatttaaaaaactgaatgtgatatacctattcatcagggttataaaaaaagaaaagcaaaaatgtaggtaaaggacctaacatagtcatagcaaataat

SEQ ID NO: 86418 - DNA, 514 bp, Homo sapiens
aggataggtaaagacaaaataaaacaatgccagaaaatactcattatttcatgtcatttctgtaaaacaaatcttgtttttaattatgtctctgaatttgaaatgacaatattgttctgatcctaaaatttgtgcatgattatgttagtgctagtctgtattttagactttgtaaaggaatwgttgtcaatcatataatctatttgcttttgaggaaatgaaaatccaattggataaatgctctctaatttatgttgccatctttaaatgtttcaacaatgtttcaaggttgttgaaaacggtgaaaaaattgatagtacagtacaatgttttgatagcaattagactatccctggcatatccctctgtgtgtttaagttctataattattttgaagaatggttaatgtgaaacgaaacataaaatttgtgttatttatttttgtaatattaagtaattcatggtgactgtaaaaggccaaaaatactagaaaatgcagaatgaaaaaaaagga

SEQ ID NO: 86419 - DNA, 514 bp, Homo sapiens
aggataggtaaagacaaaataaaacaatgccagaaaatactcattatttcatgtcatttctgtaaaacaaatcttgtttttaattatgtctctgaatttgaaatgacaatattgttctgatcctaaaatttgtgcatgattatgttagtgctagtctgtattttagactttgtaaaggaatagttgtcaatcatataatctatttgcttttgaggaaatgaaaatccaaytggataaatgctctctaatttatgttgccatctttaaatgtttcaacaatgtttcaaggttgttgaaaacggtgaaaaaattgatagtacagtacaatgttttgatagcaattagactatccctggcatatccctctgtgtgtttaagttctataattattttgaagaatggttaatgtgaaacgaaacataaaatttgtgttatttatttttgtaatattaagtaattcatggtgactgtaaaaggccaaaaatactagaaaatgcagaatgaaaaaaaagga

SEQ ID NO: 86420 - DNA, 561 bp, Homo sapiens
ggtatataggcatctgttctgctctggattattgaatagttattctgtgattctctcctgctatgtacattaaaataaaattttgtaatttttctcctattaatctgccttttttcagttgattttcagtggactttcagaggacaaaggggaagttttcccttggtccctacactaccttgagcctatagaggaagaaagtgatcagacatgctatgacttgccacagggtaaaattaaatcagtgaagtcattaacatatcctaagacaacacaacctatgactatattttcttgtaacaawtaaattttgataggtcaggtgcccattaaaaatatcatttttcctttttccaattatttctgaattttccagtggatggagtttgtatattggtgtttatattttcttcagtcacttagagtgaagatgatgcttccacatggagaacttagcctcacagcagtttttatgagagacttgtagttcaactgagtctttatgacaacagctcttgggctcagatgataggtactgactgtggatagaagccattatca

SEQ ID NO: 86421 - DNA, 601 bp, Homo sapiens
tgatcaaatatgtaatgtgctctcgtgcttccctctctagctaagaaaactgattgattcttgacaggagtatgaatggtgattcttgactgttgttctcccgctataccattcttcttatctcccctaagccaattcatcattatttctggaaaaggaatattagggaatccaaataattcagctaaatctgaatgttgaaatgggcctagaatatagccaacagtgaagagccagatccactaattttattgttatatattgcctctcagtttggcagcccttatgtttttgtcattatttgattcattaaaatatattaagccagtggcttgagcaaaatcatataatatttcrtgcaaaataacacaattattaaaaatcttcagactcttgctaaattgtacttccaccctacttccatcactgctcaaatttgacttttatatgttttttattattttcagaaatttattttcatggattcacagtttagtataatagacagccagcaacaaagtattgttttgtcagtgatgaatgaccaatacggtttccttaatactaataaaaaatggatgtacttttctgtcattacccc

SEQ ID NO: 86422 - DNA, 1346 bp, Homo sapiens
tgcacacacacacacgccaacatacatgcacacacatacagggatgttttggtagaagtaaaactgaggacatagtttccatcctttttctttcatgtattgatgattttaggtatatatttcctctacccttaagctggaagctacgtgttccaaaaggactgaacacaaagcaatcatagtttcaaatgtgataacattttgggaaaaccaaatctctgttacataattcaataaccacmcaaagtgaagccgaatcatagaacagatgataaaacaagaaaacgtattaagtacctgagactttgctgcaagaatccagaatgcaagatcgttttccttagggcaaaacttaccatgttaatacaatcctttcatactgtttctcatctgctggatatacctgttaggcaaccacaatgctgcaaaattgccaaataatatgattttccttttcttctattataggtgagatattttatcacacaattgaatttattttaaattgctgacatttcagttattcagtaaaccttaagcaaggtgcaattttaaatgaaatatcaagcaatgtttttaatttagtttttcattgtttggaaaaatttaaatgtcaattgtctgtcttctgaagagccacattctagagacagaagggaagcacaatacatttaacataagaaaccaaggcaaatttaccaagctctcgggtagccatttctgcaccaataactctggatttgtatcatatatgtatgaccataaaagtgattcatagataattttattatttaaatcctgatctgctattcaaagatccatttctgaaaataattcataatatagttgtcgtttccaccatatgagcttatttcaacagatgtctaacatttatccacaattaaatgaaatgtgaaataacaacaacatacttaacttctaatagtactgtactgctgttccttgagttgtcagtgtctttgggattattaggataattatgcactcaaatagagaaaataaaattaagacacatgactgtttacaatacatgatatctgtgaagagctaggtatctgtaacaatttttaaaagttctactggagaatgaaaaagctttccacttctgaatatcaaataaagggctactgatggaggaagaacgttttctataggaaaaacctaaagattagcctcactcaaggggcacaccatgtggtctcagtcaaatggcaaggactgaactttgaacatctattttggagttctaatgaataaaatgcttataacttatattcagtaaagcttttataagttacattccgtataatttcctcagagagaaa

SEQ ID NO: 86423 - DNA, 1346 bp, Homo sapiens
tgcacacacacacacgccaacatacatgcacacacatacagggatgttttggtagaagtaaaactgaggacatagtttccatcctttttctttcatgtattgatgattttaggtatatatttcctctacccttaagctggaagctacgtgttccaaaaggactgaacacaaagcaatcatagtttcaaatgtgataacattttgggaaaaccaaatctctgttacataattcaataaccacccaaagtgaagccgaatcatagaacagatgataaaacaagaaaacgtattaagtayctgagactttgctgcaagaatccagaatgcaagatcgttttccttagggcaaaacttaccatgttaatacaatcctttcatactgtttctcatctgctggatatacctgttaggcaaccacaatgctgcaaaattgccaaataatatgattttccttttcttctattataggtgagatattttatcacacaattgaatttattttaaattgctgacatttcagttattcagtaaaccttaagcaaggtgcaattttaaatgaaatatcaagcaatgtttttaatttagtttttcattgtttggaaaaatttaaatgtcaattgtctgtcttctgaagagccacattctagagacagaagggaagcacaatacatttaacataagaaaccaaggcaaatttaccaagctctcgggtagccatttctgcaccaataactctggatttgtatcatatatgtatgaccataaaagtgattcatagataattttattatttaaatcctgatctgctattcaaagatccatttctgaaaataattcataatatagttgtcgtttccaccatatgagcttatttcaacagatgtctaacatttatccacaattaaatgaaatgtgaaataacaacaacatacttaacttctaatagtactgtactgctgttccttgagttgtcagtgtctttgggattattaggataattatgcactcaaatagagaaaataaaattaagacacatgactgtttacaatacatgatatctgtgaagagctaggtatctgtaacaatttttaaaagttctactggagaatgaaaaagctttccacttctgaatatcaaataaagggctactgatggaggaagaacgttttctataggaaaaacctaaagattagcctcactcaaggggcacaccatgtggtctcagtcaaatggcaaggactgaactttgaacatctattttggagttctaatgaataaaatgcttataacttatattcagtaaagcttttataagttacattccgtataatttcctcagagagaaa

SEQ ID NO: 86424 - DNA, 908 bp, Homo sapiens
tttwaaaaaaaagggcctttttaaccatttttttttttttttttttttttttttttttttttgtagctggggtccaaactgccagtgctgggagtgtagtcaagaacttatttttcccttgagtctgggcataattctggatgtcatcatcagtcactatgtgttgactagaagcatcagggtagtagttaagagtatgatcctcatagctagactggcctaaggctaaatcctgctttctccatttctgtgtagccttttgcaagttactaaaggttcccatgtctcagcagccttactacaggattactgagatttaaatgagttaatccacataaggcactcagaacattgcctaaaacatggaaagcactgacaaatggtagccataatcatcatcatcatcatcatcattattttagaatttttataccaaacactgaactgtgtacgcaaaacctgagaagtatctataagctttctctctactaacaaaaagagataaactttccccaaaatacagaaaagaatcagtttcttgtgccataaaaggatgcagaaaagagggagctttttatttcccttttctcaagcagacaaacccttttgcctaaacttagtaaaactgaccagtcagatatgacctccaaaatttcccttgaaaaccttccacgcaccatattcttctgcctattcctggagatagttactgattagtaatcagtatcctatttaatgagaaaagatttctcacagctttctataacatatctcactctacgaagtccaacagagctggggtcaggtcagaaaatagttttcatcattttttcccagcttgaattcaagcatatgccttcctaccagaggcaagcttgacaagacagtgatgcactgcattttattaa

SEQ ID NO: 86425 - DNA, 2278 bp, Homo sapiens
tatgctgagtgaaggatctgggctggagcacagaccaagtgcagcctgtcaggctgagtgagcagggtactttctgtggcaagcctggaactgagtgaggccctgggcaggggtgtcaccagtagtgtaggtctctggctggtgaagcggcaccaaaaatatcctgccacacaaggttctttattaagtttgccttacaactaaaacaaatctcaaagttaaaaaaagcctctaccaaaaaataaggaggctcagcctgaaagaagactcaccagggcagaagaggtgaaatgtggaaacagagagctcaaagagctcaagagaatattgcacatcagttctaaaaatcgctgattccttcccagagtgatttgtttcacatcattctctgggcaccatttatgtcaacctaaataacaatagagagaagctctttagaagaaaattgtgtttattcaggaataggttattgcaatgggaatacacatcccatagtaaactgtgttttcagagaagtaaaggaagacaaggttttaaagaaaaaaatgaggcttatgtaaatattttgagtacaattatctttggctaaaaggaatcaatagcaaggatggcaccagcctggggttagacaagcatttgttgggcacatgttctcacagaagtaatttttgtgtaaggttataatggcctttgtgcatgattttggtttttgcagtcttttgtgataattcttgtagtcaagcatttgttcatgagagccctctctttatagtcttccaagctctattagtcagggttatttattactattattattttttaatacaaatgactctattttaattctgacagttttcacagactttgtgtttatttgaattcttacagcaattgaggatgattgttttagttgccacctcctcagtcattactagattttttttttgttatattttatttagattgtgaaaccaccctttcttctcactcccatatttaatgtcatcttttaggctccaatcaattgctgaattatggtaggaatattttcctcatatacaatttcttctttccccctagcattttatttaatattaaaatcatcatatagtttttctcctttagtttttagtgtgattagttacattgactcattttgaaaattaaactattcttgctttcttgtgccaaacctcacttgatttgggtgaattttctttcttatgaatttttgaatttgctttcctggtatttttctaagcattttttttctctatttctttatggctattgtctctctttttcctttactgtccttgtcagattgtttgcctcataaaacaagttaggaagtattacttccttttagattttccaaaaaaagttcagaatttgtattatttcttcattacaygtctggtagaatagactagtgaaactatttgttgctgaatttttctttcagggaagattttacattgtttatggtaagttgctatctcaaaggatttgctgaattctttgacataaaaatgtaaatttattggcataaaaattttcataatattcccttatccttttattgtctttaaggtttgtgataatgacacctctattaacttgataatggcaatttgtgtttttttttctttcttttggttaatctgcctagatgtttataaatttaatcttttcaaacaaccaccttttgatttgttggtttttctctctattttcacttttattgtttttccctgttatttttatttattaccattgtgttactttaatctcttttaaactagccgcttaagatggaagcctaagacattgattttaaaccttttttcttttctaatatagaattttaaggtataatttttttctctatgtcctactttagtggcctttcatcatttttgatatgttgcatttgtattatcactcaatgcaaaatctaatttctgttgtgatttcttctttgacttttggctttagaaatgtgttgcatatttccaaatatttgaagattctattgttatcaaagtctgatttaattgtattgtttctttgtatttcaataccacatatatataatagtgtataatttgcaatatctagtatatatatacatatatatgtatgtactatatatgtatatatgtactatatatgtatatatgtatatatgtatgtgtatgtgtgtatatatatatactagatattgtaaattatacactggagagtttttttttttaatttcacccttgatatagga

SEQ ID NO: 86426 - DNA, 772 bp, Homo sapiens
taaaagattttcactctattgttgaattcaggcctgccaccgtttaccttgatataacttagtataaagagcaactctatattccatgctaactacgtggactgtggcatttgtgtagtgaaaggcaaaggaagatgatttcccaatttaaatgaaactggagtttttccggggaaataaatagaggagatacgccttactggtttctccttcttttgttgataattgtgttctgctcttataaatagaaagctctacttaaatgtattaattatatagtctgctactcaagtaatgaaatccttagtataatggtctttaaattattctggggaaatgagagacatttgtacaagatttatgagatgttagcaacaaacagagaaagagcattttaaacaaaattttttygaggcaagccccttgtctttcttttagagacaactctattgttgaattcaggcctgccaccatttgccttgataaaacaaggtaaatgttactcttttttgacaatagtaatatcaggcatacataactaaatatagtctttttaaatatcagccacacataaccaaaaaaatcacaggaagtgccaggtgggggtccacgtggggtggttcagcctgcttacacacatcttttcctgcatcaataatggattgcccttcatcctgggcttgtcatgccctagctggccttgtgatataaaggcctctgtctgtttttcagacaggagtatgatgaaaaggttgaaggccaagtccttttt

SEQ ID NO: 86427 - DNA, 1562 bp, Homo sapiens
ttgttatcccactgttgccagtggctgtatctttcttctggctccacattcattcactttgcccagccatttgacagagtgtgcacccaccacagtgggaaccaccacccaaaatggagggtatggtcaccaggcagaggctgcccatttacctcatatgccactgagcttcagagtctatggcctgagacagaggaatgatccatatgcagtcccagtggggtcagagtctactccctcaaagcagacatgggcctcagtttcacagagctgatgaccagccaaggctaacatattacagagctgtgccccattcccatgtgcagtgctgataactatcctccactccagactttttacttctttgacgtgagtcatctcagagcaccagttgctggtatgctgcagagtatgatccggtgcttagggaacttgaactcctgtttctcctggaacaggaacagctgctgacccaatggtacctctactacatgcaggcaaaaggtgcttgggtccaggctaggtacaggcagatggttctgagtgaagactgggttgggtttgatgtaattttccataagcagctggagagggtgtggggtgggggatgatgatggggcctctgcattaaagaagacctagctgttgactttcagagttgagtgatgcattgaatcatcagtgtaagggtcagttttgatgcctcctgcttggtgtaggtgtacaaattctgacatcaaagatcttacaggccacagtcacccacatcccagtgtcagggctgctgtgtgaactcacttcttccttagcgtatatgcttggtgactcctgagcagccctacacctaagagtcatgataggctgaccctgcacagaggcttaataagttctccatgactgtccatcccctagtgcctgagttaacaccagacaagttgaggctggagctgaaatgaattattggtagagcaggccctaatgcagagccttgaaggagttgacctgatctgcaggctgatggtagccccaggactacagcactgtgcatgagtagcattttgctgagccctttaatgtccacaaaaaaagctgttttgcctgcctggcacctgctagggctcatgacagggcatgactacagcctgacaatggtcaggagttaggaccatagccacatctcagcttgtccccagccattggctgctgcaggtctctccaatgctgtgcctgcatactggaggcagagacaggtaagatgccacaggagggctcagagctggaactagctgagtttttgtttccaccatcactggacaactgytgatttgagttgattagagccccattggttgaggagtgggaacctcactaatttttggaacccagtcagtgaaaagtaataggaatccagagtctaatctctggattagactgaaaggtagaagactttgggatgttcccactctctccctacagctgagggttgaggggaggcgaaaagcagagagggcaccaagacaaagtttgttatttttctttttatcattttaacctttattttt

SEQ ID NO: 86428 - DNA, 533 bp, Homo sapiens
tgtctgttctatctcattgttatgccaaaagtatgggtgatattatatcccctccttgttgttcagcatgattttaatgtaaaatgtgtggcgagattcagatttaggaggccktcattgtgtgaactctttatttaatcatcattcttttcactaacaatagaaattcttttaaatttagaagaactatgatataaaaataataattatctgttctggattttctagtcaatgattataaagacaatactttaaacacagacttttaggaactattttggaagaaaaaagatgacatttccagtctgatttaatcttgactatttttcacatttcagacataaaacattcatacagtgtgttgactcatttcaatcatgttattaatcagtattcttttggaagtttcttgccagaatttaaaaaatgagaaaaactaaaactgccaataagaattgtatatcagcctcacagtttattttttatttccccacatcatcaaaaattctttaaatggtgtgatcttgaaaatt

SEQ ID NO: 86429 - DNA, 1083 bp, Homo sapiens
tatatagtgtcacttttccatttgtgttcgcatgcacataatagctatttacatcttcccttgaatcttcaagaacagaggctatgacttttttttcccttttcctctctgctttgagccgggtacggagctctacataggtcacctcaggggaacagcattcataaatgtcaatcagtgccatctggtgtctcattgtccctgttgctttctaagtccttccctgtcttgaccctcttttctctgtgctatgtacttctctttcttcctctccagtgtgtgtcattgaaaaagccagcaactgtgggtaaacccaatccatcccgcttcagcatgtgaggcagaagagtgttaagagcccagaatttgggtcctttgagaaagtcctgaatgagttcaaatcccactttcacctcttctgtttgaatcagttattttgcctctctaagactctttcctcgtaaaaaggggatartggtgtcaaactcaagcagttatagggtttgaaaaaatagctcatggaaagcacttaatacagtgcctagcacagagtaaaactgcgtagctttaagaaaattatgtagggcagggcgcagtggctcacacctgtaatcccagcacttagggaggccaaggcgggcagatcacctgacgccaggaggttgagaccagccttgccaacatggcgaaaccccgtctctactaaaaataaaaaataaataaaaaataaattagcgggagcctgtaatcccagcgacttgggaggctgaggcaggagaatcacttgaacccaggaggcagaagttgcagcgagccaagatcatgccactgcattccagcctgggcaacagagccagactctgtctcaaaaaaaaaaaaaaaaattatgtaaaccctctgcgtcttgattccctcgtgggcaaaataggaataatagtacccatcttacagggcatttgtgaggatgaaatgaaacactgcatgtgggggttgcctcaagactcaacccacactatctcctcttgattatcccctctgcccagtcccctccgccatgtgcgtggaattcctgaggttgctgca

SEQ ID NO: 86430 - DNA, 1730 bp, Homo sapiens
tagttaatgatcatcaatgaccactaaaaatttcatattaacaattaatgggaaactttataatgaatggatcaagctggaaacaaacatatggaataatcttaacatcacagaggaacaagcagacattgctccttctgatggaagcatacagcattcccatgaattattcttgccaaaaaataaaattgaatctgatcaaagctctagacctacctatcaggttacaggaaattcagccaacagagaaacacattatgcaacagtatatgggaacacaatccacaaaactaaaatttgtgaacactcaaagaactttaacaaattacaagaataaaaatgagggataaattgatagacatttatggaacatattaaccaaatgcaatatgtggtttatatttggattctgatgtaaataaaccaatgtgaaaagaaattatgagataattagagctatttcaatactgattagttagttgatgctattaagttgatgctattggttagttgatgctattaaggaaatattgttaaagtttttaggtatgataatagtatggttatgttctataacgttagagatatacactttaattttaaagctagatacttaatactaacagattatatggtgcttgtgattcttactattatttcaaggggcaggagggagtaagtaagaatacagataaaacaaatttgactaacgaatggataactgttgaagttaggtgatgatagactttcataggttttaaaatttttccatactaaaaaatgtattgaaaaacaaaataaactgtaaaatataatgcatatgcaaagagatttatataatcaaatactgtagtctcaaggttctgaggcagtaggaaggaagatctgtaatacattgaaacagtgaaaagaaaaattcagcctttctgagcactgagactatttttataaattttaatgaaaataagttagggttttagaactactcttctcattttttgatttaaaactaaggggaatcrtcattgaatgacctttgcatattatatgatgtcctgtgatttaaagaagcaaaagcataaatcaaaatctataaatggaaaagatttctgtttcctaaggcaagtatagcaagataataaccagaccaataaaactagtataaccagtttactcaccaatttatttaatttacccttccctgtctttggcaagtctaaatgatgcttcttttctccaaaaaaaaaaaaaaaagataaagttatgttgatttttaaacagtgatgtacacaccagaaaatcctgaaacagctgcaaattcaacaaccaaaagccaatagtttgtagatcttaatacaagaaaaaaagaaaagaaaagaaaagaaatgctgtaaaaaacaaaaaacaaaaaccctagagcaaagcttcagccttcagaaactaaattgcttctacttaatattggaatcatggggatggtcagggacccgtagaattttacctgaagtcaataattcacagcattatttctaattataatggtaccaggaaaaaaaaaggggggcgggtaaaggaaagaaggttgttggaagctagagtggtaagatcttgataatgagaaacaggctcagcagcaattggtatctaagcaataaggcaaaacaacttttaagaatgcacactggataagatgaagaatctggtggcaattgaaataacccttatccaat

SEQ ID NO: 86431 - DNA, 783 bp, Homo sapiens
atccctttggttcagacctagcagatgtttcacccctgcaggctgctgaccagttgtcacccccttggtctgttcgatgatcaaacagacccccttggtttatttccatattctttctgaaagaacaacatccagctgtttcctggtctatgctgttcttgtcccttttgaggttttataaagccagaatgcaatccctactggtatctgtgggttttacttctgccatcctccaactccaccccattcttcacagacaaaggcctagggtttcatgaatgacagcccaaggtgtttgaacttacgtagacagtacaaaatatttaaatatttgtggagcatgaaaacaaagacaatgcttccagaaggttaataggagagcagggtacagtcagatggaagcagggagaacactgggagtgggggaaccacttattattaatcagaataaatcaggtgtgagatgatgtgaaagtggaggtcagtggggtccartccttatcacttcgagaggaagagcaaatttattcattgttttctcttttggaaagttcctttagaggggtaggtgagcaggtctgtatgcaaagtaagccttgggcaagtggatatgcaaatggaaatattcataactctgcagcgcccaaaggtgtgatgactggcctggctctagctgcttcttcactcttgtccgaatcccaaacagcgcacttaatgctcttacagaatctctgaacaatcctgattctaagcacagtgtgataagaaggctgccctcactca

SEQ ID NO: 86432 - DNA, 847 bp, Homo sapiens
tgtggagagtaaagccatgtggtggagcactgaggcaccagacaggttaggaaagagctcatctgggagtacagtcgcagtacagtcaagcctccaaatactccagcccctgccatcatgtgactgcaaccacatgagagaccccaagtaagaccagcaggaaaaccacccatctgatcccagtcaactcatgaaattataaagaatggtaatacatttgttttacagtgatatgttatgcagacacaagtactgaaatcaaactcttgaacaacagatttttgacggatagttttttgtcagaactgctaagagtaacagccaacatttatggaagactaagtacattccaggcagtgtttcaggtgctttgcatgtatgaagtaatttgatctgcaacaacaacactatgagatatacagtgttactacctgcattttacaatgggtgaaaccaaggcttagaaaggtggcttatcttgcccaagattacagaatggataagaatctgaacttaaagccaggtaacctggcttctaagccctcaactctattgctttctgatctcagcatttgtcaaattgaccatcctctgttatcacaagtatcaagaattacattgggtatctatagaacattatgggacatatccacaaatcagataaagtgatgactcttctttgggtttttgccaggatatggaatcacatgtgtcataatggtataatttargaagtgctgggaaggtcccctggaccccaaaatgtttccactgagaagtctggtgccagatgtgttggagctcctttgtatgttatttgttttttccctcttgctgcttttaggat

SEQ ID NO: 86433 - DNA, 1162 bp, Homo sapiens
tatatgcacaaatgtatttaatttgctatatatgggcatgcttaatttaaccagtaacaaactctatatagttcattttatatttttagtttttctctattaactctttttgttgtgcttataaagtctgaagctaaaagatatccttctgtattattaataagagctcccattgacctaagaattgtatatcaktttgtggccgagcaggtaaacacctccctttaaacagagatgagaaagggggcaatttcttgagtggatgatctcttataattgcatgaggtatggagaatggaggattgggtataatacatgtcacaataaaggcacttggtatgtacttattgaacaagcaaatgaatgaatgatcattttgtttggacccttaatgccccctttggaattatacacaatcttattgtgaatgtatcttactaggagttgataccattatcctatgttaaagggtggggaggctattggaaaggaggcaaatgccacatagtactatgtgctggaggacattcgtaccaatactcaatataacagtaaatgaaatatgttgagccatagtattttctgaaaggtgactttgggatttcaaaataaaacacagattagaagactgtatgtatatagttttcaataaggtcagcaagtcatgaaacttatgaagttagtatatgttttatttgtttgaactactaaggtgctaatcagtacattttgttgatgattgccacttagaaccataggatgtacttactaatgagtcaaagattctttgctttaaagtggataactatttctgcatgccctatgctgtaattagaacatttcttcttacttgacctttcaatggattccactgtcactagtgttggtatagttctgccattctagagacattctgttacttggtaaagagtaaccaggcaaagagaaaaagaactgtattcatgacaatagtttctgaatcagcattaaaaccactgcctctcattattattatctttatctcgtttctaccttttctatttggttctcatgatttttctaactgccttctgctctaccattccactggggtaacaataataaaagtaacaattagaacatcatttactgaggcctttctaagtgccagccacgtgcaaac

SEQ ID NO: 86434 - DNA, 615 bp, Homo sapiens
actttctgggaactaagaactaatcactcttgctctcaatatgtccctgttttgaatctagcatctgttcttttgttcttctcttcagcatgtttggtatggcgtgcctcatctgcaacagaaaggaggattaccctttgctgggtaggtagtaggccttgattttaaacttctttattgaactaaaacaaaacatgcagaaaagtacatcaatgataactgtgcagcttaatgaattatcacaaaatgaaaatataatcatcatccaggttaagaaatagaaaaatagcaatacaccaggattactctttccttcttcctttccccaaagtcttctaacaccctcgattacttatgcctgtttaaaaaattgatacagatggaatcatacattgtataattatatacrgcttatatatactttctcttactcaatggtatgttatataattcatccatattgttgggtgtagctgtaatttattctatgtcattactatgtagtattccatttttataaatatacaacaatttacccattctgttgctgtgcaacatttgggttatttccagtttttggttcttatgaataatattgccataaacattcttaca

SEQ ID NO: 86435 - DNA, 1288 bp, Homo sapiens
tgtgctaaatctggcaactctaatccccaaccacttcccatttttgttttcaagcatctacagagtgcatttagggtctgttcatcagaagggtgtccatcgcactcctaatggattgcgctggagagccgccatttttaagaggaagagtcgtaacatttcacttccgggaggacctgggatcacctcagatggggtactaaggaatgttgggaagaatgtggaactgtggaggtgcagggtggatctgacttctggtccyagctctgcttttgactgaatgatcttggacaaattactttgcctctctgggcttcttcttccttatcttgtaaaagatgggtgttgaactggagggtctctgagtggagaagattgggaagaaagttctggcctggatgtggcatgtgaggctgctgagggcaagggatgggagtgaaggcaggacttcaggccgttcttccctctgcaaatgcgtcagaggacaaaggacgggagccgtgaaaggggcttgtgggctaccaagcgtggggactttgctttaacacagaattgggcttgaaatcctggtgtttcaggtcttgatggaaaacacactgtcacaccagaatgggaggtggggcagtttggggtgtgccccctcccatttccccactgacctgcgcaccagagcctatacatggcgtctgggggccaagtccgcaggaggcctcggaggtatctcttggctgaatgcctggctggatctgccgttgggcctggctctccagctggcttcggaagtggaggtatggttgccaggctctgtcctgctctccctgtgggacaccagtcaggaaacagcacagctgctgacccctgagccacccagtgatacaggctggttagcacaatcttcatcagtaacccaggaaactcccagaaggtgccagaaggccacaaaacagatgcctcggctaatagacatgaaccaagagccctcagagcaaagctctgaaaggcccctgcaggtttgcagttggaagcagaaggagaaatgacatataccagatcccatcttgagatagagtattaggaaagggtaaaaacttcagaagaaaacacattacctagttcagcctgtgaaaatcattttagtatcttcaaaaatggctctgtactgtaatgggaaagccagctcacaaatctgcattggcattcaatgtttgtaatgtgaataatgggacagacaaatcatgtccatgttcatggggagcctggcattttgaaaatatctggctctgatgca

SEQ ID NO: 86436 - DNA, 1288 bp, Homo sapiens
tgtgctaaatctggcaactctaatccccaaccacttcccatttttgttttcaagcatctacagagtgcatttagggtctgttcatcagaagggtgtccatcgcactcctaatggattgcgctggagagccgccatttttaagaggaagagtcgtaacatttcacttccgggaggacctgggatcacctcagatggggtactaaggaatgttgggaagaatgtggaactgtggaggtgcagggtggatctgacttctggtcccagctctgcttttgactgaatgatcttggacaaattactttgcctctctgggcttcttcttccttatcttgtaaaagatgggtgttgaactggagggtctctgagtggagaagattgggaagaaagttctggcctggatgtggcatgtgaggctgctgagggcaagggatgggagtgaaggcaggacttcaggccgttcttccctctgcaaatgcgtcagaggacaaaggaygggagccgtgaaaggggcttgtgggctaccaagcgtggggactttgctttaacacagaattgggcttgaaatcctggtgtttcaggtcttgatggaaaacacactgtcacaccagaatgggaggtggggcagtttggggtgtgccccctcccatttccccactgacctgcgcaccagagcctatacatggcgtctgggggccaagtccgcaggaggcctcggaggtatctcttggctgaatgcctggctggatctgccgttgggcctggctctccagctggcttcggaagtggaggtatggttgccaggctctgtcctgctctccctgtgggacaccagtcaggaaacagcacagctgctgacccctgagccacccagtgatacaggctggttagcacaatcttcatcagtaacccaggaaactcccagaaggtgccagaaggccacaaaacagatgcctcggctaatagacatgaaccaagagccctcagagcaaagctctgaaaggcccctgcaggtttgcagttggaagcagaaggagaaatgacatataccagatcccatcttgagatagagtattaggaaagggtaaaaacttcagaagaaaacacattacctagttcagcctgtgaaaatcattttagtatcttcaaaaatggctctgtactgtaatgggaaagccagctcacaaatctgcattggcattcaatgtttgtaatgtgaataatgggacagacaaatcatgtccatgttcatggggagcctggcattttgaaaatatctggctctgatgca

SEQ ID NO: 86437 - DNA, 1288 bp, Homo sapiens
tgtgctaaatctggcaactctaatccccaaccacttcccatttttgttttcaagcatctacagagtgcatttagggtctgttcatcagaagggtgtccatcgcactcctaatggattgcgctggagagccgccatttttaagaggaagagtcgtaacatttcacttccgggaggacctgggatcacctcagatggggtactaaggaatgttgggaagaatgtggaactgtggaggtgcagggtggatctgacttctggtcccagctctgcttttgactgaatgatcttggacaaattactttgcctctctgggcttcttcttccttatcttgtaaaagatgggtgttgaactggagggtctctgagtggagaagattgggaagaaagttctggcctggatgtggcatgtgaggctgctgagggcaagggatgggagtgaaggcaggacttcaggccgttcttccctctgcaaatgcgtcagaggacaaaggacgggagccgtgaaaggggcttgtgggctaccaagcgtggggactttgctttaacacagaattgggcttgaaatcctggtgtttcaggtcttgatggaaaacacactgtcacaccagaatgggaggtggggcagtttggggtgtgccccctcccatttccccactgacctgcgcaccagagcctatacatggcgtctgggggccaagtccgcaggaggcctcggaggtatctcttggctgaatgcctggctggatctgccgttgggcctggctctccagctggcttcggaagtggaggtatggttgccaggctctgtcctgctctccctgtgggacaccagtcaggaaacagcacagctgctgasccctgagccacccagtgatacaggctggttagcacaatcttcatcagtaacccaggaaactcccagaaggtgccagaaggccacaaaacagatgcctcggctaatagacatgaaccaagagccctcagagcaaagctctgaaaggcccctgcaggtttgcagttggaagcagaaggagaaatgacatataccagatcccatcttgagatagagtattaggaaagggtaaaaacttcagaagaaaacacattacctagttcagcctgtgaaaatcattttagtatcttcaaaaatggctctgtactgtaatgggaaagccagctcacaaatctgcattggcattcaatgtttgtaatgtgaataatgggacagacaaatcatgtccatgttcatggggagcctggcattttgaaaatatctggctctgatgca

SEQ ID NO: 86438 - DNA, 1128 bp, Homo sapiens
tacttattttctgttgtgaagacacttagaatctactcttagtgaaattgcattaaatattacccaccttgagttttctgagattctcttgaatcttacacctgagggaagtgcctcactcacctcaccctagtttcagctctcaatgataatttctgttatgtttctagctaattgtatttgctaagtgaatccctaacattattctgttatttccttttattaaaacaatcatgcctatggaaacacaattcatttcagaagatgaatgtagctcaaataagctcaagagatgtaatttaccaggtgttggtggctggcagagttccaccaaacttgaggatgaggcaaagcagtgcgaataatacagctttttgttgcacttttcccctttttcattataggagaagtaactatgggcaaagcagcttcctttggccaaaccaagttcctaaggaagacctcagctcccagccctcagcagtcaaaactcttagaagctgggctaggggaatatatggttctaacacactacaatacgcaatacagttcaccatttgacctgcttggaacgatgtgttattaagttaaacaatgtgatatcaaatttgcttcatctagaacacagctgttctgggattctgattgatctcttttcatggggaaaattagaagtggaaggttaataaaaagaaacattgctgtagctagtctcgaggtcacaactaatgcttatcatctcttcaattttccacccattccagattacagtcaccctcagccagcatctctactggtctaggcatcgtgattatgatgcactggagtaagatgatatagacctttatccctggtcatcttgccattctcatgcactggctgctgcacttgttcattgattatcaatatcggacaaagaagtacccagaaaagctccaagagatcacctggataccaagcatattcctccctgcccaaattgtgtaatagcayccctagcatatcttgatgatcagaatcaattacccctgccaggataactcctttccttgcctgattgtctattggaagaagaaatctgaaggagcaggagtcatcgcttaaagtttaatgggagtctcactatgt

SEQ ID NO: 86439 - DNA, 1028 bp, Homo sapiens
tcttacggatgcctggctaagattaatcatctttgaacacattaatacactccttcttcagaagaagaacaagctgactataaagacattcttagtaacacccgttgtgtgtgtctcagtaagtttgcattctctaagaacttggttgcatgtaggttactctcagacatctcttggattgttcccacacacagcggattatattcctcactgatttacttatcctgagattcttcctaattttctcagaggatatgtcccagtgatttatttatttaagccaaattactacttttaagaaatatccatttagtatttcatatgtaaatatttattttgaaaatactggtcagagaagaaaaygcctacatttgatcattactaagctagtttgaaccacatgccaaagattatactaggaaaatcctggtcatctatcattcatcccataaaattggagagtattattattcaactatattcaattaatctttaaattctaatgaatagatctcatgaaattctaaaagtttgtatatcccctttaccactgctcttgtgctagtcaccaagacctccctcctgtattactactaacagtctcttaactggctttaggatctccatcactgcctccattgcagttcactctctacattgtgaaaggagtgtcttcctaaggtgtatcttatttctctgtttacaatattaacttcctttccccccagaaaaatactacttaatattaggcttaacatatcgtaaaataatctcctagttatttgaccagtcttcctaaagatagtcactgtactttgttcaccattttaccctactactgagcagcatctgacaaatgacaatagctcaataaatatttatctagtgaatcaatgaaacaatacaaacgttgataaaaggaatacctccaaacagaaaataatgcactcataacattaggaacatgttaagggttaaggatatgaaaagacataacaatatcataaaaattgccatgtgtgtaagac

SEQ ID NO: 86440 - DNA, 815 bp, Homo sapiens
catatatggtttggaactctccatagttttaggcatcgactgggtgtcttagaacatgtcccccacagataaaggggtacttctatacaaattgctgtcttagttagttcaggcttctacaaaaaaataccatagactggctgacttaaacaacagaaatttatttctcacagttctggaagctagatggtccaagatcaaggtgttaagagacccactctctggtacaggctcacgacctagcattgctgacagacatctcactgtatctacacctggcatagagcagagagagagaacacattgtaccaattgctccagtgattttgcactacatgtttccaatgctgttgattttttgacataaatcatgtcattttataatggcactaatgtcaatcatgatggctccaacctcatgacctaattaccttctacaggccttacctcctaataacatcacatggggccttgggtttccacatgaatattggggtctcataaacattcagccyatagcactcatgcatttaattccaaaacaaacttattaatgaaatatggacgtgtatactttaaatcctcttatttttaaaagggaataaaccataaagttcctattcacaggctgaaatatttcactttttaaaatccaattacaaaggttatataagcttgatgttatagagcagaatggcttttcttgttcttactctttttccctgctttgtgacatttaataagaaattgtaaatcttcagaataatttctaataggctgtaagcaaacaaataatttctgattgataggctgaa

SEQ ID NO: 86441 - DNA, 672 bp, Homo sapiens
  misc_feature (1)...(672): n = A,T,C or G
atggggtttcaccacgttggccagactggtcttgaactgacatcaggcgatctgctcgccttggcctcccaaagcgctgggattacaggtgtgaggcaccgcactcggctcagagttcttacagacagcaggcaggcacttcgacaggttcccaagcccggagtttggatgcacgaaggagctccccccaccgcccctgccctggggaccgggccaacctaccacccctggccttggcgctggtttccacccacgcccacgggccttggctcctggctcctccgacccagccgtgccaccgtctttgccctccccagtgtctttgctggtcttccggctgcggcgcttggcacttggcaccaggagggccggggatggctcagcacctgtggggcagaggacagagtggctcgtcaggcctggggtccccagcttggagcttccaagaccatggtctgtcccggggatcagggatggggrcggaagcaactgacaccaggtgtctgaccccgggtgggctcccatgacaggctgtgaggtccagcaggggaaaccccgtctgcagggggcannnnnnnnnnnnnnnnnnnnnnnnnnnnnnnnnnnnnnnnnnnnnnnnnnnnnnnnnnnnnnnnnnnnnnnnnnnnnnnnnnnnnnnnnnnnnnnnnnnng

SEQ ID NO: 86442 - DNA, 611 bp, Homo sapiens
tttgatataattgctctgtgcctccattagttctgctggaaaattaataaaaaacaggatctcccttaaaaccagatactacttccaaatggagccttcctgaatyaaacacattaccaaaacaatgttaaatgttgacatttcctgatacatcgaatgtcatcctcttttttgtcatctctttaaagtagcttttaaaagcctatttttgttttcaaaagcagaagcttatttgcttttttaaaccagtgtgctcatttaataactccccctaattcatcagcattagcaacaaatactcaaagctgttttaagctgtgatttcggttgtacttattttcatgggagtttagtaaacccatatggtttgtaatgaagctcttaagccagaaaagtgacatttatgaatgactatgattttttaaacgctgccgacttgaagacacctctgctctcctgcttctcttttccagacaagctgacatggagtcacagagtgttagtgctagtgggagccacagacagcattagctgatgcctgtcctatgcctggcttagaaactggtaaacagaaaagaatattttttccctgtcttcggcagaatcccaac

SEQ ID NO: 86443 - DNA, 611 bp, Homo sapiens
tttgatataattgctctgtgcctccattagttctgctggaaaattaataaaaaacaggatctcccttaaaaccagatactacttccaaatggagccttcctgaatcaaacacattaccaaaacaatgttaaatgttgacatttcctgatacatcgaatgtcatcctcttttttgtcatctctttaaagtagcttttaaaagcctatttttgttttcaaaagcagaagcttatttgcttttttaaaccagtgtgctcatttaataactccccctaattcatcagcattagcaacaaatactcaaagctgttttaagctgtgatttcggttgtacttattttcatgggagtttagtaaacccatatggtttgtaatgaagctcttaagccagaaaagtgacatttatgaatgactatgattttttaracgctgccgacttgaagacacctctgctctcctgcttctcttttccagacaagctgacatggagtcacagagtgttagtgctagtgggagccacagacagcattagctgatgcctgtcctatgcctggcttagaaactggtaaacagaaaagaatattttttccctgtcttcggcagaatcccaac

SEQ ID NO: 86444 - DNA, 690 bp, Homo sapiens
gccccgcgtgggtcaccaggcggcctatggagggcccccatcagaacccatgcccatctgactggccggcccgtgtacttctccgtctggaagcgctcacccttggcggggagctctgagctttatgtttattaccatgttcgctgccccccaagctcctcccaggtgcttcacactgtacagtccacagagcagcgtgccatctgtcatttctcctttccagctgctctgtgaggtagatgagggatcatctaatctgtgcaccaaatccagctctccacctgcttttgtaaataaagttttcttggaacacagccatgcccaatcctttacagagggtgaaaacagactgcctagggttaaagccgggctccaccccttactagctgtgtgataaaatgagttggtgtatatgtaacctgtgcctcacggtttgtgccgcctagccattagctattattattaaagtctgttctgtttctgagcmcccccccccaattttggctgctcagttgtttgtatgtaaatagtgcaatgtgacctcagccaaagccagaatgtgggacattctacagggcaaatgacgtggtttatccaacaaatcaatggcataaacagggaaggagggggactcaaaagaaaagagacttgagagtcattgcagttaaatgcaatatgtgacttttattg

SEQ ID NO: 86445 - DNA, 690 bp, Homo sapiens
gccccgcgtgggtcaccaggcggcctatggagggcccccatcagaacccatgcccatctgactggccggcccgtgtacttctccgtctggaagcgctcacccttggcggggagctctgagctttatgtttattaccatgttcgctgccccccaagctcctcccaggtgcttcacactgtacagtccacagagcagcgtgccatctgtcatttctcctttccagctgctctgtgaggtagatgagggatcatctaatctgtgcaccaaatccagctctccacctgcttttgtaaataaagttttcttggaacacagccatgcccaatcctttacagagggtgaaaacagactgcctagggttaaagccgggctccaccccttactagctgtgtgataaaatgagttggtgtatatgtaacctgtgcctcacggtttgtgccgcctagccattagctattattattaaagtctgttctgtttctgagcccccccccccaattttggctgctcagttgtttgtatgtaaatagtgcaatgtgacctcagccaaagccagaatgtgggacattctacagggcaaatgacgtggtttatccaacaaatcaatggcataaacagggaaggagggggactcaaaagaaaagagacttragagtcattgcagttaaatgcaatatgtgacttttattg

SEQ ID NO: 86446 - DNA, 1665 bp, Homo sapiens
gaagccgaagcctcagaaggtgaaggtacggtgggccttgtccttggtgcgatgaaagggtgayagaggggcagactaactgatttccctattgatttggtctcttaggaaattgagtaccagaacctcagatttccagtagatttatcgaatccatttgctgtggcaactgttttaaaccaagaaccaggaaaattgaagattaaagaattaagagaaggtaaccagttgattggccataaagcagcccctgagcagaatatgaaagagtcattgctggtcacactgattacctatgaacaacaaaattcagttagattgctgttatgcctcgccattagaaatgtgtttttctctccgcacatgattttaatctgattactggtataaacattgtctgctcctgccttcagttttggaccagggcactgaaatttcaaaaacgagacagatgaaggaggcactctttgaacagaaagtcagacaggacattcacgaagagatggaaaatcatcttaagtggtaaatattgagcaattgtttgtatcaagtgtcagtacagttatttttaggtgatgatcttttataaatgagagacagtaaaatgtaataaccttttaggtactttggagaatttaatgattgtttcactgccagtggtccttcagtaggaagtttctattaggaataaatatatgtgaccaaaccacactgtttgctaagtgtgaccagtggcaggaccagagtgaattgtgggagatgctccctgctgctgctggcaccccctcacccccggacagatctgggtgccttggcacccccaatctcacccccatcatcctccacctcaccaggagcccctgtgccttgggctgtgtgccccagaggccttctgggtagcccagtggggtgaggctctggggggctcctaatggaggttttaaaactgagatgtgagaattcttgtgcttctgtgcccaaattagaaactttttcacaattttttttttaccagatcagaccaagcatatgcatgtgtacagatttagctgaaaagtaaactcttttttttgagaaagggtgtcactctgtcaccccagctggagtggtcacataaaaaagatatggtcacataaaaaagtgcatataaatgttcatagcagcattattcataatagccaaaaagtggaaactactgaaatgtctagtaactgataaatgaacaagcaaaatgttgcatatccagtgttatggatatgcaacatttgcatatttcaatgttgcatatttcagtgtcacatcatggccggctgcacccccagcctcccagcctaaagtgatcctccctcttcagcctcccaagtagctgggagcacaggtgcgtgccaccatgcccagcaaattttttttttttttagagatggggtctcactatgttgcccaggtgggacccaaacccctgggctcaagtattctcctgcttgacctcccaaagtgctgagattacaggtacgagtccccatgcctgagctaaagtaaactgggctgaaaaagagactcttggagagtgtcattgagaggctgcctactccatgacccagcctccacccttcccgacacatgagaacacgccctcacctgaagccctctgaaggtgcccaccgg

SEQ ID NO: 86447 - DNA, 1665 bp, Homo sapiens
gaagccgaagcctcagaaggtgaaggtacggtgggccttgtccttggtgcgatgaaagggtgacagaggggcagactaactgatttccctattgatttggtctcttaggaaattgagtaccagaacctcagatttccagtagatttatcgaatccatttgctgtggcaactgttttaaaccaagaaccaggaaaattgaagattaaagaattaagagaaggtaaccagttgattggccataaagcagcccctgagcagaatatgaaagagtcattgctggtcacactgattacctatgaacaacaaaattcagttagattgctgttatgcctcgccattagaaatgtgtttttctctccgcacatgattttaatctgattactggtataaacattgtctgctcctgccttcagttttggaccagggcactgaaatttcaaaaacgagacagatgaaggaggcactctttgaacagaaagtcagacaggacattcacgaagagatggaaaatcatcttaagtggtaaatattgagcaattgtttgtatcaagtgtcagtacagttatttttaggtgatgatcttttataaatgagagacagtaaaatgtaataaccttttaggtactttggagaatttaatgattgtttcactgccagtggtccttcagtaggaagtttctattaggaataaatatatgtgaccaaaccacactgtttgctaagtgtgaccagtggcaggaccagagtgaattgtgggagatgctccctgctgctgctggcaccccctcacccccggacagatctgggtgccttggcacccccaatctcacccccatcatcctccacctcaccaggagcccctgtgccttgggctgtgtgccccagaggccttctgggtagcccagtggggtgaggctctggggggctcctaatggaggttttaaaactgagatgtgagaattcttgtgcttctgtgcccaaattagaaactttttcacaattttttttttaccagatcagaccaagcatatgcatgtgtacagatttagctgaaaagtaaactcttttttttgagaaagggtgtcactctgtcaccccagctggagtggtcacataaaaaagatatggtcacataaaaaagtgcatataaatgttcatagcagcattattcataatagccaaaaagtggaaactactgaaatgtctagtaactgataaatgaacaagcaaaatgttgcatatccagtgttatggatatgcaacatttgcatatttcaatgttgcatatttcagtgtcacatcatggccggctgcacccccagcctcccagcctaaagtgatcctccctcttcagcctcccaagtagctgggagcacaggtgcgtgccaccatgcccagcaawttttttttttttttagagatggggtctcactatgttgcccaggtgggacccaaacccctgggctcaagtattctcctgcttgacctcccaaagtgctgagattacaggtacgagtccccatgcctgagctaaagtaaactgggctgaaaaagagactcttggagagtgtcattgagaggctgcctactccatgacccagcctccacccttcccgacacatgagaacacgccctcacctgaagccctctgaaggtgcccaccgg

SEQ ID NO: 86448 - DNA, 1665 bp, Homo sapiens
gaagccgaagcctcagaaggtgaaggtacggtgggccttgtccttggtgcgatgaaagggtgacagaggggcagactaactgatttccctattgatttggtctcttaggaaattgagtaccagaacctcagatttccagtagatttatcgaatccatttgctgtggcaactgttttaaaccaagaaccaggaaaattgaagattaaagaattaagagaaggtaaccagttgattggccataaagcagcccctgagcagaatatgaaagagtcattgctggtcacactgattacctatgaacaacaaaattcagttagattgctgttatgcctcgccattagaaatgtgtttttctctccgcacatgattttaatctgattactggtataaacattgtctgctcctgccttcagttttggaccagggcactgaaatttcaaaaacgagacagatgaaggaggcactctttgaacagaaagtcagacaggacattcacgaagagatggaaaatcatcttaagtggtaaatattgagcaattgtttgtatcaagtgtcagtacagttatttttaggtgatgatcttttataaatgagagacagtaaaatgtaataaccttttaggtactttggagaatttaatgattgtttcactgccagtggtccttcagtaggaagtttctattaggaataaatatatgtgaccaaaccacactgtttgctaagtgtgaccagtggcaggaccagagtgaattgtgggagatgctccctgctgctgctggcaccccctcacccccggacagatctgggtgccttggcacccccaatctcacccccatcatcctccacctcaccaggagcccctgtgccttgggctgtgtgccccagaggccttctgggtagcccagtggggtgaggctctggggggctcctaatggaggttttaaaactgagatgtgagaattcttgtgcttctgtgcccaaattagaaactttttcacaattttttttttaccagatcagaccaagcatatgcatgtgtacagatttagctgaaaagtaaactcttttttttgagaaagggtgtcactctgtcaccccagctggagtggtcacataaaaaagatatggtcacataaaaaagtgcatataaatgttcatagcagcattattcataatagccaaaaagtggaaactactgaaatgtctagtaactgataaatgaacaagcaaaatgttgcatatccagtgttatggatatgcaacatttgcatatttcaatgttgcatatttcagtgtcacatcatggccggctgcacccccagcctcccagcctaaagtgatcctccctcttcagcctcccaagtagctgggagcacaggtgcgtgccaccatgcccagcaaattttttttttttttagagatgggktctcactatgttgcccaggtgggacccaaacccctgggctcaagtattctcctgcttgacctcccaaagtgctgagattacaggtacgagtccccatgcctgagctaaagtaaactgggctgaaaaagagactcttggagagtgtcattgagaggctgcctactccatgacccagcctccacccttcccgacacatgagaacacgccctcacctgaagccctctgaaggtgcccaccgg

SEQ ID NO: 86449 - DNA, 937 bp, Homo sapiens
tgcatatataaatatttcattataggagttgttcttatacagttatggaggacaaaagttccatgatcagccttctacaagctagagaaccaggaaagacagtggtataattcagcctgtctgaataaccaaaaaccaggggagcccatgatgatgtaagtccagtctgagttcaaagacctgagacccaggattgttgatgtctgagggcaaaagaaaacggatgtcccaaatcaaacaggaagcaaattttcccttcctccagccttttgtcctattcaggtcctcaatgaattggacgatgacagtctactaatccaaatgctaatctcttccagaaataccctcacggaaatgcccagaaataatatatcaccagtaatctgggtatcccttagcccagtcaagcagacacataaaattaatcacaatatcaacatgaaaggaaatagacagaygggaagaaaaagagggaactgaaagcatgctaaatttctgattttgattcagagaagaaggcaggagaacaggctgatattaatacaaaataattcctggtagctagataataagataaatttaaatttctttaaaatttaagtgaaattgctagaagaataagtataggatattcagctcccaaaccactaaaggaaaggaaatataatttaaataaataaataaataattaaaaagcaagaaagagagaagaaatagaaagaggaagaaagagaagagaaaaagaaagggagaggaagatgaaaaatgaggaagatggaatggaagatgaaactataaagtgaggtgtaaggaacaagtccaaataatcattcctcacaagaaatatgggtgtgttaaattcttaattagactgcaggatttctggattttctatttaagattttccacataagaacctcatatttctgaggttctt

SEQ ID NO: 86450 - DNA, 937 bp, Homo sapiens
tgcatatataaatatttcattataggagttgttcttatacagttatggaggacaaaagttccatgatcagccttctacaagctagagaaccaggaaagacagtggtataattcagcctgtctgaataaccaaaaaccaggggagcccatgatgatgtaagtccagtctgagttcaaagacctgagacccaggattgttgatgtctgagggcaaaagaaaacggatgtcccaaatcaaacaggaagcaaattttcccttcctccagccttttgtcctattcaggtcctcaatgaattggacgatgacagtctactaatccaaatgctaatctcttccagaaataccctcacggaaatgcccagaaataatatatcaccagtaatctgggtatcccttagcccagtcaagcagacacataaaattaatcacaatatcaacatgaaaggaaatagacagatgggaagaaaaagagggaactgaaagcatgctaaatttctgattttgattcagagaagaaggcaggagaacaggctgatattaatacaaaataattcctggtagctagataataagataaatttaaatttctttaaaatttaagtgaaattgctagaagaataagtataggatattcagctcccaaaccactaaaggaaaggaaatataatttaaataaataaataaataattaaaaagcaagaaagagagaagaaatagaaagaggaagaaagakaagagaaaaagaaagggagaggaagatgaaaaatgaggaagatggaatggaagatgaaactataaagtgaggtgtaaggaacaagtccaaataatcattcctcacaagaaatatgggtgtgttaaattcttaattagactgcaggatttctggattttctatttaagattttccacataagaacctcatatttctgaggttctt

SEQ ID NO: 86451 - DNA, 937 bp, Homo sapiens
tgcatatataaatatttcattataggagttgttcttatacagttatggaggacaaaagttccatgatcagccttctacaagctagagaaccaggaaagacagtggtataattcagcctgtctgaataaccaaaaaccaggggagcccatgatgatgtaagtccagtctgagttcaaagacctgagacccaggattgttgatgtctgagggcaaaagaaaacggatgtcccaaatcaaacaggaagcaaattttcccttcctccagccttttgtcctattcaggtcctcaatgaattggacgatgacagtctactaatccaaatgctaatctcttccagaaataccctcacggaaatgcccagaaataatatatcaccagtaatctgggtatcccttagcccagtcaagcagacacataaaattaatcacaatatcaacatgaaaggaaatagacagatgggaagaaaaagagggaactgaaagcatgctaaatttctgattttgattcagagaagaaggcaggagaacaggctgatattaatacaaaataattcctggtagctagataataagataaatttaaatttctttaaaatttaagtgaaattgctagaagaataagtataggatattcagctcccaaaccactaaaggaaaggaaatataatttaaataaataaataaataattaaaaagcaagaaagagagaagaaatagaaagaggaagaaagagaagagaaaaagaaagggagaggaagatgaaaaatgaggaagatggaatggaagatgaaactataaagtgaggtgtaaggaacaagtccaaataatcattcctcacaagaaatatgggtgtgttaaattcttaattagactgcaggatwtctggattttctatttaagattttccacataagaacctcatatttctgaggttctt

SEQ ID NO: 86452 - DNA, 937 bp, Homo sapiens
tgcatatataaatatttcattataggagttgttcttatacagttatggaggacaaaagttccatgatcagccttctacaagctagagaaccaggaaagacagtggtataattcagcctgtctgaataaccaaaaaccaggggagcccatgatgatgtaagtccagtctgagttcaaagacctgagacccaggattgttgatgtctgagggcaaaagaaaacggatgtcccaaatcaaacaggaagcaaattttcccttcctccagccttttgtcctattcaggtcctcaatgaattggacgatgacagtctactaatccaaatgctaatctcttccagaaataccctcacggaaatgcccagaaataatatatcaccagtaatctgggtatcccttagcccagtcaagcagacacataaaattaatcacaatatcaacatgaaaggaaatagacagatgggaagaaaaagagggaactgaaagcatgctaaatttctgattttgattcagagaagaaggcaggagaacaggctgatattaatacaaaataattcctggtagctagataataagataaatttaaatttctttaaaatttaagtgaaattgctagaagaataagtataggatattcagctcccaaaccactaaaggaaaggaaatataatttaaataaataaataaataattaaaaagcaagaaagagagaagaaatagaaagaggaagaaagagaagagaaaaagaaagggagaggaagatgaaaaatgaggaagatggaatggaagatgaaactataaagtgaggtgtaaggaacaagtccaaataatcattcctcacaagaaatatgggtgtgttaaattcttaattagactgcaggatttctggattttctatttaagattttccayataagaacctcatatttctgaggttctt

SEQ ID NO: 86453 - DNA, 591 bp, Homo sapiens
catcacccaggtagtgagcatagtacccaataggtagtttttcaactcttgtccccctcccaccctgaacacttttaaatggtttgaatttttagctattatcatgctactaaagaatttttaaaatggaaagttacaataaagcagttctcttttattttgatctattcagaaatgaaagtcccttgtacacatttcagttcctgaataactgggcatttactcttattgataactacttaaatatcaattttataaacagagaagtactgggaaaataatagaatttatrgccggaaggtctgcgtttgagtcccaattctatcctgaatgaattctttgaccttgctagattaagaggctcagagagattatgtgacctgcttagtacagcagagcattgtaacgacctagaatctgtgctccagaaaaccaagcccatattccgagttcctcagacttctttgctttatcaactataattcccttgagttgttggctaacatcttgctaatgttaaaacagaaatccgggggtcctactgatcctcttcaggctatggtgacgcaaaagaatgtaactcatatcttg

SEQ ID NO: 86454 - DNA, 581 bp, Homo sapiens
tctggttggccctgagatgggagcagggacaaaataaaaatagagaagctcaaagtcattgaataagtggttttcacctttgtgttcccagtacccactgcagttcctggaggcatttgtactagtttccttttgcagctgtaaaaagttaccacaaatttagtgggtyaaaacaatacaacttcattatcttacagttctgtaaattagaactctagtatgtgtcctagggggctacaaccaaagtgtcaggactgcactcttttctggagagtctaggcatgaatccattttctttccttttccagcttctagaagctgcttgcattcttggcccatggtcccattttccagctccaaagctagcgactttaaattcagtagtcggcatctctctctaattctcttctgcctccctcttctaattttaggaatccttgtgattacattgggcccacccagataacccaagataatctccccaaaatcagctctgtagtaaccttaacttattgatttattaattaataaattaattataaattgatttcatctgaagccttaatttccctttgccatcc

SEQ ID NO: 86455 - DNA, 2353 bp, Homo sapiens
tgcatacaacaataatttagtatcgtttgatactacttatcttagttttaatatccagatttatttagtgtttgtttttcctacgagaaagactcacatggagcgcctaaagttgggcagtttcccaccatacctacacagagacgcttattcccccttgtggtagttggttacattacacgcaaactcaacattattaattcagcgaccagagtagctattgatttcatcaatggaatgaactattgcagtataatccaaaattactgcttaggttctcttttttcagaaatccttatgggctgagcagacagcatttcattatataccatccatttcaagaaagtccttagtaacttttggatgtgaaagtatactttcaaggattggagtaaatgtgactatcatgcacttgtgaagagggaagagagagaaagagagaccatcatgaaggagctaaattaccaaggcagcattctgcaaaaagttattcctagttggggccggtgcggtggctcatgcctgtaatcccagcacttcgggagaccgaggcgggtggatcacgaggtcaggagacagagaccatcttggctaacacggtgaaaccccatctctactaagaatacaaaaaaattagccgggagtggtggcacgcgcctgtagtcccagccactcgggaggttgaggcagaagaatcgcttgaactcgggaggcggaggttgcagtgagtcaagatcatgccattgcactgaagcttgggcaaaaagagcgaaattacgtctcaaaaaaaaaaaaaaaaagttattcctagctggtttacttgcaaagagaaccataatcagggttccatagttagttgagggtccatttggtcttttaactagaacattataggtgttgttgtttacctcatgatactatcaacaatgaaaaagagagagaagaattaattcagaaggattgagcccacactttgctgtgatttacatatgcaataaatatctattgagggcctgctatttgcttaggtgaagacatgagtttctagtagtcacatagaataagacatgactctctggcctagaagtgtgaactgccaaacagcagtgggtgttaaatctggagtttggaggagtctttctttctgaaaagaaatggcttaacatgtgaactttttctgcatgtaaatggaaatattagtgaaaagagtacttggagcaccttttgttaaaaccagcaacctcgaaagcagagagatagtcatcttcctcgtttttcaaagtagcccttcagtatttgcacaaatttacatcctgctttcttctaagctagtgttgtgcaactgagggtcccttaccgggttgtagggtgaatgaacaatgcaccacatatgcatacagcgaatcttctggttataatagtttataggttataattcagcattagatgttttcatacaataagtaatgaaaaatctagaccagactttggaccasccttaagtaaaaaagaagattattgacattgtcccttccatggttgaattgttggaaaacagttcacttttactactgcaccaaattagataaaattaatcaaaattgcttgcttgcaccacagttatacccaagttgcttaactaataacaaataaattcacatataatacagcaataaaataagcactaattaaagttttagagagacctaggaaaataggtttaaaattgtaatatggctagcagcccccagaaccgtcatgattttgtgatggtatctcacaaaagcaccatcaagaatacataataagaagaaaacacaaaacatcaccaacaataccaagatatggcatggcagaattttggagtaactgtagaaaatatatgacaggtggaattgacatgtaaaaaaacctatgcaatctagctctggctaaactctgtgaaacatgaatctctttaaaatggcagggcttgggcaggcgcggtggctcatgcctgtaatcccagcactttgggaggccaaggcgggtggatcacaaggtcaggagttcaagaacagcctgaccaagatggtgaaaccctgtctctactaaaaatacaaaaaaaaaaaaaaaaaaaattagccaggcatggtggcagacacctgtaatcccagctactcgggaggctgaggcaggagaatcgcttgaacccaggggcagaggttgcagtgagccgagatcgcgcccctgaaccccaacctgggtgacagaaaaagactccctctcaaaaaaaaaaaaaaaaaaagaaaaagaaaaaaatgtcaggccttttattcaggcctgaattcactgtgggcccttatattcttca

SEQ ID NO: 86456 - DNA, 2353 bp, Homo sapiens
tgcatacaacaataatttagtatcgtttgatactacttatcttagttttaatatccagatttatttagtgtttgtttttcctacgagaaagactcacatggagcgcctaaagttgggcagtttcccaccatacctacacagagacgcttattcccccttgtggtagttggttacattacacgcaaactcaacattattaattcagcgaccagagtagctattgatttcatcaatggaatgaactattgcagtataatccaaaattactgcttaggttctcttttttcagaaatccttatgggctgagcagacagcatttcattatataccatccatttcaagaaagtccttagtaacttttggatgtgaaagtatactttcaaggattggagtaaatgtgactatcatgcacttgtgaagagggaagagagagaaagagagaccatcatgaaggagctaaattaccaaggcagcattctgcaaaaagttattcctagttggggccggtgcggtggctcatgcctgtaatcccagcacttcgggagaccgaggcgggtggatcacgaggtcaggagacagagaccatcttggctaacacggtgaaaccccatctctactaagaatacaaaaaaattagccgggagtggtggcacgcgcctgtagtcccagccactcgggaggttgaggcagaagaatcgcttgaactcgggaggcggaggttgcagtgagtcaagatcatgccattgcactgaagcttgggcaaaaagagcgaaattacgtctcaaaaaaaaaaaaaaaaagttattcctagctggtttacttgcaaagagaaccataatcagggttccatagttagttgagggtccatttggtcttttaactagaacattataggtgttgttgtttacctcatgatactatcaacaatgaaaaagagagagaagaattaattcagaaggattgagcccacactttgctgtgatttacatatgcaataaatatctattgagggcctgctatttgcttaggtgaagacatgagtttctagtagtcacatagaataagacatgactctctggcctagaagtgtgaactgccaaacagcagtgggtgttaaatctggagtttggaggagtctttctttctgaaaagaaatggcttaacatgtgaactttttctgcatgtaaatggaaatattagtgaaaagagtacttggagcaccttttgttaaaaccagcaacctcgaaagcagagagatagtcatcttcctcgtttttcaaagtagcccttcagtatttgcacaaatttacatcctgctttcttctaagctagtgttgtgcaactgagggtcccttaccgggttgtagggtgaatgaacaatgcaccacatatgcatacagcgaatcttctggttataatagtttataggttataattcagcattagatgttttcatacaataagtaatgaaaaatctagaccagactttggaccacccttaagtaaaaaagaagattattgacattgtcccttccatggttgaattgttggaaaacagttcacttttactactgcaccaaattagataaaattaatcaaaattgcttgcttgcaccacagttatacccragttgcttaactaataacaaataaattcacatataatacagcaataaaataagcactaattaaagttttagagagacctaggaaaataggtttaaaattgtaatatggctagcagcccccagaaccgtcatgattttgtgatggtatctcacaaaagcaccatcaagaatacataataagaagaaaacacaaaacatcaccaacaataccaagatatggcatggcagaattttggagtaactgtagaaaatatatgacaggtggaattgacatgtaaaaaaacctatgcaatctagctctggctaaactctgtgaaacatgaatctctttaaaatggcagggcttgggcaggcgcggtggctcatgcctgtaatcccagcactttgggaggccaaggcgggtggatcacaaggtcaggagttcaagaacagcctgaccaagatggtgaaaccctgtctctactaaaaatacaaaaaaaaaaaaaaaaaaaattagccaggcatggtggcagacacctgtaatcccagctactcgggaggctgaggcaggagaatcgcttgaacccaggggcagaggttgcagtgagccgagatcgcgcccctgaaccccaacctgggtgacagaaaaagactccctctcaaaaaaaaaaaaaaaaaaagaaaaagaaaaaaatgtcaggccttttattcaggcctgaattcactgtgggcccttatattcttca

SEQ ID NO: 86457 - DNA, 2353 bp, Homo sapiens
tgcatacaacaataatttagtatcgtttgatactacttatcttagttttaatatccagatttatttagtgtttgtttttcctacgagaaagactcacatggagcgcctaaagttgggcagtttcccaccatacctacacagagacgcttattcccccttgtggtagttggttacattacacgcaaactcaacattattaattcagcgaccagagtagctattgatttcatcaatggaatgaactattgcagtataatccaaaattactgcttaggttctcttttttcagaaatccttatgggctgagcagacagcatttcattatataccatccatttcaagaaagtccttagtaacttttggatgtgaaagtatactttcaaggattggagtaaatgtgactatcatgcacttgtgaagagggaagagagagaaagagagaccatcatgaaggagctaaattaccaaggcagcattctgcaaaaagttattcctagttggggccggtgcggtggctcatgcctgtaatcccagcacttcgggagaccgaggcgggtggatcacgaggtcaggagacagagaccatcttggctaacacggtgaaaccccatctctactaagaatacaaaaaaattagccgggagtggtggcacgcgcctgtagtcccagccactcgggaggttgaggcagaagaatcgcttgaactcgggaggcggaggttgcagtgagtcaagatcatgccattgcactgaagcttgggcaaaaagagcgaaattacgtctcaaaaaaaaaaaaaaaaagttattcctagctggtttacttgcaaagagaaccataatcagggttccatagttagttgagggtccatttggtcttttaactagaacattataggtgttgttgtttacctcatgatactatcaacaatgaaaaagagagagaagaattaattcagaaggattgagcccacactttgctgtgatttacatatgcaataaatatctattgagggcctgctatttgcttaggtgaagacatgagtttctagtagtcacatagaataagacatgactctctggcctagaagtgtgaactgccaaacagcagtgggtgttaaatctggagtttggaggagtctttctttctgaaaagaaatggcttaacatgtgaactttttctgcatgtaaatggaaatattagtgaaaagagtacttggagcaccttttgttaaaaccagcaacctcgaaagcagagagatagtcatcttcctcgtttttcaaagtagcccttcagtatttgcacaaatttacatcctgctttcttctaagctagtgttgtgcaactgagggtcccttaccgggttgtagggtgaatgaacaatgcaccacatatgcatacagcgaatcttctggttataatagtttataggttataattcagcattagatgttttcatacaataagtaatgaaaaatctagaccagactttggaccacccttaagtaaaaaagaagattattgacattgtcccttccatggttgaattgttggaaaacagttcacttttactactgcaccaaattagataaaattaatcaaaattgcttgcttgcaccacagttatacccaagttgcttaactaataacaaataaattcacatataatacagcaataaaataagcactaattaaagttttagagagacctaggaaaataggtttaaaattgtaatatggctagcagcccccagaaccgtcatgattttgtgatggtatctcacaaaagcaccatcaagaatacataataagaagaaaacacaaaacatcaccaacaataccaagatatggcatggcagaattttggagtaactgtagaaaatatatgacaggtggaattgacatgtaaaaaaacctatgcaatctagctctggctaaactctgtgaaacatgaatctctttaaaatggcagggcttgggcaggcgcggtggctcatgcctgtaatcccagcactttgggaggccaaggcgggtggatcacaaggtcaggagttcaagaacagcctgaccaagatggtgaaaccctgtctctactaaaaatmcaaaaaaaaaaaaaaaaaaaattagccaggcatggtggcagacacctgtaatcccagctactcgggaggctgaggcaggagaatcgcttgaacccaggggcagaggttgcagtgagccgagatcgcgcccctgaaccccaacctgggtgacagaaaaagactccctctcaaaaaaaaaaaaaaaaaaagaaaaagaaaaaaatgtcaggccttttattcaggcctgaattcactgtgggcccttatattcttca

SEQ ID NO: 86458 - DNA, 558 bp, Homo sapiens
ctttattataaatcttgtgatcatttttttatatayataatttgaattatctatgtagaggataaaactacatgtgagatgtttccactatacctgtgaagaaatccacaaagattcaatttcctctagtattgagagagagcagcagagcaagcaactgggtgggagtgttgagcccagttttgcttagaaactccataaatatcttctgatttcaagctcacctcacaatctaataaatatacagcaagtttccaagtaaattgcctagagataaaaatgttctaacagctttaaagttttgtcttattaaatgtttgcatttttcattataaatttaacagatattgtcattataatttggcatgccttgtagcatatttagaagagaatacacagagagttcaattctttgaatattagtgctggaaatgcaattgttgtgttgaatgcttgatttgaaattaaaacatttttcagagaattttaaggaaaaaaatgaacatactagaattatttttcaaaatattgctaaaaaataagaattaagagccaaaa

SEQ ID NO: 86459 - DNA, 558 bp, Homo sapiens
ctttattataaatcttgtgatcatttttttatatacataatttgaattatctatgtagaggataaaactacatgtgagatgtttccactatacctgtgaagaaatccacaaagattcaatttcctctagtattgagagagagcagcagagcaagcaactgggtgggagtgttgascccagttttgcttagaaactccataaatatcttctgatttcaagctcacctcacaatctaataaatatacagcaagtttccaagtaaattgcctagagataaaaatgttctaacagctttaaagttttgtcttattaaatgtttgcatttttcattataaatttaacagatattgtcattataatttggcatgccttgtagcatatttagaagagaatacacagagagttcaattctttgaatattagtgctggaaatgcaattgttgtgttgaatgcttgatttgaaattaaaacatttttcagagaattttaaggaaaaaaatgaacatactagaattatttttcaaaatattgctaaaaaataagaattaagagccaaaa

SEQ ID NO: 86460 - DNA, 558 bp, Homo sapiens
ctttattataaatcttgtgatcatttttttatatacataatttgaattatctatgtagaggataaaactacatgtgagatgtttccactatacctgtgaagaaatccacaaagattcaatttcctctagtattgagagagagcagcagagcaagcaactgggtgggagtgttgagcccagttttgcttagaaactccataaatatcttctgatttcaagctcacctcacaatctaataaatatacagcaagtttccaagtaaattgcctagagataaaaatgttctaacagctttaaagttttgtcttattaaatgtttgcatttttcattataaatttwacagatattgtcattataatttggcatgccttgtagcatatttagaagagaatacacagagagttcaattctttgaatattagtgctggaaatgcaattgttgtgttgaatgcttgatttgaaattaaaacatttttcagagaattttaaggaaaaaaatgaacatactagaattatttttcaaaatattgctaaaaaataagaattaagagccaaaa

SEQ ID NO: 86461 - DNA, 730 bp, Homo sapiens
atctattgctaaattactattcatttttttttctcttagtacagctgtgctttaagttgtttttaccactttttgtaagaaagtcattgcaggatgtatgctaaggcctagctgcagaaaacaaccatttggtgtcagaatttgcccaggcataaggaaaggctaaggcaagtattttgagacaatgaagccagtcaataaatatctcgtcgcacttaaaaatagatttctctgctctaggaatatgtcccagttgatggagaggagagaaaaagagtgctggttaacagccagctgggagagaccatcacccttgatgaactcagatgctctggaaccccaggagatctctaccattcagtgggggtggcttcaggtactgttaaaaagaagttacatgacctacttaaagagggttttatgaaaattaaaatgtgttgagagcccaagtctactaggggttcaatgtctggaacgattgctgctgacctgcaaagctctgcatgatctgactccggcagcctctccgatttcccttcctgccaggcaccacttggctgattctactcctattcagtggccaactgccatcctgcctcagggcctttgcacttgctgtggcctctgccgagagcttctgctacataaccacgtggtattctcctttgtgtcatccccaacaggagctgctcraacatcactgcctcagaggtttgccccgtctaaaaaa

SEQ ID NO: 86462 - DNA, 709 bp, Homo sapiens
ggatcctacccttttattttattcttctttccatcaaatgagcctgtcttagtctgtttaggctactataacaaaataccatagactggtcagttagaaatgacaaaaatttaattctcacagttctgtactggaaagtccaagatcaaggcaacgacagagtcagtaagagcctccttccttcatggacagcagctttggctctgtaacctcacatggcagaagggactaactagttctctagggactcttttatgagggcactaatcttattctttcaggctctgttcttaggacctagtcatctccccctaaccccttctcttaataccttcaccttggcggttaagacttcattcaacatttgaatttaaggagatgccaacaatcagactacagcagagcctaatatctttacatcaaggaagtaaaagtacttattatttatttatttatttatgagatggagtcttgctctgtcactcaggctggagtacagtggcaggatcttggctcactgcaatctcaacctccyggggtcaagtgattctcctgcctcatcctccagagtatctgggactataagtgcacaccatgctagctaattttttttttttttttgtattttttagtagagttgaggtttagtcatgttggccaagctggtctcaaactcctgacatcaggtcaggcctgccttggcctccca

SEQ ID NO: 86463 - DNA, 371 bp, Homo sapiens
tatgaatgggggaagtctaaaagagaggaaaatgacagtgtggaaaggggggattgggaagaaaaaatgtcagaatatgagtgttataagcttattaagcaatctaagatattaacacttctcaattttacctagaaaatattcaaaactctttattaaatttcatatgtcatagtttggcctgggtgcgtcctttgcagaaaagcaaatacagttgtttactgcccccttgcagttccctgaacagcaagtcaaaccatttgccattccctgggagtctgtaagtccttacgtagggactgayctctctccacatcaaattgatcaccaggtttagtgctccaagttctgcccattggaagtatggaccc

SEQ ID NO: 86464 - DNA, 551 bp, Homo sapiens
taattaactttgaaacaacattatgtgttgttaacacttaaagttacttagatttttctttctttaaaaaatcactaaatccactggacattgatagagttgaagaaaacaatggtacattttatacgatttctatgtttgcatttcacatttcagaaatagctgctcaaaatgcagaggtagttaaattttcagaggatgagatatgtattataagcacagctctctctgaatacataacatccttatgctgaatttaaatctaattttgtgacagctgtaaaaatggctacctcgtcaagaagagcaaagaaatcaaatttatgctattytctgaaaagttacaatgctaaataaagcattgttctgaattttaaatcataacatttccgcctctagtgaggttcttgggaaaacgcgattctttaggatatacttataaatcacctttcatcatgaagaattttgaaatcatttcaaaatataagtaagtagaaaaagaagggtggaacttcacacagaaagtatttgttcaaaaatacccagaatag

SEQ ID NO: 86465 - DNA, 932 bp, Homo sapiens
  misc_feature (1)...(932): n = A,T,C or G
gaggttggataccaagaattgactacaaattaccctaggataagagcttgccagttcaatgactttggtctgcaaccagacctctcagaatgcaatgatatacacaactgacccaataaaacatatatatatatatatatatatatatatatatatatatatatatatatatatatatatatatgtatatacacacacacacacacacgtacacacacacacacacacacacacnnnnnnnnnnnnnnnnnnnnnnnnnnnnnnnnnnnnnnnnnnnnnnnnnnnnnnnnnnnnnnnnnnnnnnnnnnnnnnnnnnnnnnnnnnnnnnnnnnnnaaaattgaagcttatttcaatggctggataacagtaaaaggagagttctcatgtccaaatgtcagaacctcccaaatagtgctaatcacagttctcacttcactgaagattgaactttgttccaagagtgtttaagtgacttgcctaaggtaaaccagctgggattttttgtttagttttgttttgtttctgagccaatgctaaaaacagtcctctgaccacctcaataaatggcttagttttatattttgttttgcaagtggagtactggccttttaacatgatcaaaactgcataactaacttttgtgcacagtgcaatcccataacatgggggccttcccttaaaagaacacaaaaaggcctatttatccccgcaatgccacagctgactgtgccacctttgaaatttaactttgccttattttttggccttcttgatatctcctcccaggagttcccactgcactatgtgctccttggagccagagatgctggccacagtgcactaagtggaraaacctcagactttgaagtctgcaagtttcctagactaagaattatgaatattttgttttagttttatttatagatacagg

SEQ ID NO: 86466 - DNA, 1151 bp, Homo sapiens
agcttaaaaagataactgtgaataatactcagtggaggagggaaatagatttgtagctacttagtgaaatctgtaaaaggctgattagggagtcaaagctggggaacagaaaatatggtataaggtgtcctttctttagagattatggaaagctctcagagcaaggtgctcaacaaatttacatagaagtaggtagataaaaatttccccagagatactcttcacacaacttccagcaagtgaatgattaattaagaactatgggcttcaacactaggtttctagctcatagcataaggaaaaatacaagccataccaaggtaaacaaggaatacaaccttagtgaagttcaatgaaaaataaagcattctatagctatcttgacattggaagtagacatctatcatggggaacaaatgagtatgacccaagtcttttcagctttactagaagttagaagataatggaataacactagaaggttttgaagaaaacaggcgttagtcttcaaggaaggagtttaaagcttctcttcattacttcttccactccaggaaagaggagagttgatcttgtttagtcagataccacagcaacaagtaggcttgctagtgaggcatgtcatgtataataaaagttaaaagatkattgctaatggatatgtctcttttttcttgtttcctgtctgtaatgttgaggtggtaaatacaaagaactttgtttcagcattatggaagtaaaataatccagatcagcattcagaattaaggaaaaattattatctatgtttgtttgtttatactgcacttggtgctggaatgtgtatattttatcaacctgggaaaaagatagagcctatcttagccttagttttcaaaagctgtgtaagcctaatttacttatagcctaggaatggttcagatgggccattccaggccaacagagttctctgcactgggctctgggaacagtgttaacagtagttaactcagaatgactcataaaggattagagttggaaagtaatccacagcctctgttcaagatgtggttatgatttcatgtttgagtcctcacttgccattctaaatatatagcaatgataaactctaaaatgaaaaaattgaaaagacatggctgaactaaaaattt

SEQ ID NO: 86467 - DNA, 1151 bp, Homo sapiens
agcttaaaaagataactgtgaataatactcagtggaggagggaaatagatttgtagctacttagtgaaatctgtaaaaggctgattagggagtcaaagctggggaacagaaaatatggtataaggtgtcctttctttagagattatggaaagctctcagagcaaggtgctcaacaaatttacatagaagtaggtagataaaaatttccccagagatactcttcacacaacttccagcaagtgaatgattaattaagaactatgggcttcaacactaggtttctagctcatagcataaggaaaaatacaagccataccaaggtaaacaaggaatacaaccttagtgaagttcaatgaaaaataaagcattctatagctatcttgacattggaagtagacatctatcatggggaacaaatgagtatgacccaagtcttttcagctttactagaagttagaagataatggaataacactagaaggttttgaagaaaacaggcgttagtcttcaaggaaggagtttaaagcttctcttcattacttcttccactccaggaaagaggagagttgatcttgtttagtcagataccacagcaacaagtaggcttgctagtgaggcatgtcatgtataataaaagttaaaagattattgctaatggatatgtctcttttttcttgtttcctgtctgtaatgttgaggtggtaaatacaaagaactttgtttcagcattatggaagtaaaataatccagatcagcattcagaattaaggaaaaattattatctatgtttgtttgtttatactgcacttggtgctggaatgtgtatattttatcaacctgggaaaaagatagagcctatcttagccttagttttcaaaagctgtgtaagcctaatttacttatagcctaggaatggttcagatgggccattccaggccaacagagttctctgcactgggctctgggaacagtgttaacagtagttaactcagaatgactcataaaggattagagttggaaagtaatccacagcytctgttcaagatgtggttatgatttcatgtttgagtcctcacttgccattctaaatatatagcaatgataaactctaaaatgaaaaaattgaaaagacatggctgaactaaaaattt

SEQ ID NO: 86468 - DNA, 601 bp, Homo sapiens
ctataataaactgtatgtggttacagtgtttcacattttgcatagagttgcgaaattcggtaatttaagcaggaaaattcataaaaggataataaacaattttaacgtcattcctatgattagcctggggtactcttgccctggttttaggccacatgtaacaaacctctatcaataaatgcgtcttaattaaaattatttgaaatgaaatttggatgaaaacccagcatacaaatctcaaagaataacttaaggctgtttactggctcagtttggacatgctttatctgaaatcattctcagcatttgcaatgttaaggaacatattgcaggagtgtagaagttagctctacaagtaagtaatttttagtgtaatacaaaaatataaaatggaaaccaygattaatttttcagtttctctctgcaggtatctaatcattgtacccatggaccgccagaggctcccattaaagatttaaaatgcaagaggaaggtagaatccaaaagatgggatttgggattaaataatgtaaaataactgcagggcagtaatgaagtgaaagctattggtgcagtaagacatcctcttaagactttcttg

SEQ ID NO: 86469 - DNA, 966 bp, Homo sapiens
agagtgtccagcacttcataagcaccatgtaagtgttacgacgattacttttaccactgctatgaataggagctgatttttattttccagaaaatctgttgtccctccaagggaatttggaagatggggctaagtaaatatataaaaatatgtttataatacggcttttactaatgacttttcacgtcgcactataaaacccatctaacctctgatgaaaaagaaaacccttctatactcatgatttttgccacataattttacttttacatgaataggraaaaaaaaagtatacaagtcttaaaactttggcttactgctttttaagaagtagtttgggcaaaaccagcaaagacgattcccctgctaaaagagccatgaaaggtaagaaatttcagcaagagggtcagagataaaagcactcagaaaaagaaggcaaaagtaaaaccagacaaaggctgagtccacctccggagcagagacctctcatcctcactagtgtatgtactgaactctctgtggcctctttctcagggctggagaatgagcagtggaatcagctcttcccaaacctacaacccagcatgcaaggcagccaaagaaccaggcaatgagagtggtgccctgggaaccctgacaggagcaagaaatgtccaagactgggtgttgttcagaggtcccagtgcgtgtgctagagtctccacacctgagctgtaaagaaagcatctcattcggcaggtaagatgggttggcagaaaagtgggcaggagaggttcttgggcaaaaggctgagcgtgattgtgccctgctagaaaataaaaatgaccacaagtgttcgggacctgacagaacgggcgaggaggctgagaaggaactggatgaatcacaagagataggctgggctgtgtagagcatgtgcagcagtttggactgacacattgatttttggcaggggggtacagagta

SEQ ID NO: 86470 - DNA, 3018 bp, Homo sapiens
ggcaccgtcttccaataccacattttcataattataacagaaaggcgtaaattttctaaagcatggcagttcaaaaagtaatcaagggaatgagccggagggctattttaatgtatgcaaagctagtgacccacagtaaatgggaggtaagctacaatgaatgcaaagtaatgcacacatactacagtcctggtctgataagggacggctaaaattaacacccaattaatttccgaattgacaaacaaatgaaacccataaatctactttctcattaattttcttgtggtataatttaaagcagtaatatgagggccaaaactgaacattatccatcataaatatcagaaggatagcactgtaacaccataaattatgcatattacctgttgttaaaaatgatttatgtattatcaactttatcatgcaccatagatgtctatctacatgtatctttaaaaatctggaatttcatttagcccctctggaaaaaaagttcaggagcaatgaaattgtcaaaagcatgttttaaaaaaaaacaaaaccaaaacaaatgtggccactcatttagccatacaggaggatcaggtaaaactggaatcattccaggtctcaggtgagcagaggctaagaacccatggaagtgaggagtcgggcctccccagggaggagaaacaaaccagctgtaggggcacccctcctagagaacacagcatctgtgtccaaacggcgccactgacctgtcctgccctctggaacgcaggaggtgcagggcttggtacacgtaagcaaaggcaagatgcatttgaatgcatctgacatggccagtggggatcatctatagctatgatgaccaacgcaagcaaggaacactaaattggcaaaaacttagaaaacccatgcttattttcaataatgtaatacggcagctttcttgccttcaaaagaggaagaaaagaaataggaactaacttgtatttatcaattaaaccaggaatagtttatatttatcaattaaatggaagaagcattcagattaaaatagtttgcttgtccactttccccagctccatttgtttaataagaataataaataaatacatcttttatctcaagtttaactttcaggtatgccttgcacataacaagaatttaacacataattactaaatgtttgactaaatgattaaatgacacaaaattccaaggccaacctcttgatcaaatgagatcaagggcttgtgctggcctccaacttttatattccaactttaaaaatactctatttcctgtacacttctttaactgttttggtgttctgaaactccaaaagtaacaagccattaattaaatctgttaggtcttaagagaagtaggatgatctcattaaacattgaaagataatcaaccaatgaaatttcctacaaaaacccattggaaacactgaatatatatatggacaattcagatgggctggagaaggtagacaatgggatgtttaattttccctgtaattcatgactcagaatagagttggcgggatagggtggtaataaaataatgttcctaacaaaagcacaggcttcccccttcttcaccaggctttcaatgtgaagacagagacttcatatttccaaggaaaaaaaggatttctgcattccaatgccaaggcagtaaagttgttcagagcaactgtaaatgtcttattcttcagaactgtcttcatcaaactttcttggataacgtaatctttataagacaccaatgagcacagataacaagttgaccccgctccaaaaattacagatgtctcaatttatattttttagcttttcagctctggtgggtcttggttcgcttctttcctaatagacaagagtttaagtgccgtaatcatagcaactgtgggcaaacgagggaagttagaaagaagccgctctaggaaacaagtacaaagcagaatgcatacccactccctcgcatattaatcctgaggagctcaaataattaaatagagactgaaaaggagctttgccaatccagtgctaggctgtttgctttgccacaaggaagcctctgaaggtcaggcatgatggggccaggtgttctggggagcgtaattaaaatgcatttttacagaacaaaatagattttaagtttgagaactaacaaagcccacggaactttaatcatttgaacattcaaacagctgaattctcacaaatagcccagtggaataaagtgaccaacaaccagttcagaaaagtgtttttttttttttcatttctatattttctatcatttaatgtacacgaggccaggttcataacatcgattaatgactggcgtgatctatgacacacttcacgtatctcccgctttggctcaagcccctcaccgctctagtggccaaagtgaacaatatgttcacagcatcatggtaatgtagtgaatgtgggccatcagaattctgttgcttgcatttytccattgtgcaaaaggaacaattatttaattttatccttcaaaaactccaatatacatatatgtattttcccccctgaaacttgctctcacagacagatgagcaaggcttctctgacataaaagaccaccatttgcctctgcaggtcatgaccctccagcctccaccctcaccctggtcggtgttgtatctttgtaatttacagcaaatgctaggagagcatacctcatattgaaacacaaggcaaattcagaaacagcaacaaacaataacttaaaaaaaaatgatgatatgatgcgagctgagagttttctctactgtttgcaaaacatgacaaaggccaggctaatgttcaggtcttatctaaggtggctcccagtgtccaagggacaagcgtcatgtgcacacaccaaactagataaagagccacatgcttgctttacttaactagaaatgatacaaagcacaaactcactttaaaatggacaggtaagaaccacaggtaagagtaaaaacactggcttttaaaaata

SEQ ID NO: 86471 - DNA, 758 bp, Homo sapiens
ttattaccatccatctccagaaatttatcatcttccctaactgaaactctgttaccccttaaatactaactctctatcccaccttccccactccctgcccagttcctgacaaccaccattctgcttttcatctctgagattttgaccattcagggaatcttacgtaagaagaatcatagaatatttgtccttaygtaactggcttatttcacttggcataacatctgcaattaggatattattttagagcaagagttttaagctggagtctatagagccagctatatttgttttactaggttgatctactttaatgatatttaaatgtctatttgaatgcttcaactaatgagcattttgtgatgagcagaatatcctggaaatttactagattcttaatggtgtgtatgtagccaaatattaaaaatgtctgattttgaggttgcatactaaatgaatctgatattaagataaaatacaactaaaaaatgttaaaacctgagaagaaactcaataaaaataaaataaatgattacattgataattggaaaaataaaagtctaacaaagttaaaggaaaatacatgttagcacaatgtaggctttattaaggattctactgtcctgctctgaagtaggacaaaattttctaaggcattatattagagttacagagaattcagtttgggaacaagagtttgaaacttttgaaagaaatgcaacatttttttccaactgtgtagtttaaaataagtatgg

SEQ ID NO: 86472 - DNA, 758 bp, Homo sapiens
ttattaccatccatctccagaaatttatcatcttccctaactgaaactctgttaccccttaaatactaactctctatcccaccttccccactccctgcccagttcctgacaaccaccattctgcttttcatctctgagattttgaccattcagggaatcttacgtaagaagaatcatagaatatttgtccttatgtaactggcttatttcacttggcataacatctgcaattaggatattattttagagcaagagttttaagctggagtctatagagccagctatatttgttttactaggttgatctactttaatgatatttaaatgtctatytgaatgcttcaactaatgagcattttgtgatgagcagaatatcctggaaatttactagattcttaatggtgtgtatgtagccaaatattaaaaatgtctgattttgaggttgcatactaaatgaatctgatattaagataaaatacaactaaaaaatgttaaaacctgagaagaaactcaataaaaataaaataaatgattacattgataattggaaaaataaaagtctaacaaagttaaaggaaaatacatgttagcacaatgtaggctttattaaggattctactgtcctgctctgaagtaggacaaaattttctaaggcattatattagagttacagagaattcagtttgggaacaagagtttgaaacttttgaaagaaatgcaacatttttttccaactgtgtagtttaaaataagtatgg

SEQ ID NO: 86473 - DNA, 758 bp, Homo sapiens
ttattaccatccatctccagaaatttatcatcttccctaactgaaactctgttaccccttaaatactaactctctatcccaccttccccactccctgcccagttcctgacaaccaccattctgcttttcatctctgagattttgaccattcagggaatcttacgtaagaagaatcatagaatatttgtccttatgtaactggcttatttcacttggcataacatctgcaattaggatattattttagagcaagagttttaagctggagtctatagagccagctatatttgttttactaggttgatctactttaatgatatttaaatgtctatttgaatgcttcaactaatgagcattttgtgatgagcagaatatccyggaaatttactagattcttaatggtgtgtatgtagccaaatattaaaaatgtctgattttgaggttgcatactaaatgaatctgatattaagataaaatacaactaaaaaatgttaaaacctgagaagaaactcaataaaaataaaataaatgattacattgataattggaaaaataaaagtctaacaaagttaaaggaaaatacatgttagcacaatgtaggctttattaaggattctactgtcctgctctgaagtaggacaaaattttctaaggcattatattagagttacagagaattcagtttgggaacaagagtttgaaacttttgaaagaaatgcaacatttttttccaactgtgtagtttaaaataagtatgg

SEQ ID NO: 86474 - DNA, 758 bp, Homo sapiens
ttattaccatccatctccagaaatttatcatcttccctaactgaaactctgttaccccttaaatactaactctctatcccaccttccccactccctgcccagttcctgacaaccaccattctgcttttcatctctgagattttgaccattcagggaatcttacgtaagaagaatcatagaatatttgtccttatgtaactggcttatttcacttggcataacatctgcaattaggatattattttagagcaagagttttaagctggagtctatagagccagctatatttgttttactaggttgatctactttaatgatatttaaatgtctatttgaatgcttcaactaatgagcattttgtgatgagcagaatatcctggaaatttactagattcttaawggtgtgtatgtagccaaatattaaaaatgtctgattttgaggttgcatactaaatgaatctgatattaagataaaatacaactaaaaaatgttaaaacctgagaagaaactcaataaaaataaaataaatgattacattgataattggaaaaataaaagtctaacaaagttaaaggaaaatacatgttagcacaatgtaggctttattaaggattctactgtcctgctctgaagtaggacaaaattttctaaggcattatattagagttacagagaattcagtttgggaacaagagtttgaaacttttgaaagaaatgcaacatttttttccaactgtgtagtttaaaataagtatgg

SEQ ID NO: 86475 - DNA, 758 bp, Homo sapiens
ttattaccatccatctccagaaatttatcatcttccctaactgaaactctgttaccccttaaatactaactctctatcccaccttccccactccctgcccagttcctgacaaccaccattctgcttttcatctctgagattttgaccattcagggaatcttacgtaagaagaatcatagaatatttgtccttatgtaactggcttatttcacttggcataacatctgcaattaggatattattttagagcaagagttttaagctggagtctatagagccagctatatttgttttactaggttgatctactttaatgatatttaaatgtctatttgaatgcttcaactaatgagcattttgtgatgagcagaatatcctggaaatttactagattcttaatggtgtgtatgtagccaaatattaaaaatgtctgattttgaggttgcatactaawtgaatctgatattaagataaaatacaactaaaaaatgttaaaacctgagaagaaactcaataaaaataaaataaatgattacattgataattggaaaaataaaagtctaacaaagttaaaggaaaatacatgttagcacaatgtaggctttattaaggattctactgtcctgctctgaagtaggacaaaattttctaaggcattatattagagttacagagaattcagtttgggaacaagagtttgaaacttttgaaagaaatgcaacatttttttccaactgtgtagtttaaaataagtatgg

SEQ ID NO: 86476 - DNA, 1598 bp, Homo sapiens
ttctccttcatttccatgctaatctttcaactcctcgggattctgcccagcttccagtgtgtgtgcggcactggctgctggcctgctgcagaaggccacaccagcttatttggtgcctctcacccctggccttccttctccatggcattctgacaattagtggttcacttaagaactgctataaattaatggttaatcgagcccatataattagtttattcacaacaaagtgcaagacccatgattgtccagtggttctcccccaaccccaatytctcgttttaaaacttacaacaatccatatccccactttggcagacaggagaacgccccttatctgtagtgcagccacaccacctgaccgcttgggttgtggatggcacacgttttgtacacgtgctgcctccaccagcatcaggcaccgccgagtttgtgtggaagggcagcaactccacctaacaaatgtaactttaacaacagtaaaacaacctaatagcttagcatgccagggggctaatgtggcgggccatttactgctgcactaaatagccccggtttgattctcattgccaagtgtcgaactgagaattgcaaggcaggagtagctcctaattcattagataaagggggtcattgctcatagggctggggaaactgtagaagcataagaaaaaaaaaataaacaaggcattcccttttcaaaggccatcaaaacccaggctaaccatggtcaggaaaagcagaggctgctttcttggcactcatatgctaacttctaactttgggtaaatgtgctttgttttgcaatgttcatctggaaagagactagaagaggaagggatcctaatattgagccatgtcatttattatttgtaaatcactttgacacccttggaacaaaagcagcaacacaagaacaaagtatataattcagccttggctgtaaaatgagccactgacatgtccctgccagctattacgccttgtgtgccctgaaaaagttgctatggatggttgtgacccggctaataggctgggcaggaaaaagaccgctagcaataaaagggggaacaaaattcttgttaatattgccacatctgataatattgtctttctttttcatttttatttttattccaggcagttataaagagttctaagttcaaactgccctcactggtcatcataaggttatgtggacaaaacagttcccctatcttgttttttaatagaaaagagaaatcatcaaaaatttcaaatgagatccctaaaatgggacatctttctttcctgaacgttagccctaaaacaactgatttctctcattcctgccatcactcagattggccttgaattacctcccaataggcctcccatgtgcttctagatgagagtgtgtaatgggggatctgttaattaactagaagcaaagttgcacggtagggatcaaacactggagacgtcctaaaactcccacagagaagatgaaatgcagcgcaaactttaaagacttcccgtcattagctgagaccttgctgctcctggcccagacccctcctgtttctgagaacaatgaggacaatgatggcagaaatgaa

SEQ ID NO: 86477 - DNA, 1006 bp, Homo sapiens
agaaagcacttgaaaactattaagtattataaaacatcattattattttatcaccattggctaataaaactaaattctgttagccattttctaataacaacactcttaataataatattaaaaagttacctgttatttgttagcaagttacctgttatttgttagaaatcactcctgtagaaaagcttcttgatctggctgttccagtaaaaaacaaaaatcataagaatttctcttgaagaaaattaaggtctatggaattgtggaaaataaactaaagtaaagttgatcactaggaatcattagagctatttcctatatcatcttagctacaagattttttcagatactaggtgagtgctttttagcaataataacatatattgaagtctagatatgtactctatgtactttatatacattaattcatttactgtccaaatctctgtgaaataggtactattatctcaattttagagatggaaaaactaagcaacaagtagttacagaagttgtccaggatcgcacagttagacaacggcagtcaagttctggtgagcccaaaggctccatcttaaccactcttctaggctacctctccaggatggaagacactatcttttcaggtttccattcaataggtaatgtatctagatttctggtggtgtttcctccagtgcaaaatagattaattaatgtacttttaggttggtgcaaaagtaatgcttgtcataaaagtatgataaaatgtgctgaacatcttaggaacttggcattctatatattcaatgtggaacagtgttggggagcacaagaaagagacagaaagagagcgagcgagagagagagcaagtgagcgagagagagagcgcgcacatggttttgcaaatgtagattaggtattctcaggcactgttatygtgtttaaatgttaggctaaactaagaaaaacctatttatacatttgtgtgtatatatttacatatacacgcatattgagctatta

SEQ ID NO: 86478 - DNA, 755 bp, Homo sapiens
ttagggaattgccaaaattatggaaccaccatgatggaatattttgcagctgttaaaaatgtttggtaggttttcatacctgtcatttgtttttttttttttttgagagggagtctctytctgttgcctaggctggagtgccgtggtgcgatcttggctcacggcaagctccacctcccgggttcacgccattctcctgcctcagcctcccaagtagctgggactacaggtgcccgccaccacacccggctactttttttgtatttttagtagagacagggtttcaccgtgttagccaggatggtctccatctcctgacctcgtgatccgcctgccttggcctcccgaagtgttgggagtacaggcatgagccaccgtacgcagcccatacctgtcttttttttttttaagttttcagatctgccacacattgctggtgagaatataaaatcgtacattccactttggaaaatagtttggcagtttcttacaaaatgaaacatatacttaccatatgacctagcagttgcctcctgagcatttatgccagagaaatgaaagctaatgttcacaaaaaaaacctgtccacagctttatatgtaatagcccaaaactagaaaaaactcacacgttcttcagtaggtgaatggtacattcatactatggaatactattcagcaacaaaaaggaacaaactatggatacatagaataacttgggtggactcctggggctttatgctgagtgaaaaaagc

SEQ ID NO: 86479 - DNA, 755 bp, Homo sapiens
ttagggaattgccaaaattatggaaccaccatgatggaatattttgcagctgttaaaaatgtttggtaggttttcatacctgtcatttgtttttttttttttttgagagggagtctctctctgttgcctaggctggagtgccgtggtgcgatcttggctcacggcaagctccacctcccgggttcacgccattctcctgcctcagcctcccaagtagctgggactacaggtgcccgccaccacacccggctactttttttgtatttttagtagagacagggtttcaccgtgttagccaggatggtctccatctcctgacctcgtgatccgcctgccttggcctcccgaagtgttgggagtacaggcatgagccaccgtacscagcccatacctgtcttttttttttttaagttttcagatctgccacacattgctggtgagaatataaaatcgtacattccactttggaaaatagtttggcagtttcttacaaaatgaaacatatacttaccatatgacctagcagttgcctcctgagcatttatgccagagaaatgaaagctaatgttcacaaaaaaaacctgtccacagctttatatgtaatagcccaaaactagaaaaaactcacacgttcttcagtaggtgaatggtacattcatactatggaatactattcagcaacaaaaaggaacaaactatggatacatagaataacttgggtggactcctggggctttatgctgagtgaaaaaagc

SEQ ID NO: 86480 - DNA, 677 bp, Homo sapiens
ttgtaagccacatgtaattttaactttctagtagtcacaggaagaaagtaaattaagcaggtgaaattaattttaagaatatgttttatcgaaccaattatatccagaatgttttttttaacatgtaaccagtattacagtgagatagtttacattctttttttcaaagacagtcttcaaaatctagtgtacattttagggttacagcaaagtttagttcagactaaccacatttcaagtgctcagtagccacctttggctagtgggtaccatattgaagaagaggatgagtagttgggagtgagggctttgatgtcagacccaagtttgagtaacagcagctctgccatttgctcaccttgtgaccttgggtatgttacatgaacttgtgcttttgtttttcatttataagrtagggataataacttctccatagtggtattagaaggattaaatgagtcaatgtaggtagcatgcttggcacaggactgggcacaaaatatgtactgtaaatagtatatgttacacagtgataattttttaaattcccatatattgtgtactgaattgaatgagtaaccattctaaaagtgtgactgatttcttagtagtagtagtagtgagtaaatatataagcagtacatgaaataatccttactttttacaattaaagtttt

SEQ ID NO: 86481 - DNA, 526 bp, Homo sapiens
ggaaatgagcttgttgatttttcatttacacaaaaatgaaaaataaataccagatgtttgaaaacatgttgcaacacgtcctgctggaacttaaaagtgcattctgaccaaaaaaattaaattagaaaatccacatagcaaaaaaaaaaatgttttggatgaaaatatactttatctttctctcacacatactctctctctctctcgcacacatacccacacacacacacacacacacacacrcgcgcgcgaaaacaatatctcatttcttcttcagggagcagctgtgaaggaaatcgggggaggaggatggacacaacatcccatctttgtgtttcgatacagactaagcttttaggccaaccctcctgactggatgggggcggcgggcgtggcatgcatgaaaagtaaacatcagagacctgaagaagcttataaaatagcttgggagaggccagtcaccaagacaggcatctcaaatcggctgattctgcatctggaaactgccttcatcttgaaagaaaag

SEQ ID NO: 86482 - DNA, 526 bp, Homo sapiens
ggaaatgagcttgttgatttttcatttacacaaaaatgaaaaataaataccagatgtttgaaaacatgttgcaacacgtcctgctggaacttaaaagtgcattctgaccaaaaaaattaaattagaaaatccacatagcaaaaaaaaaaatgttttggatgaaaatatactttatctttctctcacacatactctctctctctctcgcacacatacccacacacacacacacacacacacacgcrcgcgcgaaaacaatatctcatttcttcttcagggagcagctgtgaaggaaatcgggggaggaggatggacacaacatcccatctttgtgtttcgatacagactaagcttttaggccaaccctcctgactggatgggggcggcgggcgtggcatgcatgaaaagtaaacatcagagacctgaagaagcttataaaatagcttgggagaggccagtcaccaagacaggcatctcaaatcggctgattctgcatctggaaactgccttcatcttgaaagaaaag

SEQ ID NO: 86483 - DNA, 2287 bp, Homo sapiens
tgcattcccagaagtgaaattgctgggccaaagagtataatatgtatttttagctttgctagatattgccaaactgccctccgcagaggttgtaaactggtatggtctccctgcaacgcgtgccaggcagcctaggagggcctggttccctcgaccttccccacacagtggcagcttcctttaaagctaactgtatacacctgaagtctggactgagcgcaggcccctagagaaagcatgatacagacctttcaaatccccaccacctctccaaagccttgatgactaaatccctcctcagggtcagatgaggaaagttccgtgcgctctggagtcctagctccccacagcgaacrcatctgactttgcacaggattcaaagatgacttgtagaattgtgcactgtttcagatgaaaggtatttcccatcatcccctttttttacagagtctagaatgtcacagcgattttggctgaagtgggccctgagaagagccctttactcagcattcaccccctgcccgcacatcccatcctagtcacagattctcattgcaatcaatctcttgcccagttgccactgggaacaatgaggcccattttgtctggcttccccaggacagggctctgcgtctgcacgacaatggggaagaagttgcaggtccccagagaaccacagggttttgctctgcttgttgtctctgcagtatctcggaagatggtacgaaattgagaagatcccaacaacctttgagaatggacgctgcatccaggccaactactcactaatggaaaacggaaagatcaaagtgttaaaccaggagttgaggtgagtggctgtgggcgtccggggccaggcctgcggagtgctgatgcagagtgactgggtgtccggcagcctgggtcagggaggatgggaaccttgctggatcgggactgcctgctcctagcaggaattgagaggaaagcgtttggcaggcaaggatggcaaggactaggatccacttatgcatttccatgaccacctgcggggcacaaactgacagggttcctgcactcactgcaaaatagatactctggtagcaaagaacatcaagaccatctcttctgacctccagtctgggagagaagccgcttcgacaccatctgctgacagaagcatccagctttgttcaaacacttccaggaactgggagctcatcgccttccaggacagttcatcccatctctgggcagcttaatctatcagaaagctccttttcttattaagcaagaatcacatacacaacattcacactctaggttatgtaaacaggatatcctttagaagtgtacatttctattactgagggcttctaacacaataattaatccaaaaagctacgctttggaaagcaactataaacttaaaaagagccccaggaagagctccttcctacccaccttccactcttgaaaatacaaatgcagtttttccatgaacatgttgtgacttcatggtcagagactggtgtcctgaaaaccgttctagagcaaaatgcaattgacggtgaaaagggcagaatctgctgggaggagactggtttgttgctaagttaacgtatgcagatagaaacagaccatcttccccagctgtctgagatccagatgagagaggagggcacggtctccagctttacatggtgataaacagagaaagtacttgggaacatcagagcacagttcccagaatccctggcctgttgctcattgtcctgtttctaggacatccgtcaccactaaccatagcattaacctactgactttcttttttttttttaattgtattttagtagagacggggtttcactgtgttggccaggctggtcttgatctcctgaccttgtgatccgcccccccttggcctcccaaagtgctgggattacaggcgtgagccaccacgcccggccaacctactgactttctaacacatacgactgctctaatttcagttggcctccctgctctgccttgaggattgataaacagacatcctctcctctgttggcttcctaggaagagcaccctgatgccttagcaccctccctttggtgcctccatctccacacctttccccttctcccaagttcatggggccattgggagtcatctagaaagcaggctcattcaaagaggtgaaagtattgcatccaatctaagcccccagcttttaagacacaccactgcgttatatgccactaagaaaggaatgacactgctaattgtcaggtgacatcaattgtgagat

SEQ ID NO: 86484 - DNA, 2287 bp, Homo sapiens
tgcattcccagaagtgaaattgctgggccaaagagtataatatgtatttttagctttgctagatattgccaaactgccctccgcagaggttgtaaactggtatggtctccctgcaacgcgtgccaggcagcctaggagggcctggttccctcgaccttccccacacagtggcagcttcctttaaagctaactgtatacacctgaagtctggactgagcgcaggcccctagagaaagcatgatacagacctttcaaatccccaccacctctccaaagccttgatgactaaatccctcctcagggtcagatgaggaaagttccgtgcgctctggagtcctagctccccacagcgaacacatctgactttgcacaggattcaaagatgacttgtagaattgtgcactgtttcagatgaaaggtatttcccatcatcccctttttttacagagtctagaatgtcacagcgattttggctgaagtgggccctgagaagagccctttactcagcattcaccccctgcccgcacatcccatcctagtcacagattctcattgcaatcaatctcttgcccagttgccactgggaacaatgaggcccattttgtctggcttccccaggacagggctctgcgtctgcacgacaatggggaagaagttgcaggtccccagagaaccacagggttttgctctgcttgttgtctctgcagtatctcggaagatggtacgaaattgagaagatcccaacaacctttgagaatggacgctgcatccaggccaactactcactaatggaaaacggaaagatcaaagtgttaaaccaggagttgaggtgagtggctgtgggcgtccggggccaggcctgcggagtgctgaygcagagtgactgggtgtccggcagcctgggtcagggaggatgggaaccttgctggatcgggactgcctgctcctagcaggaattgagaggaaagcgtttggcaggcaaggatggcaaggactaggatccacttatgcatttccatgaccacctgcggggcacaaactgacagggttcctgcactcactgcaaaatagatactctggtagcaaagaacatcaagaccatctcttctgacctccagtctgggagagaagccgcttcgacaccatctgctgacagaagcatccagctttgttcaaacacttccaggaactgggagctcatcgccttccaggacagttcatcccatctctgggcagcttaatctatcagaaagctccttttcttattaagcaagaatcacatacacaacattcacactctaggttatgtaaacaggatatcctttagaagtgtacatttctattactgagggcttctaacacaataattaatccaaaaagctacgctttggaaagcaactataaacttaaaaagagccccaggaagagctccttcctacccaccttccactcttgaaaatacaaatgcagtttttccatgaacatgttgtgacttcatggtcagagactggtgtcctgaaaaccgttctagagcaaaatgcaattgacggtgaaaagggcagaatctgctgggaggagactggtttgttgctaagttaacgtatgcagatagaaacagaccatcttccccagctgtctgagatccagatgagagaggagggcacggtctccagctttacatggtgataaacagagaaagtacttgggaacatcagagcacagttcccagaatccctggcctgttgctcattgtcctgtttctaggacatccgtcaccactaaccatagcattaacctactgactttcttttttttttttaattgtattttagtagagacggggtttcactgtgttggccaggctggtcttgatctcctgaccttgtgatccgcccccccttggcctcccaaagtgctgggattacaggcgtgagccaccacgcccggccaacctactgactttctaacacatacgactgctctaatttcagttggcctccctgctctgccttgaggattgataaacagacatcctctcctctgttggcttcctaggaagagcaccctgatgccttagcaccctccctttggtgcctccatctccacacctttccccttctcccaagttcatggggccattgggagtcatctagaaagcaggctcattcaaagaggtgaaagtattgcatccaatctaagcccccagcttttaagacacaccactgcgttatatgccactaagaaaggaatgacactgctaattgtcaggtgacatcaattgtgagat

SEQ ID NO: 86485 - DNA, 2287 bp, Homo sapiens
tgcattcccagaagtgaaattgctgggccaaagagtataatatgtatttttagctttgctagatattgccaaactgccctccgcagaggttgtaaactggtatggtctccctgcaacgcgtgccaggcagcctaggagggcctggttccctcgaccttccccacacagtggcagcttcctttaaagctaactgtatacacctgaagtctggactgagcgcaggcccctagagaaagcatgatacagacctttcaaatccccaccacctctccaaagccttgatgactaaatccctcctcagggtcagatgaggaaagttccgtgcgctctggagtcctagctccccacagcgaacacatctgactttgcacaggattcaaagatgacttgtagaattgtgcactgtttcagatgaaaggtatttcccatcatcccctttttttacagagtctagaatgtcacagcgattttggctgaagtgggccctgagaagagccctttactcagcattcaccccctgcccgcacatcccatcctagtcacagattctcattgcaatcaatctcttgcccagttgccactgggaacaatgaggcccattttgtctggcttccccaggacagggctctgcgtctgcacgacaatggggaagaagttgcaggtccccagagaaccacagggttttgctctgcttgttgtctctgcagtatctcggaagatggtacgaaattgagaagatcccaacaacctttgagaatggacgctgcatccaggccaactactcactaatggaaaacggaaagatcaaagtgttaaaccaggagttgaggtgagtggctgtgggcgtccggggccaggcctgcggagtgctgatgcagagtgactgggtgtccggcagcctgggtcagggaggatgggaaccttgctggatcgggactgcctgctcctagcaggaattgagaggaaagcgtttggcaggcaaggatggcaaggactaggatccacttatgcatttccatgaccacctgcggggcacaaactgacagggttcctgcactcactgcaaaatagatactctggtagcaaagaacatcaagaccatctcttctgacctccagtctgggagagaagccgcttcgacaccatctgctgacagaagcatccagctttgttcaaacacttccaggaactgggagctcatcgccttccaggacagttcatcccatctctgggcagcttaatctatcagaaagctccttttcttattaagcaagaatcacatacacaacattcacactctaggttatgtaaacaggatatcctttagaagtgtacatttctattactgagggcttctaacacaataattaatccaaaaagctacgctttggaaagcaactataaacttaaaaagagccccaggaagagctccttcctacccaccttccactcttgaaaatacaaatgcagtttttccatgaacatgttgtgacttcatggtcagagactggtgtcctgaaaaccgttctagagcaaaatgcaattgacggtgaaaagggcagaatctgctgggaggagactggtttgttgctaagttaacgtatgcagatagaaacagaccatcttccccagctgtctgagatccagatgagagaggagggcacggtctccagctttacatggtgataaacagagaaagtacttgggaacatcagagcacagttcccagaatccctggcctgttgctcattgtcctgtttctaggacatccgtcaccactaaccatagcattaacctactgactttcttttttttttttaattgtattttagtagagayggggtttcactgtgttggccaggctggtcttgatctcctgaccttgtgatccgcccccccttggcctcccaaagtgctgggattacaggcgtgagccaccacgcccggccaacctactgactttctaacacatacgactgctctaatttcagttggcctccctgctctgccttgaggattgataaacagacatcctctcctctgttggcttcctaggaagagcaccctgatgccttagcaccctccctttggtgcctccatctccacacctttccccttctcccaagttcatggggccattgggagtcatctagaaagcaggctcattcaaagaggtgaaagtattgcatccaatctaagcccccagcttttaagacacaccactgcgttatatgccactaagaaaggaatgacactgctaattgtcaggtgacatcaattgtgagat

SEQ ID NO: 86486 - DNA, 660 bp, Homo sapiens
ttaaaaatacaaaaattagctaggcatggtggtgggcacctgtaatctcagctacttgggaggctgaggcaggagaagctcttgaacccaggaggcagaggttgcagtgagccaagattgtgccactgcacgccagcctgggtgacagaccaagactgtgtctcaaaacaaacaacacaaaaaaaaamcccacaaaacaacaacaacaaaattacccatgaacttgagcctttaggtgccttggtcagtatgagattatgatagcataaataccaccaggtaggggtgaaatcggggccttatcaaatttgcaggctctaagtagcaaatcagatgagaaacactgcaaagtaagtttacaaaccacactgatactatgggtatctgtaccagtgttctaacaaatgactaactccagggggcgctaaacctccagtgaggtgctccaaaggcttctgtggtccagatcagcctggcactttatcacaagcacaggaagcggctatgggaggctaatttaaggaaccccaagtagttgagttcctgggtctgttcttccagaaaatggttgagattaaaatccaaactaggtctgggaactccaaggcaatatgtaaaagagagcaagaagatggctcaaactgcctcatgtctggacca

SEQ ID NO: 86487 - DNA, 719 bp, Homo sapiens
ctataacgtgttctatgtgtcagccttccagctatacaatgaaagcattcttgtccaccccaaaaccaagcaactactattctaacactgcacagacattgccttagaccagcacttctctaactttgtggttgcagaacaatttacactcttaaaattgaggactcccaaagagctttagcacatgtgggttagtgatatttaccgtattaaattaaaactgagaaaaagttaaaatattatttatacacaataaaaccattacatgttaacataaataacattttttaaagggcaaatatctattttccaaaacaaaacagaacaaaaaaattaagcgagacaaggaacattcttcacatgtttgcaaacctctttaatgtctagcttaaatggaagatagctggattctcatatcggcttctgcattccatctactgycatatgttgtttgaactgaactccatggggaaaaaaatccagctttacacagatggatagttggaaaagaaggagtacttcatagccttttcagataactatcaatattcttctttgatactacactaaaattcaacaagtggtaatttcttaaaggtttactgcaatgtggaatttgaaactatctcaatggatttttttgaattttactatattacattaaaatccactggactatcctgaactttgtgtgaatcttttacccatggatgattttg

SEQ ID NO: 86488 - DNA, 860 bp, Homo sapiens
cattcttttctgacacttttgtgacttttacttattcgtcttcctgatatcttatgttagaaagtaagcattttcaagtctatttcatctcaatatctcttgacccacatccctgttcagttaccatacaccctctcttgtctccatttcagtaactccttgaaaaaatttacctgccttcccaaacccatcttgataacatttccaggaacttccgtgttgctaaatctaatgcatacttttcaatcctcattttaatatacctatctccatcctttgttttcttattttcttttttgtcactcttctgttttacatgctacatctctagcactgcattattactctttttgcaggactcttttctatgctcctcttagttataagtgttccccagagctttatcctaagccatttttctccacacattttactaggtaatttggtttattccctaggctttaattaacatcagtttgctgataactatcaactatagatgtttagcccatattgctctcctgaatttgagacacatgtacctaccacatgtctacacttaatgtctaacaggtacttcatactcaaaattcatcctctcttacaaacttactcttyttccagtgttttctattcatgaaatggcatcaccatccaaacactcgctcaaaccagagacatgtgtcactcttggcttctctctggcttcttaaccacagctggtcaattaccaagtcctatcaaatctaccttcctaaatacatcttgaattcgttcacttctatccattgcccccatgctcattggtccaccattatctcttgccagagctagtgtatctgcctgcagttaactggtct

SEQ ID NO: 86489 - DNA, 672 bp, Homo sapiens
gtactgggattgctggattcccagtactgggattgctggattcccagtactgggattgctggatcaaatggtagttctacttttggttctttaaggaatctccacattgttttccatagtggttgtactagtttacattcctgccagcagtgtagaagtgttccctttcaccacatccatgccaacctccattttttaaaatttttttgataatggccattcttgcaggagtaaggtggtattgcatagtggttttgatttgcatttctctgatcactagtgatgttgagcatttcttattttgtttgttggctatttgtgtatcttcttttgagaattgcctattcatgtccttagcccactttttgatgggattgttaactcagtggcaaaaaaccaagcaacccaattaaaaaatgaacataggagctgaatagacatttttccaaagaagacatacaaatggccaaaaagtacatgaaaagatgctcaacatcactaatcattggggaagtgcaagtcaagaccacaatgagataccactttacatgtattttagtatggctrtatgtatatatatatattgtatatatatgtctatcataaaatagatttaaagtggtatctcattctggtcttgaaggaaaacaacataaaatagcaaatgttggc

SEQ ID NO: 86490 - DNA, 2245 bp, Homo sapiens
tggctcatggcaaggacagtgtggttctggagcaggcggcttcttgtgccatagctatctggtgggagcacaggcagcagctccatggcatcccagctctgcaacgtgatctttgcaaataggtagctcctgggacttagcctagagtcttgttaattcagctcttcgaaggagcctctaggccatttaatatcctgtacaaaacccctgtctgccaaaatagcctaactgcaccctgatctatacatcccccttgtcatcatcattcaggttaggttccttgttgaattgtttgctttccctactttgttgagggcaggtgctaggtcctttgcatccccaatacctagcatgacttctggcacataattggtaagcagtgagtatttgttgaatggataaactcttggagtgagtttttaaagccagcaggtaatatgctagcttttagttcaattaatgtaaatgaaattcaaggtcagggagttgtttactctagagaagtgcataataggtggtcctgacacctgacttcagatgatctgggttaaagttggtctgtgggccaaggaggatagaatgtccttggaaagtggttctgagctccctgttcttttttttttttcttttgagatggagtctttgctctgttgcccagggtggagtgcagtggcgcgatctcggctcactgcaacttctgtctcccgggttcaagcaattctctgcctcagcctcccgagtagctggggttacaggtacccgccaccatgccctgctaatttttgtatttttagtagagacggggtttcaccactttggccagggtggtcttgaactcctgacctcgtgatccgcctgccttggcctcccaaagtgctgggattacgggcatgagccaccgctcccggccagggctccctgttctttatcaggttgcaggggcgatgcaggccgacttcagttagaagggaggcaaaacttctctgtctctagcacattatgtgcccagcactgtcccaggcactgtgttgcaggcagggaggagaggaggacatagaagaaataggagggaaggatgcatttcagaaagttatcttcaaggaatacaaatctagctggggaggctccctgggaaacaaggtaatgaggagtccataatagccagagaaaagtgctggaaaagtgacccaagacggcttcctggacagggaggcaattgaacagaaccagaattcaggactaagtaaagccgttgtcctgagaacccagaagatggggaactaggaaggtgccgggctcagtgctgtgctgtgcagcctttaagctctgtcttgatcagagtgcctctgcgagctcggtgctttcacagtttaattgtgccggacacgcttgggaagttcctggcaggccccaaagttgaacccagggcgtgtggcacgtcgtgttgtccagtgatttggccactagatcatkctttctatttatttatctgatcccgaataacaagccgggaagttctgcttcatgggggtgacgtaagtgatggatgtgagtaccgcgtttcctaagccacatgcccggcctcacggtctgacaaatgggagtgaacttggacgacagggagaattttgcaactgtctgggaagtgttgatggatgaatgatgagaagtgaggtgactctggccctggcctcgggtggggaaaacaccggctggccactgtgggcccttcccgggtccctgcccacctgactcagttgctttgggaagtcccctttgctccagctccagctgggctggagcaagcctggcaaatgtgctccctccctccctccctcctcctggctccagcgcctgggcctggctgtcattacactcactccgcgctcagcgtggggctaaataagccattccctgtttgtctgtgccgctgcctggggccctgaccacccgtctctgcctcataacctcctcccacaggcgctggcacacacagtgggggctcagtaaatattagttggtgaacagcaggctcaaggttctaattttgttccctgcttctgggtcaccagagtttttattattatttttcttagttttcccatcctgcccctcccatcagcgcgaggtttcacaaggagagtgagtgggctccgctggccgccctcctgcactgtctggaaatttcccaccctgggtgcgctttgactgtgccaaggcttgaggcgaaggtcctgggagcagg

SEQ ID NO: 86491 - DNA, 2245 bp, Homo sapiens
tggctcatggcaaggacagtgtggttctggagcaggcggcttcttgtgccatagctatctggtgggagcacaggcagcagctccatggcatcccagctctgcaacgtgatctttgcaaataggtagctcctgggacttagcctagagtcttgttaattcagctcttcgaaggagcctctaggccatttaatatcctgtacaaaacccctgtctgccaaaatagcctaactgcaccctgatctatacatcccccttgtcatcatcattcaggttaggttccttgttgaattgtttgctttccctactttgttgagggcaggtgctaggtcctttgcatccccaatacctagcatgacttctggcacataattggtaagcagtgagtatttgttgaatggataaactcttggagtgagtttttaaagccagcaggtaatatgctagcttttagttcaattaatgtaaatgaaattcaaggtcagggagttgtttactctagagaagtgcataataggtggtcctgacacctgacttcagatgatctgggttaaagttggtctgtgggccaaggaggatagaatgtccttggaaagtggttctgagctccctgttcttttttttttttcttttgagatggagtctttgctctgttgcccagggtggagtgcagtggcgcgatctcggctcactgcaacttctgtctcccgggttcaagcaattctctgcctcagcctcccgagtagctggggttacaggtacccgccaccatgccctgctaatttttgtatttttagtagagacggggtttcaccactttggccagggtggtcttgaactcctgacctcgtgatccgcctgccttggcctcccaaagtgctgggattacgggcatgagccaccgctcccggccagggctccctgttctttatcaggttgcaggggcgatgcaggccgacttcagttagaagggaggcaaaacttctctgtctctagcacattatgtgcccagcactgtcccaggcactgtgttgcaggcagggaggagaggaggacatagaagaaataggagggaaggatgcatttcagaaagttatcttcaaggaatacaaatctagctggggaggctccctgggaaacaaggtaatgaggagtccataatagccagagaaaagtgctggaaaagtgacccaagacggcttcctggacagggaggcaattgaacagaaccagaattcaggactaagtaaagccgttgtcctgagaacccagaagatggggaactaggaaggtgccgggctcagtgctgtgctgtgcagcctttaagctctgtcttgatcagagtgcctctgcgagctcggtgctttcacagtttaattgtgccggacacgcttgggaagttcctggcaggccccaaagttgaacccagggcgtgtggcacgtcgtgttgtccagtgatttggccactagatcattctttctatttatttatctgatcccgaataacaagccgggaagttctgcttcatgggggtgacgtaagtgatggatgtgagtaccgcgtttcctaagccacatgcccggcctcacggtctgacaaatgggagtgaacttggacgacagggagaattttgcaactgtctgggaagtgttgatggatgaatgatgagaagtgaggtgactctggccctggcctcgggtggggaaaacaccggctggccactgtgggcccttcccgggtccctgcccacctgactcagttgctttgggaagtcccctttgctccagctccagctgggctggagcaagcctggcaaatgtgctccctccctccctccctcctcctggctccagcgcctgggcctggctgtcattacactcactccgcgctcagcgtggggctaaataagccattccctgtttgtctgtgccgctgcctggggccctgaccacccgtctctgcctcataacctcctcccacaggcgctggcacacacagtgggggcwcagtaaatattagttggtgaacagcaggctcaaggttctaattttgttccctgcttctgggtcaccagagtttttattattatttttcttagttttcccatcctgcccctcccatcagcgcgaggtttcacaaggagagtgagtgggctccgctggccgccctcctgcactgtctggaaatttcccaccctgggtgcgctttgactgtgccaaggcttgaggcgaaggtcctgggagcagg

SEQ ID NO: 86492 - DNA, 675 bp, Homo sapiens
gcatcaagttgctgattaaactaggtgactttaagaccctaccaaccccgcagttctatcaattaaagtcttctaagagagtttattgggctagaagatagaagaccttcattattcagattyattattgtaacagactataacactcatcatcaattgcccatcaagtaatgactcctgtctcttaaagttttgtgaagtgtaaagtgatagcacatgcaaaagtattgtttaatgaggtgcttggttcttggttcaaacactgagataatgccatttaaaccaagcatataactgaattccagaacccaaccttatacctatgggacataggttctcaacatacaagctcattatcattcaagttcagcatgtccaaaatattgtaccttatcatctgccctcaaattgattctcttgttcactttcctctttctactatgaataccatctctcccttaattatccatgtctgaggctttaaaataacatagccattttctctcctttgtcttccaaactgttcagtcactaaatgctatttgttcttcttgcaagattctaaccttcatccaattctttcaaatccacattttcacacctaaatattttcatagtcctttaaatgggtctcaacctccagcttctttccactatccatcaacactgagcctg

SEQ ID NO: 86493 - DNA, 675 bp, Homo sapiens
gcatcaagttgctgattaaactaggtgactttaagaccctaccaaccccgcagttctatcaattaaagtcttctaagagagtttattgggctagaagatagaagaccttcattattcagatttattattgtaacaractataacactcatcatcaattgcccatcaagtaatgactcctgtctcttaaagttttgtgaagtgtaaagtgatagcacatgcaaaagtattgtttaatgaggtgcttggttcttggttcaaacactgagataatgccatttaaaccaagcatataactgaattccagaacccaaccttatacctatgggacataggttctcaacatacaagctcattatcattcaagttcagcatgtccaaaatattgtaccttatcatctgccctcaaattgattctcttgttcactttcctctttctactatgaataccatctctcccttaattatccatgtctgaggctttaaaataacatagccattttctctcctttgtcttccaaactgttcagtcactaaatgctatttgttcttcttgcaagattctaaccttcatccaattctttcaaatccacattttcacacctaaatattttcatagtcctttaaatgggtctcaacctccagcttctttccactatccatcaacactgagcctg

SEQ ID NO: 86494 - DNA, 675 bp, Homo sapiens
gcatcaagttgctgattaaactaggtgactttaagaccctaccaaccccgcagttctatcaattaaagtcttctaagagagtttattgggctagaagatagaagaccttcattattcagatttattattgtaacagactataacactcatcatcaattgcccatcaagtaatgactcctgtctcttaaagttttgtgaagtgtaaagtgatagcacatgcaaaagtattgtttaatgaggtgcttggttcttggttcaaacactgagataatgccatttaaaccaagcatataactgaattccagaacccaaccttatacctatgggacataggttctcaacatacaagctcattatcattcaagttcagcatgtccaaaatattgtaccttatcatctgccctcaaattgattctcttgttcactttcctctttctactatgaataccatctctcccttaattatccatgtctgaggctttaaaataacatagccattttctctcctttgtcttccaaactgttcagtcactaaatgctatttgttcttcttgcaagattctaamcttcatccaattctttcaaatccacattttcacacctaaatattttcatagtcctttaaatgggtctcaacctccagcttctttccactatccatcaacactgagcctg

SEQ ID NO: 86495 - DNA, 519 bp, Homo sapiens
cagggaactgtggcttaaagatactgatrgctgtttgtcagagtagagtctggtagaaaactgtgaacttgtgtagctgatcacatgaaatccacttgcctcgttgaaactaaaaatgaacaccactatttcttgctttcataaatttgcaagtgctcttgattgtaaggtaaggatttggctcgtttataaacatgcatgcccctgcctatccccacccattgcctcttctcagtgttcctcaggtagttgacttgctattggggcaggatacagtggaggcttttgtgttcacataacactcttctttgtaactggattcgggactgaatctgtcaggggtcttaattgcaaacaagagaccaactctgaaattactggaaggatgttgagatgcaggttggcttgcagaattattggacggctggagaggtaggcttcaaatggagcaggaaccaagagcattcttcagagaaggataggaagaatgtagagattacaaatgtaaaagctggatcc

SEQ ID NO: 86496 - DNA, 519 bp, Homo sapiens
cagggaactgtggcttaaagatactgatagctgtttgtcagagtagagtctggtagaaaactgtgaacttgtgtagctgatcacatgaaatccacttgcctcgttgaaactaaaaatgaacaccactatttcttgctttcataaatttgcaagtgctcttgattgtaaggtaaggatttggctcgtttataaacatgcatgcccctgcctatccccacccattgcctcttctcagtgttcctcaggtagttgacttgctattggggcaggatacagtggaggcttttgtgttcacataacactcttctttgtaactggattcgggactgaatctgtcaggggtcttaattgcaaasaagagaccaactctgaaattactggaaggatgttgagatgcaggttggcttgcagaattattggacggctggagaggtaggcttcaaatggagcaggaaccaagagcattcttcagagaaggataggaagaatgtagagattacaaatgtaaaagctggatcc

SEQ ID NO: 86497 - DNA, 943 bp, Homo sapiens
tgcatgtgtttgcatacatacacacaccctggccatgtgtatgctggacttttggaccacgttctggttaytttctggaagttccgtctctacacgtgggctgcctgacttacacttggtaagttctagtagcttcccacgtataggctttctcactcttacccccgtagcttcgtgattttgcgtcaggctcctaaggtcagaaggtgttgtttacaacatgaaaagcaaaacaagaggaatatccagacaatagcatgaatttcttttcctctgataaggaccagaggtcactcacagctcactgagagagcatctaaaatcatagcaaggccccggctgaggcaactgggaaacacactcatttttagtttagtctattaagaaaaagatcagtcttgaattcatttggtttcaatttacttttcacaaaacacatatgtagtaaaagatcttgggtttgtgttttcctttctgcttgcaaatttcatcccatttaaaacatgaaaggagaaaaataatggtgctaactagagccaaacaaaatatgggtggtcacagtacaaactttcccttagaaagctttacccctacacataatgggtgagaattttccttactagagaaagagaggcatgtcctttggcagtggagtattttgttatcaatgagacacaacacatgcctgcagggatctgcattctcctccacttcttagaaccccagagtctgtaatacaaaaatggaaattagagtaagcagaggtttcattgagtgagaggtgttatcctcctaattttgtcctcttgaaagtagtttaattattttcttgaattgtggagtccttttccagtctgtttctgaatctctcagctatcaacttccaacttctggagttatataactctagaaatcattaattttagatctggaagatcatcct

SEQ ID NO: 86498 - DNA, 943 bp, Homo sapiens
tgcatgtgtttgcatacatacacacaccctggccatgtgtatgctggacttttggaccacgttctggttactttctggaagttccgtctctacacgtgggctgcctgacttacacttggtaagttctagtagcttcccacgtataggctttctcactcttacccccgtagcttcgtgattttgcgtcaggctcctaaggtcagaaggwgttgtttacaacatgaaaagcaaaacaagaggaatatccagacaatagcatgaatttcttttcctctgataaggaccagaggtcactcacagctcactgagagagcatctaaaatcatagcaaggccccggctgaggcaactgggaaacacactcatttttagtttagtctattaagaaaaagatcagtcttgaattcatttggtttcaatttacttttcacaaaacacatatgtagtaaaagatcttgggtttgtgttttcctttctgcttgcaaatttcatcccatttaaaacatgaaaggagaaaaataatggtgctaactagagccaaacaaaatatgggtggtcacagtacaaactttcccttagaaagctttacccctacacataatgggtgagaattttccttactagagaaagagaggcatgtcctttggcagtggagtattttgttatcaatgagacacaacacatgcctgcagggatctgcattctcctccacttcttagaaccccagagtctgtaatacaaaaatggaaattagagtaagcagaggtttcattgagtgagaggtgttatcctcctaattttgtcctcttgaaagtagtttaattattttcttgaattgtggagtccttttccagtctgtttctgaatctctcagctatcaacttccaacttctggagttatataactctagaaatcattaattttagatctggaagatcatcct

SEQ ID NO: 86499 - DNA, 943 bp, Homo sapiens
tgcatgtgtttgcatacatacacacaccctggccatgtgtatgctggacttttggaccacgttctggttactttctggaagttccgtctctacacgtgggctgcctgacttacacttggtaagttctagtagcttcccacgtataggctttctcactcttacccccgtagcttcgtgattttgcgtcaggctcctaaggtcagaaggtgttgtttacarcatgaaaagcaaaacaagaggaatatccagacaatagcatgaatttcttttcctctgataaggaccagaggtcactcacagctcactgagagagcatctaaaatcatagcaaggccccggctgaggcaactgggaaacacactcatttttagtttagtctattaagaaaaagatcagtcttgaattcatttggtttcaatttacttttcacaaaacacatatgtagtaaaagatcttgggtttgtgttttcctttctgcttgcaaatttcatcccatttaaaacatgaaaggagaaaaataatggtgctaactagagccaaacaaaatatgggtggtcacagtacaaactttcccttagaaagctttacccctacacataatgggtgagaattttccttactagagaaagagaggcatgtcctttggcagtggagtattttgttatcaatgagacacaacacatgcctgcagggatctgcattctcctccacttcttagaaccccagagtctgtaatacaaaaatggaaattagagtaagcagaggtttcattgagtgagaggtgttatcctcctaattttgtcctcttgaaagtagtttaattattttcttgaattgtggagtccttttccagtctgtttctgaatctctcagctatcaacttccaacttctggagttatataactctagaaatcattaattttagatctggaagatcatcct

SEQ ID NO: 86500 - DNA, 943 bp, Homo sapiens
tgcatgtgtttgcatacatacacacaccctggccatgtgtatgctggacttttggaccacgttctggttactttctggaagttccgtctctacacgtgggctgcctgacttacacttggtaagttctagtagcttcccacgtataggctttctcactcttacccccgtagcttcgtgattttgcgtcaggctcctaaggtcagaaggtgttgtttacaacatgaaaagcaaaacaagaggaatatccagacaatagcatgaatttcttttcctctgataaggaccagaggtcactcacagctcactgagagagcatctaaaatcatagcaaggccccggctgaggcaactgggaaacacactcatttttagtttagtctattaagaaaaagatcagtcttgaattcatttggtttcaatttacttttcacaaaacacatatgtagtaaaagatcttgggtttgtgttttcctttctgcttgcaaatttcatcccatttaaaacatgaaaggagaaaaataatggtgctaactagagccaaayaaaatatgggtggtcacagtacaaactttcccttagaaagctttacccctacacataatgggtgagaattttccttactagagaaagagaggcatgtcctttggcagtggagtattttgttatcaatgagacacaacacatgcctgcagggatctgcattctcctccacttcttagaaccccagagtctgtaatacaaaaatggaaattagagtaagcagaggtttcattgagtgagaggtgttatcctcctaattttgtcctcttgaaagtagtttaattattttcttgaattgtggagtccttttccagtctgtttctgaatctctcagctatcaacttccaacttctggagttatataactctagaaatcattaattttagatctggaagatcatcct

SEQ ID NO: 86501 - DNA, 1470 bp, Homo sapiens
taaatgcattgttaggaaaggtgttttgtaaacgtcttactaaggatttgccaaaaagttactcagtagctgataaattgctatgtctgtatctttatttttttctaaaaatttagaggaataaaattattcattaaagagctcccctggtatatggacagagcccagtctccagagtcctgagaacacttcagcaaaggacaagtttaaatgctcgctggtgaaagatagctcaataaaaattactttgtggctaaaacacaggatatttcagaatatatccccgctgtacctcactcatgcctccctgtgttcctctcattggctttctgctcttccttctcactgcaacattctcctctctggctgtttcaataaagcacttcctgcctgctgcagtgcacagggatgtctctttttctactgtgggatctgacctagaggatagcacttgattatatacaggcatcaccctggaaacatgagtacttcagtcccaaaaatcagatgtcacatgcaacaaacacttgtgggtttctatttgccattgttttaaatggaaaaaactgtgttggctgttggtcaatacttagcaattcctaaaamgcaatgtaacacagtagaaaattctataattttaaaaatggacatgttaggatataagtttctcaaattatcaccttctgatcaccagaaagatgaatacaattattaactattgctttgtatgcaataatgtgcagtttgcatgtcctatacggcagtcactaaactttgtattaaaaaactccatcacgttgaaaaacaactggaagttcaaaaataattttgtaacatgcataatattttcctcagaaattagagccaaacataaattaaatgaattaaacaaagaaaaataaaagcaaaattataaaaactcaaaaacaacttttttagctaaagaaattttatttaagctgggacatggtacatttcaatacgttttatatgatgtggggtagggtatcctaaagtaagtccttgggtattacaacaattttaaagcagccctgttgaccagggccttggggaatcctctccttgaggcgatccagtaaccttgcccacctgaagcaggtcctgcttacctggctttgtgcccaggcctactcatacttggacataccttgaggtaacaggcatcctctgatggtggcatccactccttctgtcccaagcttgggccctagaagacttttggtctgggctccaaaagtcatgaacttggtggtcagttctcaggaattcgtgttacccctcctttgtcctgggtgttcctcctctctggaaaccctctgtcctattcccaattgcatgcttttcctcttgcataggcactgatcttccaaatcaaagtgggatggtctgctggacagcctcaataccactgagtaagctattagtgccctcctggggtaaggggaccca

SEQ ID NO: 86502 - DNA, 298 bp, Homo sapiens
acaaagcatttttagactgtttactgtagaaaacctacagtaaacagaccaactgagccctcttattgtggattatgcacaaaaaggtaaaaaagaaatagtttttcataccatattctttaccaaccacagttttcaccaagcacttagaatgagtttgagagagcttctgggctcaaagcctytaaagttctcaagacaggttttctgtgaaatagtcctattcctgggttgcacagggctgtcctgtgttctgtaggatacttagtagcatctctggcctctacacattggacaa

SEQ ID NO: 86503 - DNA, 506 bp, Homo sapiens
agatgtttaagggctgaaaaaagatttgaataaatatgataatgtaggaaatagctgaaggttaaaatgatagcaaaactctgtctygtgcatcttcagatgtgttaataagaaaaatatgattaaagaaattagtgtgccaattttttctaaagcaagttcagtaaatagtaatatctttttttttttttgagacagtctttctctgtcaccaggctggagtgcaatggcacgatcgtggctcactgcagcctccgcctcctgggttcaagcgattcccctgcctcagcctcccgagtagccaggattacagtcacgtaccaccatgcccggctaattttttgtattttagcagacatggggtttcaccatgttggccaggatggtctagatctcctgacctcatgatccacccaccttggcctcccaaaatgctgggattacagacatgagccaccacgtcaagcctcatttttctttaaatatgccattatgtttaaatcatt

SEQ ID NO: 86504 - DNA, 506 bp, Homo sapiens
agatgtttaagggctgaaaaaagatttgaataaatatgataatgtaggaaatagctgaaggttaaaatgatagcaaaactctgtcttgtgcatcttcagatgtgttaataagaaaaatatgattaaagaaattagtgtgccaattttttctaaagcaagttcagtaaatagtaatatctttttttttttttgagacagtctttctctgtcaccaggctggagtgcaatggcacgatcgtggctcactgcagcctccgcctcctgggttcaagcgattcccctgcctcagcctcccgagtagccrggattacagtcacgtaccaccatgcccggctaattttttgtattttagcagacatggggtttcaccatgttggccaggatggtctagatctcctgacctcatgatccacccaccttggcctcccaaaatgctgggattacagacatgagccaccacgtcaagcctcatttttctttaaatatgccattatgtttaaatcatt

SEQ ID NO: 86505 - DNA, 506 bp, Homo sapiens
agatgtttaagggctgaaaaaagatttgaataaatatgataatgtaggaaatagctgaaggttaaaatgatagcaaaactctgtcttgtgcatcttcagatgtgttaataagaaaaatatgattaaagaaattagtgtgccaattttttctaaagcaagttcagtaaatagtaatatctttttttttttttgagacagtctttctctgtcaccaggctggagtgcaatggcacgatcgtggctcactgcagcctccgcctcctgggttcaagcgattcccctgcctcagcctcccgagtagccaggattacagtcacgtaccaccatgcccggctaaytttttgtattttagcagacatggggtttcaccatgttggccaggatggtctagatctcctgacctcatgatccacccaccttggcctcccaaaatgctgggattacagacatgagccaccacgtcaagcctcatttttctttaaatatgccattatgtttaaatcatt

SEQ ID NO: 86506 - DNA, 1128 bp, Homo sapiens
cacatgcatatatatatatatatatatatatatatatatatatatataaagctcatataaattggctaaatttatatgagccatttggtgtgttaccaggaaggtaacacacacatatgctatatatgaagctcatataaattggctaaatatgctaatgcaataatatacaatcaatttaaaaatattttttaaaaaggataacatgaaggggcagtagcatatcaaactgaagagtatcatattttgagtaaactccaaatgtgacactaattagcttcacttcattagctacattagttagtatctctgtttctcagttaccccatcttcaaaatgagaataataataataataataatgtctattttaaaagttagtttttcaaaaaagagacgtaattcttaaggagaatttagcacagtgactgactacatgtaccaaatctataactagtttacaaacgtgaaaggaagtgttgccctattaataattgaagaaaagccattctcataaaattagcacattttttaaaacaaagcaataggcactattaaatattactaatgcaagtataatttggtaacttttggattaaaatttggtaaatatcaaactttaaaacttcattgtaccatttgawctaataattccacatatggaaatcaatttgaaatattgtgagaaatatgagtgaagaaatgggtgtggaggggataggaaagctacaagcccaaagattttaacagataaaaactgaaaacagcctaaattttccaatgttagaatagcaaaattcccttaaaacctcattaaggtgctgcctacaataactttgcaagactaggcatatataaaaatctgtggacaataaaaagagagctatttaagcctgagtcaaaaaacgaaaaccacaattaaaaatacttaataaattctgtgtggttccttttacatatgatacaaaaataagcaaaactaatctatgctgttagacatcataatggtgtttttcatggggagatgaagtagtctgagtgactagtgaggttctatttcttgatctgggtgttttttaaacaaaaatgcacaatttgcaaaaattattgaacatatcacctatgatac

SEQ ID NO: 86507 - DNA, 1128 bp, Homo sapiens
cacatgcatatatatatatatatatatatatatatatatatatatataaagctcatataaattggctaaatttatatgagccatttggtgtgttaccaggaaggtaacacacacatatgctatatatgaagctcatataaattggctaaatatgctaatgcaataatatacaatcaatttaaaaatattttttaaaaaggataacatgaaggggcagtagcatatcaaactgaagagtatcatattttgagtaaactccaaatgtgacactaattagcttcacttcattagctacattagttagtatctctgtttctcagttaccccatcttcaaaatgagaataataataataataataatgtctattttaaaagttagtttttcaaaaaagagacgtaattcttaaggagaatttagcacagtgactgactacatgtaccaaatctataactagtttacaaacgtgaaaggaagtgttgccctattaataattgaagaaaagccattctcataaaattagcacattttttaaaacaaagcaataggcactattaaatattactaatgcaagtataatttggtaacttttggattaaaatttggtaaatatcaaactttaaaacttcattgtaccatttgatctaataattccacatatggaaatcaatttgaaatattgtgagaaatatgagtgaagaaatgggtgtggaggggataggaaagctacaagcccaaagattwtaacagataaaaactgaaaacagcctaaattttccaatgttagaatagcaaaattcccttaaaacctcattaaggtgctgcctacaataactttgcaagactaggcatatataaaaatctgtggacaataaaaagagagctatttaagcctgagtcaaaaaacgaaaaccacaattaaaaatacttaataaattctgtgtggttccttttacatatgatacaaaaataagcaaaactaatctatgctgttagacatcataatggtgtttttcatggggagatgaagtagtctgagtgactagtgaggttctatttcttgatctgggtgttttttaaacaaaaatgcacaatttgcaaaaattattgaacatatcacctatgatac

SEQ ID NO: 86508 - DNA, 612 bp, Homo sapiens
gatgtaatgaaatatgttgataaagtctacatattgaaccatctttgcatgcctagaataaatcctttgttacacttgtgttttgatatattaatgaattaactaggctattttatctataatttgtgtacatataatcataataaagatcattttatagcatttttttctgcttgtttyacttatcatgattaggttttgataggggagttttctccaacctcctctactgtctaggatatttaataactacactggaattatctggttttttaaaggttatccaaattcagcataaagtcatctaaatacatcttcttttaacagacattaatcatattgccagtaacttctatgataatagtagtagttttctatttattctgaggtcattttgcagtacttttctgatagaaattcacatttttttcctaggtttgatctctgctccctctgaaacaagctacttcttgtctaaaaatgacttccaacatactatgcatcaatttagatcataagcattactttctactagtccttgaaggcaaatcttgcactatattctacagttcaagttatacatccttatagtacaatcccacagcatctaca

SEQ ID NO: 86509 - DNA, 612 bp, Homo sapiens
gatgtaatgaaatatgttgataaagtctacatattgaaccatctttgcatgcctagaataaatcctttgttacacttgtgttttgatatattaatgaattaactaggctattttatctataatttgtgtacatataatcataataaagatcattttatagcatttttttctgcttgttttacttatcatgattaggttttgataggggagttttctccaacctcctctactgtctaggatatttaataactacactggaattatctggttttttaaaggttatccaaattcagcataaagtcatctaaatacatcttcttttaacagacattaatcatattgccagtaacttctatgataatagtagtagttttctatttattctgaggtcattttgcagtacttttmtgatagaaattcacatttttttcctaggtttgatctctgctccctctgaaacaagctacttcttgtctaaaaatgacttccaacatactatgcatcaatttagatcataagcattactttctactagtccttgaaggcaaatcttgcactatattctacagttcaagttatacatccttatagtacaatcccacagcatctaca

SEQ ID NO: 86510 - DNA, 772 bp, Homo sapiens
aggtttcaaattaactttgtcyaaattcatcagaggaatcattatctatggcagctatagtcttacaaaatgaatttcttaagtaataagacacaaaactcaaaactattccttgaattaccaaaatgtgatagagaaacataaaatgagcatatactcttaggaaaattacaataatagaatgtcttgatacaaggttgatgcaaaccttcaatttgtataaacacaatattgcaaagcacaataacatgcaaaacaattagatatgcctgtatatccttttataaaatatctcaagatgcttttgtgacttcttaaagaaatttcataaattaacaattttttaatgtaatttgggacaatgtcaatgccacatgtacataagtcattatacagggacagattcagaattacaggccataaagaattatgtttcttgggttcttagaacatataaaacaatataaactgttgcaaaatcaacaaaataagttgaaataaatttttaaaaattgatattcaaaggaattttattgaacatatgaatatgtgctacaggttctactccttaatacttatcatgaagttagaagggctagtcaaaaagaccaggataaaaatatcttatttatcagttcaaactaaaaaccaagctactttatatatctgttgtttagttttagattaacaataaactatgattgcccatgatcaagagaaaaaaactacaagatattcaatcaaaacaatctttagcttgacctaagataaa

SEQ ID NO: 86511 - DNA, 772 bp, Homo sapiens
aggtttcaaattaactttgtccaaattcatcagaggaatcattatctatggcagctatagtcttacaaaatgaatttcttaagtaataagacacaaaactcaaaactattccttgaattaccaaaatgtgatagagaaacataaaatgagcatayactcttaggaaaattacaataatagaatgtcttgatacaaggttgatgcaaaccttcaatttgtataaacacaatattgcaaagcacaataacatgcaaaacaattagatatgcctgtatatccttttataaaatatctcaagatgcttttgtgacttcttaaagaaatttcataaattaacaattttttaatgtaatttgggacaatgtcaatgccacatgtacataagtcattatacagggacagattcagaattacaggccataaagaattatgtttcttgggttcttagaacatataaaacaatataaactgttgcaaaatcaacaaaataagttgaaataaatttttaaaaattgatattcaaaggaattttattgaacatatgaatatgtgctacaggttctactccttaatacttatcatgaagttagaagggctagtcaaaaagaccaggataaaaatatcttatttatcagttcaaactaaaaaccaagctactttatatatctgttgtttagttttagattaacaataaactatgattgcccatgatcaagagaaaaaaactacaagatattcaatcaaaacaatctttagcttgacctaagataaa

SEQ ID NO: 86512 - DNA, 772 bp, Homo sapiens
aggtttcaaattaactttgtccaaattcatcagaggaatcattatctatggcagctatagtcttacaaaatgaatttcttaagtaataagacacaaaactcaaaactattccttgaattaccaaaatgtgatagagaaacataaaatgagcatatactcttaggaaaattacaataatrgaatgtcttgatacaaggttgatgcaaaccttcaatttgtataaacacaatattgcaaagcacaataacatgcaaaacaattagatatgcctgtatatccttttataaaatatctcaagatgcttttgtgacttcttaaagaaatttcataaattaacaattttttaatgtaatttgggacaatgtcaatgccacatgtacataagtcattatacagggacagattcagaattacaggccataaagaattatgtttcttgggttcttagaacatataaaacaatataaactgttgcaaaatcaacaaaataagttgaaataaatttttaaaaattgatattcaaaggaattttattgaacatatgaatatgtgctacaggttctactccttaatacttatcatgaagttagaagggctagtcaaaaagaccaggataaaaatatcttatttatcagttcaaactaaaaaccaagctactttatatatctgttgtttagttttagattaacaataaactatgattgcccatgatcaagagaaaaaaactacaagatattcaatcaaaacaatctttagcttgacctaagataaa

SEQ ID NO: 86513 - DNA, 772 bp, Homo sapiens
aggtttcaaattaactttgtccaaattcatcagaggaatcattatctatggcagctatagtcttacaaaatgaatttcttaagtaataagacacaaaactcaaaactattccttgaattaccaaaatgtgatagagaaacataaaatgagcatatactcttaggaaaattacaataatagaatgtcttgatacaaggttgatgcaaaccttcaatttgtataaacacaatattgcaaagcacaataacatgcaaaacaattagatatgcctstatatccttttataaaatatctcaagatgcttttgtgacttcttaaagaaatttcataaattaacaattttttaatgtaatttgggacaatgtcaatgccacatgtacataagtcattatacagggacagattcagaattacaggccataaagaattatgtttcttgggttcttagaacatataaaacaatataaactgttgcaaaatcaacaaaataagttgaaataaatttttaaaaattgatattcaaaggaattttattgaacatatgaatatgtgctacaggttctactccttaatacttatcatgaagttagaagggctagtcaaaaagaccaggataaaaatatcttatttatcagttcaaactaaaaaccaagctactttatatatctgttgtttagttttagattaacaataaactatgattgcccatgatcaagagaaaaaaactacaagatattcaatcaaaacaatctttagcttgacctaagataaa

SEQ ID NO: 86514 - DNA, 1050 bp, Homo sapiens
tggttagactcatggtctgggcttctttattttggataaattttattaaaatggactacctcaggtaaatgaaagaacgatagaaacacacatttatttaayagtgtccttacaagaacagagcagatttttagaacttgaattgataacctcttgtacttatatgtgtgacccatcttacactcaacttattatcctcaagcaaacggctcactttcagactatctgtccaagaacaatgttgcccagttttgctcgtccacaattttctcgttttctctattgctcctgcatgatctccacacccattgaaaaactggagggggaaaggaaaaaaaagaaaaaacactctgcaaaaagaaaaccataaagtcaccacacactgaacagaaccatttctgccaccattacttgcttaccttatcttccctagtcttagctccctcacctaaaagaaatagtataaaataaccttttagccctaaaaattctgtacctctataagacctcacagccacctctgaaagctattaatcagataaacaaaaactcacatacaaaaagcattttcattacaaatatacaacagaataagaatttagctcagtgcaaactagagctctgtaggggagcaagtagaagtttaccaagcaagcaatagcatcaatgtaattgttcagttccttttagcggatttaattataactattttagagcatggtaacatggcaaaataataggtacatctaattagttttttaaaaaacttaaaaatgatattttaaaataatttaaataatatacattatgaaacttattttcatgtaatttcgaatcaaattagaactagaatgagcataatactttatacatgaagatactgagactcaggctgattcagagctctttccatgctatctcttgtctgtaatgccaccttctataatttcaaattagtttctacatggtagaaatgcaaattaagtaaggagtgattatgatcaagcttacagctcaatctatacgttgaaaatgagtaagactgcatgc

SEQ ID NO: 86515 - DNA, 1050 bp, Homo sapiens
tggttagactcatggtctgggcttctttattttggataaattttattaaaatggactacctcaggtaaatgaaagaacgatagaaacacacatttatttaacagtgtccttacaagaacagagcagatttttagaacttgaattgataacctcttgtacttatatgtgtgacccatcttacactcaacttattatcctcaagcaaacggctcactttcagactatctgtccaagaacaatgttgcccagttttgctcgtccacaattttctcgttttctctattgctcctgcatgatctccacacccattgaaaaactggagggggaaaggaaaaaaaagaaaaaacactctgcaaaaagaaaaccataaagtcaccacacactgaacagaaccatttctgccaccattacttgcttaccttatcttcyctagtcttagctccctcacctaaaagaaatagtataaaataaccttttagccctaaaaattctgtacctctataagacctcacagccacctctgaaagctattaatcagataaacaaaaactcacatacaaaaagcattttcattacaaatatacaacagaataagaatttagctcagtgcaaactagagctctgtaggggagcaagtagaagtttaccaagcaagcaatagcatcaatgtaattgttcagttccttttagcggatttaattataactattttagagcatggtaacatggcaaaataataggtacatctaattagttttttaaaaaacttaaaaatgatattttaaaataatttaaataatatacattatgaaacttattttcatgtaatttcgaatcaaattagaactagaatgagcataatactttatacatgaagatactgagactcaggctgattcagagctctttccatgctatctcttgtctgtaatgccaccttctataatttcaaattagtttctacatggtagaaatgcaaattaagtaaggagtgattatgatcaagcttacagctcaatctatacgttgaaaatgagtaagactgcatgc

SEQ ID NO: 86516 - DNA, 1050 bp, Homo sapiens
tggttagactcatggtctgggcttctttattttggataaattttattaaaatggactacctcaggtaaatgaaagaacgatagaaacacacatttatttaacagtgtccttacaagaacagagcagatttttagaacttgaattgataacctcttgtacttatatgtgtgacccatcttacactcaacttattatcctcaagcaaacggctcactttcagactatctgtccaagaacaatgttgcccagttttgctcgtccacaattttctcgttttctctattgctcctgcatgatctccacacccattgaaaaactggagggggaaaggaaaaaaaagaaaaaacactctgcaaaaagaaaaccataaagtcaccacacactgaacagaaccatttctgccaccattacttgcttaccttatcttccctagtcttagctycctcacctaaaagaaatagtataaaataaccttttagccctaaaaattctgtacctctataagacctcacagccacctctgaaagctattaatcagataaacaaaaactcacatacaaaaagcattttcattacaaatatacaacagaataagaatttagctcagtgcaaactagagctctgtaggggagcaagtagaagtttaccaagcaagcaatagcatcaatgtaattgttcagttccttttagcggatttaattataactattttagagcatggtaacatggcaaaataataggtacatctaattagttttttaaaaaacttaaaaatgatattttaaaataatttaaataatatacattatgaaacttattttcatgtaatttcgaatcaaattagaactagaatgagcataatactttatacatgaagatactgagactcaggctgattcagagctctttccatgctatctcttgtctgtaatgccaccttctataatttcaaattagtttctacatggtagaaatgcaaattaagtaaggagtgattatgatcaagcttacagctcaatctatacgttgaaaatgagtaagactgcatgc

SEQ ID NO: 86517 - DNA, 191 bp, Homo sapiens
catttaagcctccaaattcttgaataatgaamttgttaagggaactaaatacacacatctagtttcaataaagttggcaatacttaagatattctgcataaataattttaaccttaagcattaacattaagggaatgattagaacacatttttcataacaaaaggggcatattgaccgttattttattagc

SEQ ID NO: 86518 - DNA, 544 bp, Homo sapiens
gtactttcaaatttgacatgtttcttacttctgatggctgaggaaaacaattcagggttatgaataactaatgctggcattgtgcctagggagaataatttctaggacttcataggtgatcatttttagtgagttttttttgcatatgtgtgtcataccaacatcatgtttcttctaagctatgataagcaatgtcataaagtccaaactgtgaaaggtgtaatgtctgatggggctacagagacattttatatgttttgtgattgtatattttattgtatttctttttttttttaatttatttttttattgataattcttgggtgtttctcacagagggggatttgccagggtcatgggacaatagtggagggaaggtcagcagataaacaagtgaacaaaggtctctggttttcctaggcagaggaccctgcggccttccgcagtgtttgtgtccctgattacttgagattagggattggtgatgactcttaacgagcatgctgcyttcaagcatctgtttaacaaagcacatcttgcacca

SEQ ID NO: 86519 - DNA, 773 bp, Homo sapiens
  misc_feature (1)...(773): n = A,T,C or G
annnnnnnnnnnnnnnnnnnnnnnnnnnnnnnnnnnnnnnnnnnnnnnnnnnnnnnnnnnnnnnnnnnnnnnnnnnnnnnnnnnnnnnnnnnnnnnnnnnncacctcttgttagaagacagtttggtaaagtgagtgcctggctttgcaggtattttagtgggagggtacaaaggagaaggtggtgaaaatggctgttgtgttaattgaaacagtgtcgcccacagccgcaggataaacatgtggagaaggtcattgatcaccttgactgaagcactgcagacaagataaagacagcctgatgcagaggaagattgaggactaaggggcttcatccacaggtgagctcacatctgaaagccgtgcttacatgaatgtgaaaatatgtcatccatggagttgcccacctcttgcatttaagaatcaaacttcaccctttctgtctccaaagcttcatgtttatatggtaaaaagaaaagaaaatcagtgtaactcagatgcctcccaagtttcatcccactcttctccaaagatagtgttcttccttgagtagtcttctcttttgtctactgtgcaacaagatgtataaccatcaccttccccaccagayaacatgctaggatgctttctgttaggatatgaagaagagtgatactgacatgctagtgataatactcttggagctgggaaacttgcagagtaaccaggcgtctactgacccaccacatttttaccttatgaccaaagacaagccctgtcataatagactgtcat

SEQ ID NO: 86520 - DNA, 663 bp, Homo sapiens
gaagccagagtcggtgttggtggagtcagatttttagcctgtaaggggatcacagaggtgcacaggacttttgacgagttactagagttctctgtccctctcaagttccttatttataacaaagcaataattctaacaaacatttcctgtagaagtggacttagggaactaatgtatacaagatagctctcactgttcctgagtatagaaagtactcagtgaaaactggttataattcagaaggggagaatcagatggagcaggctgccttgagagaagctatgagatctgtgacaaaacacgcccaggcagttggcaaccctgcttggagaacgctgaagaaataaacacatgactttattctccctcgctcttttatcgtcttctatcattggccagagccaactggaaaccaaagcagaaaggaaaaaagaaccartaagggtagacagcaagacagggaaggcagagagtgagttcatggggcaaacagaaaacatccagcacctcattgtggataaaattcaagaacaagtgttctctcagctgcaagtgatggaaactcaagttacacttgcttttgcaaaaatgagatgatttaccaactcatgccattggaaagtccagcagtagattgtgtaaggttcagtcgaggtgggatcc

SEQ ID NO: 86521 - DNA, 1032 bp, Homo sapiens
agatagatatgttactggttttgtacaagatgcaaaagataagtggtagtgaagccaccctggccacaggagaaagcacatgcaggagaaagcacattcatcaagagacagtacattttaggtttatttttttttttaatccaaggctttgggatcaagagaaggtaaggggctattgaacagttttgagtagtggcaccacagtgccagaaaaagataaactgggcttatagacgctgttataataaacattataaaatgaaaatgctaacaagtacaaagaaaatggatacataaaacttttattcaagttagctggctattctgttggagattcttakgagctgtgaatggaggcaggtaggggatgactagtgagaggaagctcaagtgaggcacatccttcctattagtaattcttagaagctacagattagcttgtcagatttaaaatgttagtcaaaataaatatacctgaggtttcttgattggaaaagcaggtcagatgtgactagaaatggaggtgggttttttttttttttaatggaggattttagaaggcaatagtgtagaatttagagctagaaaggatcttacacatgaaaatacgaaaagtagactttgtaggtttatctaagatttttatttagtgacagagctagaactaggatccagggtttctctttcatggttagttcagctaggaagaatatttaaagaagccagggtaattaagatgaaccttgataggtataggaaagaggtaagagaacaaaaatccagtaggtaagaagatggaagaactttaaaatcatttttataagaaatagatattatttatttagaatttatgagatgtttcacagagggcttgaagtgggaaaatcattgaaattatatagaccatataaatacttctataaaccatttgttaaatttgattctataattcattgccattctaattattcaatcaatataattttttattaataataaaccttcaacgctttaggggaccatgggcccatt

SEQ ID NO: 86522 - DNA, 1032 bp, Homo sapiens
agatagatatgttactggttttgtacaagatgcaaaagataagtggtagtgaagccaccctggccacaggagaaagcacatgcaggagaaagcacattcatcaagagacagtacattttaggtttatttttttttttaatccaaggctttgggatcaagagaaggtaaggggctattgaacagttttgagtagtggcaccacagtgccagaaaaagataaactgggcttatagacgctgttataataaacattataaaatgaaaatgctaacaagtacaaagaaaatggatacataaaacttttattcaagttagctggctattctgttggagattcttaggagctgtgaatggaggcaggtaggggatgactagtgagaggaagctcaagtgaggcacatccttcctattagtaattcttagaagctacagattagcttgtcagatttaaaatgttagtcaaaataaatatacctgaggtttcttgattggaaaagcaggtcagatgtgactagaaatggaggtgggktttttttttttttaatggaggattttagaaggcaatagtgtagaatttagagctagaaaggatcttacacatgaaaatacgaaaagtagactttgtaggtttatctaagatttttatttagtgacagagctagaactaggatccagggtttctctttcatggttagttcagctaggaagaatatttaaagaagccagggtaattaagatgaaccttgataggtataggaaagaggtaagagaacaaaaatccagtaggtaagaagatggaagaactttaaaatcatttttataagaaatagatattatttatttagaatttatgagatgtttcacagagggcttgaagtgggaaaatcattgaaattatatagaccatataaatacttctataaaccatttgttaaatttgattctataattcattgccattctaattattcaatcaatataattttttattaataataaaccttcaacgctttaggggaccatgggcccatt

SEQ ID NO: 86523 - DNA, 561 bp, Homo sapiens
cttgggtggagacttggagggttgtgcacctggtacactccctcagtgagacaccatggtgaggggtctgccattcgtcgtaaatgggagacgaagaaagagcctacagcttcattacacacacaatctctgtccattcccatttagcgaaggcatgatactgagcccatgggaactgataccctaagaagcctttacccctgaaggtcctcagatcccgtttgaagattactaaattagaccaccccctgaggggaaagcattggctgaacatccagagaaaagttgacaccccacatatagtataaccaattttcctacccttgcgaggtgcaaaatggaggttctttctggtcataaagcgaagactattatacacacacacacacacacacactgcacacaytgtagggaggaaaactttcttccctaccaccttatgtcctagagcatggaacctggagaaaagtgtattacacatgtgcaagcacctgagagagagcaggagagagggcgggaatgaaggacagacttcccaaacagctaagggtaaggatttag

SEQ ID NO: 86524 - DNA, 1259 bp, Homo sapiens
ttttttattttttgagatgaagtctcgctctgtcgcccaagctggagtgcagtggcgcaatctctgctcactgcaagctccgcctcccgggttcacgccattctcctgcctcggcctcccgagtagctgggactacaggcgcgtgccaccacgcccggctaatttttttgtatttttagtagagacaggatttcaccatgttagccaggatggtctcgatctcctgacctcgtgatccgcccgcctgggccttccaaaggcatgtaatctcatgcctgggattacaggcatgagccactgcacctggccagcatttatttttttttgagatgggggctggatggtgggggggaggggcggtcttgctctatcgcccaggatggagtgcagtcactacctaggctggtcttgaactcccggcttcaagggatcctcctgccttagtctcccaaagtgctggaattataggcatgagcccccacacctagcctaacctagcrtatgtcagttgtcttccactgtcctcttcatgtatattatgatccagccacaccaaactgtttactgtctcctatatatattgagcttttatgagagcctaaagtgcacgtaaacaagctaatattaagaatttatgtttttaaaaaagttcaaggttaatatgccattcagttcaattgcctatgccgtatatagtatttaaaaatttttcataatgctgatcttgaaacactatagcacttgaaacagcttctgactcagtaagactaagttacttgtatcattgttttgtaggtatttgaattctgtgaaaacctatgcatgcaataaatttttcaccgcaaatacagctatctgctagaagtgccatgagaacaaggcccatatttgtcttgtcacacctatattctcagtgctagcatagtacctaatgggtgcttaatagttattaaatgaataaactatgattaggttaatcaggacatccagtctctcaaacattatgaatgaacttggatctagctcattcactctcgaaatatttatttggtacctacatgtgaagattcctgtgtttattagagagcaatgtgtaacatttgcctttgcagtactagctttttgaaaatacctgaagatgagggatcatgttttactttaccagacaccagccctctgctaggtgcaattaagtggcatatgatcacctatgcacacgattatctgaaatactcctctccacattgctttctttgagc

SEQ ID NO: 86525 - DNA, 1259 bp, Homo sapiens
ttttttattttttgagatgaagtctcgctctgtcgcccaagctggagtgcagtggcgcaatctctgctcactgcaagctccgcctcccgggttcacgccattctcctgcctcggcctcccgagtagctgggactacaggcgcgtgccaccacgcccggctaatttttttgtatttttagtagagacaggatttcaccatgttagccaggatggtctcgatctcctgacctcgtgatccgcccgcctgggccttccaaaggcatgtaatctcatgcctgggattacaggcatgagccactgcacctggccagcatttatttttttttgagatgggggctggatggtgggggggaggggcggtcttgctctatcgcccaggatggagtgcagtcactacctaggctggtcttgaactcccggcttcaagggatcctcctgccttagtctcccaaagtgctggaattataggcatgagcccccacacctagcctaacctagcgtatgtcagttgtcttccactgtcctcttcatgtatattatgatccagccacaccaaactgtttactgtctcctatatatattgagcttttatgagagcctaaagtgcacgtaaacaagctaatattaagaatttatgtttttaaaaaagttcaaggttaatatgccattcagttcaattgcctatgccgtatatagtatttaaaaatttttcataatgctgatcttgaaacactatagcacttgaaacagcttctgactcagtaagactaagttacttgtatcattgttttgtaggtatttgaattctgtgaaaacctatgcatgcaataaatttttcaccgcaaatacagctatctgctrgaagtgccatgagaacaaggcccatatttgtcttgtcacacctatattctcagtgctagcatagtacctaatgggtgcttaatagttattaaatgaataaactatgattaggttaatcaggacatccagtctctcaaacattatgaatgaacttggatctagctcattcactctcgaaatatttatttggtacctacatgtgaagattcctgtgtttattagagagcaatgtgtaacatttgcctttgcagtactagctttttgaaaatacctgaagatgagggatcatgttttactttaccagacaccagccctctgctaggtgcaattaagtggcatatgatcacctatgcacacgattatctgaaatactcctctccacattgctttctttgagc

SEQ ID NO: 86526 - DNA, 1259 bp, Homo sapiens
ttttttattttttgagatgaagtctcgctctgtcgcccaagctggagtgcagtggcgcaatctctgctcactgcaagctccgcctcccgggttcacgccattctcctgcctcggcctcccgagtagctgggactacaggcgcgtgccaccacgcccggctaatttttttgtatttttagtagagacaggatttcaccatgttagccaggatggtctcgatctcctgacctcgtgatccgcccgcctgggccttccaaaggcatgtaatctcatgcctgggattacaggcatgagccactgcacctggccagcatttatttttttttgagatgggggctggatggtgggggggaggggcggtcttgctctatcgcccaggatggagtgcagtcactacctaggctggtcttgaactcccggcttcaagggatcctcctgccttagtctcccaaagtgctggaattataggcatgagcccccacacctagcctaacctagcgtatgtcagttgtcttccactgtcctcttcatgtatattatgatccagccacaccaaactgtttactgtctcctatatatattgagcttttatgagagcctaaagtgcacgtaaacaagctaatattaagaatttatgtttttaaaaaagttcaaggttaatatgccattcagttcaattgcctatgccgtatatagtatttaaaaatttttcataatgctgatcttgaaacactatagcacttgaaacagcttctgactcagtaagactaagttacttgtatcattgttttgtaggtatttgaattctgtgaaaacctatgcatgcaataaatttttcaccgcaaatacagctatctgctagaagtgccatgagaacaaggcccatatttgtcttgtcacacctatattctcagtgctagcatagtacctaatgggtgcktaatagttattaaatgaataaactatgattaggttaatcaggacatccagtctctcaaacattatgaatgaacttggatctagctcattcactctcgaaatatttatttggtacctacatgtgaagattcctgtgtttattagagagcaatgtgtaacatttgcctttgcagtactagctttttgaaaatacctgaagatgagggatcatgttttactttaccagacaccagccctctgctaggtgcaattaagtggcatatgatcacctatgcacacgattatctgaaatactcctctccacattgctttctttgagc

SEQ ID NO: 86527 - DNA, 755 bp, Homo sapiens
cttgagcccagaagttcaaggttgcagtgagctgtgatcacaccactgcatccctgcctgggtgacagagcaagaccttgtctgtaagaaaaaaataaaaagtaaaaaacgaaaataaattcaattacatttcttcattctatataaacataaaatgaaagagaagtggtagacagttcccacataatttcatttggcakcaaaagtaaatatatggtgctcacttcagcagcacatacactaaaaccataacagttcagagaggactagcatgcccctgcagaaggatgacacacatttgcagtgttacatattttctttaaaaaagtaaatatggctgggcgcagtggctcacccctgtcatcccagcactttagaaggccaaggcgggtggataacctgaggtcaggagtttgagaccagcctggccaacatggtgaaaccccatccctacaaaaatacaaaaaaaaattagccgggcatcatgacgggggcctgtaatcccagctactcgggaggctgaggcgggagaactgcttgaacctgggaggcggaggttgcagtgagccgagatcgcaccattgcattcccgcctgagtgacagagcaagactctgtctcaaaaaaaaaaaaaaaaaaaaaaagtaaatatatgctattttaaaatgctattttaaaagaagcaattgtgcataaaaagaacatttaagaatgattaactgtactttcacacttcacagaaatgtctcagatcaa

SEQ ID NO: 86528 - DNA, 1184 bp, Homo sapiens
tactgccaaatcgctttttaaagagtacttttctaaaattttttttcttttctattgtcataaacactcattcaggagattatgaatggtagttataattgaagtttaaattcaagttataatttaactcaacagtaaacactattaaataaagtttatgagaagactatatcaagaaaaagctttgatcgttatttgaaatggaagtgcactgggtttcaccaataggttttcctctgttcccctgattcccagagttggaagctctggggcagtcttacaggttatgctaagtatactttgctccagtgccccctagtgctggtcctgtggaagtaaccttcattttttctttgtagcagaaaacatccttcttccttcagctccttctggacatacacaaagacatttaaagagccaggcaaataagagttagggctaaaatgggccgggcatsgtggcttacgcctgtaatcccagcactttgggaggccgaggcgggcagatcacaaggtcaagagatcaagaccatcctggccaacatggtgaaaccctgtctctactaaaaatacaaaagttagctgggcatggtggcgtgcgcctgtagtcccagctacttgggaggctgaggcaggagaatcgctttaacccaggaggcggaggttgcagtgagccaagattatgccactgcactccagcttggcgacagagtgagactctgtctcaaaaaaagaaaaaaaaaaaaaaaaaaagagggctaaagtaatgccctattactttctttggcctgcggatctagaatttatccttattttttttctctcctgggaggagctgtcctgctttctgtagtcttatatttgtgctactctctctgccttaccctgcatgtttctattctagactgcaatagggagggcctgggccaaacatccctacctctggaccctcaccctatttcaaatcctttatgtcaaagaaagtcaatataccctaggtagctacaagtccaattattattgaggtatttagctgtaaaatttgtccttccatcactgtcttgactaaaggttctcctctgaaaattccaacttgttgacctgcaaacagactggagaaaagagcagtaagggtgaaggtgggactgatagtggccaagccccatgagaagacatgtttaacct

SEQ ID NO: 86529 - DNA, 724 bp, Homo sapiens
ggtggcataagaatcacttgaaccctggaggtagaggttgccatgagccaagatcgtgcctttgcactccagcctgggtgacagagctagaccctgtctcaaaaaaaaaaaaagtaaaataatgcaacagaaagcttgataaactaataaaaacagagcaaaaaatgaaagaggaaattcactatccagacatttaaaaattctacaaatgaataagaaaaacacaacccactatatcaatggacaaaaaaacaggcttttgaaacagtatcggctgggcgtggtggctcacgcctgtaattccaacactttgggaggctgaggtgggtggatcacgaggtcaggagatcgagaccatcctggctaacatggtgaaaacccrtctctactaaaaatacaaaaaattagccaggcgtggtggtgggcgcctgtagtcccagctactcgggaggctgaggcaggagaatggcaggaacccaggagacggagcttgcagtgagtgggcaacagagcaagactccgtctcaaaaaaaaaaaaaaaaaagggtatccacatggttcatacacatgaagtgatgctcagtagtctcattggttatcagggaactgtaaattacttcttcaaagaaatactggctgggcacagtggctcacacctgtaatcccagcacttcgggaggccgaggtgggtaaatcacaaggtcgggagttcgagaccagcctg

SEQ ID NO: 86530 - DNA, 656 bp, Homo sapiens
ctgcatgaccttaagcaaattactttctgtgcttcagtttcctcctctataaaatggtgatagtaataataatagctatctcatgggttatgagaattaaatatgggaatattatctattttacctagggtttgattcttgctaaatgcagaacctctccagggattaaacagacagagaggacagagctggctttttaaatagtggaagaaacaagtgttggtgctaaacaggtggttagagaaagtgttccatgcttgatgagccagtcaagaagtacagttgtgaggctgggtgcagtggctcatgcctacgatcccagcacttcgggaggccaagttggaagtatcacttgaygccaggagttgaagaccaccctgggcgacaaattgagacctcacctctccacacacacacacaaaaactacaactgtgaggaactagaaatgtaaatgcgaaacaaaaacagcaggatctcagagtacggtggtgtgcatttacctcagctagcaatcctactgtcttgcaaatggcatcagatttcccacgggtcatgtggtaagaaagtatcagtgttaacccaggccaaggaatggtataaatgtggcctctgacttactctttgcctaatagttatccagagtagaaactaacat

SEQ ID NO: 86531 - DNA, 661 bp, Homo sapiens
caggaattatgactgttccatgacttgagccccaaaactccggacctgaattgccagatgcacccttgatatctccatgtggcccatactcagctctctcaaactcaacatgttccagatggaactggtcttcttccctcaagacctggatttctcctgggctctggatttaagcagatggctgttcccattaccgaatcttctagaccagaagctggacattattcaaatttcttccttcttcatcacaccaataacaacagaaataagaaaactgtcattagctgagttgcttcaytcctggtatggtaacaaatgcttcacatttagtgtataatttacctctcatataactgtgaagttggtggtattattatccccactgtacagataggaaaactgaggctcagaaagaaggggaagctttccaggagacgttctgacaaaacctggtttccaacctagttgattgggcctttctctttcatcccctgtgactctctctcctcagctaagttttttcaaaggcacccagtaggtgttcagagaaatgtgctggattgaactgaactaaccttctagagggtgttatgaactgcatctccgccctgtccagttggaaactgttgccaacacaaggtcctctttggagaggaagggg

SEQ ID NO: 86532 - DNA, 661 bp, Homo sapiens
caggaattatgactgttccatgacttgagccccaaaactccggacctgaattgccagatgcacccttgatatctccatgtggcccatactcagctctctcaaactcaacatgttccagatggaactggtcttcttccctcaagacctggatttctcctgggctctggatttaagcagatggctgttcccattaccgaatcttctagaccagaagctggacattattcaaatttcttccttcttcatcacaccaataacaacagaaataagaaaactgtcattagctgagttgcttcactcctggtatggtaasaaatgcttcacatttagtgtataatttacctctcatataactgtgaagttggtggtattattatccccactgtacagataggaaaactgaggctcagaaagaaggggaagctttccaggagacgttctgacaaaacctggtttccaacctagttgattgggcctttctctttcatcccctgtgactctctctcctcagctaagttttttcaaaggcacccagtaggtgttcagagaaatgtgctggattgaactgaactaaccttctagagggtgttatgaactgcatctccgccctgtccagttggaaactgttgccaacacaaggtcctctttggagaggaagggg

SEQ ID NO: 86533 - DNA, 628 bp, Homo sapiens
tggcaagtggaagaagcccagatgctgagggagaaccttctatttatctgctcattcatttattcaggcattcattttttaaataagcatttgttgcatactgattgtgtgtaaggtccatggactccacctttgagcacgcccatcctgtgttattttgaggtgtgatagattctatgtcagaggtgarctcagaaaacataaaactaactcacctgggaatggaggcagcaaagtcttcccagaggagctggtacccccgaagtcctctgttctgtcctctccccaccatgtcccctgccgtctcctggggacacccctgttcctcaaactgcctaagaggtcaaattcagttgctggattcatgtctcttttaccttcaatttcacccaaatcaaaagccaaaaggtcaacaaagcagaggtgtcagctgaagtgcttttgaatttggttcagggaggtcgatgaggaggtttgcttctttctttggctatcacccaagaaagaaaagatgggagaaaggggagtgggctttgctgacattgaggacaggggctggaagcaagggggagggaaacatcttgaaagagacaaaagcaggctccatgatatcctggtttttggatcc

SEQ ID NO: 86534 - DNA, 639 bp, Homo sapiens
ctctgttatgtaacacttatattttcttcaatgcaccatttattttattttgtttgcttattatcggtgccccaggaaaatgtaaacccatgagggtaagggccatgtctgtctaatcccttgtcctacttttctgtggcagacagtttgtgggccccacctagattcccttaacattcactatttccatacatgccagtggcttcttactgcaaacattgtgactctgccctgggggatttctttgcctgcaggagtgccaggttcacatactggacaggctggtaggtcagagagtcatcccctgggagtactctttgattcgtgagagatggaagctagtgaataaatatttcagcttttcttgcctctcacctgggctgactctgagacatttttctgagaaatgttttatgcagtctttccgaggtctgcagtgggaccaaatgccagctgcccacactagcaacatgctttcaaacaccrtattggttgttatcttgccctgtctcattttgtcatccaccttccaaattactttcactcacaaccttttattgggtctgcttctggataaaaaaattcaagctgagacaccctatggctcagaaacgttcctggggatacaactggatccac

SEQ ID NO: 86535 - DNA, 1293 bp, Homo sapiens
gctgaggactgatccttcacatattccaacctttcctcctctttgtgtgctgctggaggaggaagagggtgtgcacacgcttggacatgtgtttaatcccctctccagctgcaaaagtcaggagtctctgtgccctcaaaaatatccccarcaactggaagaccataaccaaccacagcctttaaggaactcccagagcagggacttctggatcttctctcaaacttccctgtctctaggcagagatctacactggtgaaattaagggaagggaaaggaatcaagatccagtccagctggattatgtggactcctgccccaggcagccacatatttcccaccaccaccacccacccataccaaagttgttgggggagactttgtggacagattcactggactttgttagtgtagaaccagcctctatccttgaggtctgtcatagattacaagatgcaggggcctgaagaaacaaaagtgttagaaattggtgctttctggggaaaatgggatccactgggattgagatccaacagacatttcctaaatagaaaacattgacacggttgtcccaaaccctagccctgttcctctgctgcccagtgaccttggttcaacacacacaaacacaaacacagacacaaacacacagcctctaaatgcaggaagagagtttcaaacaaatacaggagatttgttttgtttgcctttctttctttctctttctttctttctttctcctttcaaggtaaaaggggtgtatttacacttctcgtgacataatggagatgaaagaaaattagaaaattatgtggaaattttggcccatcttctcatttcccttatacacttaattatctggaaatttgggaaaagttgagacatctagtgtgtggatgaccagagagattgctttaattctctaatttgggaaacctggtggggctgcctctgaagctcttcttccagccatgaacatactcagaagcccaagaagctcagagaagatgccaaggtaaccaccactctcatcaccacacccatctctccctcccttctccatcacaaccttgggagcattgtggaatttgccagggaaaaataaatccagaagtactgtatcagaaaaattcaggagagtgagcaggcatccagccacagctggagagcagaacactgtgctaatacaatctggacggttgtccccataacagcagatgttgactacctggcaaatccaggaaattctgggaaattcagtataacatttggataattgacagttttgcctag

SEQ ID NO: 86536 - DNA, 1293 bp, Homo sapiens
gctgaggactgatccttcacatattccaacctttcctcctctttgtgtgctgctggaggaggaagagggtgtgcacacgcttggacatgtgtttaatcccctctccagctgcaaaagtcaggagtctctgtgccctcaaaaatatccccaacaactggaagaccataaccaaccacagcctttaaggaactcccagagcagggacttctggatcttctctcaaacttccctgtctctaggcagagatctacactggtgaaattaagggaagggaaaggaatcaagatccagtccagctggattatgtggactcctgccccaggcagccacatatttcccaccaccaccacccacccataccaaagttgttgggggagactttgtggacagattcactggactttgttagtgtagaaccagcctctatccttgaggtctgtcatagattacaagatgcaggggcctgaagaaacaaaagtgttagaaattggtgctttctggggaaaatgggatccactgggattgagatccaacagacatttcctaaatagaaaacattgacacggttgtcccaaaccctagccctgttcctctgctgcccagtgaccttggytcaacacacacaaacacaaacacagacacaaacacacagcctctaaatgcaggaagagagtttcaaacaaatacaggagatttgttttgtttgcctttctttctttctctttctttctttctttctcctttcaaggtaaaaggggtgtatttacacttctcgtgacataatggagatgaaagaaaattagaaaattatgtggaaattttggcccatcttctcatttcccttatacacttaattatctggaaatttgggaaaagttgagacatctagtgtgtggatgaccagagagattgctttaattctctaatttgggaaacctggtggggctgcctctgaagctcttcttccagccatgaacatactcagaagcccaagaagctcagagaagatgccaaggtaaccaccactctcatcaccacacccatctctccctcccttctccatcacaaccttgggagcattgtggaatttgccagggaaaaataaatccagaagtactgtatcagaaaaattcaggagagtgagcaggcatccagccacagctggagagcagaacactgtgctaatacaatctggacggttgtccccataacagcagatgttgactacctggcaaatccaggaaattctgggaaattcagtataacatttggataattgacagttttgcctag

SEQ ID NO: 86537 - DNA, 689 bp, Homo sapiens
  misc_feature (1)...(689): n = A,T,C or G
cttatcctttactcgttacaaaaaaaaaaatactgactcttgatacctggatttttctcattcttttcagactcctcaatgcctaattgaacgggattttgattcgctgttctaatatttcacattcaatctcatggttgaaaacacctttctcatttgccacagagcagttgcaattctgcagtgatttacagttttgcaaaagtggagtctatttcctaatttaggatgggttaattaaaggtattatgcacgtacaaaatggaatacgttctgacatctctgatctctctctctctctccattaagtaaaagcaaacaaaaaaacaggttacaaactagtttgaatgcattgtcttaaaatgtctgtatgttttattaaaataacaaatgcatatgccttctgactcaggaatttcatttccagagatacttgcaaaattgcacaatgatatttctacattacagcatcttttgggataacataagattggaaacattttaaatgcccaacagtaggagcctgattaaagaaatctcgaattcccaaaagtggggggttcacacytgtaatcccagcactttgggaggcagaggtgggaggatcacttgaacccaagagttcaagacttccctgggcaacatagtgagcccctcccctgttctangaaaanaaacaaaaaccaaaa

SEQ ID NO: 86538 - DNA, 689 bp, Homo sapiens
  misc_feature (1)...(689): n = A,T,C or G
cttatcctttactcgttacaaaaaaaaaaatactgactcttgatacctggatttttctcattcttttcagactcctcaatgcctaattgaacgggattttgattcgctgttctaatatttcacattcaatctcatggttgaaaacacctttctcatttgccacagagcagttgcaattctgcagtgatttacagttttgcaaaagtggagtctatttcctaatttaggatgggttaattaaaggtattatgcacgtacaaaatggaatacgttctgacatctctgatctctctctctctctccattaagtaaaagcaaacaaaaaaacaggttacaaactagtttgaatgcattgtcttaaaatgtctgtatgttttattaaaataacaaatgcatatgccttctgactcaggaatttcatttccagagatacttgcaaaattgcacaatgatatttctacattacagcatcttttgggataacataagattggaaacattttaaatgcccaacagtaggagcctgattaaagaaatctcgaattcccaaaagtggggggttcacacttgtaatcccagcactttgggakgcagaggtgggaggatcacttgaacccaagagttcaagacttccctgggcaacatagtgagcccctcccctgttctangaaaanaaacaaaaaccaaaa

SEQ ID NO: 86539 - DNA, 689 bp, Homo sapiens
  misc_feature (1)...(689): n = A,T,C or G
cttatcctttactcgttacaaaaaaaaaaatactgactcttgatacctggatttttctcattcttttcagactcctcaatgcctaattgaacgggattttgattcgctgttctaatatttcacattcaatctcatggttgaaaacacctttctcatttgccacagagcagttgcaattctgcagtgatttacagttttgcaaaagtggagtctatttcctaatttaggatgggttaattaaaggtattatgcacgtacaaaatggaatacgttctgacatctctgatctctctctctctctccattaagtaaaagcaaacaaaaaaacaggttacaaactagtttgaatgcattgtcttaaaatgtctgtatgttttattaaaataacaaatgcatatgccttctgactcaggaatttcatttccagagatacttgcaaaattgcacaatgatatttctacattacagcatcttttgggataacataagattggaaacattttaaatgcccaacagtaggagcctgattaaagaaatctcgaattcccaaaagtggggggttcacacttgtaatcccagcactttgggaggcagaggtgggaggatcacttgaacycaagagttcaagacttccctgggcaacatagtgagcccctcccctgttctangaaaanaaacaaaaaccaaaa

SEQ ID NO: 86540 - DNA, 1041 bp, Homo sapiens
ctaataagcttacagaagctatctctgggtggtggaattaggttctttaaatttttttcattgttttattttatttctcagttttctacaggaagcataactcaactgaacaataaatatcatgaagaaatcttagagtaaggggccataatattttgagagaagggtacatttacatgcaagctgtgtatagaactagaggtcccttaaagcagggtggtttgttttaaaggttcaatctcccactccactagtcagtcagtcatcctaataaaaagtggatgttggtgacctagccacatgtatttccttctgctatactgagctatcactttttgcacctgaatttccttacatagggatcatgacattttagtagatctcaagtttttccaaatcaatcactaagtgggttacatggtatattagccagctggtgctgcaagaatgctttcagcattcaacagttccctccctcaccaccaaattcaatggtttaaagtaacaagcatttatttcttgctcaagaatccaggagctgactgtagttcagctgctcatggctgggctcagctgggagggctccatttccagattgggatagggtctgatttatcatctctctcattccttcttggaccgtggccactcaggayatgttcttaacatgaagaatgggagaagcataagaagcaagcatttatagcctctacttgtgtcacattccctaacatttcattggccataccaggtcacatgccaaaactcatgaaagtggagcagagtctacccattctagtgggaaatcttgcaaagtcacatgtcaaagagtgtggatgtgtatatcaagtatagggaacttatattgctaataacgactccatctatcacatgtgggaaacccagtatctgtccacggctaactttcacttttccttgtctttgtcaaagatcacaacacttcagagacatcaaaggttcctccattcagattacagggccttagccatatgtatttggtcgtgtcctgcatatccatga

SEQ ID NO: 86541 - DNA, 575 bp, Homo sapiens
ttagatataatacacacacacacatacagaaagctgcagcgagagagagagagagagagagggagagtgagagagtataattagctcctgggcatgaggggaaatctcaaaaattacccaggaatgagggaaaaatgtcattctagggttagtcctttgaatttatttaataattacatctacaaagagaacgctaatttaccccatcagtgaacattttggaaactatttatttggttttaaaaatataatctttaaaacatcctcaatatgcacaagagaaggggaaagataaacacagatgctaaagaaacaaactgaattgtgcttttttcagttcttctagtcatttttgcaaattccttcaaagtatgcatttagatctttttatgttctgattacattcatcattaaaacattgggtaaaatccaccactgctaccattgtggaactgsagatttatgctagctgcaagaaatacgtttttggaattctttggttgcatgaagaattcagtttgcccactggcactgcaagcaccaataaaaggaattggggagcattgtagtgagga

SEQ ID NO: 86542 - DNA, 652 bp, Homo sapiens
agattactttctatggatagatttctagaagggaaattactaaataagagcctgaatgaatattttatggtcttgatcatattgccaatttgctttccagaaaatgtgtatcaatttatagttctctttgcagcatatcttttaaaattttttaccatattgaattaattttaatatgaacttttttaaaactttgctaattttattartgataaaagattattagtagtgtttccatttctttaattgctaatgagattgaaaactttcttacaaagttttcagttgtttctactctatgaattatctgtttatgaactttgtaattctttaattatcttagtgttttcaacaatgtacagttatttaattgaaagttgtaatttatgcaatctatttaatctgtataaatatttccctatgcgtttgcttttaaattttttagtattgtttgaaattcaacagtttaattttcaagtagtccaatctgtttgctttcccttgccattttttctaatgcttctctacttagaaagttgtactacattttaaatcagataaatgttatcctatattttcctctagatttttttcttcttatctctctttctaacatttatcttatgaattcctctgctttttattttgacat

SEQ ID NO: 86543 - DNA, 652 bp, Homo sapiens
agattactttctatggatagatttctagaagggaaattactaaataagagcctgaatgaatattttatggtcttgatcatattgccaatttgctttccagaaaatgtgtatcaatttatagttctctttgcagcatatcttttaaaattttttaccatattgaattaattttaatatgaacttttttaaaactttgctaattttattaatgataaaagattattagtagtgtttccatttctttaattgctaatgagattgaaaactttcttacaaagttttcagttgtttctactctatgaattatctgtttatgaactttgtaattctttaattatcttagtgttttcaacaatgtacagtyatttaattgaaagttgtaatttatgcaatctatttaatctgtataaatatttccctatgcgtttgcttttaaattttttagtattgtttgaaattcaacagtttaattttcaagtagtccaatctgtttgctttcccttgccattttttctaatgcttctctacttagaaagttgtactacattttaaatcagataaatgttatcctatattttcctctagatttttttcttcttatctctctttctaacatttatcttatgaattcctctgctttttattttgacat

SEQ ID NO: 86544 - DNA, 652 bp, Homo sapiens
agattactttctatggatagatttctagaagggaaattactaaataagagcctgaatgaatattttatggtcttgatcatattgccaatttgctttccagaaaatgtgtatcaatttatagttctctttgcagcatatcttttaaaattttttaccatattgaattaattttaatatgaacttttttaaaactttgctaattttattaatgataaaagattattagtagtgtttccatttctttaattgctaatgagattgaaaactttcttacaaagttttcagttgtttctactctatgaattatctgtttatgaactttgtaattctttaattatcttagtgttttcaacaatgtacagttakttaattgaaagttgtaatttatgcaatctatttaatctgtataaatatttccctatgcgtttgcttttaaattttttagtattgtttgaaattcaacagtttaattttcaagtagtccaatctgtttgctttcccttgccattttttctaatgcttctctacttagaaagttgtactacattttaaatcagataaatgttatcctatattttcctctagatttttttcttcttatctctctttctaacatttatcttatgaattcctctgctttttattttgacat

SEQ ID NO: 86545 - DNA, 1854 bp, Homo sapiens
tgtaatttaaccaaatattatgcaaactaagaaatatgaggctaaaaaagagttatttctatgaaaattaaggtgaatgctttggaaaagctccatgatggctgatagcttaaagaaaaattgcagtcaaattaggtgagcaccaagaccaagaaaaaaaaaatcctttacatttagatgtattttacattgacattaccttaccatccaccactcaatgaagctgaaactggaaactgtgaatggtgttctatggctaaaagacaaacctaagccctaaccaacaacaggtccacccgtaaagcagaggccttgggtcccacattaaaagagaattcagtgaaagtacagtgatatgtttcttattttattctttattatttttattcttatttatttattttgagacagggtctcgctctgtcacccaggctgaagagcagtggcaccatcagggctcactgcagcctggacctccctggttcaagtgatcctcccgtctcattgttctgagtagctgggattacaggtgtgaaccacaatgcctggctaatttttgtatttttttgtagatacggggttttgcaatgttgctcaggctggtctccaattcctgggctcaagcagtctgcccgctttggcctcccaaagtgctgggattacaggcatgagccactgcgtacggcccatttatatgttttaaggtgtcttygcatcacttttataatttttggctttaactgacttcactgattaaccgatcacttgtctcaattacctcaagaggccaccttctctagaaatatcttgattgcatccttaggcctattcttttcctgttctgctctttccctgagcaattaaatttccaaccagagcttcaatatagtctttaaacaaattaatacaaagtccgcaagctctttgaaatgaggatccctcgtttattcatcactgcatcacccatcttgcactctgtccttgcactgtgccttgcacacagtaactatttttaaaaatgttgagatttaaactgtatttaagaattagttataaattacaacccaagaattagaagtcagtcttgaatgaatgtgtcacaagaacatttctttgttttgcaatcataatttaccccttctcagcaactaaagaagctcgcttgacaagtataattggaaaattatcattttaaattgggtagctgaagcttaattttaaaaagtaaatggtagtttttctgaaaagtatgaaactttctgaaggtaagcaaatggtccaatccattttaggtggacaatgacaagtaccactacggcactgagttttacgtaaagtgagaagtttcgcttctcaagtgttgtggattaatttcttaggcaattttctctgagcattgcaggagagctatggttatcctttccattttacagatgaaagaattaatggtcctaacagttacttactcttgaccttcaagatcatttgtaacttcaatggaatttgtgccttgatgctacacatcttgagtcatcttctaaattcttctaaggctcgttagaattgtgcaggagaatcagggacaaactagcaaaaagtcaagccacagttgtcacttatctactctgcaggcagtctagaattatgccattggagttcagtcttttcatttaatagtttctctcaaaattgttgggtagaagactaagttagtaattcagttttaatatcttcctgttagttaacatacccagttttctttcctctgattaagcagctaaaggaaaggaagagtcattttagattaggctactttgtcttgaagaaggcaagtccaagtttgtgtatatgagt

SEQ ID NO: 86546 - DNA, 1854 bp, Homo sapiens
tgtaatttaaccaaatattatgcaaactaagaaatatgaggctaaaaaagagttatttctatgaaaattaaggtgaatgctttggaaaagctccatgatggctgatagcttaaagaaaaattgcagtcaaattaggtgagcaccaagaccaagaaaaaaaaaatcctttacatttagatgtattttacattgacattaccttaccatccaccactcaatgaagctgaaactggaaactgtgaatggtgttctatggctaaaagacaaacctaagccctaaccaacaacaggtccacccgtaaagcagaggccttgggtcccacattaaaagagaattcagtgaaagtacagtgatatgtttcttattttattctttattatttttattcttatttatttattttgagacagggtctcgctctgtcacccaggctgaagagcagtggcaccatcagggctcactgcagcctggacctccctggttcaagtgatcctcccgtctcattgttctgagtagctgggattacaggtgtgaaccacaatgcctggctaatttttgtatttttttgtagatacggggttttgcaatgttgctcaggctggtctccaattcctgggctcaagcagtctgcccgctttggcctcccaaagtgctgggattacaggcatgagccactgcgtacggcccatttatatgttttaaggtgtctttgcatcacttttataatttttggctttaactgacttcactgattaaccratcacttgtctcaattacctcaagaggccaccttctctagaaatatcttgattgcatccttaggcctattcttttcctgttctgctctttccctgagcaattaaatttccaaccagagcttcaatatagtctttaaacaaattaatacaaagtccgcaagctctttgaaatgaggatccctcgtttattcatcactgcatcacccatcttgcactctgtccttgcactgtgccttgcacacagtaactatttttaaaaatgttgagatttaaactgtatttaagaattagttataaattacaacccaagaattagaagtcagtcttgaatgaatgtgtcacaagaacatttctttgttttgcaatcataatttaccccttctcagcaactaaagaagctcgcttgacaagtataattggaaaattatcattttaaattgggtagctgaagcttaattttaaaaagtaaatggtagtttttctgaaaagtatgaaactttctgaaggtaagcaaatggtccaatccattttaggtggacaatgacaagtaccactacggcactgagttttacgtaaagtgagaagtttcgcttctcaagtgttgtggattaatttcttaggcaattttctctgagcattgcaggagagctatggttatcctttccattttacagatgaaagaattaatggtcctaacagttacttactcttgaccttcaagatcatttgtaacttcaatggaatttgtgccttgatgctacacatcttgagtcatcttctaaattcttctaaggctcgttagaattgtgcaggagaatcagggacaaactagcaaaaagtcaagccacagttgtcacttatctactctgcaggcagtctagaattatgccattggagttcagtcttttcatttaatagtttctctcaaaattgttgggtagaagactaagttagtaattcagttttaatatcttcctgttagttaacatacccagttttctttcctctgattaagcagctaaaggaaaggaagagtcattttagattaggctactttgtcttgaagaaggcaagtccaagtttgtgtatatgagt

SEQ ID NO: 86547 - DNA, 1050 bp, Homo sapiens
aaaggagaaggtaagttggctgagatctccagctggtaagcacaggagctgtgactggacctctggctgtctggcctgagcagcgccatgcctaactactacattacatgagcctttagctgttaggattatagaagggcatttacaatatatattggattataaagaaggttcaggatgatcttcttaagaaaacttttaattatatattgagttttagaaaaaattagcttttactattgtaacagtttttataatttcctgacatttcattctttccttgttttcttcctatctctcttccttcttatcaggtatttattaattcaggcactgtgttagtcccaggatatataataatgaaccaaaatataggtagtctctgtcttcataagaattacattctggtgggggagataaatattcaaatgatttctaagaataaaattgcaagagtgatttttgcccaaatgagagaaatttggtatggggggaarttcagccagacattgggtgaaattcacccccgatatttcacgtaggttcttttctattttccctaagtgttggccagtctgagaaatagagggacagagtacaaaagagagaaattttaaagctaggtgtccaggcgagacatcacatgtcagcaggttctgtgatgccccccaagccgcaaaactggcaagtttttattagtgattttcaaaaggggagggagtgtacgaatagggtgtgggtcacagagatcacatgcttcgcaaggtaataagatatcacaaggtaaatggaggcagggcgagatcacaggactacaggaccggggtgaaattaaaattgctaaagaagtttcgggcaggcattgtcattgataacatcttatcaggacagggtttgagagcagacaactggtctgaccaaaatgtattaggtggtaatttcctcgtcctaataagcctgggagcgcaacaggagactggggcttatttcatccctatagctagctgcgaccgtaaaagacagccacccccaaagtggccattttagagg

SEQ ID NO: 86548 - DNA, 1050 bp, Homo sapiens
aaaggagaaggtaagttggctgagatctccagctggtaagcacaggagctgtgactggacctctggctgtctggcctgagcagcgccatgcctaactactacattacatgagcctttagctgttaggattatagaagggcatttacaatatatattggattataaagaaggttcaggatgatcttcttaagaaaacttttaattatatattgagttttagaaaaaattagcttttactattgtaacagtttttataatttcctgacatttcattctttccttgttttcttcctatctctcttccttcttatcaggtatttattaattcaggcactgtgttagtcccaggatatataataatgaaccaaaatataggtagtctctgtcttcataagaattacattctggtgggggagataaatattcaaatgatttctaagaataaaattgcaagagtgatttttgcccaaatgagagaaatttggtatggggggaaattcagccagacattgggtgaaattcacccccgatatttcacgtaggttcttttctattttccctaagtgttggccagtctgagaaatagagggacagagtacaaaagagagaaattttaaagctaggtgtccaggcgagacatcacatgtcagcaggttctgtgatgccccccaagccgcaaaactggcaagtttttattagtgattttcaaaaggggagggagtgtacgaatagggtgtgggtcacagagatcacatgcttcgcaaggtaataagatatcacaaggtaaatggaggcagggcgagatcacaggactacaggaccggggtgaaattaaaattgctaaagaagtttcgggcaggcattgtcattgataacatcttatcaggacasggtttgagagcagacaactggtctgaccaaaatgtattaggtggtaatttcctcgtcctaataagcctgggagcgcaacaggagactggggcttatttcatccctatagctagctgcgaccgtaaaagacagccacccccaaagtggccattttagagg

SEQ ID NO: 86549 - DNA, 579 bp, Homo sapiens
ttcaattatcagaaggcaaccatagccgccgccatgaagtcttctcctgacaagggaaatgttcacagttctcctgggttctcatgacatggtttccaaatcatkcatcatattagctgcatttgaagtactcatagagtacaggagcaatattaccttctttaggcaaaacttgcattagttttttggcagccttatctcactatgctttatatgtactactattttattttttgagacggactctcactctgtcacccaggctggagtgcagtggcacaatcagggtgcactgcagcctcaaactcctgggctcaagtgattctcctgcctcatcctcccaaagagctgggataataggcatgagctgcctattcttttttttacctagcctcttattttctctttttaagacaaggtctcactctgtcaccctggctggagtgcagtggcatgatcatggctcactgaagtctcaaccatctaggctcaagcaatccttccacctcagcctcccaagtagctgagactatagacacacgccaccatgcctggctaattttttgtatttttagtaga

SEQ ID NO: 86550 - DNA, 579 bp, Homo sapiens
ttcaattatcagaaggcaaccatagccgccgccatgaagtcttctcctgacaagggaaatgttcacagttctcctgggttctcatgacatggtttccaaatcattcatcatattagctgcatttgaagtactcatagagtacagkagcaatattaccttctttaggcaaaacttgcattagttttttggcagccttatctcactatgctttatatgtactactattttattttttgagacggactctcactctgtcacccaggctggagtgcagtggcacaatcagggtgcactgcagcctcaaactcctgggctcaagtgattctcctgcctcatcctcccaaagagctgggataataggcatgagctgcctattcttttttttacctagcctcttattttctctttttaagacaaggtctcactctgtcaccctggctggagtgcagtggcatgatcatggctcactgaagtctcaaccatctaggctcaagcaatccttccacctcagcctcccaagtagctgagactatagacacacgccaccatgcctggctaattttttgtatttttagtaga

SEQ ID NO: 86551 - DNA, 664 bp, Homo sapiens
gaatctcctgagcccaggaggtcaaggctgcagtgagttgtgattgtgccactgtactccagcctgggtgacagagcaagaccctgtctcaaaaaaaaaaaacagataaagtgtggccttgacctccctgtaacacaaactactcttcctcctaccagccatggcagtgtctacgaaggatggaatgacactgtctgatcattcatgccattgttgttttagtagccagagaatacaggcttttcatggactacagcaaaaataagccattcttttctaaattgtctacatacataaacactgtaagttgcttgagagtaagccgtaagttaaaggagagtacaggtaaatacactgaaaggagaaaagtcccagagcagtccccaaatgggaggagggctctctccctacccctctgcctcactaaatccctgactccaggcccctgacacagacatttccagccccttctctactgtaccctagtgcaggcccaggagggcgacagcaaactgatgcctccracagcacccctcctcctgcccccaacacaccccttgccatggccgtcctgtgggcaggacataccccggttcagcataacctaattctatcttcaggccacagaagaatgcctgtcaccccatgttttacattcagccgt

SEQ ID NO: 86552 - DNA, 995 bp, Homo sapiens
gggcttcttgaaaaatccatcagagagctgaggatgcaaaggaacaggcatgagctaaattccaggaagcagcaagctcttcctaggagacagggcccaacagctgctttgtccctggcagaggagcaagagaagggagaattgggcagagaacgggggaaggagaaaagggctgaacttggaagacactttcaccgcctgcatgtaggtgggtgcaacagagtagactcccatgggcaaatctaccattctccaacgcctcctgcaggcttttgcagagggcaacgtgcagtacactgaggctgagggcaggcaggacagctaggaggacagtcccaggcactcaggacctcccctagatgcctggcagctgccacagaaatccaggcagggcagagagctggcagatgccctgaggggcactatgctttctccaagcacaaagcagaggcttgctgagcttggtagacaagagaacaaccgagattcctcctccaagaccatggctgccaaaggttagggccaagcagcaaagcttgaagaaacccctccaaggcatcaggacccttcactgagtgcaaggcagtaccctgtggaaggctgggggcaggaccaagagagagcycccaaaatgcagaaagccagagatagggctggagatcagagaaaactcccccaaacccacaaatccagcatccagtctcaaagcacaaagatggaaagctggtgactggctgcaaaccaaactccagtcttttctgtgcccagaccccaagccaacagaaggtcaaatcctgaccaaacacctgaagctaaagatgaaatgaccccaaggagagctaggaccaaggctacacccagctcaactgcagatcagattggcaatgccccacccccctggtggcaagccttttgaggagggtaaatatttactttatgctttttaatacaagtccaaaagaggaagtagtacaatatttgaagggggttatgtt

SEQ ID NO: 86553 - DNA, 995 bp, Homo sapiens
gggcttcttgaaaaatccatcagagagctgaggatgcaaaggaacaggcatgagctaaattccaggaagcagcaagctcttcctaggagacagggcccaacagctgctttgtccctggcagaggagcaagagaagggagaattgggcagagaacgggggaaggagaaaagggctgaacttggaagacactttcaccgcctgcatgtaggtgggtgcaacagagtagactcccatgggcaaatctaccattctccaacgcctcctgcaggcttttgcagagggcaacgtgcagtacactgaggctgagggcaggcaggacagctaggaggacagtcccaggcactcaggacctcccctagatgcctggcagctgccacagaaatccaggcagggcagagagctggcagatgccctgaggggcactatgctttctccaagcacaaagcagaggcttgctgagcttggtagacaagagaacaaccgagattcctcctccaagaccatggctgccaaaggttagggccaagcagcaaagcttgaagaaacccctccaaggcatcaggacccttcactgagtgcaaggcagtaccctgtggaaggctgggggcaggaccaagagagagcccccaaaatgcagaaagccagagatagggctggagatcagagaaaactcccccaaacmcacaaatccagcatccagtctcaaagcacaaagatggaaagctggtgactggctgcaaaccaaactccagtcttttctgtgcccagaccccaagccaacagaaggtcaaatcctgaccaaacacctgaagctaaagatgaaatgaccccaaggagagctaggaccaaggctacacccagctcaactgcagatcagattggcaatgccccacccccctggtggcaagccttttgaggagggtaaatatttactttatgctttttaatacaagtccaaaagaggaagtagtacaatatttgaagggggttatgtt

SEQ ID NO: 86554 - DNA, 722 bp, Homo sapiens
gggatccaacactatcttcagatagacggtatcagaagtaaattagaggacacccagctggtatctgttggaaaactgactgactggttattaaggggaagaaatccttawacacattttggcaaccagaggtcacagaaattttctgtgttggttgtcatgttgagagaacagaaaaaacactttgagtgtgtttttccacagaacaaaatatattttattctcccaaataaaggcataaaaggagaaaaaagaagaggaaaaaaacagatatgacaaacagaaaacaaatacaagatggtagacttgaacccatccacacaaaactcgataaaaaacccaagatccaactatatatactttatactctcaggaaacaaacttttttaaaaaatatatttttttttatttgcataggttttcggggaacaggtggtgtttggttacataaatcagttctttagtggtaatttctgagatgttggtgcacccattaccctagcgatatacgctgtacccaatttgtagtattttatccctcaccccctcccaccctttccccggagtccccaaagtccgttgtatcattcttttgccttgcatccttacagcttagatcccacttacgagtgagaacatacgatgtttgattttcaggaaacaacctttaaatatgaagacacagactgaaaataaaaggatgggggggaaaagatatacca

SEQ ID NO: 86555 - DNA, 722 bp, Homo sapiens
gggatccaacactatcttcagatagacggtatcagaagtaaattagaggacacccagctggtatctgttggaaaactgactgactggttattaaggggaagaaatccttaaacacattttggcaaccagaggtcacagaaattttctgtgttggttgtcatgttgagagaacagaaaaaacactttgagtgtgtttttccacagaacaaaatatattttattctcccaaataaaggcataaaaggagaaaaaagaagaggaaaaaaacagatatgacaaacagaaaacaaatacaagatggtagacttgaacccatccacacaaaactcgataaaaaacccaagatccaactatatatactttatactctcaggaaacaaacttttttaaaaaatatatttttttttatttgcataggttttcggggaacaggtggtgtttggttacataaatcagttctttagtggtaatttctgagatgttggtgcacccattaccctagcgatayacgctgtacccaatttgtagtattttatccctcaccccctcccaccctttccccggagtccccaaagtccgttgtatcattcttttgccttgcatccttacagcttagatcccacttacgagtgagaacatacgatgtttgattttcaggaaacaacctttaaatatgaagacacagactgaaaataaaaggatgggggggaaaagatatacca

SEQ ID NO: 86556 - DNA, 687 bp, Homo sapiens
ttagaaaacagcaacacccttgactggtgtctgatgctggctggtacagtctttagtgggtgcagccccttgtcagtgtcggacactgagatccaacaaccactgagtaagtgtccttagctggctgcaggtgacccaggatgtggggtcaggcatgtgctccagagccaggcgcccggaactgtaatcccagctcgcacacgcagccgcggaagcccaccatgccttactgcctcctcctcgtaatctcagcctgcaatgatccctctaaccatgatgatcagaggagttcacacacatgaaggcacatgttacaccaggcccagcacacaagaggtgtgtgacaactcctgtcacacactctcacaggacccagaaacagactgcaggcaaaggctggtcactgttcctctacatccagaaggtgctgcatttgaggaaagataaaacaggaagaacattctaagaagataaatactggctgggtgagtgagaaaattaattaatcaagcttgagcaggccaggactgtgacatatgagccacagacagagaggatcaggacttgtcaatccagaaagcagagatagagaacaaggtcaccrgcaagagagagaacaaacggactgcgactcatccagatgcgcctccctccggctctgccatgcagcacgtgggtgcgggtacc

SEQ ID NO: 86557 - DNA, 503 bp, Homo sapiens
ggtcctctgaccccttgggccagcaggttggccacataggcacccacactcaaggtctgaaaaatggccctgcagcacccccttgcagccttcaccactgaattctactgaacctttaaagaagaattaataccaatttttctcaaaatacttcaaaaaaattaaagcagaggaaattattcctaactcattctgtgaggccagcatatccctgataccaaaaccagacaaggactcagcaaraaaataaaactacaagccattatcccagatgaacatagcactacaggccaatatccctgatgaagatagatggaaaaatcttcaataaaatctaacaaatcaaatctaacaacacctcaaaatgataatacaccatgattaagtgatatttattgcaggaatgcaaaatggttcaatatatgcaaatcaataaatgtcataaattatatcaatagaattaagaacaaaaaccagatgattatttcaatagatgcaggaaa

SEQ ID NO: 86558 - DNA, 1132 bp, Homo sapiens
tgaaacaaacaagaaaccaaatagggttcacagcataccattatttgcaaaaatgaaaaataaacattgctacgtwtttttcaagaatacgtatctgttccaagacatgtgtcaaacccaaaaggtgaatacttataaaaaggggaagttggagaaacagtctgagaattaaagtggtattagggataaaggaaaaaaaataaaattatgagaatgagagaagcaccttggctccaactaaataacctacatggttaggagcatggttttcctgctatctgatttcaaaaggaaggaaaaaaagcctctccaaattagctctttaacatcagcattctctgtagtatagtaccacaaatagatttaacaagtagtactaaatatttgttgaatgtaggtggcagtaatcaattagaaaaaaaaatcactgcaattctttgctttgcactatgaaaggagaatatgtaagtgctggctataattgccaaaagttctgtgattacattttactgctgaaccactgtaaaaatcttaaagttttcttgaccttttgaacattggtagtgttttggccttgctcccactctaataatttgctggttttaatgaactgaagtttcaaagaaattgtatttgtaaaaaagataattgtggttttatcaaacatttataaaacttgttatatagcttcatgcaatttgccacctttattttctactcaactcatacacttccattaaatttttcacaaactgttttacttaaactcttgtcatgttaactgccaatatcctgtagtcagattattttttcatgatttttagatgagtgtgattttggtgaatttggcttttttttattttgtcatatttgttcttaaattaaagtattcttcagagcttctctctgaaatgaatcaaacatagtgttttcttccagccacttggagccagacacatagaattgccatgattttccaagaagaaattcagttcttcccaacacatagggactcaaaggatagaagtataagtttatttagtgatatgtagtgatagtgaggagtttgccacattggcctcatatagtcatgtgtacctcgagttcccttactaattaggcatagaaatat

SEQ ID NO: 86559 - DNA, 1132 bp, Homo sapiens
tgaaacaaacaagaaaccaaatagggttcacagcataccattatttgcaaaaatgaaaaataaacattgctacgtatttttcaagaatacgtatctgttccaagacatgtgtcaaacccaaaaggygaatacttataaaaaggggaagttggagaaacagtctgagaattaaagtggtattagggataaaggaaaaaaaataaaattatgagaatgagagaagcaccttggctccaactaaataacctacatggttaggagcatggttttcctgctatctgatttcaaaaggaaggaaaaaaagcctctccaaattagctctttaacatcagcattctctgtagtatagtaccacaaatagatttaacaagtagtactaaatatttgttgaatgtaggtggcagtaatcaattagaaaaaaaaatcactgcaattctttgctttgcactatgaaaggagaatatgtaagtgctggctataattgccaaaagttctgtgattacattttactgctgaaccactgtaaaaatcttaaagttttcttgaccttttgaacattggtagtgttttggccttgctcccactctaataatttgctggttttaatgaactgaagtttcaaagaaattgtatttgtaaaaaagataattgtggttttatcaaacatttataaaacttgttatatagcttcatgcaatttgccacctttattttctactcaactcatacacttccattaaatttttcacaaactgttttacttaaactcttgtcatgttaactgccaatatcctgtagtcagattattttttcatgatttttagatgagtgtgattttggtgaatttggcttttttttattttgtcatatttgttcttaaattaaagtattcttcagagcttctctctgaaatgaatcaaacatagtgttttcttccagccacttggagccagacacatagaattgccatgattttccaagaagaaattcagttcttcccaacacatagggactcaaaggatagaagtataagtttatttagtgatatgtagtgatagtgaggagtttgccacattggcctcatatagtcatgtgtacctcgagttcccttactaattaggcatagaaatat

SEQ ID NO: 86560 - DNA, 992 bp, Homo sapiens
gagtgtcttctacaggctgacccttgggatagaaatatgaataaggtacagtgtctctgctctaaaagaaattcataatccagttagagccaaaaggtgtattcgaaaaaatctagcatacttcttttatgtttttagcatgctatatttgttgagtgagtgaatgaatgaatgaatgaataatatttttaaatggcaatgtcaaatattccttgaatgttaaaatgtgatgtttcaagattgtgattatatggtaacgatatcaaattcatcactataccatacccaaagcattctgaacctggtaaatgaagattrgggctgtttcctccctgagagaagtcaccgcttgtaaaggcttgatccacttacctgcctgtcttagcgcctagaatgtactatgcccaactgagtactatgtactggtctgggtttcatcaacacccacacaggggccagctgccctatcagcctcagggagaaggggtccaaagaagtagaattgaagtctagaacaaaaggccaaataaactgggtttttgatattttttaaaagaattgacaaatgatacagtaattgttttcaagtattcacgtttcaatattttttaatgctgtccagcatctccataaatgaggaataaaacatgagacaattagagaatttcagttagacattaggaaagacatcaagaaatatataatacttcttaactgtgtagactcagccagaggaatccttcagaaattgacagtatctcagcttactgacatggtcaactcacatacattcctgtcttcaagtaagtctcatcaccatcctcccaccaacttcaccatcaacacacagaaattcacaggagtttaatatctggtgatcaataaaatatttttatccagtaatgtacagatagtcagaggaaagtaaatgctaaaataatgtagaggccctgacatgatttataattgttagcatttatcactctaataat

SEQ ID NO: 86561 - DNA, 685 bp, Homo sapiens
atccacttcatggggtgtgcagaggacttcatggggtgtgcagaggactgggataggctgagctgtgagcrgccccaggtgtgatttctaggtgtccctgggggaggtggcctgaggagcatggaggactgcattggggcgattgagggatatgagcccttttctctgtttccctcgaggagtccgtgtgtgtggagggagcaccgggttgtccaggcccctgctgtccttgcccccacatctcacatggtaacagaggccagaggcaaacctaatgtgactccaagactcttggcccctgtgggtcttgctggggctctgtggggtgaggggaggacagaggccctgaggatggcaggagtggacagaagatgatgcagcctctgtgaatcctgaggttggtggggcactcggtggcccccgggctgcagttgtccggagaataatgcaccctgtgtcctctgggtgcagctgctgcgggggcggggaggtggtggcctggcgctgctctgggccttgtctgccagcagctgccggcttggccccaaggatggcacagggcgggggctgggttctggagcccagctaggggaggaccatcccagccaacatttattgaggcttacggtatgccaggctcagagccattaactcattcaagactcacaaggaccggggaggtgcc

SEQ ID NO: 86562 - DNA, 1310 bp, Homo sapiens
tattttgcaataagcacatttttatggtcctaaaagctaacccccttttaaaacctgcaagttagaaattccgttgttgagatgtcattgacagccctgttgtcttgggaggtgacaaggtttggtattgacagcccatcttggaattgccatctcagggccacagaaggcagaaagcagcaggtgggggtggttcactgaccctggggcaggagactgggcacagtgtgagtgtcccagcatcgggggctgggcttccaagcttggagccagggacattgtcaaccactttggaaacagttaggaagttcctactacatctgaacattgcctactctttgaccctgcaatttcattccttgtgatacagcagtgcatttatatgtctaaaataagacacccactaggaggacattaaccacagcgctcatcataattgccaacaacccagatgtctatcaacaggagaatggttaaataaatcattctatctcacaatgaaacgttatatagcaatgaaaaagagccacctgcagctatactcgactgcatagtgtttttatgagtaagttcgtaatgtagtgcaggcaagaaaagcaggtaggcacagcagcaagaaaagctaggcacacaagcacacgtgtgtagcattccatttctatcaaaagcatagaccgccaagattcagccatcgtggaaaaggtagtggctgagggggagcagaggggtttctgggtgcttctcctctggtcatgttcatctgggtgttggctacacggacatgctcacctttggaaatgcattgctctgtgcacttatgatctatgcactttttttttttttttttttkaggtggagtctcactctgtcgcccatggctggagtgcagtggctgatttcatctcacttcaacctctgcctccctggttcaagtaattctcctgcctcagccttcgaagtagctaagactacaggcatgtgccaccacatccgggctaatttttgtatttttagtagagatggggtttcactacgttggccaggctggtcttgaactcctgaactcaagtgatccatacctgccttgacctcccaaagtgctgggattacaggtgtgagccaccgcgcccagcctgtattttgtatttcagtaaaaatactggagacaaacgagagatacaagatcatggcagttctctcttcttccaccggacattgctgtgtctgcctaaaatgtcgaattggcaacagccattttgtaaccacgggacacagagcaaagtccgcagagcagaaaggtggaaggatcc

SEQ ID NO: 86563 - DNA, 1055 bp, Homo sapiens
atagttccattatgtccaattggagctactttattccttacacttcacctcaggtggcctgcctgctgttattttcaaaagattaatcctgggggttatattgcataagactgctctttatttgacctgaaacattccttcactcctgacagacagacaggatatggcctaataggaaagggttcatgaagctccagccctagtacagctggcgtccatcctccgcctgtcgctgccaacagggctgggagatggccactctcctgagcacactggactctgcagctgggaaggtgcagttctctgggaacagtcagagttgagcccccatggtgggtggcatgtttatcttttcccttgaaaaacaaaaggtcaatgaggaacacatgtttctatgacaacaagaaattcaaaggggatgctaaatccaagcaaatgtgaatgcaagggaagaggaagagaaaagttggcccagtttgaaaggaagtgatttggtagtacattgagtctctttttatttcaacttaattcccatctgaatttacatgtgatgaaaggctggtgaagaaaatatgtgaaaataggaataatcctctaaaataatgtagtctgtacgccactgatgagggaggtctgaatttggtaaaactagtggtctcaggttggtaaatgataccctcagttttcaaaataggtattttatttgttagcattggaaatgacttaatctagtctgccttctgccctgttgaaaaatcacatttgcaaatactatctttagaaaaagtgtattttgtcacctgtgttttcaatggtcccatccattttatccttgccatgattttgtcatgtttcagtgtagggccaccaatatatgacatgggggaatacttcactgacattgcatagtgagatgggaggaggagaaaagaaaaaaagagtaaaaatgaaaaaatcaaatggaaggaacatcctattcataatacttaatatttaaaagaaacagagagtgtgttrtaaacatgaagaagagtaacacccggacagcatttggt

SEQ ID NO: 86564 - DNA, 674 bp, Homo sapiens
acatggcagccaggaactggggtcattgcacggtcatcaaactctgagtttcacagtagatttgtaggtttaggtttaaagttgcttacgcaatcccaggttggtttgggaactagtgtgggctgagcctactggtgtggggagctgtagccgcagggttagggagagaarggcagtgtagagagagattacgtgggtgtaggattggggcctcatagacatgcctcaaaacattgtgaagtaaaactgggaatagggcaacacaagtataggaagagagaaaatggcctctccagaataacttgagagataactgcgaccacatcatctccaaatacttctccatcccacactatagaattcctgtctggaattccaactgctggatctccgggttaggcaaccaggaagagaacattttctacaggtggtgacgattaaaatgcttctgtcaccagaaggcagagaggctcaggggggctgggggggctgcaatccttcgttctacttcttttatcggcacattgttctttaaagatgtggagatggtccctgttgggatagcacgtgaaacacactgatcacctggctgatcataaaaccactggtgtggtgtccgacatatctgctttagaacgtggtcagcagtgccatatggtctacccaagctctta

SEQ ID NO: 86565 - DNA, 620 bp, Homo sapiens
gggatccctgaattagaacaactgtatgctctctacaaaacacatgacttcctgaggatcatagagtgggttagtcatgcaacggaatatgagccttttagtgttagaattaaatacactgattctacgcccccactcatagcagcatcattcacaatcgccaaaaggtggaagaaacccaagtatccattgacaagtaaatggataaacgtgtggtatatttatacaatggaatattattctgccttaaaaagaatggaaattctgacacacgctacaacatggatgcaccttgagagcaaaatgcttagtgaaataagtcagtcacaaaagaacaaacactgtatgattccgcttacgtgaggtacctaaagtagccaaatttgtagagagagaaagttgaattgcagttgccaggggctgtggagagtgggaaatgggaattgcttaatgggcattgagtttcagttctgcaagatgaaacagttctggaattggttgcacaacactgtaaacatacttaayacgactgaactatacactaaaaaaatggttaagatggtaaattttatgttacgtgtatttcaccacaatttaaaaatatcatttaaatactgatt

SEQ ID NO: 86566 - DNA, 743 bp, Homo sapiens
ccaaatgataaagtttgtaaagtactgaggtagaatatgcctcaaagttaatcagatgaaggggtgagaaaactgtgatagtcattactagcttcccccttaacactgcttgtgagctgtttctgaagttaattcccctgcactcctggcttagcctttgtatgagcagggcattcatgccccagtggtcaaaaaggaagtccccagacagaaaatcaaaggtattagcaggaagcggccctcaacatgcacagctattacaagttcagctgttaaatagttaatctaaatatgatattaaaactgaggttaaattataataataaaaacagccacaactctaatgctgattcaakgttaaagatgcattaaatagattgaaataagcaggatttcatttaggcatttattctcaaaaaagcagttgatttacctagtagaaaaataaccattatcacaattaactttaggaaaattcaattaagattaatattattttttactcagtagttatttcaggccctctcaagcaggccatgagtgagatcatgaaatatgttcccatatttcattgacttattctaattcctaatattaacccccaggaggggtggggaggcacatgactgaggttttgcattgcaaagacaaactatgtactatatttattctggagtacattcacgatctgaaattatagtggaaaaaaaaaagacttgactcctattataatgctaaacact

SEQ ID NO: 86567 - DNA, 692 bp, Homo sapiens
gactccgactggtcaaacagaacaactgtggcttggctctggctgatggctgctctgtaggaataagggctctgatttttcagatatcagaaatccaggtttttacgtaacagctcttgatttttatatgtttgcaataaattcaaatttacaatgatatgtaggttaatcctatgcaagccaaataaaatacatctgtgagtgtctagcccacaggatacctcttgtatcctccgctccttcttgtctttcaaggtccacttagctgcctcctcccccaggaagctgcccatgattgcttcagctccagagacgcctgtggcccctcaaagccccgcagggctgataatcccagactggaagtgacaggaggacaaatagggggttggcttatccatttctcacgcctcaagcatagggtttggccacagagggggagttaatgaatgaatacctgccgaatgaatgaatgaacaagtagctcacttgatccctctgcccttattttgcaaataaarctgagtcccagataagggacatgacctgccagggtgggatctggggccagggactgctcaccgtctggcctctgtttgtcagctgtcccccgaggctgggccaggctaggccggcaggaagtataaagacaattgcacagtcttatcgagttatgccatgggagggtagaaaca

SEQ ID NO: 86568 - DNA, 632 bp, Homo sapiens
acacatcaatgggtcatacagggagtacaaggaagacatggacagggaaggtggggtatccgctgggcctgaagaggaggatttccagaggctgcccaagagtccaaggccaggcctcaagaagtggagtctggatttcaactcaggctttcagggaggtcactttaggacgggtgacctcaacagacacactggtaggaccatcacctgcacctgtataaagcacagtacaactgctgaccttcacttcgctgtgatcgtgccaggctgtgtattcgaagcacttcatgtttactctcttttttttctttttttttctgagacagagtctcgctctgtcgcccaggctggagtgcaatggcacaatctcagctcgctgcaacctccgtctgccaggttcaagcaattctgctgcctcagcctcctgagtagctgggattataggcacgtgccaccacacccagctaatttttgtatttttagtagagacggggtttcaccatgttggtcaggatggtctcgaactcctgaccttgtgattcactcaccttgacttcccaaagtgttgagawtacaggcatgagccaccgcgcccggccaactcacttattccctaagtggtgatgctatca

SEQ ID NO: 86569 - DNA, 531 bp, Homo sapiens
gaatgtaggaaaatgaacatctcggctcccaaaggacgagaataaagctgtagaagaatgtcagggaggaatctgagttgatcgtatgactattcatccttcttcccacattttcccgactgtttagccctacttttcttcgcgttgggtctcattttccttcctgtgtggcctgtgccttatggtcagcgcggacgtccatcagtctatcaaatgcctagaaacctttcgccctttgtcaccttctgtgtcacccagcattccccttctcagcccttttcattctcatggtggaatccttttggtttgatttcaagggtccagcactgttgatgtcacaacagagtggcatrgaaagtttctgaaaattttgtcatctaacctctcgtggggacttttaattaattcagcttttgacaactccatcacattcattatattatccattcattcattcattaatacatttgacatttataatgtgtgccaacaatgtgccaggtcaaaactgcccacttacaatgtagaaca

SEQ ID NO: 86570 - DNA, 643 bp, Homo sapiens
  misc_feature (1)...(643): n = A,T,C or G
tgtgggatcacacctgtaatcccagcattttgggaggccgaggcaggtagatcacctgaggtcgggagtttgagaccagcctggccaacgtggcaaaaccccgtctctactaaaaatacaaaaaattagccaggagtggtggtgtgtgcctgtaatcccaggtacttgggaggctgagacaggagaatctcttgaacccagcaggcggaggttgcagtgagccgagatcgtgccacttcactccagcctgggcgacgagagggagattctgtctcaaaaaaataaataaaaataaaaataattacaaaataaaaacaactctgatgagtgattcacactgaagaatcactrgtaattccttaatatggtcacacttgagtctgtggtgatttcttgaccgtatccatatggtgcccaaaccagcgattcacaggttgtgccaacttctggccgtgacctaacggaagcacttggtggggccttttccttgacgtgcagctgatgcagcacatggtgctgcggacaggtcnnagctctaccgtggagcctagtgacgcaggatgtcctgttgnncnctcgnantagctcgtctgactcagtctaaacaagacggtggcaccttggctccaggaatgtgtttcct

SEQ ID NO: 86571 - DNA, 2338 bp, Homo sapiens
ttcatgtctgaatcagatttgagagctgcttccacctctctgatttctgcacacaaaccagcaataacgactcgggtccagcagcaattaagccatggtcagagaatgatcactggcattgccttcatccacagcccccagctgtgtgaggagtgggatgggcccacggaggagggtagatctttctttccctgctttgtctactttacccaagtacgcaggcctcttcctactgcaatagctgctttgagtccttgtggtcacgttatagaggagcgtaaaatagcagttcttcagctccctgtcctgctcccaacttgaaaaggcctttcctgaacacatgtctagttgactctagctcgaaggacttttctgacctactgtgaagaggcagaaaacatgcggaaagtaatttttatcaccaatcttatcacaaagcacagatccaagaatattgctgaacagtagcaaagagttggccacagtggcttgctatatgtagccaaaattccagtcagcatcaggaataatcagagagagaaatcctcaattctggctgcaatacatagttcacaaaactcacatttagtgtgctttatcaggtagagttcttttcttgcaaaaatacagaaatgaactctagctaacataagcagagaaagagtttattgggaggagaacatgttggaatgctctcagatgcaagggaaggagtatttcactataagtgacttaaacaaatgagggtttaattttcttcaacagcaaggatcctgaaaggagattgtcactgggtttgctttaatggctgaacagtgtaagaactgagtgcctgtgattctattggcttttgtctcatggccacaaaatggctgccagagcaccaagctacatcaacctgcaagtcaggaggaaggggaaggaatagctgtttctgtctcttttatcaggcaagcaaatttctcctttagtctctctgatcagaatggtatcatctggacacctgatccttagtgcaagagaggctgggaaagtgaatattttttagtctctatagggaagaacataaaaaagaggggattggagatgggcattgggttcactcagagtttctcaatcttagcactagggatattttgggccaggtaattctttaatggagggtggggggaggctgttcagtataatgtaggatatttagtagcattcctggcctccacgaaatagatgccagtagcatccctcccctggtggtaacaaccaaaaatgtctccagatattgccaaatgtctcctgggtggggagggggaaattgcctcaggtcagaaccactgtgttaccccactcacagcatctgccatagattatagggtaactccaagaatcaaagacagaaaaagatccaggcttcagaaatagacagatcagttcctgggttccaggtagcaggacctaagagacagtctctaccaaagcagttaccttgggataaattagttccaaaccttttcagtctgttagggcttaggacaagcattccaagaatttattggccttgggttacaagccatctttggcgaaggaagggcaggtacactgattgtcctaccaagactggatccattgtagaagggatagctccctatagctattatttaagagtgataggatagggagakcagggggaatggatgcttgtcagagtagaatatattagatcagttcaaaagtaattgccattttgccattacttttaatggcaaaaaccacaattacttttgcaccaacctaatatcatgcaatgactttggacaactgatcctatttctgacaaatggctgagtcccttgtgttagtttgagaaaagactattctgaaaagggcttttgaggaagaatccagaatgtctatgcaaccccaggaaaatcagttgccctttgaacctctagatgtttatgtgtaaaattagagtttcaggcaatgaatctccaagatctctttatgctctcacatgctgcatctcagtgatatggtttcacttcctgtacccacccaaatcccatctggaattgtaatccccacgtgtcaagggagatacctggtgggaagtgattggatcatgggggcggttccccccatgctgttctcctgatagtgggtaagttctcacaagatctgatggttttataaggggctcttccctcttcactctcacttctctctcctgccaccttgtgaagaggtccctgcttcccctttgcctttcaccatgattataagtttcctgaggcctccccagccatgtggaactgtgagccaattaaacctcttttcttta

SEQ ID NO: 86572 - DNA, 2338 bp, Homo sapiens
ttcatgtctgaatcagatttgagagctgcttccacctctctgatttctgcacacaaaccagcaataacgactcgggtccagcagcaattaagccatggtcagagaatgatcactggcattgccttcatccacagcccccagctgtgtgaggagtgggatgggcccacggaggagggtagatctttctttccctgctttgtctactttacccaagtacgcaggcctcttcctactgcaatagctgctttgagtccttgtggtcacgttatagaggagcgtaaaatagcagttcttcagctccctgtcctgctcccaacttgaaaaggcctttcctgaacacatgtctagttgactctagctcgaaggacttttctgacctactgtgaagaggcagaaaacatgcggaaagtaatttttatcaccaatcttatcacaaagcacagatccaagaatattgctgaacagtagcaaagagttggccacagtggcttgctatatgtagccaaaattccagtcagcatcaggaataatcagagagagaaatcctcaattctggctgcaatacatagttcacaaaactcacatttagtgtgctttatcaggtagagttcttttcttgcaaaaatacagaaatgaactctagctaacataagcagagaaagagtttattgggaggagaacatgttggaatgctctcagatgcaagggaaggagtatttcactataagtgacttaaacaaatgagggtttaattttcttcaacagcaaggatcctgaaaggagattgtcactgggtttgctttaatggctgaacagtgtaagaactgagtgcctgtgattctattggcttttgtctcatggccacaaaatggctgccagagcaccaagctacatcaacctgcaagtcaggaggaaggggaaggaatagctgtttctgtctcttttatcaggcaagcaaatttctcctttagtctctctgatcagaatggtatcatctggacacctgatccttagtgcaagagaggctgggaaagtgaatattttttagtctctatagggaagaacataaaaaagaggggattggagatgggcattgggttcactcagagtttctcaatcttagcactagggatattttgggccaggtaattctttaatggagggtggggggaggctgttcagtataatgtaggatatttagtagcattcctggcctccacgaaatagatgccagtagcatccctcccctggtggtaacaaccaaaaatgtctccagatattgccaaatgtctcctgggtggggagggggaaattgcctcaggtcagaaccactgtgttaccccactcacagcatctgccatagattatagggtaactccaagaatcaaagacagaaaaagatccaggcttcagaaatagacagatcagttcctgggttccaggtagcaggacctaagagacagtctctaccaaagcagttaccttgggataaattagttccaaaccttttcagtctgttagggcttaggacaagcattccaagaatttattggccttgggttacaagccatctttggcgaaggaagggcaggtacactgattgtcctaccaagactggatccattgtagaagggatagctccctatagctattatttaagagtgataggatagggagagcagggggaatggatgcttgtcagagtagaatatattagatcagttcaaaagtaattgccattttgccattacttttaatggcaaaaaccacaattacttttgcaccaacctaatatcatgcaatgactttggacaactgatcctatttctgacaaatggctgagtcccttgtgttagtttgagaaaagactattctgaaaagggcttttgaggaagaatccagaatgtctatgcaaccccaggaaaatcagttgccctttgaacctctagatgtttatgtgtaaaattagagtttcaggcaatgaatctccaagatctctttatgctstcacatgctgcatctcagtgatatggtttcacttcctgtacccacccaaatcccatctggaattgtaatccccacgtgtcaagggagatacctggtgggaagtgattggatcatgggggcggttccccccatgctgttctcctgatagtgggtaagttctcacaagatctgatggttttataaggggctcttccctcttcactctcacttctctctcctgccaccttgtgaagaggtccctgcttcccctttgcctttcaccatgattataagtttcctgaggcctccccagccatgtggaactgtgagccaattaaacctcttttcttta

SEQ ID NO: 86573 - DNA, 1166 bp, Homo sapiens
gtgtccccacaaaattcatatgacaaaatgtgaatccccaaggtgacgatataaggaggtagggtctttaggagttgatgaggttaggaaggcagaacccacgtgaatgggattactgcccttatttaaaaggccccagagagatatygccccatttctgtcatgtgaggctacagtgaaaagacatctttctaggaagcaggccttcaccagaccccaagtcatctggtaccttgatcttagatttcccagcctgcataactgtgagaaataaatatctgctgtttgtaagtcacccagttctatggtatacttttaaagcagtttgaataagaaacttcttattgattaaaaatcatggagtcaaacctaactgcaagaatgattgaaatgggaacatgaccaccatagataaaattgagactgtttaactaatgaagaaatggagagtagatattaggtcgataaccagctgtcaatctcaccttcagcttgtgaaatttaatgatcctcaacactattaaaccccttaaaggataataactcataatagagctatggggaagccatgaaattgatctttttatctactcagtcacttgttaatatttataaggaccatgttcctaagcacagacttttagtccacagaaatatcataattgctggcatacacacacaaaacatacatgcacacacacatacatgcacatagaatcactactatgcaaagttggtataaggaaggctgtgaagcagaggggttctaaagtttccatccacttatattcactcagcttttgatcaccctttgtagctgtataacattttttctgtccttggactatttatcagcttattctcaaggaacaaactgttcttcacaagtgtttcttggaatgacaagttgttcagagtttaccttcccatgcactggctgcatcaatcaataattcccatgacctccatgggatggatgctggatcatcattcctttaagtcagatttgagctgataaaaatagaagcatatgaaataagcagtggaaacataccatatatctctagctttttggctgccaaatgactgcaaaacacactctaatatactgataaaactggagcataatattttccagaggtctgaatgctgctatgggatggaag

SEQ ID NO: 86574 - DNA, 847 bp, Homo sapiens
tggatagtagacctttgtcatatgtatagtttgcaaatattttctctcattctgtaggttgtctgtttactctcttgatagtttcttttggtgcgcagaagttctttagtttaataaggtccactttgtcaatatttgttcctgtttcaattgcttttagagactttgtcatgaaatctttgccaaggcctatgtccagtatgatatgttctaggttttcttttagtgtttttatagttttagttcttacatttaagtctttaatccatcttctgttgatttttgtgtctggtgtaaggaaggggtccagcttcaatcttctgcatatggctagcctgttttcccagtaccatttattaaacagagagtcctttcccccattgctctttattgtcaactttgttgaagatcagatggttgtaggcgtataactttatttctggactttctaacctgttccattggtgtatgtgtctatttttgtatgagttacattggacttgtactayagtttgaaatcagggagtgtgatacctttggctttgctctttttgcttaggattgctatggctatttgggctgttgggctcttttttgttctgtgtgaatttctaaagcacaagtaaattgtactccactcttctgtttaaaacactcttatggcttctcatcttatacggaagaaaaacctcagttcacaccacggcctataaagaactatgcatgctgatccctcctttgcaaattgtgtatcaatattccaggtacactctaagcactatgtctttctagtgggaacacaaaagcaaattatacagttggaatgatcacgtagattccacaggta

SEQ ID NO: 86575 - DNA, 847 bp, Homo sapiens
tggatagtagacctttgtcatatgtatagtttgcaaatattttctctcattctgtaggttgtctgtttactctcttgatagtttcttttggtgcgcagaagttctttagtttaataaggtccactttgtcaatatttgttcctgtttcaattgcttttagagactttgtcatgaaatctttgccaaggcctatgtccagtatgatatgttctaggttttcttttagtgtttttatagttttagttcttacatttaagtctttaatccatcttctgttgatttttgtgtctggtgtaaggaaggggtccagcttcaatcttctgcatatggctagcctgttttcccagtaccatttattaaacagagagtcctttcccccattgctctttattgtcaactttgttgaagatcagatggttgtaggcgtataactttatttctggactttctaacctgttccattggtgtatgtgtctatttttgtatgagttacattggacttgtactacagtttgaaatcagggagtrtgatacctttggctttgctctttttgcttaggattgctatggctatttgggctgttgggctcttttttgttctgtgtgaatttctaaagcacaagtaaattgtactccactcttctgtttaaaacactcttatggcttctcatcttatacggaagaaaaacctcagttcacaccacggcctataaagaactatgcatgctgatccctcctttgcaaattgtgtatcaatattccaggtacactctaagcactatgtctttctagtgggaacacaaaagcaaattatacagttggaatgatcacgtagattccacaggta

SEQ ID NO: 86576 - DNA, 1289 bp, Homo sapiens
agcccaagcaagaggtgatgaagcctggactcagaagcaacaagtaagtggcagatgagaggatggatgggaatcatatttggaagttaacattttcaggatttgkggttgatcaagtgtggaaagtgaaagagacagaacagatgcagtcaccattcaccaaaacaggaaaacaccagaaaaggaccaaaaaggaagagaactgtctttggagagaatcatggctatttcttctaatgtactacactcctcagccaatcacctcagattaaacagattttattttcagtgatcaaaagtagaatcaggctctgacctcaaaaatatctgccctctgctcacagatgcctagtctttttacagtaatgaaaggccaaagcctgagtcagcacactccacaattagagatagtgttgcattcagtttcctagagctgacaatgttgccacaaaccagggagcttaaaacaagagaaatgtattctttcacaattctgaagaccggaagtccaaaatcagagtgttagtagggccatgtcccctccaaaagctctcagagtgaatctctttcggcctcttccagcttctggtggctcctggtgttccttggcttctggtagcataactctaatctgcctccttcttcacatggccttctttctgtatgtctctgtgtctcctcctttctcatctcttatatgaacagtcattgaatttagggcccatcctgaagccagagtgatctcatcttgaaattcttaatctcactacatctgtaaaaccctattttgaattgaggtcatattcacaagtactaggggttaggatttggacatatcttttgggggccactattcaacccactacagatgtacaatgttaacaggttgcttagatacacgtagacgagttttacctgaaacagcatttctcagagtgtgtaagacaaacattagttcctcaagatactcaaaaaaaattgttaccatggtcaaagtttggaaaacattgaacactctatacccttcttatgattcctaatttacatacacacactaaagtttctgaaaagtcctgcagtaatgaaacccattcaagttgctcaacccagaactttacaatcttatttgatgcataatcttttccttttggtgacaaagcacctgcccactgatatctgaaacactgtccaagggccatactcacagtatgctaagataccatcagttagcaatcagtgataaatagtttggggttgtggatttttctcagttttggtgaggaagaaaa

SEQ ID NO: 86577 - DNA, 1029 bp, Homo sapiens
aaccatagatcattagaagtgagaaagatcaagtacaagaagtcaggatgatggctttccctttctgtctcactcaatgcaaactgcaatgtcactattgtgatctacaaggccctatatgccctgcacttccatccccattaacactgtgacttgtctcctcctacccttccttccattcctctgtgagccacactcacctccttgctcttccttaaacctgtcagggacatttgcatctcacattcctttgcgcttgctaccttggcccagaatttccttcccacgttaccatctcattgcagatgtcactaccttatctaaggttgtcccatcacaccccaacactgcctattccccttccttgctttactccattacacttatcacaatctaatgtatacatcttacttaaacatatacagctgttttcttgcttattctctctctctcccagtagcacataagttcctgagagcaacgatttttgtttcttttgtttagtgctataaccccagcaactagaacagtgctttgtacatagtaggtgatcaacaaatatttgctgagtgaatgaaggagagagagatgagtaaggaaaagagtgaacaaagaaatacacagagccctaaaggctttgctgaaactggggaagacctagcttaatttcaaaataagataatatccttttaatgaaacatatacttttacataaaagtttagcatccttcaaaatatcctatttttgaaaaatatgtccattaaaagtgaagaaatttctataygacatttaaaaacctccccaggaatgtttaattttagctatttcactctcagccttcatccacctctctgagccatgccttaaaaatacttttcccaggagtctcatgtagttttaaatgaagtacacaagttccaataagaattagaactgcaagcaaaatctaaacttagagtgtagaagtttttattttaattgttaaagtatacatccaatatcatttttttttaaatccaggtttatct

SEQ ID NO: 86578 - DNA, 1664 bp, Homo sapiens
ccagcatgatataatttatattatactgtgtatacaagggttgcttatgaattgcctagagaaatatatatatatgttactaaattatttctaattatttactaattatttcactttgggaatgctaaataaattcaagatcattaattacagagacaaaggcgagtgattggatcagggaaataaatgtataccagggtgagatgagagggacctgaaattagcaatctgttatttttgttgttgttgttgttttgtttgttgtttttgtttgtctgtttgttttgagacagagtctcgctctgtcgcccaggctagagtacagtggcgtgatctcggctcactgaaacctccgcctcctgggttcaagcaattctcctgcctcaccctcccaagtagctgggactacaggtacacaccaccacgcctgggtaatttttttgtattttagtagagatggggtttcaccatgttgcccaggctggttgcaaactcctgagctcaggcaatccgcccaccttggcctcccaaagtgctgggattacaggcgtaagccaccacgcttggcccagcaatccgttatttcttaggctgtgtggtagatacaggggcgttcattttataattctctataatttktgaatttctgaagtaagtgctaaatataaaagataaagattgtgtaatacttttagtgtctatcgtgctttcaaataaattctctcatttgattcacaaggtaaacttgtgagatagtgaaggtagttgttattaatattttcatttcataaaggaggaaacacccacggctaaaaaaaaaattctacaagtaataaacagatgagaagcaagtccacaactaagctctttgggatccgaatcatcatgcctccttagatatgctaacacttggtaagtgagactgtagaatcaggggtacaaccatcctactttatcctttttttgcccttgagttaaatcatattgtcttaaatcaaatggagataaatatatttattgaggcgccgctgctgtgtccaaggttatgaaatgcctttcttcttcatagttttctgaaattttatatattgtcaattcctctccagcatcataaaacaatgtagaaggtatcagttattattcagaaccatggagtcaattttttttctctagaaatagaaactttctatagctactcaagtgaaaagaggtaggggcatcagaaaatctgggcaatcagaaacctgaattgtattttcacttgtcttcttcactttagctttggttttacattggactttctagaagtcattttgtgtatctgtgtctcactctatacaactgggacaaaaatacagacagctgacaactttaagcactcaaataaaaaactatgcatgatcataaagcatatcaacatacctcacatagccctttgcattgtggcaaccgtttggtttgctgataacaaaagagtattggaaagagttaatttgcactagcatgtaataaatctcctcaatcacctcacgttataattctttttttttggggggatggagtctcactctgttgcccaggctggagtgcagtggcacaatctcggctcactacaacctccacctcctgaattcaagctattctcctgcctcagcctcccgagt

SEQ ID NO: 86579 - DNA, 932 bp, Homo sapiens
gcttcgtctcctctgaggcagactgcctgagttgcagagggagtgttgattttataacagacccaaatgagctacagggccaggacccacctagtacatttaaattaggttgagtgccaggtaagactttygtggcagaagtaatgggaaaagccacgtcccccgtccccaagtcctggaacacatccagaaatccataaagcaaagggtttcttaaactaaaaagtcatacagaaacattaccatacttattttccttatcctcaaaaacactgaaaagtgaaacagagcattattataacaaggtaacacctatgtctttaggatatgaatggtccacatcatgttcagatgttacttgataatgatagatgctacataatttgatgacaactaaaatctgctgagcacttactgtatactaataactatagttgacagcattttccagtttgatcctcaaaaaaccctgagacataactgctattcctttccttttgtgtccagagttggttccttctggggggttcgtggtctccttgacttcaagaatggagctgcagacctttgaggtgagtgttacaactcttaaagatggcacagacccaaaaagtgagcagcagcaagatctactgtgaagaccgaaagaacaaagctttcacggcacccaagtgggttgccactgccggctggggtggccagttttattcccttatttgtcccttcccatgttctgtttctgtcctatcagagtgccctttattcagtccttcccacaattggctacctttagactcctgctgattggtgcattttacagagcgctgattggtgcgttttatagaccgctgactggtgcgttttacagagcgccgattggtgcattttgcagaatgctgattggtacattttacagagtgctgattgatgca

SEQ ID NO: 86580 - DNA, 1015 bp, Homo sapiens
tgagatgttaattaatctccaagtatttgtgktgtcttagaaaaatagtatctctggttttctttattagtctattatgactctattttcccatcctaaaaattttctaagtctttcttgaatccattggatttttaaaaattatgaataattaaaaaatttactgttttataagcataacattccttatttgccctcaaatttcttgtctcagacttcaagttgagcctcatttgagtgttctaggactctatttttgcagaatgtcagatacggatcccttattaaatcaataaaccaattgattaaaaaaactgaatattctaaatttctctgctctggaagatcaataatggtgtaaaattcacaagggagtatacgttaaatatcaataacgaatgacaaaatatgatctttttctatttataggttatgaagtgttccttttttgcttccataaaggacttgagaaatttacaatcaaagatacattttcaatactatttttaagcagaaagaagataatcaacaccaccaccaataaactatacagatgggagaaataagtgtgccaaaatgtaggttaatgttacagcagttgaaaattaaattaggttcaggtcttcctggaagccaagggaagacaaaaggagcagggcagggacaaggcattatgaggttataacataaatctttaattagcaaaggtatttctttgagggtttgcaaatgagataagaatacattgctccgtggtgaaccaactaggtctaaggatagaattaagaattcccaggagaatgaaagtctcattgtataccactcgggcttttacaacttttactgggcagaaaaattcactcagttgaagatggttttctttgaaattatcccattagattgcttaatatccttacggtgagcaatctcatggaggctgtggaccaaagagccaggaagtaccatacattgaattaaatcaatgtcacttcaccactgatcattgttggaagga

SEQ ID NO: 86581 - DNA, 1015 bp, Homo sapiens
tgagatgttaattaatctccaagtatttgtgttgtcttagaaaaatagtatctctggttttctttattagtctattatgactctattttcccatcctaaaaattttctaagtctttcttgaatccattggatttttaaaaattatgaataattaaaaaatttactgttttataagcataacattccttatttgccctcaaatttcttgtctcagacttcaagttgagcctcatttgagtgttctaggactctatttttgcagaatgtcagatacggatcccttattaaatcaataaaccaattgattaaaaaaactgaatattctaaatttctctgctctggaagatcaataatggtgtaaaattcacaagggagtatacgttaaatatcaataacgaatgacaaaatatgatctttttctatttataggttatgaagtgttccttttttgcttccataaaggacttgagaaatttacaatcaaagatacattttcaatactatttttaagcagaaagaagataatcaacaccaccaccaataaactatacagatgggagaaataagtgtgccaaaatgtaggttaatgttacagcarttgaaaattaaattaggttcaggtcttcctggaagccaagggaagacaaaaggagcagggcagggacaaggcattatgaggttataacataaatctttaattagcaaaggtatttctttgagggtttgcaaatgagataagaatacattgctccgtggtgaaccaactaggtctaaggatagaattaagaattcccaggagaatgaaagtctcattgtataccactcgggcttttacaacttttactgggcagaaaaattcactcagttgaagatggttttctttgaaattatcccattagattgcttaatatccttacggtgagcaatctcatggaggctgtggaccaaagagccaggaagtaccatacattgaattaaatcaatgtcacttcaccactgatcattgttggaagga

SEQ ID NO: 86582 - DNA, 1110 bp, Homo sapiens
actcaacaaagcctgcaaatctccttcctctaaaatcccattggtgcaaagcactgtttctgttagcaatatacccttcctctaggcccagggactaccagggaagaggtggatgcatgagattgtaagggccagttttaagggttcagatccccaaaatcaaggcaggcacacacacatgcttatacrgggcgtaaattgatggactttgtctcctgagccattatatgccccctttccatctttctcaatcatgaaaaaaaatttctactttaatataagagcccaaacccaaaggcttggccacattctgggacccatgtgtatttacaattaaatgtaaaacagttttattcctcaaacctagaccaattccccttgtcagcaaacagtagctagaattgccattgccccatatccctcaagattgaggaatgcacaacagaaagggagttgatatagtttgaatatgtgttgctgccaaatttcatgttgaattgtgatccccagtgttggaggtggggtcttgggggaggtgtttgggtcataagggcagactctcatgtcatagtgcattcttttgagatccagttgtttaaatgtgtggaaccttccctacccattctctctctcttgttcctgctctgccatgtgatgtgtctgttcctgcttctatacacagagacttttgctccaattctctatgtttttaaatttaagaatgaagaagagctctttgtgtgaaataatgaagtaaaacagggtatttcaagtagcatctttaccaaagatttgggcagaatcttccactggcttggacctaaaagatctaactgtggcattgtaaatgtcaatattccaatgagcggctggagcattgcaggtgcatttggaggagaaaagcacatttgtggtggcagggcatctggtgatgactcctggaaatagtgcatgagaaggtttacttgtatcatcaactatggtaaggatcttcctctggtgaaaggaatcaagtttcagtaaagttttatggacgaacattgcttaattttaggtgttcctgcagctgtttctgaagaagaaaaaaaaaattaaaattttccctgaata

SEQ ID NO: 86583 - DNA, 1110 bp, Homo sapiens
actcaacaaagcctgcaaatctccttcctctaaaatcccattggtgcaaagcactgtttctgttagcaatatacccttcctctaggcccagggactaccagggaagaggtggatgcatgagattgtaagggccagttttaagggttcagatccccaaaatcaaggcaggcacacacacatgcttatacagggcgtaaattgatggactttgtctcctgagccattatatgccccctttccatctttctcaatcatgaaaaaaaatttctactttaatataagagcccaaacccaaaggcttggccacattctgggacccatgtgtatttacaattaaatgtaaaacagttttattcctcaaacctagaccaattccccttgtcagcaaacagtagctagaattgccattgccccatatccctcaagattgaggaatgcacaacagaaagggagttgatatagtttgaatatgtgttgctgccaaatttcatgttgaattgtgatccccagtgttggaggtggggtcttgggggaggtgtttgggtcataagggcagactctcatgtcatagtgcattcwtttgagatccagttgtttaaatgtgtggaaccttccctacccattctctctctcttgttcctgctctgccatgtgatgtgtctgttcctgcttctatacacagagacttttgctccaattctctatgtttttaaatttaagaatgaagaagagctctttgtgtgaaataatgaagtaaaacagggtatttcaagtagcatctttaccaaagatttgggcagaatcttccactggcttggacctaaaagatctaactgtggcattgtaaatgtcaatattccaatgagcggctggagcattgcaggtgcatttggaggagaaaagcacatttgtggtggcagggcatctggtgatgactcctggaaatagtgcatgagaaggtttacttgtatcatcaactatggtaaggatcttcctctggtgaaaggaatcaagtttcagtaaagttttatggacgaacattgcttaattttaggtgttcctgcagctgtttctgaagaagaaaaaaaaaattaaaattttccctgaata

SEQ ID NO: 86584 - DNA, 1110 bp, Homo sapiens
actcaacaaagcctgcaaatctccttcctctaaaatcccattggtgcaaagcactgtttctgttagcaatatacccttcctctaggcccagggactaccagggaagaggtggatgcatgagattgtaagggccagttttaagggttcagatccccaaaatcaaggcaggcacacacacatgcttatacagggcgtaaattgatggactttgtctcctgagccattatatgccccctttccatctttctcaatcatgaaaaaaaatttctactttaatataagagcccaaacccaaaggcttggccacattctgggacccatgtgtatttacaattaaatgtaaaacagttttattcctcaaacctagaccaattccccttgtcagcaaacagtagctagaattgccattgccccatatccctcaagattgaggaatgcacaacagaaagggagttgatatagtttgaatatgtgttgctgccaaatttcatgttgaattgtgatccccagtgttggaggtggggtcttgggggaggtgtttgggtcataagggcagactctcatgtcatagtgcattcttttgagatccagttgtttaaatgtgtggaaccttccctacccattctctctctcttgttcctgctctgccatgtgatgtgtctgttcctgcttctatacacagagacttttgctccaattctctatgtttttaaatttaagaatgaagaagagctctttgtgtgaaataatgragtaaaacagggtatttcaagtagcatctttaccaaagatttgggcagaatcttccactggcttggacctaaaagatctaactgtggcattgtaaatgtcaatattccaatgagcggctggagcattgcaggtgcatttggaggagaaaagcacatttgtggtggcagggcatctggtgatgactcctggaaatagtgcatgagaaggtttacttgtatcatcaactatggtaaggatcttcctctggtgaaaggaatcaagtttcagtaaagttttatggacgaacattgcttaattttaggtgttcctgcagctgtttctgaagaagaaaaaaaaaattaaaattttccctgaata

SEQ ID NO: 86585 - DNA, 1174 bp, Homo sapiens
aggaagactgcttgaggctaggagtttgagaacagcctgggcaatatagtgagataccatcttaaaaaaaaaaattaaaacattagccaggagttgtggagcacacctgtagtcccagctacttgggaggctgagaagggaggattgcttgagcccaggagttcaaggctgccatgagctgtgatcacaccaccccactccagcctgggagacagagcaagatcctgtgtctaaataaatatatgcattaattaaatggggagaaaagggctagactcctgagtcctgaggatagcaaggaaatgaacccatggcttctgtagtgaaggtctttcttgaaggagcccaacaaacttgcccaggcagggtagcagctaaacttcccaaatgcccaaggagtggaaaacactccagagctatgatttcaacccacagcctgagcagatgggttcaataaagccaatggttatttacatcaatgcgaagactgcctgtgtttatttctggctcctggggtctggaaaggaaaaggaatgactgaaacgaggaacgtgctgaaaggcaaaaaatggacaatctaacargaaaaaaatgttcattcttagcataatcactttcatcccagggcctccaagggctcggtgaggggatctggtaagccctccggagacctcagactcataccagctgggatcccagaagaaggccctgggaattgctctcttatggtctgggaaacatggggctgggaatcaggggagtagaagggatgcctacttaagtgggtgttggggttcaaatcttgccccactctttactagctgtgtgacactgggcaagaccagaatcaatctggcttcccagaccaggcttggtggcacagttctgtaatcccagcactttgtgaggctgaggtgggaggatcacttgaggttgggagttcaagaccagcctgggtaacatagtgagacccccccatctctacaacaaataataaaaattagccaggtgtggctgcagacacctgtagttccatgactcgggaggctgcggcaggaagattgcttgagccaaggagtttgaggctgcagtgagctgtgattgcaccactgcacaccaacctgggtgacagagcaagatcctttctcttaaaaaattctgtacttttgttccc

SEQ ID NO: 86586 - DNA, 854 bp, Homo sapiens
gctgtaaccccaccaccttgggcacatgttctgaagacctcctgaggctgtgtcatgggccatggtcactcttatttggctcagaataaacctcttcaaatgtttgacagagtttggcttttgttgtctatagcaataacctacatctaagtcacatcctgaccctgaatgtggtgggaatagaaaggctgggatgtttttgctcgtcttgggacactccagaggccaatactgatccaagctcctgcttcattggctgaagatttgtgggttctgctccagttccccatctttctcagttcagtcctgtttccttcttgcttcctttccccataaacatcctgcaccccaacctttgtctcaaagctgcttccagaaagcccagcctgtgataccacagtctcttgactacaaacccactgtttacttccataagaatgacagatacatatttttttaagcttgaaaaacaaaccctcaacacatctatgcctgaggcaaagcagggcagaagatcacagggtttctgttatgccaaaatctctcctaggtaaacgctgcgtgcaggcatctaagcccctggaggtgcttcaatttatatttcatgtgcaaacactctaaggagggctgcgtgtggaagccagatcaaaacatttatcctcactgtgtcttggaaaaaacttattagctggctgtatacagatattgaagaggagcagaaaaatggagggaaagaaaaagaacaaccrccaaaaaaaaaaaaaatctgtcgctaccagttaaatagagaaggctggtagcaacagatttttggagagccagggctgcaggtggcaactgtaatatattgttat

SEQ ID NO: 86587 - DNA, 1165 bp, Homo sapiens
gcatgatttaagctgttgtgtgtttgttctctttgttagagcagcctaatctttgccctcccttatacagtgaggaagctaagaagggtggaaatttcttttgcatccccctagggcccactattatagccatgagagaaggcttgccatgagaaaagtcacttgaaaattaagaaagagctagaaacaccagacaaagcaccaggtaagtaaaatgggctttgccacattttctgtcttcttttcctcctcaatccctgctcctcaaccctgcttggagaagccagacaaagggcagaggagagaggatataaaaacaggagcttatggaagtgcaccagatcttactttgcttaggtgagagagatgggtagaggagcttaagaaaacaaagttctaatttagactagactggacattttaaaatttataaaggtatttaaagctatgggtttcatacaagatgtcacccagaaataacagtgagacatccacaaaagcagtagaggcagaaaaataaacctgtttccaaattgtactctaccaaattcagtacacccgattaacctagttattcgatatccaataagtaaagcatatacactgcaaatgttcaagaacaaatgatatttctcccactcatccttagctgttatcaaacctggctaaactaattgtgacagcttttatcctatttgaggttcaatcttttacttctcttcayagatacctgctagaactctgaagtctgttcacggatcccaattatttaatatgccaattatgattttgcaactactaaaagaatttagaatcctttacaacaggggttgttctgtttttctagccagagattgtcactccatatttactaatgagcttttctagaaataacagaaaatgattagcatctctactttttttatctactgaagacaaacatctcagggtgatagcaggattatgggcggcatcatttaacaataacagtttttcaaagttatttatttatttatttatttatttatttttgagacggagtttcgctcttgttgcccaggctggagtgcaatggcactatctcggctcaccgaaacctctgcctcccaggttcaagcaattctcctgcctcagcctcccaagtagctgggattacaggcatgca

SEQ ID NO: 86588 - DNA, 626 bp, Homo sapiens
atcagcctgttttcacttctttttattaatgtttgcatttctctcccagcattaggaagtcttgttgtttccaaggtacgcttgttttccaaggaagtgcctcggtggccgtctcatggggcagaaaaagatctgggcttcctaatccgatgtcaaccacagcagcttcaatttaaattcatgtcatcagcctccaggtcagagttttacaataatacttaatatgatttgttttaagttaattatgtgccaaggtccaaattctgacactaccacttagtaactgtgtgaccctgggctttagtgtgaccttaggcaagatgctgatctgtgactcagttttcttatctgtaaatgggagataataacaatacctacctgaaagaactgttatgaggattaagtatatggaaatgctataccgtatacattttagaaactcttctcattgtctcatttaatccttaaaatggtccctctgaggaaytattgccacctccctagcatagatgagacaactggcatttagagagatttagtatctttttcaaggtcacaatctataagtggcagggctaggattgaaacacagacctagtcaacagtgaagcctgtacccataatct

SEQ ID NO: 86589 - DNA, 1697 bp, Homo sapiens
aagagagagaaaaaacatccaattaagagtctcactcctaaatccataaagaaaaagtcggggggaggagggtagaaaaaaaccagacaccaccctaccatagattcttaaggtgttaactttaacaccttaaaggaaagaaaaggagattttttttcttccataggcatttctattattcaaagtactttaaaaaataaaattggcraatttaaaaaactttcaactgcatttagggaacaagggtgcttgtattttgatatactctttgactaaatgaagttattttttaaaatattagcttttaaaattattataatttaaattattatttccagaagcaattttctctattaatatcaaacatcataatcccaagtaatttttttatggttgtttggtcaaaatattaactttaaatggctgaaatcaatgcaaaataaacagcaatctaaagaattacaatcttttgcttcacaataataaattagtaatgcagattccaatgcttataataattctgaaaaaagatgtgtagtcactaataacattagttataaatgttattgcacaaattattttataaataaaaatctaccacccactccaccctcagtatcctacccaccagaaaaaatacaccctaaaaatgtctcatcatgatgacttaggtctatcttcaagcattttaaattaaaaaaaaaattaagttactatgcccaattacatagggttacaggcttaagtctctactcacacagttgaggttgatgagcaaacagctgtcctgtatcttgagacagacattagctttctgccttccctattctcataagcagctacttaaaagttttgaattttatgcaagaaaacattttaaagccttctgtgttttactgcagcagacttcagattcattcctgtaacacatttaacatgaaacagagttgagacatataaaatttacgtaccacattttaaccacctaaaattttaaggagctgttcgctattatagctaggttaaaagggtggctgaagaaaaagtgaaaaataaaaacattccaattggtatttgacattattaacaatatgcatataactaatccatagattttctatacctggccacagactaggtgagtaaggattactttatataatcattttatccaaagtaagcaaaagtaggtatttttctgttttccttaagtctagctaatttatttagaataaacagctaccaactaaagaacacttttaccaacagtcagtggaatgcctttagagtctcaagtatacatgtcatagcaccggactagggagaatgagattgttttgtgacagcaggaggagccatgttgctgacattttctatggtttatagcacatttcttgacagattaaaatttctacagtaccattattactacaggttaatcaagtgttagaagccttgcctagaaaataaaaccttgttcccataaaaaaaaaaaactattctactaaactgaactttcaaaataccaaaaatacagaaagtctgtaaattaagaactacaattacaagataaaaatctttgtttctccatcccattagcaaatatgtattacataggcagtcataatgacagtttgcactgcaaaaataaatgtatgtatttatttatttatttatttatttgagacagtttcgtt

SEQ ID NO: 86590 - DNA, 1697 bp, Homo sapiens
aagagagagaaaaaacatccaattaagagtctcactcctaaatccataaagaaaaagtcggggggaggagggtagaaaaaaaccagacaccaccctaccatagattcttaaggtgttaactttaacaccttaaaggaaagaaaaggagattttttttcttccataggcatttctattattcaaagtactttaaaaaataaaattggcgaatttaaaaaactttcaactgcatttagggaacaagggtgcttgtattttgatatactctttgactaaatgaagttattttttaaaatattagcttttaaaattattataatttaaattattatttccagaagcaattttctctattaatatcaaacatcataatcccaagtaatttttttatggttgtttggtcaaaatattaactttaaayggctgaaatcaatgcaaaataaacagcaatctaaagaattacaatcttttgcttcacaataataaattagtaatgcagattccaatgcttataataattctgaaaaaagatgtgtagtcactaataacattagttataaatgttattgcacaaattattttataaataaaaatctaccacccactccaccctcagtatcctacccaccagaaaaaatacaccctaaaaatgtctcatcatgatgacttaggtctatcttcaagcattttaaattaaaaaaaaaattaagttactatgcccaattacatagggttacaggcttaagtctctactcacacagttgaggttgatgagcaaacagctgtcctgtatcttgagacagacattagctttctgccttccctattctcataagcagctacttaaaagttttgaattttatgcaagaaaacattttaaagccttctgtgttttactgcagcagacttcagattcattcctgtaacacatttaacatgaaacagagttgagacatataaaatttacgtaccacattttaaccacctaaaattttaaggagctgttcgctattatagctaggttaaaagggtggctgaagaaaaagtgaaaaataaaaacattccaattggtatttgacattattaacaatatgcatataactaatccatagattttctatacctggccacagactaggtgagtaaggattactttatataatcattttatccaaagtaagcaaaagtaggtatttttctgttttccttaagtctagctaatttatttagaataaacagctaccaactaaagaacacttttaccaacagtcagtggaatgcctttagagtctcaagtatacatgtcatagcaccggactagggagaatgagattgttttgtgacagcaggaggagccatgttgctgacattttctatggtttatagcacatttcttgacagattaaaatttctacagtaccattattactacaggttaatcaagtgttagaagccttgcctagaaaataaaaccttgttcccataaaaaaaaaaaactattctactaaactgaactttcaaaataccaaaaatacagaaagtctgtaaattaagaactacaattacaagataaaaatctttgtttctccatcccattagcaaatatgtattacataggcagtcataatgacagtttgcactgcaaaaataaatgtatgtatttatttatttatttatttatttgagacagtttcgtt

SEQ ID NO: 86591 - DNA, 1697 bp, Homo sapiens
aagagagagaaaaaacatccaattaagagtctcactcctaaatccataaagaaaaagtcggggggaggagggtagaaaaaaaccagacaccaccctaccatagattcttaaggtgttaactttaacaccttaaaggaaagaaaaggagattttttttcttccataggcatttctattattcaaagtactttaaaaaataaaattggcgaatttaaaaaactttcaactgcatttagggaacaagggtgcttgtattttgatatactctttgactaaatgaagttattttttaaaatattagcttttaaaattattataatttaaattattatttccagaagcaattttctctattaatatcaaacatcataatcccaagtaatttttttatggttgtttggtcaaaatattaactttaaatggctgaaatcaatgcaaaataaacagcaatctaaagaattacaatcttttgcttcacaataataaattagtaatgcagattccaatgcttataataattctgaaaaaagatgtgtagtcactaataacattagttataaatgttattgcacaaattattttataaataaaaatctaccacccactccaccctcagtatmctacccaccagaaaaaatacaccctaaaaatgtctcatcatgatgacttaggtctatcttcaagcattttaaattaaaaaaaaaattaagttactatgcccaattacatagggttacaggcttaagtctctactcacacagttgaggttgatgagcaaacagctgtcctgtatcttgagacagacattagctttctgccttccctattctcataagcagctacttaaaagttttgaattttatgcaagaaaacattttaaagccttctgtgttttactgcagcagacttcagattcattcctgtaacacatttaacatgaaacagagttgagacatataaaatttacgtaccacattttaaccacctaaaattttaaggagctgttcgctattatagctaggttaaaagggtggctgaagaaaaagtgaaaaataaaaacattccaattggtatttgacattattaacaatatgcatataactaatccatagattttctatacctggccacagactaggtgagtaaggattactttatataatcattttatccaaagtaagcaaaagtaggtatttttctgttttccttaagtctagctaatttatttagaataaacagctaccaactaaagaacacttttaccaacagtcagtggaatgcctttagagtctcaagtatacatgtcatagcaccggactagggagaatgagattgttttgtgacagcaggaggagccatgttgctgacattttctatggtttatagcacatttcttgacagattaaaatttctacagtaccattattactacaggttaatcaagtgttagaagccttgcctagaaaataaaaccttgttcccataaaaaaaaaaaactattctactaaactgaactttcaaaataccaaaaatacagaaagtctgtaaattaagaactacaattacaagataaaaatctttgtttctccatcccattagcaaatatgtattacataggcagtcataatgacagtttgcactgcaaaaataaatgtatgtatttatttatttatttatttatttgagacagtttcgtt

SEQ ID NO: 86592 - DNA, 1329 bp, Homo sapiens
tgcattttctggcttggtccctggggtcttggtgtcccgtatttcagttgcaacagaagagaatttaggaggcgggtagaggggagtacatggcaggagtcagaggctttaagccccactgaacagagagagactaagaccactctttttttwgtttgtttgttttgttttgttttgtttaagacagagtttcactcttgtcgcccaagctggagtgcaatggcacgatctcggctcactgcaacctccacctcctgggttaaagtgattctcctgcctcagcctcccaagtagctgggactacaggcgtgcgccaccatgcctggctaatttttgtatttttagtagagacagggtttcaccatcttggccaggctggtctcgaactcctgacctcatgatctacccacctcggcctcccaaagtgctgggattacaggcgtgagcgcgcgcgcccggccataagaccactcttaactcattcattagtgaacccctgctccatggagtaccatgctagctgctaaggatagagtgatgaagagcagcagggtctccaccctcctcactggctcaaggccacttgtcctgcctccatcaggactaactaagcagccgaggtgtggctgagtcagcaggcaggaagtgtgagtggcctgcatcttaggagctggggctggcagggtgccagattagagaggcaggtgctgaggctaagattccacgcagcagttaatgcctctccctctattatccccgatccagaccagctgtcctggcgtgtgtgcagacctgcaagttcagcaaagcccacagacttcagtgtgaccaactgtcccagtttgcccagaactggtttggttttagcattgtcccaggaaacccctctagtgcaggactgaggtccttggggctgagtgaggagtggccgcatgccaaatgagtaattgctggtgctgtggcaaagccccaggcttggtccttggaagtttgaacactgttgggctggtgtttgttcccagctgccctgaatgaccacacagctgggtgtttgggaaacaattagtggcattcctgacccaaatacctccaatcttgttcattagtcactcatatatgaggaaatgaattcaggaaaaacacaatcatatattattttggtgtgagtgtctgctccccagtgtcaccctggtgtttcgttctcttatcactctagattgtgaatttttatttgtagctgtctttcccaccaggttctctcatagaatcctgagtctggtgacttagtgtatcgcacataatagggactccagaagtgtttcatgaata

SEQ ID NO: 86593 - DNA, 554 bp, Homo sapiens
gaagcttcttgatcatgcagaagcagaaggtcccttggctgcacagttctgtgttgtggttttgggagtccttccggaaggttcattctagtgtctatttctttagggcctccagtgattctgtgatctgtctttaacacgtaataaatacctttctgtttaaactagctggggcagattctgtggtctgcaactgagaacactgacccacaccccacgcccgggagaaatatgtctgcttgtacttagattcttcctggtaattcagaggccttcagagaagcagattctgagcatgaagctgacttgttgccctccgccaggattcggattgtgccactgctctggttccagcaaagtggccgtgttctttctgaaatagaagcccagccctgctgcgagatataccagcttccagctggggaggtagttactcttcctaatatccctgttagaaaggaaacaaaagggatgaagtgttcatgctgttcctagaaagaaagtagagaaccatacttgaatacctctttcaataactccttsgccaggggctt

SEQ ID NO: 86594 - DNA, 554 bp, Homo sapiens
gaagcttcttgatcatgcagaagcagaaggtcccttggctgcacagttctgtgttgtggttttgggagtccttccggaaggttcattctagtgtctatttctttagggcctccagtgattctgtgatctgtctttaacacgtaataaatacctttctgtttaaactagctggggcagattctgtggtctgcaactgagaacactgacccacaccccacgcccgggagaaatatgtctgcttgtacttagattcttcctggtaattcagaggccttcagagaagcagattctgagcatgaagctgacttgttgccctccgccaggattcggattgtgccactgctctggttccagcaaagtggccgtgttctttctgaaatagaagcccagccctgctgcgagatataccagcttccagctggggaggtagttactcttcctaatatccctgttagaaaggaaacaaaagggatgaagtgttcatgctgttcctagaaagaaagtagagaaccatacttgaatacctctttcaataactccttcsccaggggctt

SEQ ID NO: 86595 - DNA, 571 bp, Homo sapiens
tttttaattttagccattttagtgtatgtatagtgataaatactcattatggctttaatacgcaatcccttgatgactaattaatgttaagcacctattcatgtatactgagctatttggctatccccttttgtagggtgtcttgtcttcacaaggtatttgcttacattttttattgagctctctgtgtttttcttaatgacgtatatayactagagctgagttctttattggacatgagtatgattaatattttcttttactctatggcttgccttttcactctgttaagaatatcctttgataaagagaggcttttgattttaatgtaattgaatgtatttctcttatttaaatttagtcatttttgtgctctctttaagaaatatctgcctacaccaagatcatgaaaatatgatgcgccattgtcttcaaaaagccttgtcgttttccctactatatatctgtaattgattttttaaattggtgtacagagaatccagaattaatgtttacttggttatccaattgacccagggtcatttattgaaaatatttatttttcttatcc

SEQ ID NO: 86596 - DNA, 1041 bp, Homo sapiens
ctaggtatatgtcagagcttttcaaggaactatatggactcttattgcccatttttttttaacttttttggttagcttcttgttagtaccaaacagtttcaccaccgcaggtatctgtgatgttaaacagttgcaactgattgttttcaacaaatgcaccagggatagggctgtttgcacagagcaagttctgaaccaggtcaaataaagacaaaccctgagaatggaacttttcaaggtgcttccagacaggtcaaataatgacagtttacttagtatggggcttttgagaagatctaaacctattctgccccatccagtggctgctggatggttttcaaagctactgtagttgtgaggctgttggcttactaggctactgtagagctggagagaagtagttgrgaattgggcagatcaaaatgccctaaagctcactgtactcaccaagattcagtaatttttctttaataaatactccttggattgttgtgtttggttaatttctggagttggttttaactatttttgccagtgtactcccttttatggagaagcagattttctaccactctagaagtgcttctcccagatttatttttattgcttattatcctgaataggtccctcagcttccaggtgcctaaatctttgagcacagtgtagtattttcatcaaatatcttacaattattatgacaaagtaatgcaaaaggccaaacatatatttgacatggtgagtatataaaaacaggccttgatgtttcttaaaagttctgctccaaggatgtcctctccccaggggagtatacaaccgaagtgtcaaaaacctgccaattcctcattttatgtgagagctaaaatttctgggtaaatgaaagtgaaatatttagacctgctttcctacctaagtgactgtgaaatcatgttgggaacccaaaccccaggaagattgtgttgttttaatcttatgtgctaattaatttgaagatgaagtatttaaatagaggtgcaggagggataaactgtggagggagggggt

SEQ ID NO: 86597 - DNA, 1497 bp, Homo sapiens
tgacgtagtaagaaacctgaagataacgaaaacccacattaacctaatgttgcagaaaagagggcttcatcattgttgtctgagaaacttgtgagtaaaagacaaaaataatacatattgtgagaaatacattcaatacaatataaggaaaatattctttagcttcttgagactccatgaagttcaagagttaggaaattctgaaaagggtttggcagggtcatagtgattccgtctggaaagggtttgtttgtgcttggtctcagggctgctaggaagatgggaaatgtctctggcactccaggagagcaattactctgtgccatgacttcawgtgccccctcaccatgatgcagtgccccatgggagatgttctgtcactgatcccactgtctcactacattccaacagtccaaaagacaggcaaaaatttagactgataactttttttattagtctgatttaaaaattagttacacaagtaaaataatgtctgtatcacactcataatcacgtgtgcacatgaaaatgttagctcagaggaggttgaatgcttctccagtgcagacttcctggaaagctggaaagctgggcaatggctcaggggcccctgggcacagcactgtcttctcctgaatgagaatcagctgtgctgatgcctacgttagttcaagaaccaggagctgcataaacaagcttttgagaagtatgccagaagaagctcagattgatgatggtgtgtttgacaaaattaatgaagccatgcttattagactgaaagataagattccaaatgtgagaatacaggcagttctggcgctttcacgacttcaggatccaaaggatgatgaatgcccagtggttaatgcatatgctactttgatcgaaaatgattgatttgaatccagaacttagacaggcagtgttatcatgtattgcaccatcagcaaagactttgccaaaaattgtagggtgcaccaaggatgtgaaagaggctgtcagaaagctggcttatccggtgttagctgaaaaggttcgtatgagagctatgtccattgctcagacagtaatgctccctcaacaaggttttaatgagagatgagatgctgtgaaacaagctatgtggaagcatcttctccaaagctggttatggttctctgagggaaatatcttcgagtggcttcagcagttggatgtagaaaattctgaagtggcagtctctgtcctcaatgccatgttttcaatgactcctctcagtgaactggtggcaatctgtaaaaacaatgatggcaggtacataaaggattcattctttgaaatgtaatactgattaacttctacaattaatttgttttttttcctccccatagcttaagattatattaatatctttaatcttacctcccttttgttttcttttagtctgatgaatatcttctttcccttcttttttcccctcctggtgtaagaactcattactttatcttagactatcta

SEQ ID NO: 86598 - DNA, 1074 bp, Homo sapiens
atacagaatattttaattaacctatcagagtaaaaacttgcttaaattattcttcaagtattggctataaatagataatgtttagttatgttgacataggtgagatagctatatctagaaatgattgaacataattaataattatatgccataattatatccaacttgattttacatttttcaagactttgcattctcttctgctctttatacttaacataatcaccatacctgattcctacacagcttaggaaaattaatcagcatactctctatcattatatgaaagtaaaatgcatttggatgtttgttattgttttattttcttattgtttacctggattctttgtttgttctgccattttatggtatctaccaatacctccataaccacttgtatttaaggataacccttcttgacaccaatgtatttagatttatgcagtaaatcactgtgatatatcatttatacatattacttctccaattctcctaacaatttttttgctgttaatctgtgaggaataaaaaggatttttattattattattattgttcttgtaaaaatgagaaaactaaagcttagataaattaaataaataatttagtgttatccagtttatgtgattttggatttaaaacaaggtttaccaacttayatgacattcattcttaatataggagaaagttattgcaagtacactcatagagaaaaatatggtagacagagtaaatcagtgtaaaaatgaagaaactttaaatggctattggagatgtttgccattaaattaggatgtctaaactattcccaactgcctcacaagaaatctactcatttttagtacttttaaactattgctatggaccagcatgattcaatataatagccaccagccacaggtagctatttaaatataaatgtaagaattgacataaaataaacttaaaaatttatatctcagttgcactaactacatttcaaatgctcacgtgctcagtagctatatgtggctggtgcttgtcacattggacagcacagatatgtccattattacaaaggttcttagcatttat

SEQ ID NO: 86599 - DNA, 1141 bp, Homo sapiens
tctgtgtgtgtttaaaagtgcttgagagagtggccaataatgcttagaaaacaaaacataaaagccagtaattttggatcaagggtacaatgataacccttttttacattatataactcataacctcataactctcaataacttaatgaaggtkacttgaaacacgaattcaaagttcttcaagttaaatacatagaaattctaagttaaggaagctaattctttaccaatatatttactaatttctctgctaacaaattttttaaattcaactcctttcttgtgggtttaatatttttcttccttaagaaatcagttaatggatctttttaatgtcaaagataaattcactctctcaatcttttctagtcttaaaatggccttaagtattacattattgactaataccttattgtaacaatctcagttgaccattattttcctccagtactttggatatatcaatcaatagtcttgtaccatatattattgcttaagagaagcctattatcaaatctatttccttattattagtactgtgaattagtcttaatagttaaaatgttctattttttgacattacacatttttactatgaggcatctggtgtgaatttgttttttttcttctcggaattcaatgtaattcttttatattaggaattatgtcttgttcaattttgagaattcttaggcattctatattcaaatatatagggacttttcattatatctttggtgcctcataattttattcacattttctatttttttatttctctgaattacattctgatccatttcttcagttttaacatttgtttcagttaatacttctagatctatatacggttcatcctttaaatgactaatttaggctattatttttttcaaaaactattcatcttaaagttccacttgattactgctcatatttcctgactgtttttcattctattcttgcttgtttctattttttctttagctatttgagcactttcaactatcttttacagtttattagttttacttatattgtaaattcccctctttatacaattgactgattctctctcattgtgggttgttgcacagtatatttgtaactttttactgtggtctcatcttcagaagattttctt

SEQ ID NO: 86600 - DNA, 1141 bp, Homo sapiens
tctgtgtgtgtttaaaagtgcttgagagagtggccaataatgcttagaaaacaaaacataaaagccagtaattttggatcaagggtacaatgataacccttttttacattatataactcataacctcataactctcaataacttaatgaaggttacttgaaacacgaattcaaagttcttcaagttaaatacatagaaattctaagttaaggaagctaattctttaccaatatatttactaatttctctgctaacaaattttttaaattcaactcctttcttgtgggtttaatatttttcttccttaagaaatcagttaatggatctttttaatgtcaaagataaattcactctctcaatcttttctagtcttaaaatggccttaagtattacattattgactaataccttattgtaacaatctcagttgaccattattttcctccagtactttggatatatcaatcaatagtcttgtaccatatattattgcttaagagaagcctattatcaaatctatttccttattattagtactgtgaattagtcttaatagttaaaatgttctattttttgacattacacatttttactatgaggcatctggtgtgaatttgttttttttcttctcggaattcaatgtaattcttttmtattaggaattatgtcttgttcaattttgagaattcttaggcattctatattcaaatatatagggacttttcattatatctttggtgcctcataattttattcacattttctatttttttatttctctgaattacattctgatccatttcttcagttttaacatttgtttcagttaatacttctagatctatatacggttcatcctttaaatgactaatttaggctattatttttttcaaaaactattcatcttaaagttccacttgattactgctcatatttcctgactgtttttcattctattcttgcttgtttctattttttctttagctatttgagcactttcaactatcttttacagtttattagttttacttatattgtaaattcccctctttatacaattgactgattctctctcattgtgggttgttgcacagtatatttgtaactttttactgtggtctcatcttcagaagattttctt

SEQ ID NO: 86601 - DNA, 750 bp, Homo sapiens
atgcatttagtagtaatcaaaacccatttttgttctattgcacactaggttgaagggatgttaatattgttaacatattatttgacaagaaactctaaagttaaatatatctggactacaaattctgataaaatactcatcttttgctcccaattatgcttattctgaagatacaagaatgaacaaaaatgacatgggtcttatagagcttgcatcttacagagcytgcatgctcatgtaagagacaaaagattagaaagccaacaaacaaaaataattgtagcttgtgataagagctcataaataaagtgctttggcagcaaataaccaaggacagtgggctacttcagatgaggtggtaggaaagaggtctctgagatgtcagatgaaccgaggcccaaagactgtaaaggaagtggtcatatgtggaaccaagtgaaatttatttgagatggatggaaaagcaactataagcgaaagcaacctgagggagaaaacgcctgggtcttctggcggcatgagaagatcaatgtggctgaagcatggtgagccaatggggagaggaaaagagcttaggtgtaagggctgcttaaggccaaatgtatattctaggcttagaaaatcttggtaaggcatttgaagtttattaaacaatccaatggaaacaactatatggataaatcttaaaaatattgtggcaaaaataaaaaaaccttaaatacataaaacataaacactactataaaaatc

SEQ ID NO: 86602 - DNA, 894 bp, Homo sapiens
atgtgccagagttaagggaccccataagtggagtttcagtgctcttttgttggacaattcccttctttctgggactctgcccttcatattgctattgcattagcttcttcaacttctcatctctgtctcctccacttatctagatcactgtgttttgcttgggattccaattttttgcatgtgaatgtataaagtgtctcaggcagaaaaccaaggaaattatacagcttgccttttctgtttcttttctctcagggattacaggcttgttcctgtttatcatgtctgaaaacactttaaaaaaaatatggcctagttttcatttcttgtttgtgggacagtaagtctggtcctagatgttccttaattacctaaagcagaagtctgaaaaagttgactttcaagtggtgtcatggagggaatgagtgagctaactatgtggatatctggagaaagggctttctagtaataataacagcaacaagtacaaagtacctaaggcatctgtgtgcctggaagacttaaggtaatgtggatagagcaggaaaaagtaagggagaagagcaagagttgagatcagagattgaattggagccaaatmatacaggaatttgtaagttactctaaggactttggctttcactttgagtggcatgagaaaacttatgaaggttttcagcaggagagtgaccatgatctgactttattttaacaaaatcattttgctactgtgtaaatgttaggctaaaatgaggcaagggcagaagcagaaacaccagtcaggaagctgctgcaattacctggaaaatacacgacagtggcttggacatgactgtcatttactggttatgaaagttggtgtaatataaaagatttaggagatttggggatgca

SEQ ID NO: 86603 - DNA, 639 bp, Homo sapiens
tgttgatctgtgaccttacccccaaccctgtgctctctgaaacatgtgctgtgtccactcagggttraatggattaagggtggtgcaagatgtgctttgttaaacagatgcttgaaggcagcatgctccttaagagtcatcgccactccctaatctcaagtacccagggacacaaacacttcggaaggccgcagggtcctctgcctaggaaaaccagagacctttgttcacttgtttatctgctgaccttccctccactattgtcctatgaccctgccaaatccccctctgcgagaaacacccaagaatgatcaattaaaaaaaaaaaacaaaaaaaaaaacaagccaaggcaggggcccacagctctctgtgacccacctgggcagacctggcccgtgatagaaggagagggtgatggtatgagactcaaacccctgggcttgggcactacgtatccttggacaagtcacacacctctatgaattccctttgctcaagcatatgatgcagttgcttaattaaactcttgtgaggaccaagagagggaatggctgtgaaaatgctttgaaaatataaaaccaggccagtcaatatggctcacgcctgtaatcccagcagtttgggaggctgaggcggga

SEQ ID NO: 86604 - DNA, 639 bp, Homo sapiens
tgttgatctgtgaccttacccccaaccctgtgctctctgaaacatgtgctgtgtccactcagggttgaatggattaagggtggtgcaagatgtgctttgttaaacagatgcttgaaggcagcatgctcsttaagagtcatcgccactccctaatctcaagtacccagggacacaaacacttcggaaggccgcagggtcctctgcctaggaaaaccagagacctttgttcacttgtttatctgctgaccttccctccactattgtcctatgaccctgccaaatccccctctgcgagaaacacccaagaatgatcaattaaaaaaaaaaaacaaaaaaaaaaacaagccaaggcaggggcccacagctctctgtgacccacctgggcagacctggcccgtgatagaaggagagggtgatggtatgagactcaaacccctgggcttgggcactacgtatccttggacaagtcacacacctctatgaattccctttgctcaagcatatgatgcagttgcttaattaaactcttgtgaggaccaagagagggaatggctgtgaaaatgctttgaaaatataaaaccaggccagtcaatatggctcacgcctgtaatcccagcagtttgggaggctgaggcggga

SEQ ID NO: 86605 - DNA, 639 bp, Homo sapiens
tgttgatctgtgaccttacccccaaccctgtgctctctgaaacatgtgctgtgtccactcagggttgaatggattaagggtggtgcaagatgtgctttgttaaacagatgcttgaaggcagcatgctccttaagagtcatcgccactccctaatctcaagtacccagggacacaaacactkcggaaggccgcagggtcctctgcctaggaaaaccagagacctttgttcacttgtttatctgctgaccttccctccactattgtcctatgaccctgccaaatccccctctgcgagaaacacccaagaatgatcaattaaaaaaaaaaaacaaaaaaaaaaacaagccaaggcaggggcccacagctctctgtgacccacctgggcagacctggcccgtgatagaaggagagggtgatggtatgagactcaaacccctgggcttgggcactacgtatccttggacaagtcacacacctctatgaattccctttgctcaagcatatgatgcagttgcttaattaaactcttgtgaggaccaagagagggaatggctgtgaaaatgctttgaaaatataaaaccaggccagtcaatatggctcacgcctgtaatcccagcagtttgggaggctgaggcggga

SEQ ID NO: 86606 - DNA, 639 bp, Homo sapiens
tgttgatctgtgaccttacccccaaccctgtgctctctgaaacatgtgctgtgtccactcagggttgaatggattaagggtggtgcaagatgtgctttgttaaacagatgcttgaaggcagcatgctccttaagagtcatcgccactccctaatctcaagtacccagggacacaaacacttcggaaggccgcagggtcctctgcctaggaaaaccagagacctttgttcacttgtttatctgctgaccttccctccactattgtcctatgaccctgccaaatccccctctgcgagaaacacccaagaatgatcaattaaaaaaaaaaaacaaaaaaaaaaacaagccaaggcaggggcccacagctctctgtgacccacctgggcagacctggccygtgatagaaggagagggtgatggtatgagactcaaacccctgggcttgggcactacgtatccttggacaagtcacacacctctatgaattccctttgctcaagcatatgatgcagttgcttaattaaactcttgtgaggaccaagagagggaatggctgtgaaaatgctttgaaaatataaaaccaggccagtcaatatggctcacgcctgtaatcccagcagtttgggaggctgaggcggga

SEQ ID NO: 86607 - DNA, 351 bp, Homo sapiens
ttccacatatcatagctctggaaaayccaataaagtaagttgttatcccattgtgtttattataatgtttgttataattgttttgtatccctatatgtttattataatgataatttcaagtgagaaatcatttctgaagatctttctgaaaactcagttttaagctaattttcaaacaaaaaaaaatcaatctcaatactttttttgttttgttttgttttgttttgagatggagtctcactctgtcaccaggctggagtgcagtggtgtgatgttggctcactgcaacctccagctcccagattcaagcgattctcctgcctcagcctcccaagtagctgggattacagg

SEQ ID NO: 86608 - DNA, 318 bp, Homo sapiens
ggattacaggtgtgaaccaccgcacctggcctttttttattattattattgtagaaatgaagkcttgctacgttgcccaggctggtctccaattcctgagctcacaggtttctcccacctcagcctcccaaagtgctgggattacaggcatgagccaccatgcctggcacaatttctttctagaacccaaatcatctgccagatcagaagtcatttttaaattaaaattaaattggttcatagatgaatatcaagccagtgttgtactgccccttctgtaagatatggccagagagcagctggtgccttctgggatgg

SEQ ID NO: 86609 - DNA, 1920 bp, Homo sapiens
gggtttttgtggatgatagcaggatactcagcttacttttgctgcaaggcgaggtagtttacctaaggcttaagaggaggaatatgaatgtctttggagatggtggtttcaccatgttggccaggctggtctcgaactcctgacctcaagtgatccacctgccttggcctcccagagtgctgggattacaggcatgagccaccgcgcatagtctttattggttctgagttggagtctagctctgtcacccagagtggagtgcagtggtgcgttcttggctcaccgcaacatccgcttcctgggttcaagtgattcttgtgcctcagcctcccaagtaggtgggattacagacgcacaccaccacacccggctaatttttttgtattttttagtagagacggggtttcaccgtgttagccaggatggtctcgatctcctgacctcgtgatccacccacctcagcctcccaaaatgctgggattacaggcgtgagccactgcgccctgcctaatttttttatttttagtagagacggagttttgccatgttgcccaggcttgtctctaacccctgagctcaggcaatccacccacacctcagcctcccagagtgctagaatatgaatgtttgaggtaataataacaatgattaaagaccagctcagtaaaatgtttgccataagctggagtagagcctttagttagattttactttatttttgcstataaacataggcacctataacacagatgacccaaagttagtaatgtttcattataagaaccacttgataacaaactataaattatgtagcacagttaaatttactatatgcataattaatacatagcatctgaataaaactcggtgtgccgagcacggtggctcatgcctatcactttgggaggctaaggcaggaggcttgcttgagcccaggagttggagaccagcctggacaacatagggaaaccttgtctctacaaaaaataaaaaaagttagaccagcattgtggcacacacctgtcgtcccagctactcaggaggctaaggcagacggattgcttgagcccaggaggtcgaggctgcagtgagctaaggtcacgctactgcactccagcctaggagatagagtgagtctctgaaaatcagtcaatttcttagtgtaaaatgctaaaagaattgtgataattgtcttttcttttctttcgagatggagttttgctcttgttgcccaggctggagtgcaatggcaccatctaggctcactgcaacctccgcctcccaggttcaagtgattctcctgcctctgcctcccaagtagctgggattacaagcatgcgccaccatgcctggctaattttgtatttttagtagagacggggtttctccatggtggtcaggctggtctcgaactcccaacctcaggtgatccacccgcctcaccctcccaaagtgctgggattacaggcctgagccaccacgtccagcaggaactgtgagaattttctcaggcagaaagatgcttgctatgctttgctttttttttattattttttgaaacagagtctcactctgttgcccaggctggaatgcagtggcctgatcttggctcactgcaccctccacctcccatgtttaaacaactgttatgcctcagcctctcctgagtagctggtattacaggtgtgcgccaccatgcccggataattttttatttttagtagagaccaggtttcgccaggctggtcttacactcctggccttaagtgatctggcctccttggacttccaaagtgttgggatgacaggtgtgagccaccgcaccaggccagaaagaaggttcttgaaggaaatagatgtattttccccacgtatttggagatggtggtggtttaatgtttacagatgaaaaggagagaa

SEQ ID NO: 86610 - DNA, 600 bp, Homo sapiens
atgcacttcaaacatgtattgttcaagggacaattgtacaagcctactaatggcttaggatgggaaaaaaacatcccatacatagtcatcctgactcattcaataccaagacaacatactcaagtctatccttataatttaatttatccagtttcgcagccggtggggtctttttctaaactcttgcattgtgatagtgtcaatcttttttttttttttttttggagacagagtctcgtcttttgcccaagctgcagtgcagtggcacgatccctgctcactgcaacctctgcctccccggktcaagcaattctcctgcctcagcctcctgagtagctgggattacaggtgtgcaacaccatgcccagctaattttgtatttttagtagagacagggtttcaccatgttagccaggctgatctcaaactcgacctcaggtgatctgctcgcctcagcctccccaagtgctgggattacaggcatgagccaccatgccaatctttaagaacttgcctcaggtacacctaactgctaagtcaaattcctttgactgttaatcctgcattataattctcttcttacttagttgtatttaattg

SEQ ID NO: 86611 - DNA, 781 bp, Homo sapiens
gttcattaaaaagtcaggaaacaacaggtgctggggaggatgtggagaaataggaacacttttacactgttgttgggactgtaaactacttcaaccattgtggaagtcagtgtggcgattccttagggatctagaactagaaataacatttgacccagccatcccattactagatatgtacccaagggattataaatcatactgctataaagacacatacacacctatgtttattgcgcactattcacaatagcaaagacttggaaccaacctatacgtccaacaacgatagactggattaagaaaatctggcacaaatacaccatggaatactatatggcgataaaaaaggatgagttcgtgtcctttgtagggacatggatgaagatggaaaccatcattctcagcaaactatcgcaaggacaaaaaaccaaacaccacatgttctcactcataggtgggaattgaactatgagaacacatggacacaggaaggggaacatcacacactggggactgttgtggggtgggggtagaggggagggatagcattaggagatrtgcctaatgctaaatgacgagttaaagggagcagcacaccaacatggcacatgtatacatatgtaacaaacctgcacgttgtacagatgtaccctaaaacttaaagtataataataataaaattaaaaaaaaagaaactgtgtgaacaaggaattctttgtcacatctgtgctttggtcagtaatagaccagcaagcaattcattcagtcattgtgggtg

SEQ ID NO: 86612 - DNA, 781 bp, Homo sapiens
gttcattaaaaagtcaggaaacaacaggtgctggggaggatgtggagaaataggaacacttttacactgttgttgggactgtaaactacttcaaccattgtggaagtcagtgtggcgattccttagggatctagaactagaaataacatttgacccagccatcccattactagatatgtacccaagggattataaatcatactgctataaagacacatacacacctatgtttattgcgcactattcacaatagcaaagacttggaaccaacctatacgtccaacaacgatagactggattaagaaaatctggcacaaatacaccatggaatactatatggcgataaaaaaggatgagttcgtgtcctttgtagggacatggatgaagatggaaaccatcattctcagcaaactatcgcaaggacaaaaaaccaaacaccacatgttctcactcataggtgggaattgaactatgagaacacatggacacaggaaggggaacatcacacactggggactgttgtggggtgggggtagaggggagggatagcattaggagatatgcctaatgctaaatgacgagttaawgggagcagcacaccaacatggcacatgtatacatatgtaacaaacctgcacgttgtacagatgtaccctaaaacttaaagtataataataataaaattaaaaaaaaagaaactgtgtgaacaaggaattctttgtcacatctgtgctttggtcagtaatagaccagcaagcaattcattcagtcattgtgggtg

SEQ ID NO: 86613 - DNA, 781 bp, Homo sapiens
gttcattaaaaagtcaggaaacaacaggtgctggggaggatgtggagaaataggaacacttttacactgttgttgggactgtaaactacttcaaccattgtggaagtcagtgtggcgattccttagggatctagaactagaaataacatttgacccagccatcccattactagatatgtacccaagggattataaatcatactgctataaagacacatacacacctatgtttattgcgcactattcacaatagcaaagacttggaaccaacctatacgtccaacaacgatagactggattaagaaaatctggcacaaatacaccatggaatactatatggcgataaaaaaggatgagttcgtgtcctttgtagggacatggatgaagatggaaaccatcattctcagcaaactatcgcaaggacaaaaaaccaaacaccacatgttctcactcataggtgggaattgaactatgagaacacatggacacaggaaggggaacatcacacactggggactgttgtggggtgggggtagaggggagggatagcattaggagatatgcctaatgctaaatgacgagttaaagggagcagcacaccaacatggcacatgtatacatatgtaacaaacctgcacgttgtacasatgtaccctaaaacttaaagtataataataataaaattaaaaaaaaagaaactgtgtgaacaaggaattctttgtcacatctgtgctttggtcagtaatagaccagcaagcaattcattcagtcattgtgggtg

SEQ ID NO: 86614 - DNA, 583 bp, Homo sapiens
gcagcaaatgaccagaaagattattctcaacatatgtgtgtcttctaattcaatggtgacgctatctaccgggacatagcattagattccaaagggccgagtcccgccagacaggcctcccacactcataacaacgggaagccctacgttgttttacctgtgcttctcagcaactggctataaatcaggttgccaccactcccagatttagttgcattcattggctggaagagctcacagcacgcagggaaacacttacatttgccattgtattttagcggacattgcaaaaagttcagaaataaatgtggggcccggcatgtggggaggggcgcactgccttccaggaagtgttatccagaagctstctgaacccagtccttttgggtttttatggagacctcattctataggcatgatgggttaaaccataggctattggtgatcaactccacctgaggctctcaaccctccgtggaaattggggttgaggctttgccattctcagtctgactaaaagaagttacccaaacggaattttaaaacagatgagcataactggactcttaattagatgattgga

SEQ ID NO: 86615 - DNA, 1064 bp, Homo sapiens
ttttctaaaaattagccaggcacagttatctatagttctagctactcagtgcctataattctagctactcaggaggctgaggtgagaggatgagaggatggggcttgagatagggaggcatagttcgcagtgagccacgattgtgccatggcactctaggctgggagacagagccagactctgtctcaaaaaaaaaaaaaaaaaaccacacagggcaaggtatgtcgagaggggtacagaacttccatgtcctctattgtgcatgttaccttcctggtatctcccttgtgttcagcaacccagacattctccaactccagttgttgagggcgcttatgaacgcttcattatgcaggcatgattgatgaagtcattgaccattggtaattaagtcagtcttcggccactatttcttcctggagcccagggggtgaggctgacagttccaagcctctaatcacatggtttgttcttctgacaacaaccacccctttttctgaagctgtctaggagctttcagtcacccagtcatctcagtaacatcaccaaatgcattcttactatggtgatcccaaaggtcttagaggctcttgtgttagaaacctgggactaagaccaaatattgaaacagaagatgccccatcacyttcatcaccaaggcctttataagagcttgagaagctctttgccaggatgaggggcagaaaccaaatgtgtatttcttttctttttcttttgaacacagagtctgtttcacccaatctggagtgcagtgatggtgttgtagctaactgcagcctcaaccacctgtgctcaagcaattctcccacctcagccttccaagcatctgggactacaggtgcacaccatccatgcccagctaatttttgtatttttttttttgtagagatgggatcttgttatattgccgaggctggtcttgaactctggggctaaagcgatcctttcaccacaacctctcaagtagctgaaactacagatgcatactaccatgcccagctaattttttcttatttctttttgttgtttaattgagggggtct

SEQ ID NO: 86616 - DNA, 1064 bp, Homo sapiens
ttttctaaaaattagccaggcacagttatctatagttctagctactcagtgcctataattctagctactcaggaggctgaggtgagaggatgagaggatggggcttgagatagggaggcatagttcgcagtgagccacgattgtgccatggcactctaggctgggagacagagccagactctgtctcaaaaaaaaaaaaaaaaaaccacacagggcaaggtatgtcgagaggggtacagaacttccatgtcctctattgtgcatgttaccttcctggtatctcccttgtgttcagcaacccagacattctccaactccagttgttgagggcgcttatgaacgcttcattatgcaggcatgattgatgaagtcattgaccattggtaattaagtcagtcttcggccactatttcttcctggagcccagggggtgaggctgacagttccaagcctctaatcacatggtttgttcttctgacaacaaccacccctttttctgaagctgtctaggagctttcagtcacccagtcatctcagtaacatcaccaaatgcattcttactatggtgatcccaaaggtcttagaggctcttgtgttagaaacctgggactaagaccaaatattgaaacagaagatgccccatcactttcatcaccaaggcctttataagagcttgagaagctctttgccaggatgaggggcagaaaccaaatgtgtatttcttttctttttcttttgaacacagagtctgtttcacccaatctggagtgcagtgatgktgttgtagctaactgcagcctcaaccacctgtgctcaagcaattctcccacctcagccttccaagcatctgggactacaggtgcacaccatccatgcccagctaatttttgtatttttttttttgtagagatgggatcttgttatattgccgaggctggtcttgaactctggggctaaagcgatcctttcaccacaacctctcaagtagctgaaactacagatgcatactaccatgcccagctaattttttcttatttctttttgttgtttaattgagggggtct

SEQ ID NO: 86617 - DNA, 976 bp, Homo sapiens
ctatgtatttatttatttattcatttatttatttgaggggagatggaaccctgagcagcccatgtacatggaagatctttattgcagagatcttcaaaccaggtaagccctgccagcttttgtccctccactcctttctccaatccagagttccttgctgccaaaggaagaatttgtgggaagaggaaactcttctctctcgttgctcggcctggccctccaccttttccattaatgatgaagaatttcttttcatcaaacggtcctcttcattatcctctttccctgggttggatttttccccacactgccatgtctgaaagtagaattgagttmtcctcaatgtggattcagcctccaagtaactctactaatgaacaacttaattcacaataaaaacatgggtcagtcttgactctttttaaatgtaattttggatgatcacttttatttttaattttaaaacatggccgtaactaaaataattatacttttgctcaaattgaatggattataatcttaaagataatattcaagagagagagatgatttaaacaagaatcttatttataaaatatttctatcttagtaagaactctggatagaacaaatgttgtctttaatttgattaacaaattcattgtaacataaatgacaataggagaattatatgggacgtttaacaactagagacatctgagattgtaaaagccattctatggtcttactatagttataagacaaactgaaagttacagtatgtcttcctacataaaattttcttaagttaaaaaaaaacacacaattggcaggtctaggcttgagttgggtgagactggaatataatgggagggacagacatagagaagggagatagaatacctatttccaagccagtataagaaactattaactttgggtcccttatggctgcatggaataagtgggagtctgatgtggaaaggagactgttgcc

SEQ ID NO: 86618 - DNA, 1787 bp, Homo sapiens
tgcatgtatagctcacatttatttcaatgtttartattacaagtgttttggatcttcatttagaagtttggtgatgtttttgtgaccagaaatatgccttaggaacttcactcttgtttatatcagtatatggcaaaattagcttcattatatgtcattttccttaaagtcatagtttccaggaacttctcaatgatattgggtgaggtctgactgtaatgtaaggtagtcatgtgttttattgtttactagagagaaagttttcaatattttggctacaagttaagtggaacttagccttgtgcgagagtaatatctacactgacttatcattttttctttctgtaataggatcaaattttctaaattagtgggttttctttgtatgtgtatgtgtgttgaagactttatcattggaaaattccaatacatgtatgagaaaggacttccaacatttctggccaattgcacttttaactgagagcttatatggctataaatagctacatggaggtacctgatttcttctattaacccacgtcctatgtcaaattttcctcaggggatcggatagttaattgactaggtttgctcatgttccctctctcattgcagatatgacttactaaagcaaatgctgtttttaattggtttgtgaacgatttaatcagacagtgtttatgctctggtcataaagaacgccctgcaatgggctcgccatctgttcaaaataaaaatgaaatcccctttgaagatgtaggcaattgatagaaagattttaatgaatgtttaatgtttctggatctatgagaggggcttaccgcgacagtaacataaatgttgtctaagcctgagggctcaatcttagtatttcagttcttattaagtctctgttggagtactgtattttaaatttctgaagttgtataccaaagtgatagagtggggattgagtccagtgaagtgtttgccccagtcaaattctcttttgaatctctgctcacccctgcctggttactgccgtccaataagagtgttttgactgcaaagtggttttctcctttagcaacccatctttcttcagatattgtttattttataaattatgctttatggattttagccaacattttcatctctttggaatccaaactatgttatccttctattctgttatgcatcatttcctttctgatatacattctaactatacttatttcatgtttgaatgacctcgtattctccttcctgacattttgtttctgaaacgtgggctcattatagcatcctgcccgtcttctttgaccattgctgtctcttcaaattgaagtgcgtagtcatagcaaacccagtaagaggtctagctagggaacaattttctaatttaagattgtcactgcatatggtttagttttcccatggttttctgattgaggttgttacaagggtattataaaagagggaagaggaaagcttttccccaaaagtgatatcatgaagtatataaacttgacctacaatgtgaaaatttagtgtattttcttcaatataaaatgctacttggcacagtggatgtttcccagtgtcattttgctatagaatagttgcctatttgtcagaaactttttgtcagttttctcagtatctgcaggtggtaagtatgcttcagaattcaggcaaggaaaattgtgtgctcacagggattcgtgcaagtgcttgacaaaaaatatgatcttatttctgaattcttccacagcttcaatgtgcataatcagggtatttgctag

SEQ ID NO: 86619 - DNA, 1059 bp, Homo sapiens
tagctctttccattttcttgagtcaagcgcagaagaccaagacaagaaaacacagtgtgagtgtcttagtctgcttagtggtgctataaaggaataccagaggctggggaatttataaagaaaagagatttatttggctcgcaattctgctggctggactattgggcatctggtgaaagcctgaaggtgggctgctttcactcaaggcagagtgcaaaaggaagcaagctgtgcagggattacatggcaagagaggaagccagagaggggtaggggaggtgccaggctatttttaacaaccagctctggagggaactaatagagcaagaaattactcatccctgcctgatctaggtgggggagatcagtctattcaggagggatcctcccccatcactcaagcacctcccattagactctgtctccaacattggggatcaaatatcaacttgaggtttacagggacaaacatccaaactatagcagtgagtaacaggtggtatccaagttctgttgccagtttagttgtcctctccttcttgacaatttgctctgccctagatttttatctttcttttcttgtgaaatgtacagaagacctacttattatctaattgcttttgtttttgcactgctgagaaattgcgtgtgtgtttatgtcttaaatttttatatttttatgttttttctgaatttaaaaaatagtggtaaacgctgggggcaggtcttgagataattattgtatagattatgtcactatggcatgtatrtttatatataatacaatatatacataatacaatatgatgtaaaatagtgtaatatagcacaaaataatgcacagaatccttcctgcctattaaatgaggaagagctcaaatttaattctgcccaaagtcttccttgaacgaatctctgtagatcatctctctcaccatctgtaatatgtatttggcacttaattacactaggcagtttatgatatctgtttaaatattaaagaattaataatagtagatattatgtattgagtgttcattatgtgctaggcacagtaac

SEQ ID NO: 86620 - DNA, 523 bp, Homo sapiens
aaaaaaaaaaaaaaaaaaagaaagaaagaaaggaaggaaggaaggaaggaaggraataaaaaaaatagacatagaccaatggaacaaaatacaagtccagaaatagacctcacaatcattttcagctttatgcaattcaatggagatgaaatagtcttttcaattcattttgctggagcaattgggttccatgtggggaaagaaaggaagcttggctcatacatcacaccatattcaaacattaatttgagatagattctagacatacatacagaaggttaatgtcaaagcttgtagaaaaaattgttatgatcttgaacaaaatagaaaatcactaataatacttcattaaacttaggaacaagtccatgtattcttatagttattctaagcagtatcttcaaatcaagctaggcttcataacatttaagtacttccaccattatccaccattatcttgaagtttgtagaattacctaaactaacattttattgttatgctctcagctttttatcgaagggc

SEQ ID NO: 86621 - DNA, 523 bp, Homo sapiens
aaaaaaaaaaaaaaaaaaagaaagaaagaaaggaaggaaggaaggaaggaaggaaataaaaaaaatagacatagaccaatggaacaaaatacaagtccagaaatagacctcacaatcattttcagctttatgcaattcaatggagatgaaatagtcttttcaattcattttgctggagcaattgggttccatgtggggaaagaaaggaagcttggctcatacatcacaccatattcaaacattaatttgagayagattctagacatacatacagaaggttaatgtcaaagcttgtagaaaaaattgttatgatcttgaacaaaatagaaaatcactaataatacttcattaaacttaggaacaagtccatgtattcttatagttattctaagcagtatcttcaaatcaagctaggcttcataacatttaagtacttccaccattatccaccattatcttgaagtttgtagaattacctaaactaacattttattgttatgctctcagctttttatcgaagggc

SEQ ID NO: 86622 - DNA, 523 bp, Homo sapiens
aaaaaaaaaaaaaaaaaaagaaagaaagaaaggaaggaaggaaggaaggaaggaaataaaaaaaatagacatagaccaatggaacaaaatacaagtccagaaatagacctcacaatcattttcagctttatgcaattcaatggagatgaaatagtcttttcaattcattttgctggagcaattgggttccatgtggggaaagaaaggaagcttggctcatacatcacaccatattcaaacattaatttgagatagattctagacatacatacaraaggttaatgtcaaagcttgtagaaaaaattgttatgatcttgaacaaaatagaaaatcactaataatacttcattaaacttaggaacaagtccatgtattcttatagttattctaagcagtatcttcaaatcaagctaggcttcataacatttaagtacttccaccattatccaccattatcttgaagtttgtagaattacctaaactaacattttattgttatgctctcagctttttatcgaagggc

SEQ ID NO: 86623 - DNA, 761 bp, Homo sapiens
aaacgtgaagatccaaagacaggttgggggaaaacaaacagtttttgacacccttcttcttgaaattataaatcatccatggttcaatggatactccagccacagttataccttgtccttccttctctccattcccccaaaggttaaaggcatcgctcccaatctgaaagtttttactagaacttttcaaatctcttccaacttcagaatgactaagtatagctcaagcacttgaggraaagctgaagaggtcatgtcctaaattgctatttagcctcacctggcaggagttgatgaagacaagtagtgagtaaacaatgaaatatttttgaaaccctctcattctattcatctaataattgagcacaactatcatactatcatagcaacaataattctacaaatctgctttccatttgtttgtgttagaatcctataccctcctaggtcattttaacaattgtttttaagaagctggacaaaaattgttttaaataaggaaaagtgtcaagtctcagtgtgctctaattggccatgattagcatggctcttaatagggttttcgctgctagccattgacagtcgtttgcatttagaccgcttttctaaaaatgcaatgatttctgtgtggtggaaagctccggagacttaatagagaagtcataataatgtaaactcacatagtggtttctactactgaaaaatgcctctgtccatgttagatacagtgatgggatttctttaactctgggtgcaaacac

SEQ ID NO: 86624 - DNA, 774 bp, Homo sapiens
ctgtcttgaagtagtatgaggttatatttgcattaatattcacacatacctcaaataactaggatttttatgcatagatgaatttctaatcaacagggtaaagatacaacatgcatgaaaaggttttcagttttgctacattccaaattactgaattcaaacagaaagtgaagggagtgaaccccttaggtaaaagtattcactttgtatatatcaaagtggacatgtcaccaaagtggacatgtatataacatgcttcagagtatttcaaaacatgagctgtgtgatcagagagtaacttaggcttatgtcaggccagatgctctcctgaatgtgtttattaaagtggttaattcgaataaaaacacctgaggaggaccttcaccctgcccacatactgtgaggtatttacctccaatattggttcactgacgaaacacacaccttagggagagaggaaagtaagttataaacctgatgcagattccccactgaagacatttctctactaagtactcctagttagacttttaccttgatgcaaattcatggtggtatggtttctgggttagtgtgattctgctagactatgagttccaaaagaacaagaccttgactttgtgttcactgcatttatctaacatttaaataaaacactgggagatactcgtcttatgataacattagatgaawgaacaaactatccagtgtcaccctgaacacatccctttccatgaaataaggaaatggcactgaaatcaactcttagaaaat

SEQ ID NO: 86625 - DNA, 1983 bp, Homo sapiens
gcacctagtattggtccgtagcattttcagacaacaaagtctaccgagaaccctcgacagctatgtgaaaactcaatgtctggagtgattcatcattatgtcagactggccagcactttgtcacagtgactgacaatgggagaaacttggaaataatacaaagattctctgttcactgatagtgtctgaagtgtgattagagaagaaagctttgagactgtgaggagaatcttaattttcccccaaaattaattttgatattttacccttcgttggaaaaattccacctaactttttcattgtcttactcaaaactggccactttcattttaaatagtgtctggagcttgcttattgaacttcactgcacattcaacagcttagtaggtggggtgaacaatttttcaatagtgtaagaccagctacactggctttatactgggctactctatccagttgagaaaggtaaacgccctccagttaatggttgatagtggtgtcaatacaacctaaattaactcatgccttacccttttcttggaatctggaatcattttatactattcaatatagcaaaattctaaaagggtaatgatattaattccttacttcaggtaaactattgctagacaaagtaatgtaatgcatgggcattacatttagaggtgctggggagcaaaggtaatggctttcatttatttcccatcccctctatgggaaataaatgaaataacatcttttatggatagtagatcaatgattccaccttcttattaaaaaatttaaaaagctaaaatggatcctatccagaaaaatgtgattacaagaggagtaaattattagaggggataataataaaaactagcatttgttgacattgtgtgccagaaattacatagataccatygcatatattcctaagaaaatttgagataagaattaccatcaccattgtatagtttagaaaatggagaatcagagaagaataagtatacaattggtgaatggtagaactcgaatttatgtccaaatatgcctgcttccaaagacaataaccatcagagtaaacagaaaatttaaagtgagatacatgaaggataaagttaaggaatataaaaagatatgcagtcaaatatctatcaaagtgatggtctcaagatgcacatcacttcccttcatcactctcccatctccctcaaaatctcattgctttacgttaaagcagaatgtcctcaccatgaccaaagtagcgatgtgtgatccaggtctgacctgcctcccaaacctcattttccagcaccttgtccttctctctattgcaccctcactggcttactggtggtgctttttatctgtcatgccctctcctgacttttgctgtttctagttactaaaattctcttctctatcctcttacctggttaaattctttccatcctccacagctcagttaaagaacaccatcaggaggttggattccccttatcatatgaaccacatacctttcttttattgcctttgtcagaattgtaacttacatttgttagaatgattatttcatttatacctgcataatacacttgcctaatatctccagtgactagctctccctgctacataaatagaggctcattaactctgagagaatgaatgagtaaatggataaatagtttttatctatattccttcttatagcttgtatttagagttttatttgatttttattgcaactcaaggacaaaaaaattaggtatcactttctcattttactgaagaagaaattaatgctcagagatgtttaatacatacctaaatttacatggtggcagagcctgctaaaatctgggccttctgaatctcaggtcaatgaggattataccaaagccttactgtgtcatcagtggaaattcaaatttctgctatctactcataacaaaacacggaaaatgtcagaaagacaaatgagcacctcattgaccatgg

SEQ ID NO: 86626 - DNA, 669 bp, Homo sapiens
gttatcccttctggaaaggctcccccygccccagtcacctcctgcactgggctctcagagtgcgctagtatggagtgctgatagttggtttgatgttccttccagtttgagaaacccttccgtgtagggatttgtatctcttttacttctttataaaccatcatgcttagcaaactgtagatgtctttttaaagtttgttcagttgaattgtgtgtccagtgggtgggggacagggtacataaagtaattatagggaagtacagatgaagcaggttgatacttgattcatggggttgtgaaaacaatggcaaaagttgagttaacatttttcaaaagttttcttggggggttgtattatgctttcttgttatatagctttctgcctacttttttttttttttcttattttgagagtggtgtatgctagttagaattcagaattatcaggaggaactttatcttagtctgttttgtactgctatgacagaataccacagactgggtaatttataatgaacagaaattacctgttcattatcctggaggctaggaagtccaagactgagggaccaaactcgcccttttatatggaactctctcctcagataacagcattaagccattcatgagggtggtgcccccatgacccaagtacctcccattccatc

SEQ ID NO: 86627 - DNA, 604 bp, Homo sapiens
aagggagaatccagcatccttagtcccatacagattttccatggtcctcaacttggaactccaggcaaatttaaattgggtactaagggccaagcatggtggcttatgtctctaatcccagcactttgggaggccaaggtcggtggatcacctgaggtcaggagttcgagaccagcctggccaacatggtgaaaccctgtctctactaaaaatacaaaaaattagcttggcatggtagggcacgtccgtagtcacagctactcaggaggctgaggcaggagaatcgcttgaacctgggaggcagaggttgcagtgagccaagatcacaccactgtactccagcctgggtgacagagaaagactttgtctcaacaaaaaaaaaattaaattaaattaaattaaattaaaaaataaattgggttctaaggatagaggccagtctttttatctcccagttggaaactggagtgtgattaytattgtatgctagcattttatacttaaaactgtttgaccttcataaaagagagaatgtagtcccctgtctaggtcctattagtatttagagtatccttggccatctcacagagccaacgtaggatct

SEQ ID NO: 86628 - DNA, 604 bp, Homo sapiens
aagggagaatccagcatccttagtcccatacagattttccatggtcctcaacttggaactccaggcaaatttaaattgggtactaagggccaagcatggtggcttatgtctctaatcccagcactttgggaggccaaggtcggtggatcacctgaggtcaggagttcgagaccagcctggccaacatggtgaaaccctgtctctactaaaaatacaaaaaattagcttggcatggtagggcacgtccgtagtcacagctactcaggaggctgaggcaggagaatcgcttgaacctgggaggcagaggttgcagtgagccaagatcacaccactgtactccagcctgggtgacagagaaagactttgtctcaacaaaaaaaaaattaaattaaattaaattaaattaaaaaataaattgggttctaaggatagaggccagtctttttatctcccagttggaaactggagtgtgattactattgtatgctagcattttatacttaaaactgtttgaccttcataaaagagagartgtagtcccctgtctaggtcctattagtatttagagtatccttggccatctcacagagccaacgtaggatct

SEQ ID NO: 86629 - DNA, 686 bp, Homo sapiens
tgcatacatatccgtactgatatagatataggcatattgatgtagacataaatagagatgtatccaaaatgtcatggcttttattgacatatggataattacctctgtattagtcarggttctccagagaaacagaaccaacaggacgtgtatatggagggagagaaaggcactgatgataaggaatgtgcttatgctgttagggagcctgaagagtcctgagatctgcagtcagaaagctggaagcccagaagagccaatgtgtagttccagtctggtctcaaggcctgaaaaccaggagaactgacggtgtaagttccagtccaaaagttggcagcctcaatacaaaagaagagttaatgttttggtctgagtctaaaggctgaataaagaccagcatcccagctcaagcagtcaggcaggagcaattcccctcttacttagccctttttgttttagtcaagtctccagctgattggatgaggcctacgcacattagggaagaaaatcatctttacttggtctaccaattcaaatgttaatctcatcaagaaataccttcacatacacacatgccaatcatctttactcagtctaacaattcaaatgttaatctcatccagaaataccttcatacacacacgcgtacgcacacatgtgcacacacacacacagaataatgtttg

SEQ ID NO: 86630 - DNA, 657 bp, Homo sapiens
acaaaagaatgtgagaatgtggtgcccctggttctgacaggaggatgtgattgacttgattcaatgattctgtggaataccagggaagtaaaattggttaggttgaggacatggtggagtgcaagcagtccagcccatagatgaactagctgggtagggggcatatcttttcagctacggaggaggcatatctgatgagagtagagaacacccagttagtcttggaggccctccaaggcccaaagatgtcaagacaacccgtgaaataataggccctacactacagcattcctaatataaatatagtcaattacacaagaagtgagtggaggagaggagactgatgcagggggcattaggctgttcttgcattgctataaataaatacctcagactgagtgatttataaagaaaatagattaaattgactcatcgttctgcaggctatacaggaaacagtgccaacatatgyttctggggaggcctcaggaagctttagtcatggcagaaggtgaagagggagtaagcactttacaaggcaaaagcaggagccagagagagaagattggaaaagggagttgccacacactttcaaataaccagatctcatgagcactcactcactatgtgaagacagcaccaagccatgaaggatcc

SEQ ID NO: 86631 - DNA, 538 bp, Homo sapiens
atcactctccccaaaactggaaaccttacatgttggaaatgagtacttaaatgttaccaaaacgtaaaaaaatggtggagcagtttaagctgagatccaatcaagaattacttgaaattaacataaaaataaagcagaaagccaatttgcccaggtatcwacaactccctccccagccttccggcctagttaatagccggctcagctactgtgaaaagggaatcctttgtttgcacaaactgctgtttcttaaggccaacatctgtaaaaacgttcaaagccacttttaaaaaactataacaatccaccccagctgctcccagaagattcctgggcccgcaacccgccactccagcaccgcagcctggcttctgcacctgcgcgaggaaactatctgggccccacaggagcccttctgccccgccccgcggccacctcggcctccgctctgcgcctgcgctcggattgagctttgacccttcagggagcgctgggccctgcgtcaccgccacctcggcctccgctctgcgcctgcgca

SEQ ID NO: 86632 - DNA, 741 bp, Homo sapiens
ctggcaggatctcagcccctgtgtgcctcagtttcctacctccaaaatgaagataatgataagtcctatagcagtgtctgactcttaaactcagtgggacaaaacatctacctttgtgccctaggaataattttaaacttttggacatggtgtatttaagatgcgtctagatgtaactaggttattctccctgcaataatgatatttaataattccaagatgattcttttttcctttcttttgtttttgagacagggtcttgctctgttgcctgggctacagtgcagtggtgttttctcagctcactataatttctgcctcctgggctcaggtgactctcccacttcagcctcctgagtagctgggactataaccacatgccaccacacctggctaattaytgctttttatttatttatttatttatttttggtagagatggggtttatccatattgctcaggctggtcttgaactcctgggctcaggtgtttctcctgccacagcctcccagtgttgggattacaggcatgaaccacaacgcctggactagatgatattcaataatcccgttttcctttctcccatttcctaccagacacacacacacacacacacacacacacacacaaacacacatttctatctccggctgttgtaagtatatgtccagcatctccccttggtctgacttaacataaattgtggtgagatattctcagggcagggtgtcatcctgctg

SEQ ID NO: 86633 - DNA, 1029 bp, Homo sapiens
gggcttaaaacctgtatgatgggttgataggtgcagcaaaccaccatggcagatgtatacctatgtaaacaagcctgcatgctcagcacatgtatcccagaagtgaaagtaaaataattaaaaaaagtatagcagggaaggagtccatgatataaaataatcatcctctcactccactcttagggaaaacagaagcataaaaaatgtcactgtgtgaagatggagctccacacctgtcctgcatgttccacgagtgttattgcatggatgccacctaagatccattgaagtctacagatagttttttaaatgaaaaccttaagctctattacacctattcttgtctctacaatatcagttacttagggctatttcattactagcttatgagaaaataaaacataactttcctttttatgagaatgtccaacaaatatcaaaatagaaaatgaagagatagtaaatgaagccccaggtacacatcctgtgtttcagcaattatcagcattttgcttacctgtttctttgcacttactccatcgggaatattttttaaacgttccagatatcaaagcatttcattagttaatactatatgatgtatctataaaggaaataacactgtttttttttwaaaaaaaaacaaaatcagaacatcattatgtctagtaaaattaataatgatctcttactatcttctgacaaccattcagtgttcaaattcccttattgtttcaaaactgctcattgaccccttgatatgtttgaagcacgttcagagaggatgcacatagtgtatttagtttatactttcttaaatctttttaaatctataacagcatcccattcttacctccgtttccttgtgccatttgtttggggaagaaactaaaccatttatctggtagaaatttgcatatgctggatttggctgattgaatcatagtggtgtcatttcatttttttcccatcacgtatttccggtaagctaggagtcaaaactagagatttgactggatttggtttatt

SEQ ID NO: 86634 - DNA, 1029 bp, Homo sapiens
gggcttaaaacctgtatgatgggttgataggtgcagcaaaccaccatggcagatgtatacctatgtaaacaagcctgcatgctcagcacatgtatcccagaagtgaaagtaaaataattaaaaaaagtatagcagggaaggagtccatgatataaaataatcatcctctcactccactcttagggaaaacagaagcataaaaaatgtcactgtgtgaagatggagctccacacctgtcctgcatgttccacgagtgttattgcatggatgccacctaagatccattgaagtctacagatagttttttaaatgaaaaccttaagctctattacacctattcttgtctctacaatatcagttacttagggctatttcattactagcttatgagaaaataaaacataactttcctttttatgagaatgtccaacaaatatcaaaatagaaaatgaagagatagtaaatgaagccccaggtacacatcctgtgtttcagcaattatcagcattttgcttacctgtttctttgcacttactccatcgggaatattttttaaacgttccagatatcaaagcatttcattagttaatactatatgatgtatctataaaggaaataacactgttttttttttwaaaaaaaacaaaatcagaacatcattatgtctagtaaaattaataatgatctcttactatcttctgacaaccattcagtgttcaaattcccttattgtttcaaaactgctcattgaccccttgatatgtttgaagcacgttcagagaggatgcacatagtgtatttagtttatactttcttaaatctttttaaatctataacagcatcccattcttacctccgtttccttgtgccatttgtttggggaagaaactaaaccatttatctggtagaaatttgcatatgctggatttggctgattgaatcatagtggtgtcatttcatttttttcccatcacgtatttccggtaagctaggagtcaaaactagagatttgactggatttggtttatt

SEQ ID NO: 86635 - DNA, 691 bp, Homo sapiens
aatcttgttttttttaagtataaggaagtaagcttgctttaataagaaatatatataatatatataattataatatataataagaaattatatatagcttcagtcattattttttctaaaaccatcatgctgttctagtacaattttaaggttaaagtatgaatcaatatgatatataaagaacactctatctcattcaaaaatatattaaagtagggagctaagctatgaggatgcaaagacataagaatgatacagtggactttgggtacttaggggaaagggtgagagcagggtgagggataaaaaactacacattggatacagtgtacactgcttgggtgatgggtgcaccaacatctcagcaatcaccactaaagracttattcatgtaaccaaacaccacctgttatccaaaaccatatatatatatatatatatatatatatatatatatatatacacacatatatatgctatagattttttaagcaagctgtgcatgttacactgtagcctgatttaactttaactatatgtaattgccatttctccatatcattatattttttcagcatttttaagtgtcttcattaaattcccatgtaaagctagactatatttaactatttaactattggatatttaagctgtttcatacatgtcactattactactactatgatatgca

SEQ ID NO: 86636 - DNA, 691 bp, Homo sapiens
aatcttgttttttttaagtataaggaagtaagcttgctttaataagaaatatatataatatatataattataatatataataagaaattatatatagcttcagtcattattttttctaaaaccatcatgctgttctagtacaattttaaggttaaagtatgaatcaatatgatatataaagaacactctatctcattcaaaaatatattaaagtagggagctaagctatgaggatgcaaagacataagaatgatacagtggactttgggtacttaggggaaagggtgagagcagggtgagggataaaaaactacacattggatacagtgtacactgcttgggtgatgggtgcaccaacatctcagcaatcaccactaaagaacttattcatgtaaccaaacaccacctgttatccaaaaccatatatatatatatatatatatatatatatatatatatayacacacatatatatgctatagattttttaagcaagctgtgcatgttacactgtagcctgatttaactttaactatatgtaattgccatttctccatatcattatattttttcagcatttttaagtgtcttcattaaattcccatgtaaagctagactatatttaactatttaactattggatatttaagctgtttcatacatgtcactattactactactatgatatgca

SEQ ID NO: 86637 - DNA, 691 bp, Homo sapiens
aatcttgttttttttaagtataaggaagtaagcttgctttaataagaaatatatataatatatataattataatatataataagaaattatatatagcttcagtcattattttttctaaaaccatcatgctgttctagtacaattttaaggttaaagtatgaatcaatatgatatataaagaacactctatctcattcaaaaatatattaaagtagggagctaagctatgaggatgcaaagacataagaatgatacagtggactttgggtacttaggggaaagggtgagagcagggtgagggataaaaaactacacattggatacagtgtacactgcttgggtgatgggtgcaccaacatctcagcaatcaccactaaagaacttattcatgtaaccaaacaccacctgttatccaaaaccatatatatatatatatatatatatatatatatatatatatacayacatatatatgctatagattttttaagcaagctgtgcatgttacactgtagcctgatttaactttaactatatgtaattgccatttctccatatcattatattttttcagcatttttaagtgtcttcattaaattcccatgtaaagctagactatatttaactatttaactattggatatttaagctgtttcatacatgtcactattactactactatgatatgca

SEQ ID NO: 86638 - DNA, 691 bp, Homo sapiens
aatcttgttttttttaagtataaggaagtaagcttgctttaataagaaatatatataatatatataattataatatataataagaaattatatatagcttcagtcattattttttctaaaaccatcatgctgttctagtacaattttaaggttaaagtatgaatcaatatgatatataaagaacactctatctcattcaaaaatatattaaagtagggagctaagctatgaggatgcaaagacataagaatgatacagtggactttgggtacttaggggaaagggtgagagcagggtgagggataaaaaactacacattggatacagtgtacactgcttgggtgatgggtgcaccaacatctcagcaatcaccactaaagaacttattcatgtaaccaaacaccacctgttatccaaaaccatatatatatatatatatatatatatatatatatatatatacacayatatatatgctatagattttttaagcaagctgtgcatgttacactgtagcctgatttaactttaactatatgtaattgccatttctccatatcattatattttttcagcatttttaagtgtcttcattaaattcccatgtaaagctagactatatttaactatttaactattggatatttaagctgtttcatacatgtcactattactactactatgatatgca

SEQ ID NO: 86639 - DNA, 691 bp, Homo sapiens
aatcttgttttttttaagtataaggaagtaagcttgctttaataagaaatatatataatatatataattataatatataataagaaattatatatagcttcagtcattattttttctaaaaccatcatgctgttctagtacaattttaaggttaaagtatgaatcaatatgatatataaagaacactctatctcattcaaaaatatattaaagtagggagctaagctatgaggatgcaaagacataagaatgatacagtggactttgggtacttaggggaaagggtgagagcagggtgagggataaaaaactacacattggatacagtgtacactgcttgggtgatgggtgcaccaacatctcagcaatcaccactaaagaacttattcatgtaaccaaacaccacctgttatccaaaaccatatatatatatatatatatatatatatatatatatatatacacacatatatatgctatagattttttaagcaagctgtgcatgttacactgtagcctgatttaactttaactatatgtaattgccatttctccatatcattatattttttcagcayttttaagtgtcttcattaaattcccatgtaaagctagactatatttaactatttaactattggatatttaagctgtttcatacatgtcactattactactactatgatatgca

SEQ ID NO: 86640 - DNA, 1169 bp, Homo sapiens
aatccactatttttagtacaattctctcacactcaactgcactggtgttctcccagtgtagaaccatctattttaccccattctggaaataaacttcacccttttgccagttaaggaaggtgcagtctctgggatgctacacagatctggggagaaggctacggatccaatcaaattcctcctaaagaatacttccaaacaatcctccttatttagtccatatcccctttaccctcacttcttcagggacctgctgccattagtttccaagtcttcagawatgctataaatcagattagtttttagttttctcttctgcctggtgggatttaaatttctcaaatctgctcattttatccctatgtattcatctgttttccagcttccaaaattgtcccttcttcagctctctccatctattgggtttaagccttaaaatatctatttactggtagttttactgggatttccggaagtcaacaaaatagaattgtatgttagtctcctacctttacgcaaagcttgcttttcattttctatttacgggaagtgtgttaatggcttcataactgaatctagcttataatttatttgtgatagatctaaaactggttaatgaaagatggcttcaattacagtaggcttaaagcaatgtctttctccttaaaaatacagaaaagaaaaagcaactcagcactaacccagtgaaggggcatacagataagtcaagatttgtatatgggggacgggcacggtggatcatgcctgtaatcctagcactttgggaggccaaggtgggtggatcaactgaggtcaggatttcaagaccagcctagccaacatggtgaaactccatctctactacaaatacaaaaattagcctggtgtggtagcacatgcctgtaatcccagctactcaggaggctgaggcatgagaatagcttgaacctgggggcggaggtggcagtgagccgagatcacaccactgtactccagcctgggcgacagagcgagactgtctcaaaaacaaaaacaaaagttaaaaaaaagatttctgtatgggaatattctttccgtgcgtttgtatgcccttgctaaaatgcaggttgcataacagccttaataagaaaattcctaagcctatggaaacttgtgggaggggtgtagtc

SEQ ID NO: 86641 - DNA, 727 bp, Homo sapiens
tctgtgatgaatacagggaattaaaagctaagtaaggcacagtccctcatggccaaagagaggggaatgaataaaaccagagagaaagctaccatttgttgagtgtctgccgtatgacaaatgccaattcatttaatcctctcacatagaaggaaggtgctattccctgcattttaataagaaaaccaaggctgaggaaacaggagagctgtttaccataacacaccatttcagggcttctgactgttttcagtgccatacagtaaggccaagaggaaatagactgcttgggtttgagcttgttttgtcacttgctagccatgtgacttattatcaatgcctgcctctctaaaaagatgagaataagagcacctacttcataatgtggttgtgaggattaacataaattaaaacacaaagcattttgartaacgcctgacaaaaaaaattgcctcagtaaatattagctatttatctgtatgttgtctcatattttttatcattatttccctctgcattttggaagatttccttgccattatcttctggtgccttcctatttttctctacagcaatcacatttaaatttctaagaatgcttgcttctttcttgatcgttccttttttctccacagcaccatgtgctggttttatgaacgcaaaaactttctgaagtctccaagatgacattaaccaaagttttaaaagttctcgtctgtttccttga

SEQ ID NO: 86642 - DNA, 970 bp, Homo sapiens
ttacacaaagaggtcaggaaacaccttcgttttatacttcagtaattacacagctgacagatcagctatatcctggtaaattattgcataaataagggctttttgttatctttctgattgtaaatgccatcaataagtatttaggagattgggccaggtgtggtggctcaygcctgtaatcccagcactttgggaggctgaggtgggcggatcacaaggtcaggagattgagaccatcctggccaacatggtgaaaccctatctctactaaaaattagctgggcgtggtggtgcctgcctgtagtcccagcaactcaggaggctgaggcaggagaatcgcttgaacctgggaggtggaggttgtagtgagccgagattgtgccactgcactccagcctggcaatagagtgaaactctgtctcaaaaaaaaaaaaagcatttaggagattgacctgggtcaattcttttttctttttgtcccctttcctcagatgttctgaaggttggaaatatgacttactaccattacctaacagttatttcttcttctttcctagttaatacaacctgatttcatttgggccacaacatgtacaaagaaggaatacctgtccccaggcctcagagaaaagtcatgattgattgaagcttagcccgttcccctgctagagattgcttctgaactcagcatgtggccaattatggccaatgagatggaagagtctggaagcaggcttttggaaagattcttgtagcctagttaaagataaaatcccggaaagggaaaagccttgtgttgacaagcttaagagtgaaaaaccaacgtgttgaggaggaggattaggaagacataaagaggccgggttcttaatgacatccttgagccactgcagctaaaaaggaaacttctttctccaggattcttatgtcagattttcaaatgtcttcatggcttaaaccagatttatgc

SEQ ID NO: 86643 - DNA, 1401 bp, Homo sapiens
ttgcccaaggtcacagagctacaaaatagcatagctggaattcaaaccttggcattctggctccagaatccatgctcgtaactataaagtattctgcctgctcatgggtaggagttggtctgcatccacagccttagacaatccctgtgagtagttggcgttgtatgttaaatgaattaatacattgtggtaaattcgtagagtgcatactgttgagcaaaataatgrtatgtattgatataaagagatcttcacaacatattgttaagtgaataagcatatatagagtatagcctggttctatttttggaaaaaaaacgtgtgtatgtatattgcatatataatagctataggatatgtctatatgtgtatgtgtagaggaggaccatagagaaaaatctggaagggtaaacataagcatctccatgatcatctctaggaagtagaatttgtcggggaagaggggctgttaaaaataccttcattgaagaaaaaaaaaaacctttagttaagaataagtactgtttttataatagaaaaagttttaagaaaaattttaaagctttttttgttttgagacggagtctcgctctgtcgcccaggctggagtgcagtggcgctattttggctcactgcaagctccgcctcccgggttcacgccattcttctgcctcagcctcccaagtaactgggactacaggcgcccgccaccacgcccagctaattttttgtatttagagacggggtttcaccgtgttagcaaggatggtttcgatctcctgacctcgtgatccacccgcctcagcctcccaaagtgctgggattataggcatgagccaccgcgcccagccacattttaaagcttttgaaaaaaataaatgcattaattgtcttgcttcatacactcttgaattacaacttcaatatggtaaatgtttttaaattcctgaattttgtaatgctgtaaatgaactaaagtggtcatttcttcattcggtcttaagtattgcaatgtggttttgttcaggaagtcttttattctttccaaagttgagagttggctaaaggctgcattctcacaattgacagctgaatatatcaccctaaggattgtcacataataacctcatgccattactgtggacataattaatattatactgcatatcatgacatttgatgccatattatattacaaaagtctgcatgctgtgacacaactgactcttggggttttggcattgaacacatatacttttattttccagatctgacttttatgttttattacagataagggtgacattagttcacaggttggttggcccatcaaagtagaaagatgtatgtgtgggcttttctttaaaaacaggcttcttccagggttattgagcctcattc

SEQ ID NO: 86644 - DNA, 776 bp, Homo sapiens
ggatccaaagtttcagttacacagaatgaataagttctggagacctaatgcacagcatggtgactatagttagtaatattgtattagattcttgaaatttgctaagatcataagatcttacgtgttctaaccctaaggaaaaaaaaaaagaaaacgttaactatgtgaggtgctggatatattaattagcttgatcatggtgattttttcacagtgtatatgtatatcagaacatcaagttgtataccttaaatatatacaatttttatttgtcagttatacaataataaagatgaaaaaataaattttttagcatatctccccaatttagtatttgtgtttatgtacaarttatatatcagcactagttttccaatatattgtatatgttataaaacgtacataaaattttgagggatgaggttttaaataattattatataataacatcttagtaggagtaaagtgatagaataagcttcattatttttgaaaagtttagatactgacctgggaattctacaatcattaggcaaatactagcaaattaataagtgttaatgttattttggcttacaaatgtgatttctgatttgttaaaaagttttgaaaagcatatttgtaaataatcaaaggaaatgttcaagtattcattttgcagaattgtaatgtttaattaaaatttgttatgaaatgtatcatatataaaagtacacaaagataatcagtttaaaagaaaaaaagaaagattgttttcatttggttcaagcaaaaaa

SEQ ID NO: 86645 - DNA, 776 bp, Homo sapiens
ggatccaaagtttcagttacacagaatgaataagttctggagacctaatgcacagcatggtgactatagttagtaatattgtattagattcttgaaatttgctaagatcataagatcttacgtgttctaaccctaaggaaaaaaaaaaagaaaacgttaactatgtgaggtgctggatatattaattagcttgatcatggtgattttttcacagtgtatatgtatatcagaacatcaagttgtataccttaaatatatacaatttttatttgtcagttatacaataataaagatgaaaaaataaattttttagcatatctccccaatttagtatttgtgtttatgtacaagttatatatcagcactagttttccaatatattgtatatgttataaaacrtacataaaattttgagggatgaggttttaaataattattatataataacatcttagtaggagtaaagtgatagaataagcttcattatttttgaaaagtttagatactgacctgggaattctacaatcattaggcaaatactagcaaattaataagtgttaatgttattttggcttacaaatgtgatttctgatttgttaaaaagttttgaaaagcatatttgtaaataatcaaaggaaatgttcaagtattcattttgcagaattgtaatgtttaattaaaatttgttatgaaatgtatcatatataaaagtacacaaagataatcagtttaaaagaaaaaaagaaagattgttttcatttggttcaagcaaaaaa

SEQ ID NO: 86646 - DNA, 1462 bp, Homo sapiens
atatttccataaaacatgcatgtgattactgtaaatgtcctgtaaacactcctgcttgggctggtaggtcatcttttttttttttttttcttttgagacagttttagtcttgttgcccaggctggagtgcagtggcgtgatctcagctcactgcaacctctgcctcccagattcaagtgattctcctgccacagcctcccaagtagctggaatgatacaccatgcgccaccacacctggctaatttttgtatttttagtagagatggggattcttcatgttggtcaggctggtctcaaactgcgacctcagatgatctgcctgcctcggccttctaaagtgctgggattacaggcgtgagccaccatgcctggactgtaggtcacctctgtgtccartctgccagaggtcagggatacgttgccgtctaggattttttatattggagaccagtctgatgagtagcccttgagcagggactggattctaagtcttggagaaaatgagtaagttctacctcttatgtgaggtatgattgaagaaattgtgttttctttgttttttgagaggcagggtcttgccctgttgcctacctggagtgtggtggcataatcatagctcacttcagtcttgacctcctagggtcaagcaatcctcccacctcagcctcctgagtagctgggactactagcacgtgccactatgcccagctaatttttaaatttttttgtagcgatgtggtcttggctatgttgcccaggctggatcctcctgcctcagcctcccaaagtgttgggattacaggcgtgagccaccacacccggcccagaagtgtcttatatttttagacttttgagcagtgttggaacgattgaattgcctgagtggagaaatttggtaggaagagagtagaagagaggctctttattaaagacctaaaaatagaattcattaaagtcacaaatagataacagtaggattcctgtctgactctcttctgctttgggtttgtgctaccagctgttgcgtttgcttacctagaaaatagaataatattttgtcagaagggtcaacagtatggtcctaaaacattgtgtttgcaagtctgaggatgtgctttttccaattttaaaagtagttagaaagtgaccagattctttcatgtaggggagaaatcttagcaggagacgttggttcttctgcttgtagtgccagccctaacctgacaggtcctgtggggacccctgtctcttcagagccctgagcctttttcccttctagttggactttgctgactagagagggatatcctatgtaggccacctgattacctgatttaatcagatggtacctctgttattttggagaagagagtctccttttgattctaatagctgaagataaaaatggctccgtatgctttcttcctgtggagggctctgctgccctgagctgcctgtgcc

SEQ ID NO: 86647 - DNA, 1462 bp, Homo sapiens
atatttccataaaacatgcatgtgattactgtaaatgtcctgtaaacactcctgcttgggctggtaggtcatcttttttttttttttttcttttgagacagttttagtcttgttgcccaggctggagtgcagtggcgtgatctcagctcactgcaacctctgcctcccagattcaagtgattctcctgccacagcctcccaagtagctggaatgatacaccatgcgccaccacacctggctaatttttgtatttttagtagagatggggattcttcatgttggtcaggctggtctcaaactgcgacctcagatgatctgcctgcctcggccttctaaagtgctgggattacaggcgtgagccaccatgcctggactgtaggtcacctctgtgtccaatctgccagaggtcagggatacgttgccgtctaggattttttatattggagaccagtctgatgagtagcccttgagcagggactggattctaagtcttggagaaaatgagtaagttctacctcttatgtgaggtatgattgaagaaattgtgttttctttgttttttgagaggcagggtcttgccctgttgcctacctggagtgtggtggcataatcatagctcacttcagtcttgacctcctagggtcaagcaatcctcccacctcagcctcctgagtagctgggactactagcacgtgccactrtgcccagctaatttttaaatttttttgtagcgatgtggtcttggctatgttgcccaggctggatcctcctgcctcagcctcccaaagtgttgggattacaggcgtgagccaccacacccggcccagaagtgtcttatatttttagacttttgagcagtgttggaacgattgaattgcctgagtggagaaatttggtaggaagagagtagaagagaggctctttattaaagacctaaaaatagaattcattaaagtcacaaatagataacagtaggattcctgtctgactctcttctgctttgggtttgtgctaccagctgttgcgtttgcttacctagaaaatagaataatattttgtcagaagggtcaacagtatggtcctaaaacattgtgtttgcaagtctgaggatgtgctttttccaattttaaaagtagttagaaagtgaccagattctttcatgtaggggagaaatcttagcaggagacgttggttcttctgcttgtagtgccagccctaacctgacaggtcctgtggggacccctgtctcttcagagccctgagcctttttcccttctagttggactttgctgactagagagggatatcctatgtaggccacctgattacctgatttaatcagatggtacctctgttattttggagaagagagtctccttttgattctaatagctgaagataaaaatggctccgtatgctttcttcctgtggagggctctgctgccctgagctgcctgtgcc

SEQ ID NO: 86648 - DNA, 1462 bp, Homo sapiens
atatttccataaaacatgcatgtgattactgtaaatgtcctgtaaacactcctgcttgggctggtaggtcatcttttttttttttttttcttttgagacagttttagtcttgttgcccaggctggagtgcagtggcgtgatctcagctcactgcaacctctgcctcccagattcaagtgattctcctgccacagcctcccaagtagctggaatgatacaccatgcgccaccacacctggctaatttttgtatttttagtagagatggggattcttcatgttggtcaggctggtctcaaactgcgacctcagatgatctgcctgcctcggccttctaaagtgctgggattacaggcgtgagccaccatgcctggactgtaggtcacctctgtgtccaatctgccagaggtcagggatacgttgccgtctaggattttttatattggagaccagtctgatgagtagcccttgagcagggactggattctaagtcttggagaaaatgagtaagttctacctcttatgtgaggtatgattgaagaaattgtgttttctttgttttttgagaggcagggtcttgccctgttgcctacctggagtgtggtggcataatcatagctcacttcagtcttgacctcctagggtcaagcaatcctcccacctcagcctcctgagtagctgggactactagcacgtgccactatgcccagctaatttttaaatttttttgtagcgatgtggtcttggctatgttgcccaggctggatcctcctgcctcagcctcccaaagtgttgggattacaggcgtgagccaccacacccggcccagaagtgtcttatatttttagacttttgagcagtgttggaacgattgaattgcctgagtggagaaatttggtaggaagagagtagaagagaggctctttattaaagacctaaaaatagaattcattaaagtcacaaatagataacagtaggattcctgtctgactctctyctgctttgggtttgtgctaccagctgttgcgtttgcttacctagaaaatagaataatattttgtcagaagggtcaacagtatggtcctaaaacattgtgtttgcaagtctgaggatgtgctttttccaattttaaaagtagttagaaagtgaccagattctttcatgtaggggagaaatcttagcaggagacgttggttcttctgcttgtagtgccagccctaacctgacaggtcctgtggggacccctgtctcttcagagccctgagcctttttcccttctagttggactttgctgactagagagggatatcctatgtaggccacctgattacctgatttaatcagatggtacctctgttattttggagaagagagtctccttttgattctaatagctgaagataaaaatggctccgtatgctttcttcctgtggagggctctgctgccctgagctgcctgtgcc

SEQ ID NO: 86649 - DNA, 678 bp, Homo sapiens
attcagtaaaacaaagtagaaaaagattgttttcaatatatacaaacaaaggagggcttccattaagacatataaagaacactttcaaattaataaaaattttaacttaaaaattaattacaaagcagtaacatgatctaacaaaaattgtaagaaattaggaatacttcacaaaagaatacaaaggtggaaaataatgayatgaagttattgtcagtaagataaaaaataaaacaatcatgagatatcacttcacattcaccaaaatgtctaaaaataagaattttgataatttgtaagaacgtggaacagtaggatacttttattttatttttatttatttttaagacaagatcttgctctgttgttcaggctgaagtgcagtggcgccatcatggctcactgtagcctcaacctcttaggttcaagcaatccttccacctcagcctccctagtagatgggacatgcgccaccacacccagctaatttttgtattttttgcacaaacgggtttttgcaattttgcccaagctggtcttgaactcctgggctcaagtgatccacccacctcagccaaggatactgcttaatactgactacttgcttcaaatatttcagaaaacatattgtcattaatcaatttgaacatacaatgtattctggcaatatctttcaga

SEQ ID NO: 86650 - DNA, 678 bp, Homo sapiens
attcagtaaaacaaagtagaaaaagattgttttcaatatatacaaacaaaggagggcttccattaagacatataaagaacactttcaaattaataaaaattttaacttaaaaattaattacaaagcagtaacatgatctaacaaaaattgtaagaaattaggaatacttcacaaaagaatacaaaggtggaaaataatgacatgaagttattgtcagtaagataaaaaataaaacratcatgagatatcacttcacattcaccaaaatgtctaaaaataagaattttgataatttgtaagaacgtggaacagtaggatacttttattttatttttatttatttttaagacaagatcttgctctgttgttcaggctgaagtgcagtggcgccatcatggctcactgtagcctcaacctcttaggttcaagcaatccttccacctcagcctccctagtagatgggacatgcgccaccacacccagctaatttttgtattttttgcacaaacgggtttttgcaattttgcccaagctggtcttgaactcctgggctcaagtgatccacccacctcagccaaggatactgcttaatactgactacttgcttcaaatatttcagaaaacatattgtcattaatcaatttgaacatacaatgtattctggcaatatctttcaga

SEQ ID NO: 86651 - DNA, 581 bp, Homo sapiens
atacatatatacatatatacacatatatatacatatatacatatatacacatatacacatatatacacatatacacatatatacatatatatacatatatatacacatatatatatwtttttttattttatttttttgagacagagtcttgctctgttgccaggctggagtgcagtggtgtgatctcggctcactgcaaccttcacctcccaggttcaagtgattcccctgcctgtctcccaagtagctgggactacaggcgcgtgccatcatgcccagctaatttttgtatttttagtagagacggggtttcaccatgttggccaggatggtctcaatctcttgaccttgtgatcctcccacctcagcctcccaaagtgctgggattacaggcgtgagccactgtgcccagcctcaaatgatatttttatcataactgggctctcttgttgtcagcatttgcctactgtgtctttatccttttcaccttctgaatccctttattttacagatcttttttttttttcctttttttttgagacagtttcagtctgttgcccaggctggagtgcagtggcgtg

SEQ ID NO: 86652 - DNA, 581 bp, Homo sapiens
atacatatatacatatatacacatatatatacatatatacatatatacacatatacacatatatacacatatacacatatatacatatatatacatatatatacacatatatatatatttttttattttatttttttgagacagagtcttgctctgttgccaggctggagtgcagtggtgtgatctcggctcactgcaaccttcacctcccaggttcaagtgattcccctgcctgtctcccaagtagctgggactacaggcgcrtgccatcatgcccagctaatttttgtatttttagtagagacggggtttcaccatgttggccaggatggtctcaatctcttgaccttgtgatcctcccacctcagcctcccaaagtgctgggattacaggcgtgagccactgtgcccagcctcaaatgatatttttatcataactgggctctcttgttgtcagcatttgcctactgtgtctttatccttttcaccttctgaatccctttattttacagatcttttttttttttcctttttttttgagacagtttcagtctgttgcccaggctggagtgcagtggcgtg

SEQ ID NO: 86653 - DNA, 513 bp, Homo sapiens
cccattaaatatgtagtatgattttctgaatggcaaattgtagaagggaatctaaaccaaagggtaagcggtgggtagcagagtttgtaaaggcctgtaaagtgctgcccaagagaacttcctgcagtgataactgttgagcactcgaaatgtggctagttcaacygaggaactgaattttaaactttatttgattctaataaaactttaagttaggtaaccatatctggctactagctactgtgttggacagtacaactccattggttgcttttgagagaaaaaaaagcaaagcaagggtaaaagaaaagaaagaagacctcagaatttcaggctcatgatctttttttttttttttttgggacagagtctcgctgtgtcacccaggctggagtgcagtggcacaatctcggttcactgcaacctccacctcccaggttcaagcgattctcctgcctcagtctcctgagtagctgggattacaggtgtgcaccaccatgcccagctaatttt

SEQ ID NO: 86654 - DNA, 748 bp, Homo sapiens
aagtgtttggaatataattttggtcctgttagagttgtttctttttctttgtgaaagtgggcgtatttttttttattccatttcccctctaatccctgcattgttgaagggatctatttttgtattgagcttaggtttagagctggcccttactatacagcatggttcttcatctcaaggcataacctttttagaatctcaactgaatcttcaaaatgttctgcttgggacagaagtccaaygtctctcagcaaagcaggacttctggtttctctgttcagctcccagtcctgcagcatgtgacccttgctaggccttgtgtatgggcagctgagttctcagccacagacccacagtccatccccatgcagacttcagtggcctgattttctgtgcagtatcttcttttctgatatcccaccccacaaatttcagccatgtctatatcccaaagcttcaatctctgcctccttagctctttttattgcagcaggagaatttccttgggaaaaaaactggggtgaccatggaactcacgtcatatagttcacttgtctcccaaatcacattcccctattgcctattgctccgtgtctgaaaacatttgcctcatgtgtttttccccatttgtagttgttttaagtgaaggcaagttatgtaccagttactatgtcaggatcagacacagaaatccccatgtgtttttaattctttgcaagattagtcttcctgatgatgcagagtggta

SEQ ID NO: 86655 - DNA, 748 bp, Homo sapiens
aagtgtttggaatataattttggtcctgttagagttgtttctttttctttgtgaaagtgggcgtatttttttttattccatttcccctctaatccctgcattgttgaagggatctatttttgtattgagcttaggtttagagctggcccttactatacagcatggttcttcatctcaaggcataacctttttagaatctcaactgaatcttcaaaatgttctgcttgggacagaagtccaacgtctctcagcaaagcaggacttctggtttctctgttcagctcccagtcctgcagcatgtgacccttgctaggccttgtgtatgggcagctgagttctcagccacagacccacagtccatccccatgcagacttcagtggcctgattttctgtgcagtatcttcttttctgatatcccaccccacaaatttcagccatgtctrtatcccaaagcttcaatctctgcctccttagctctttttattgcagcaggagaatttccttgggaaaaaaactggggtgaccatggaactcacgtcatatagttcacttgtctcccaaatcacattcccctattgcctattgctccgtgtctgaaaacatttgcctcatgtgtttttccccatttgtagttgttttaagtgaaggcaagttatgtaccagttactatgtcaggatcagacacagaaatccccatgtgtttttaattctttgcaagattagtcttcctgatgatgcagagtggta

SEQ ID NO: 86656 - DNA, 930 bp, Homo sapiens
gttgtcatttgcagtgttgtccccrataccctgctaactaaaaagcttctctaacgccaactggagtttgagctgagctgtcagtcttcttaaagccaaggatgaaagaaataaattctgtaggtatatcagatatttagtctaggtcttctctcatcccctctctgtatctctggttaagataatctagatgagatcagatcagagaataagaaattcaccctatcaggaccatttgttgagtctgtcttccaaagtgctaaagtaatctgagacttctcaatcaatttcaatcttgagacatttttggaacaaaattgtggaaaaggaattgatttggttccttcctcaagttctcctccagtctcttgagccaaaatgatctttcatccaactattgaaagaacaacttaacagttctttgttatcctttccacttttttagttgtaggtgaccacaaaagaaatcatgattgcactaaggaaatagagattaaagtgaaatgatggcagctctacagaaagcagtgactgcacttcactttgcagtgactgcattcctttgagccttctcagccttctcatctgctgcctttcatgcttggggaaattcatttgtgagtttggaatgtgaaacaaaatctaaacttcactaaaatgttataatgctttggtttagccagcgaacgttctctttcacttcaatcctgtttaaatatccatagcaactctaccttcgcaaatagaaactaattcacagatcactgccttagcttgcatggaagcacagccttaaagaagccataaacattctaattaataaattaaagtattcctttggtgttattatcaacggtatacatctgcttcacttacaaaagcaagttagcaataagtatttacaacatttgaaaaaaatctggaaatgtg

SEQ ID NO: 86657 - DNA, 1111 bp, Homo sapiens
ctttaattattatccaccacaatcttatcattctaaactccttttattaaaaataaaggtacatttcaataaattcaggaaaaaaagataaaaatttgtgctctaaaagagcaaaaaatgtaatgtttstatatatttatttttcaaaattttaaatttcattcttttctattgttggctcaaagcaaagatgcaatgaatgcaaaattatgctgataaaatctgattctggatacatctgcacatttaaatttgttcttttttactatcattctccctagtttcatgtgactcttcagagtatttatgtctccagtgaccttaatctataagtaaaatttactttcctcttatctcaaaattctccagctatgtgagcagggtggagatgctatgtttagttatcagatcttgtactcagtactgtaacttgttcttttactaatttctagaagaagaaccacaatattatcatattacattttagttgaatgtggaaagttaattttacaacttttaaatgtaccaactttccaaactcaatagggcaaagcaaatcctgagaaaacaaaatcaaaactgctttcgatgctgcatgaaagtacaattgtcattatatctaatgaaatgaaataaaatctttctaatctaagtagtattcagtgttttgtttccattgtggcagtgatatacgtagtaataaaatcattttacctatcatgtagacctcaaaattatattttcatataaacttaaaaaaatagctgttgaggagtataaacaaacaagaaacaacataaatatgagacatatagcaagatgtcagtttatacaaaatcttatctatatttaaattgtatataatttgtgtaaaccatctcattaaatgggtttatcttatgatcgtaattttttttatttaaattgcctttatttgcaaatatactagtaggaactgtgaaaatcaaatgacatttaaaatataagtgggaaggcatttacctgagaaaaaagggaagctaaaatgcaattatactaatttaagtagtactaaaatggatgagcttcaaatgacttaatcctctgaaaatagaaattatattagcgtgtt

SEQ ID NO: 86658 - DNA, 1111 bp, Homo sapiens
ctttaattattatccaccacaatcttatcattctaaactccttttattaaaaataaaggtacatttcaataaattcaggaaaaaaagataaaaatttgtgctctaaaagagcaaaaaatgtaatgtttgtatatatttatttttcaaaattttaaatttcattcttttctattgwtggctcaaagcaaagatgcaatgaatgcaaaattatgctgataaaatctgattctggatacatctgcacatttaaatttgttcttttttactatcattctccctagtttcatgtgactcttcagagtatttatgtctccagtgaccttaatctataagtaaaatttactttcctcttatctcaaaattctccagctatgtgagcagggtggagatgctatgtttagttatcagatcttgtactcagtactgtaacttgttcttttactaatttctagaagaagaaccacaatattatcatattacattttagttgaatgtggaaagttaattttacaacttttaaatgtaccaactttccaaactcaatagggcaaagcaaatcctgagaaaacaaaatcaaaactgctttcgatgctgcatgaaagtacaattgtcattatatctaatgaaatgaaataaaatctttctaatctaagtagtattcagtgttttgtttccattgtggcagtgatatacgtagtaataaaatcattttacctatcatgtagacctcaaaattatattttcatataaacttaaaaaaatagctgttgaggagtataaacaaacaagaaacaacataaatatgagacatatagcaagatgtcagtttatacaaaatcttatctatatttaaattgtatataatttgtgtaaaccatctcattaaatgggtttatcttatgatcgtaattttttttatttaaattgcctttatttgcaaatatactagtaggaactgtgaaaatcaaatgacatttaaaatataagtgggaaggcatttacctgagaaaaaagggaagctaaaatgcaattatactaatttaagtagtactaaaatggatgagcttcaaatgacttaatcctctgaaaatagaaattatattagcgtgtt

SEQ ID NO: 86659 - DNA, 1111 bp, Homo sapiens
ctttaattattatccaccacaatcttatcattctaaactccttttattaaaaataaaggtacatttcaataaattcaggaaaaaaagataaaaatttgtgctctaaaagagcaaaaaatgtaatgtttgtatatatttatttttcaaaattttaaatttcattcttttctattgttggctcaaagcaaagatgcaatgaatgcaaaattatgctgataaaatctgattctggatacatctgcacatttaaatttgttcttttttactatcattctccctagtttcatgtgactcttcagagtatttatgtctccagtgaccttaatctataagtaaaatttactttcctcttatctcaaaattctccagctatgtgagcagggtggagatgctatgtttagttatcagatcttgtactcagtactgtaacttgttcttttactaatttctagaagaagaaccacaatattatcatattacattttagttgaatgtggaaagttaattttacaacttttaaatgtaccaactttccaaactcaatagggcaaagcaaatcctgagaaaacaaaatcaaaactgctttcgatgctgcatgaaagtacaattgtcattayatctaatgaaatgaaataaaatctttctaatctaagtagtattcagtgttttgtttccattgtggcagtgatatacgtagtaataaaatcattttacctatcatgtagacctcaaaattatattttcatataaacttaaaaaaatagctgttgaggagtataaacaaacaagaaacaacataaatatgagacatatagcaagatgtcagtttatacaaaatcttatctatatttaaattgtatataatttgtgtaaaccatctcattaaatgggtttatcttatgatcgtaattttttttatttaaattgcctttatttgcaaatatactagtaggaactgtgaaaatcaaatgacatttaaaatataagtgggaaggcatttacctgagaaaaaagggaagctaaaatgcaattatactaatttaagtagtactaaaatggatgagcttcaaatgacttaatcctctgaaaatagaaattatattagcgtgtt

SEQ ID NO: 86660 - DNA, 1111 bp, Homo sapiens
ctttaattattatccaccacaatcttatcattctaaactccttttattaaaaataaaggtacatttcaataaattcaggaaaaaaagataaaaatttgtgctctaaaagagcaaaaaatgtaatgtttgtatatatttatttttcaaaattttaaatttcattcttttctattgttggctcaaagcaaagatgcaatgaatgcaaaattatgctgataaaatctgattctggatacatctgcacatttaaatttgttcttttttactatcattctccctagtttcatgtgactcttcagagtatttatgtctccagtgaccttaatctataagtaaaatttactttcctcttatctcaaaattctccagctatgtgagcagggtggagatgctatgtttagttatcagatcttgtactcagtactgtaacttgttcttttactaatttctagaagaagaaccacaatattatcatattacattttagttgaatgtggaaagttaattttacaacttttaaatgtaccaactttccaaactcaatagggcaaagcaaatcctgagaaaacaaaatcaaaactgctttcgatgctgcatgaaagtacaattgtcattatatctaatgaaatgaaataaaatctttctaatctaagtagtattcagtgttttgtttccattgtggcagtgatatacgtagtaataaaatcattttacctatcatgtagacctcaaaattatattttcatataaacttaaaaaaatagctgttgaggagtataaacaaacaagaaacaacataaatatgagacatatagcaagatgtcagtttatacaamatcttatctatatttaaattgtatataatttgtgtaaaccatctcattaaatgggtttatcttatgatcgtaattttttttatttaaattgcctttatttgcaaatatactagtaggaactgtgaaaatcaaatgacatttaaaatataagtgggaaggcatttacctgagaaaaaagggaagctaaaatgcaattatactaatttaagtagtactaaaatggatgagcttcaaatgacttaatcctctgaaaatagaaattatattagcgtgtt

SEQ ID NO: 86661 - DNA, 1111 bp, Homo sapiens
ctttaattattatccaccacaatcttatcattctaaactccttttattaaaaataaaggtacatttcaataaattcaggaaaaaaagataaaaatttgtgctctaaaagagcaaaaaatgtaatgtttgtatatatttatttttcaaaattttaaatttcattcttttctattgttggctcaaagcaaagatgcaatgaatgcaaaattatgctgataaaatctgattctggatacatctgcacatttaaatttgttcttttttactatcattctccctagtttcatgtgactcttcagagtatttatgtctccagtgaccttaatctataagtaaaatttactttcctcttatctcaaaattctccagctatgtgagcagggtggagatgctatgtttagttatcagatcttgtactcagtactgtaacttgttcttttactaatttctagaagaagaaccacaatattatcatattacattttagttgaatgtggaaagttaattttacaacttttaaatgtaccaactttccaaactcaatagggcaaagcaaatcctgagaaaacaaaatcaaaactgctttcgatgctgcatgaaagtacaattgtcattatatctaatgaaatgaaataaaatctttctaatctaagtagtattcagtgttttgtttccattgtggcagtgatatacgtagtaataaaatcattttacctatcatgtagacctcaaaattatattttcatataaacttaaaaaaatagctgttgaggagtataaacaaacaagaaacaacataaatatgagacatatagcaagatgtcagtttatacaaaatcttatctatatttaaattgtatataatttgtgtaaaccatctcattaaatgggtttatcttaygatcgtaattttttttatttaaattgcctttatttgcaaatatactagtaggaactgtgaaaatcaaatgacatttaaaatataagtgggaaggcatttacctgagaaaaaagggaagctaaaatgcaattatactaatttaagtagtactaaaatggatgagcttcaaatgacttaatcctctgaaaatagaaattatattagcgtgtt

SEQ ID NO: 86662 - DNA, 1111 bp, Homo sapiens
ctttaattattatccaccacaatcttatcattctaaactccttttattaaaaataaaggtacatttcaataaattcaggaaaaaaagataaaaatttgtgctctaaaagagcaaaaaatgtaatgtttgtatatatttatttttcaaaattttaaatttcattcttttctattgttggctcaaagcaaagatgcaatgaatgcaaaattatgctgataaaatctgattctggatacatctgcacatttaaatttgttcttttttactatcattctccctagtttcatgtgactcttcagagtatttatgtctccagtgaccttaatctataagtaaaatttactttcctcttatctcaaaattctccagctatgtgagcagggtggagatgctatgtttagttatcagatcttgtactcagtactgtaacttgttcttttactaatttctagaagaagaaccacaatattatcatattacattttagttgaatgtggaaagttaattttacaacttttaaatgtaccaactttccaaactcaatagggcaaagcaaatcctgagaaaacaaaatcaaaactgctttcgatgctgcatgaaagtacaattgtcattatatctaatgaaatgaaataaaatctttctaatctaagtagtattcagtgttttgtttccattgtggcagtgatatacgtagtaataaaatcattttacctatcatgtagacctcaaaattatattttcatataaacttaaaaaaatagctgttgaggagtataaacaaacaagaaacaacataaatatgagacatatagcaagatgtcagtttatacaaaatcttatctatatttaaattgtatataatttgtgtaaaccatctcattaaatgggtttatcttatgatcgtaattttttttatttaaattgcctttatttgcaaatatactagtaggaactgtgaaaatcaaatgacatttaaaatataagtgggaaggcatttrcctgagaaaaaagggaagctaaaatgcaattatactaatttaagtagtactaaaatggatgagcttcaaatgacttaatcctctgaaaatagaaattatattagcgtgtt

SEQ ID NO: 86663 - DNA, 550 bp, Homo sapiens
catttccagtattcctctgcagtacgtgattacattcatctattttttttcttatttatacatgccacagtttattacatttatatttataaacatatgacacttccaagtcatcccctgccttcctataggggtaactaatctgatttttttcctactgttataacacaaataaatgttttcttaaacattatattaaattgtattttgaaacttgtacaaatgatacataaattgataggaggtcatgccccatgctccatttgttaataatcctattctgtctttattttttgtataatttgttttaggtttctcaggccaccccctagccttttttccccctctgtactaagtartaaaattcaagtattaggcattaaagaattgcaggttgttctaacagttttctaaaaaagtcattgtcatgtggatagaaaatagttcctctttctctttagctacaagaaaagtagatagtactcagcataaatctgtctttatcatattaaatacaaagaagccttacaaattaagacctgtaaaagta

SEQ ID NO: 86664 - DNA, 1045 bp, Homo sapiens
cttcccaacacatgagttaacataggaatgaccttgtacatgacttgagaagtaggtagcagagttgcaactcagcccagtccagtgatctttgagctggaccataccatattacctgcataaatggaactggccccaaagatggtgctattctcccctgacactacttccttaggaagccaattcatcttactygggattctgttttaccgtttagtagcaaagtatccataatacattgttaagaggatttcaagggtcataggacgtgtagaaaatttagaaagtagccattccaaactcttcatttacagactctataacaaagggtaagagagaggcaattcattgattaagatgtcatagcaagctgtcaggagagatgagacctgagagcctttgggctctcagtgtagcactctctcaagatgcacagagctatctcccaggtgccctacctcaagtatcagtttcttcccactagtaggcgctgttgcctgattgtgaggaatttctccttctacctaacagtagattttcattgtaattaggagtattgcgtgggacactaagtctacaacatggcttctgtatgactccagaacaaggtgaactccattacaattgcaaccagtagagtcatgccatttctctctgaaacactgtggtgttttggatttgtacatctcaatgttctggaaaccaaaggaatggcagtaggacatggggtactgagtgggttctgcagagctgtgttgaggcaaaaaaaagtcaaggctctggtccctgtttgaccatagctggtataaaatgattgctttatacgttggtattatctagaacattcatttaacagaaactttccagtttggctttgttacttcttcgtcttattattattattactttgagacagagttttgctcttgttgcccaagctggagtgcaacggcacaatcttggctcacagcaacctctgcctcccgggttcaagtgattctcctgcctcagcctcccgagtagctgggattacaggcgcacgtca

SEQ ID NO: 86665 - DNA, 1045 bp, Homo sapiens
cttcccaacacatgagttaacataggaatgaccttgtacatgacttgagaagtaggtagcagagttgcaactcagcccagtccagtgatctttgagctggaccataccatattacctgcataaatggaactggccccaaagatggtgctattctcccctgacactacttccttaggaagccaattcatcttactcgggattctgttttaccgtttagtagcaaagtatccataatacattgttaagaggatttcaagggtcataggacgtgtagaaaatttagaaagtagccattccaaactcttcatttacagactcwataacaaagggtaagagagaggcaattcattgattaagatgtcatagcaagctgtcaggagagatgagacctgagagcctttgggctctcagtgtagcactctctcaagatgcacagagctatctcccaggtgccctacctcaagtatcagtttcttcccactagtaggcgctgttgcctgattgtgaggaatttctccttctacctaacagtagattttcattgtaattaggagtattgcgtgggacactaagtctacaacatggcttctgtatgactccagaacaaggtgaactccattacaattgcaaccagtagagtcatgccatttctctctgaaacactgtggtgttttggatttgtacatctcaatgttctggaaaccaaaggaatggcagtaggacatggggtactgagtgggttctgcagagctgtgttgaggcaaaaaaaagtcaaggctctggtccctgtttgaccatagctggtataaaatgattgctttatacgttggtattatctagaacattcatttaacagaaactttccagtttggctttgttacttcttcgtcttattattattattactttgagacagagttttgctcttgttgcccaagctggagtgcaacggcacaatcttggctcacagcaacctctgcctcccgggttcaagtgattctcctgcctcagcctcccgagtagctgggattacaggcgcacgtca

SEQ ID NO: 86666 - DNA, 1045 bp, Homo sapiens
cttcccaacacatgagttaacataggaatgaccttgtacatgacttgagaagtaggtagcagagttgcaactcagcccagtccagtgatctttgagctggaccataccatattacctgcataaatggaactggccccaaagatggtgctattctcccctgacactacttccttaggaagccaattcatcttactcgggattctgttttaccgtttagtagcaaagtatccataatacattgttaagaggatttcaagggtcataggacgtgtagaaaatttagaaagtagccattccaaactcttcatttacagactctrtaacaaagggtaagagagaggcaattcattgattaagatgtcatagcaagctgtcaggagagatgagacctgagagcctttgggctctcagtgtagcactctctcaagatgcacagagctatctcccaggtgccctacctcaagtatcagtttcttcccactagtaggcgctgttgcctgattgtgaggaatttctccttctacctaacagtagattttcattgtaattaggagtattgcgtgggacactaagtctacaacatggcttctgtatgactccagaacaaggtgaactccattacaattgcaaccagtagagtcatgccatttctctctgaaacactgtggtgttttggatttgtacatctcaatgttctggaaaccaaaggaatggcagtaggacatggggtactgagtgggttctgcagagctgtgttgaggcaaaaaaaagtcaaggctctggtccctgtttgaccatagctggtataaaatgattgctttatacgttggtattatctagaacattcatttaacagaaactttccagtttggctttgttacttcttcgtcttattattattattactttgagacagagttttgctcttgttgcccaagctggagtgcaacggcacaatcttggctcacagcaacctctgcctcccgggttcaagtgattctcctgcctcagcctcccgagtagctgggattacaggcgcacgtca

SEQ ID NO: 86667 - DNA, 615 bp, Homo sapiens
gtctgtatttatttagattgttaatttctttaattattgttttatatttttcagcgtaggaatattgtacatatttcctaaggtttataatgaagtattccatgttttggggtgcttttacaaatggtgatttaaaaatatgcaatttcaagtattcattgctactgtatagataagattgatctttgtatattgcccatgtgtgctgtaactttgctaaaattattyattctagtagctttttttttattcggggggaggtttaatgaaaaaaattatgttttcaatgtagtgcatctttatatatatatatatatatatatatatatatatatatataaaatggaatacaattcagccataaaaaagaatggaatcatgtcttttgcagcaacatggatagaactaggggtcgttatcctaaatgaaataaattagaaatagaaagccaaatactgcatgtggtcacttataaattggagctaaacagtggaaacatatggacatacagaatgaaataaaggtgggaggatgatgagggttgaaaaaatacctattggatacagtccagtactcactcttcggtttatgggtgcactaaaagcccaaatttca

SEQ ID NO: 86668 - DNA, 658 bp, Homo sapiens
ataaggagaggaaaggagatgaagaattaaggtctgaagaggtaaacagacatggaggctgcaccagaaatggcctagcatgactgccacccactgctgcattcatgtactcactcaacaaatactgattgggtgtctaatatgtgcacaatattctcttgagcatttctcatgttagactgtcttwaagggggattacttccagcaccttttttattaaggctcactgcctcatcttgggagtaagcatgggcttttctttatggagagtgatgctacttaccccaccttcacacaatcagaggctcctagcctgggaggtgatgaaaagaagaggagaattccaccacagctggaggagaatcgcctcagatatgggcagcttcccaaatcaaagcagggactgagttcatggcatttggtgtcccccctacccacccaaaaaacaaacaaacaaacaaacaaaaaatcttcatcttccctgcagatccctggagggacagttttagaagagaaatctgagaacacttagggaagtcaatgagggtaatttatagtaatacaagagatttttgagttcagagatcgacaacagcatctataagatttcaacccaagttgacacatacagcaagggttgtatggtgagacagatgga

SEQ ID NO: 86669 - DNA, 2141 bp, Homo sapiens
gcattttctttgttaatgtttttattcacaaaaataacaccacgtttttttctttaaagccactaaagcagagggagaacaaaacatgcagcactgtacacatttgcatagtatattttacccagcatgccttgtagaatgctacacatacctagataagaaaaataaaaggggacaaattattaaaataaataactaaaatttaaagaaagaaaaaaaattatttgacaaaggcattttttatcccactttgtcaatggagatatagcaatagcctgggatttcaacagccctcagaatagtaggaaaaatctttttacatcattttgccatatttctgttttagtatgttttatgttaatacatttattttttattccttcccaccatccctacaaaaacacagctaatggctttaacttatgtttcaaagtagtattcagtacaaaacaaattaaagaatccctaactaatataattttttgtggttgggacatctttattgatcattctgactcgaggctgtgaaaaatacaaaaatctcacacatgtccaaaattcagaggagccctatgagctcacttgctgtgactttctgctgttgttattgaaagagaagaaataagaggagaaaatatggtatgagtgttatcacaaaataaaatttaataaattttatggaagggaataaaacaaaagaaattacatccacagattgcaaggctatgaaataaattgctggaaaagtatcaagcagcaagttaaaaagatggtagatgaagtaaatctgacaaaacttagaactaaatcgacatacttttaaaaaatatgactgccaaatttaacrgtggattttgttataagtttgtgctataacaaatgtgcttctttctcctcaatctatttttatattattggcaaaatatatattttataattttgtactgtacaatatgtttttgctacattatttttctactgctaatgcagattataagtaacaacatagatttattttggcaataaaatgctttcattttaataacatcccagaaaatattgtaaggcatatgaaaaatagtatgcaacgatatagcgttaatgatcccgcctctttattacatcccttatgcatacagaattcacactgatttcagttaaaagtcaaagtggcatgcaagtagggcaagggtggcccctacataaatatagacatagccatttgttgagaaatttaagtgttcaaaacataaccaagaacacttatcaggtattgaaaagctagaggccagccacttctggttcttagttccccttgtaactccttataattttcaaatgaggaagtatcagtgtattctcccaaaccactctaaattcattagtaacattttctaccatccttctgcaaacattttacatacatcatgagaaacaaaagaaagtttcatatataactacgactccccaaaccaattgctactcactcttaattatactttgtttatggcaagtagaagttacagcccttaggattatctgatgagatactttctagtcttctcataatgtccctcaattacatgaagcatttagaattaatcattacaagtaaaaagagatagctgctatcagaggatgtattttatttaagaaagtccattttaataaaagaagaaacttttaaaagtaatttttgaatgctgtagttctgggtgcccatataagccaatttttctattttgactaacttgactgcttaagtcaaaaagaaggttatccttattgtctgtctaacagctaattggattgacttgactggtttgatcatgattattttaaagaagaggactgttctctgccccatagacacagcttgagtaagtaacttactaacagttatagtattgacagtatttaaaggtatgagaaactaataaaacagattttattacataatttcctataaatttttcattcatacagtcattcaaggatgagttttatataatttaaaaaaacacaacatgcaacattgtcataaaagacaaaggcagaaatgtaaaaggaataaggggtacatagcatttatttgaaacattgatatgaagtttattccaattacatgggagtccaagatt

SEQ ID NO: 86670 - DNA, 535 bp, Homo sapiens
ctgtatggaatgaactagagtatcaataagctgaaattagataacctatcctgtggtggattaggatttaaactgctttaaatmtttctttaacagtgcctagaaataaagaaggcacactggagagagaaggtatagtagatgatacagggtaggaatccacatgtctgggccaggcacagtggctcacgcctgtaatcccagcactttggggggctgaggcgggtggatcacttgaggtcaggagtccaaaaccagcttggccaacatggcgaaaccccgtctctactaaaaattcaaaaattagctgggtgtggtggcacacacttgtggtcccagctacttgggaggctgaggcatgagaatcagttgaacctgggagtcagaggttgcagtgagccaagattgtgtcactgcactccagcctgggcgacagagtgagatcctgtctccaaaaaaaaaaaaaaaaaaaaaaaaacagaatccatatgtctggcatggtggaaaatgttaatagagaaaagcgtgtcggaga

SEQ ID NO: 86671 - DNA, 1056 bp, Homo sapiens
cactttactatgcaattagtatagccaatgataaaaatatgtctcatttctacattattgttagtaaattttttacatttgataatgacaaatctgtgtctctctttagaatttaaaaacattgtcatatacatttgcatttgactttcataataacactgtgaggcagataagggaagtattttattctcattttttaaatgaagaaactgagattcagaaggaatttatgagttgtctaagataagataactagtatcagaactggaactcaaattcctagcctagcctattaaagggtaccaacagaaaaggaggattggagatagaatgatagcagtgaagatacacaactatccagaaaaactgttaccaaccttaaatactttactcagaggtatcgagacatttatttatcttactstttgtaagtgtcattaaggactaatccttcagtccaaactttcactcagtccagaaatatttgttaaaatagccctgaaagatgatgtgtcatcttctgctgaagacttctatttttcttccacagacatagctgttatgtattgtcttttagttttgagacaaaactgcctcttacagttttaaaatatttatttaaagctctttaatcccaggacaatcattcacttactattatttttaattttctcatattataaaatacactcaagaaagtgcagacatcattaatgaacaaaatacaaccagcccacaaataaagaaacagcatatgatcacaagagcctctttgtgtgtcaccttccaataactatcctctcctaatgaagttcctgaatttcctaacaagtagaataatatatagtatgtattcttttgtgtctggcttttttcactgaatgcaatgtttttgagattcttccacatggttgcatgtaatattattcattctcattgttgagtagtatttcattttttggcacaacttatttattcatttttctgatagtagacatttgagctgtttctgcgttttggctactatttagctactgctgtttcattcttgtacat

SEQ ID NO: 86672 - DNA, 1056 bp, Homo sapiens
cactttactatgcaattagtatagccaatgataaaaatatgtctcatttctacattattgttagtaaattttttacatttgataatgacaaatctgtgtctctctttagaatttaaaaacattgtcatatacatttgcatttgactttcataataacactgtgaggcagataagggaagtattttattctcattttttaaatgaagaaactgagattcagaaggaatttatgagttgtctaagataagataactagtatcagaactggaactcaaattcctagcctagcctattaaagggtaccaacagaaaaggaggattggagatagaatgatagcagtgaagatacacaactatccagaaaaactgttaccaaccttaaatactttactcagaggtatcgagacatttatttatcttactctttgtaagtgtcattaaggactaatccttcagtccaaactttcactcagtccagaaatatttgttaaaatagccctgaaagatgatgtgtcatcttctgctgaagacttctatttttcttccacagacatagctgttatgtattgtcttttagttttgagacaaaactgcctcttacagttttaaaatatttatttaaagctctttaatcccaggacaatcattcacttactattatttttaattttctcatattataaaatacactcaagaaagtgcagacatcattaatgaacaaaatacaaccagcccacaaataaagaaacagcatatgatcacaagagcctctttgtgtgtcaccttccaataactatcctctcctaatgaagttcctgaayttcctaacaagtagaataatatatagtatgtattcttttgtgtctggcttttttcactgaatgcaatgtttttgagattcttccacatggttgcatgtaatattattcattctcattgttgagtagtatttcattttttggcacaacttatttattcatttttctgatagtagacatttgagctgtttctgcgttttggctactatttagctactgctgtttcattcttgtacat

SEQ ID NO: 86673 - DNA, 898 bp, Homo sapiens
attgctttaaataaatgtagtgccattatttgagaccaagcagatatgtttttgtaatagaatgcaaatgaatatctacaacatacacataatagccctagagaaacaaatactgtgtggctgcttaataagaataatctaggatagcacaagttgatcattcttcgtatagcctatacaggaaagaacagcagacactgaggccctataaagtacatggaaaatggaaaatgactgctaatgggtgtgaggtttcttttggggtgatgaaaatgtcctaaaatcggctgtgttgatgattgaacaactttgtgaatatattaaaaccactgaattataagcttttaagggatgaattgcataatatgtgaattatatctcaataaagttgtggttttgttttttttgtttttgtttttgtttttgttttttttggagacagagtctcactctgtctcccaggccggagtgtagtggctcaatctcggctcattgcaacctccgcctcttgggttcaagcaattcttgtgcctcagcctcccgagtagctgggactactggtgtgcgccaccatgcctggctaattttttgtatttttagtacagatggggcttcatcacgatggtcatgctggtctcgaactcctgagctcaggcaattcatgcacctcggctcccagtgtgctgggattacaggcgtgagccaccgcasctggccttttttttttttttaagaccagattttggcctcccactacaaataagcatgctggaagaaatgtaaaagcctagtagttgaacttgaaggtatccataattttttctgaattgcttcaaacaatgtgatttcaaggccacttactaatcttgtcttagcaccttgtgtatggacaaatata

SEQ ID NO: 86674 - DNA, 898 bp, Homo sapiens
attgctttaaataaatgtagtgccattatttgagaccaagcagatatgtttttgtaatagaatgcaaatgaatatctacaacatacacataatagccctagagaaacaaatactgtgtggctgcttaataagaataatctaggatagcacaagttgatcattcttcgtatagcctatacaggaaagaacagcagacactgaggccctataaagtacatggaaaatggaaaatgactgctaatgggtgtgaggtttcttttggggtgatgaaaatgtcctaaaatcggctgtgttgatgattgaacaactttgtgaatatattaaaaccactgaattataagcttttaagggatgaattgcataatatgtgaattatatctcaataaagttgtggttttgttttttttgtttttgtttttgtttttgttttttttggagacagagtctcactctgtctcccaggccggagtgtagtggctcaatctcggctcattgcaacctccgcctcttgggttcaagcaattcttgtgcctcagcctcccgagtagctgggactactggtgtgcgccaccatgcctggctaattttttgtatttttagtacagatggggcttcatcacgatggtcatgctggtctcgaactcctgagctcaggcaattcatgcacctcggctcccagtgtgctgggattacaggcgtgagccaccgcagctggccttttttttttttttaagaccagattttggcctcccactacaaataagcatgctggaagaaatgtaaaagcctagtagttgaacttgaaggtatccataattttttcygaattgcttcaaacaatgtgatttcaaggccacttactaatcttgtcttagcaccttgtgtatggacaaatata

SEQ ID NO: 86675 - DNA, 847 bp, Homo sapiens
ccttagtttaaaatgcagctgttttattctgctttagtaattaattctttttccaatactctattgattaagcgtagaccctgataaagttcaaactgagaagaatctctcgtggcgtccttagttgctcgggagagtcaatgaaaacttcctacaattccacctgcctcctcagagtgctgatccaatgaacagaacagtttttttctcataaattagtcaggccatgtggagctgtattagctgatcgttgcttttgtctctctacttgctgacttgcttttcagttttgctggcctttgtgctgtcacacacaaagtcggagtgcagctgccattctgaacccaaaccaaggtaaagaacaattcatacaaactacatttttcccccattttctaaagcggcaactccctgagcagtaaagggctcaacggggcctcctgggacccaacyagctgagaaatcagtgccaaagcatgcagacatattgtggaactgaaaaaataaataaataaataaataaagtaacctatttttttcaaggctttactaggcttttttgtcttttttccccccggtagagtttgtgctaccctattttcagcaatgttaagctctctactttgttttcacagagaacatcacagaatgacagacgacagggtaaagagagtaatcaagaagccgaggcttgtatcctgtgctggtcaggtggcatcagagagttagagaacgcctattaaccacacgggcgtggagtgtaaccatatataaatggccattataaacacaatggtatttagtaataagaggaatcaccaacatggtgcttcttttcaaagggtca

SEQ ID NO: 86676 - DNA, 488 bp, Homo sapiens
attgaaaattcaagggatgggagaatatgggcaaattgatgggaaaaataagtgggggaaaatcaaaggcacacataggaagaatagccttggcaacgtggaagaatggctctttctctgacagtgggtgggagtaaatacaattagcgataygaagaggagaaaaaaaggggaagctcattttgactttggttatttcatttaagtagtaagatcatcttcaagtagtatcaagactggggtttgctccttgggaaacatgaaaagcttggccattttcagtgtaggggttgtggttgcagaaagatgaagagtaaatcttctcactgcagttgaggctggcaagcttgggtaatggtggtaaagagacctccagtccttattaggatgtaaagaccttattttctatttagcttagttcaaataccatcaagcagacagtgaaggaagtagagtggctcctaaaagcagcagccctaatcttctgt

SEQ ID NO: 86677 - DNA, 715 bp, Homo sapiens
tgtcgaggacacactggaagtagaacttggtaagctgggcctcatcgcctttgaatgacatcgtgctgctgggagcaggtctaagtgtgatagaaggaaaacagcattgggatttccagtcaaacagaattgggtgtgaatcttaactcagccattgactagttttgtgactttgcacagttacttcatcctttaagcctcagtacttaaatccgcaaatagctatcataaaactgaccctaaaagattatattgcaggccgggcatggtggcttatgcctgtaatcccagcactttgggaggctgaggtgggtagatcacttgaggtcaggagtttgagaccagcctggccaacatggtgaaaccccatctctactaaaactacaaaaattagccgggcgtgggtgtgggtgcctgtaatcccagctactcaggatgacaaggcaggagaatcacctgaacctgggaggcggaggttacagtgagccgagatcgagccattgcactccatcctgggtgrcagagcaagattccatctcaaagaaaaaaaaaaattatactgagaaataatgggacaatgtatgttaagtggctggagcatgaaacctgatcaatagattttattcttccttaacttccccaggaacaggtggtttcgtacatgttggttaggtctatcagttatgactacaaattcgccaacctgagtaacatt

SEQ ID NO: 86678 - DNA, 762 bp, Homo sapiens
attgcacctacctcccaggggtaactaaatgaataaatataataaagtacttacagtggttcctgacacagactcagcactccgtcagtgttgccatgactatttttattatcattattaatgattacttagatcaattatttagcagtggactaatggaagctacagagcagggaagggaagcagatctagggaggaaggcagttttgatttgaggaggtttgcacatgtagagaagcatactggagaagcatatccagagggcgaaagatatctctccattgtgcatctgcctcttttgacgttggaagacacatgtcttacyccccaaagggagcccagcactgggagccttcttgatgatctcaaaaataatagctattcaagaaaatcaccaagtgactgtgaaaccgtcagttcggaaggctggttagaacatgtgggagcaacatgaatgttctacaaaagtttaaagcagagattgtttcaaatgggtgtagtagatattactgaaaaccaaaaaagagtgagattgtcagtgtaagaatgtgatttaatgtttgtagtgcttacaattttgtgtaccaactggatgactaaaaagagtaaaataatttaattaatagctcatattttatgtgtgaaaacatgttagtgaacatatataatcaaaatagatttcattgctattgcatagtctctaatacatagaatgattttgcttttctcttttattatacttgctttaaaatacttgaaata

SEQ ID NO: 86679 - DNA, 632 bp, Homo sapiens
cctcttatgtgacagaggcccaggtaagatttggaggcatggggaggctggtgaccttgcaggtgacttcacttactaggtctttttccctgaygttgaggatcatgccacacatgagcaacagtgcctctacagaaatatccaatgttgtaatgactgatgttgcagtgagctgtgttggctgggggacttaccaggtattactgaatgttaatgaagatgtccctaagattcccaattttctttttttttttttttgagacggagtctcactctgttgcccaggccggagagcagtggcgcgatctcggctcactgcaagctccgcctcccgggttcacgccattctcctgcctcagcctcctgagtagctgggactacaggcgccgccaccacgcccagctaatttttttttatttttgtagagacggggtttcaccatgttagccaggatggtctcgatctcctgacctcgtgatctgcccgcctttgcctcccaaagtgctgggattacagatgtgagccactgcacccagcccccttttttcttttttgtttttttttttgaaacggagtctagctctgtcacccaggctggagtgcagtggcatgatctcggtccactgcaatct

SEQ ID NO: 86680 - DNA, 713 bp, Homo sapiens
tcctgaacattcaggaaatcaagtcaaaacaccccaaaaaatactaggtacgctcagccagagcacaacaaacaggacaggctgtgtcaggggcccaggcctccagctggagggaacgtcaagcccagsctgggggggtgggggggatggtcagatgcacttcctgggcacagatggtgacatagtcaccacagatgaactcggctctggtgaccctccctggcttcagtaacaagccaaaaagcagctttctgcacaaggaaaccttccttctttccttccttcccaaagcgctgactgtgggctgactgccatttggggcagggagtcttccatctgttctgaggctgcttcctcctcttggccctgccctacagatcatgaaggagaagggcaagaggtcttctgaacacatccaccagatcaaactggacgtgagcaggactctccagaaccatgtcttcttcagggatcaatatggagtgaagtaagcctacgagagccacagggtcccagaggagatggggtgaatgagagggatggggactttcccagagcagaagccaggatcacccaggagggatgacagagctgccaagagctctcctggcccagggagcagccggcaccatgaaccaagcacctccctggttccaagccctgggccaggccggaacatgtggggccagaacccaggaggatcctgaggagac

SEQ ID NO: 86681 - DNA, 855 bp, Homo sapiens
tttgtatttatttagcttacagatctactcacatataagaaataacatagaaaaaaggatgttcactgcagcatgattagtaaaagttaattactagaaacaacccaaatgtccaccaataggggactgattatataaattatggtgctttcaagctactgaactccacacagctgtagaacgtagctagaaagcttttcatacactgctatataaatgtctttgtgttgaatgttaagtaaaaagagcaaagcacagcatattgtatgtaatatgtcactgttgyttttcatttgtgaaaagggggcacctggctttatatatgcacgtgactttgtgtgtgcttcgggaaagacaggcgagaaatgaactggattctgtgcctctgtggggaggagacagtgcttcttgccctttcttcagcattttcttccgatgaggtgagcaggtggtccctgctctgaaacttgcttatctgtgaatgctgccttttgtgctgatgtggggctctggggctggatttccggttcctggacatggtccccgtctccccgcgggtgggactcgttaccttatggcctctgacttctgctgcggaccatgagaagggtggcaaatgtgtgattcttttgtttttttcctttattgagacggggtctcactgtcgcccaggctggagtggagtggcacaatcacagctcactgcagcgttggcctttcaggctcaggtgatcctcctgcttcagcctcccaagtagctgaaactacatgcacgcaccaccacgcccacctaattattgtatttttgctagaaaccgggtcttactttgttgctcggctggtctggaactcctg

SEQ ID NO: 86682 - DNA, 1387 bp, Homo sapiens
gatccttcagggtttaatcacacgctctgtggtcaccccagtcggaccctttacaagcatccttcagggtttaatccatgctgtgacagggtgaatgagattcagggcatcgtgactttgctcagcttgacggatttgctgaggatggcttggagacaggcttgcagccagcctgggtgtgctcagacccctgaggacgctggccagtgcctgatgctccagagtgtcctgttctggggaccacctgccggcacccagccatgagcgccttgaggaagcctcctgtgaccagcagtcagtgaaactctgtctccaccctcaagaggaggaaggaaactcaattctgttagggttagctctctaggacgtgagagagatccgccacgtcaggggacctttcagcgggcaccatcctgtttcctctctgatgatatccaccgtctgtacttaccatctatagaattgttagaaaacaaatgtttaaaatctgtttatgaacatattttttaaaatttcactgtcttttaacacaatggagaatttctgactgactctggaatgtttaaatatttacacatatttaatgctcattgctttgcatattactattatcccatacagtaaatccaaatgaaaatgtgaagacaatgatataatcaatgttacaaagtacagtctaaattatcgcttatgaatccattctgtgcttgttgattgaaaaaaagattgatgaaattcactggtactgaactaaattgctaaaatctttaagcttccttgaattaagatgatatatatatgtgcgtatataatatatagataaatatatatctcacacttcaacaagaaaaatacgactaaaacaattaaagaatggaaaaaattatatgaacaagcaaattaaagaaatatgtataaatggcaaataaacataaaatacaatcaatcaacctcactagtataaaaacaatgatacctctctcaaattggctaaattggagggattctcaacattcaggattggtaggggctggggaaatgtgtgtcctcctgaactgtggctcagtccttggattcattcattcagtaaacgttcccaggcctggaaaggcaaggggagatgataggagcccygtgtctgtccacagggtgtccacagctgatggaaacacagccaggccgatcgatggtcagaacatggattagctgcagacagtgaaaaattctaaggagaaatcatgaaaataaaccagagaaaatggatacgtttcaggggcaaattggcggcatctatcacattttaaatgtgcattttcttttatgcagcagttttaggtttgaaaatctctgcggaagtctgtgcatgtgcagaaagtggctcccagga

SEQ ID NO: 86683 - DNA, 1387 bp, Homo sapiens
gatccttcagggtttaatcacacgctctgtggtcaccccagtcggaccctttacaagcatccttcagggtttaatccatgctgtgacagggtgaatgagattcagggcatcgtgactttgctcagcttgacggatttgctgaggatggcttggagacaggcttgcagccagcctgggtgtgctcagacccctgaggacgctggccagtgcctgatgctccagagtgtcctgttctggggaccacctgccggcacccagccatgagcgccttgaggaagcctcctgtgaccagcagtcagtgaaactctgtctccaccctcaagaggaggaaggaaactcaattctgttagggttagctctctaggacgtgagagagatccgccacgtcaggggacctttcagcgggcaccatcctgtttcctctctgatgatatccaccgtctgtacttaccatctatagaattgttagaaaacaaatgtttaaaatctgtttatgaacatattttttaaaatttcactgtcttttaacacaatggagaatttctgactgactctggaatgtttaaatatttacacatatttaatgctcattgctttgcatattactattatcccatacagtaaatccaaatgaaaatgtgaagacaatgatataatcaatgttacaaagtacagtctaaattatcgcttatgaatccattctgtgcttgttgattgaaaaaaagattgatgaaattcactggtactgaactaaattgctaaaatctttaagcttccttgaattaagatgatatatatatgtgcgtatataatatatagataaatatatatctcacacttcaacaagaaaaatacgactaaaacaattaaagaatggaaaaaattatatgaacaagcaaattaaagaaatatgtataaatggcaaataaacataaaatacaatcaatcaacctcactagtataaaaacaatgatacctctctcaaattggctaaattggagggattctcaacattcaggattggtaggggctggggaaatgtgtgtcctcctgaactgtggctcagtccttggattcattcattcagtaaacgttcccaggcctggaaaggcaaggggagatgataggagccctgtgtctgtccacagggtgtccacagctgatggaaacacagccaggccgatcgatggtcagaacatggattagctgcagacagtgaaaaattctaaggagaaatcatgaaaataaaccagagaaaatggatacgtttcaggggcaaattggcggcatctatcacattttaaatgtgcattttcttttatgcagcagttttaggtttgaaaatctctgcggaagtctgtgcatgtgcagaaagtggcycccagga

SEQ ID NO: 86684 - DNA, 781 bp, Homo sapiens
tttttgtaaaattgggatagtagtattattggcttcagggtttctgagatgagttagtttaatttatgcaaagtgcttataacagtacctggcacagagtatgtgctcagtaaatattatttgttactattattgtaattatgatctcaacaccattaagataacgagccttctccaccttgacttcatgcccaggctcctaccagaggggaggattgcatttgcttttcacggggattcatgaagaagtgaacctgtggctcttggcttggaggctgggtacatgaagtgagaattagtcatggccttgttcacaatctgagaacattcacacttgttgcacctgctcggagaagcttgaattcaatcagcaaattttgcatttcccaatcccagcctggggaagagcttgactttaaaagccttacaaagacctcctctccaccgctcagtgatttcattcaagaagttgcccctccagggagcgagtgacacaagctctgctgagagaggcaggagaaagctgcatcagccacagtgttttcccaggcagggttctcctggggtgcccacgcttgcctgttcccagtgtgtgccttcaagcccragccgcaaaagagttttccttcatgaaatcgaccaagaaccatttaggacactgttccttggaagggacatattgggatgccaggttcttggctggaatcattaagtgaatttacatcctgatctgctgcacgtgaaacatctatccggataggagaggctttagctgggtctt

SEQ ID NO: 86685 - DNA, 596 bp, Homo sapiens
acacatctgggctttgtgaaaagtccatacagggatttgggccttccaagaaattgtgtccctgtagcactacagcaccattagtctcttaaaagtggcatccccactgatcaaagggcaaagtagccaccaagggctaaatgacmgctgctgctatcagtacccttctctctgtcccaattcaccccaggtaattcagccctcctggtgctcccaattattctagtgggatgagattgtagtgggtctcccataagattcccagaccagggaagaaatcaaatgtccacttctaatttcttcctctcaccttggaaactgtgtgtctagggaaaatttttgtgagtgtcattatgctggttttggggagggagtggtacaatctgaaatgaccaagtctcttactagtcatggcttctctcaattctgtgggcccaagggatttctctgctttctccatgagtcctggtaaaatcagggtggtattcttctatttgaatagtttctagttgtatttcgtgggagggtgatgctaggggctcttctattctgccatcctgccaatgtctgtcccctaaaatggaattttaggagct

SEQ ID NO: 86686 - DNA, 674 bp, Homo sapiens
tacctttgataatgttagaaattatttcattacagttctgggaagagtgtgtttttccatgaacttatgtttcttcttccatattgcattgataatagcagaacttaagtatttgtcaaatataagactttaaaattagaaattttgatagttaaatatattttcaaagcmgatattttgagataatagcattaaggcagttctagctttatgtaaaatcaatttcgaaagtaattggtaaagccctttccaaaggaaaaacaaagtatgccctctttaatatgattcatcatcttgtagagcaggcaatagaaatgtatagttgttttttatttttattttttgagtttcacataattgtaatttacacatacaaatcccacaggcacgtgtcaataacagatggtatttattaaaaatccacatgtattcttggttggtgaaagtttcattctgcttgaaggcaagaaaatggattagatgacctttcaaggtcatgccacttacaatttttaaggttgggatctaaaactgtctcactgtttaaagtgtgtttattttaaatacgtatacaaatcaggtatgtttggttgcaggtgacaaagtaatacaaaagtacaatatgtaggcttacttagaaaagggcatgtttagtgctggcctgcgagagaact

SEQ ID NO: 86687 - DNA, 2374 bp, Homo sapiens
tataatattgaaatcatcacataggaacacctgtgaaagggagtttataattgtttttgaataattctaataaattgagaccattagccttctctgatgtattaattatgattagtttcatcttcatgtgatgggaaaaaagaatatgacagaaaaaaataatatgacagtggctgaaataacatccaattaaattttctcttgtaataatctgaataagaggttcacagccttcgttatcatcaaaaaccaagtttcttctatctcatttctccatcatcttcaatgtttgacttgcattttgtggtccaagatggtgttctagctctagtcatatcatctgtataccagtcagcaggacactttctgtaagttttgccagcacttctggatgttacattggccagaacttagatacacacagtgaaggctgatctacctggtctttattctgggaacaaatatgctcaactaacatttagaggttccatatctgagtaagaagtcatcacatgactacccattttaaatacttctgcatctctgtgtagaagatccttgatttggggttggggtttcattttattttcagcaattcttagcatggagagaaatcagggagtccatgctccacatcagaaatgtaatgactccctcagaacatatacatttttggaactagaatagcctcttmtttggagagaggcagcattttgagagacgacgaacgtcagtattggttttggtgcaaggataaaatacgtttttcctcttgcattttgtagcagcttgctagcctcatctaattcacaggtcatggtgggatgcaatagcaagcttgaaaagctatgaccggtatttttgattgactatgattttaactaacagggtcctatacagaactgggctccacatggagctctttctatagagctcaaacaaaatagtgagttttagagagtgatgaagtttcttcatttttactttactcccattatgggagctataagatggaacagagtttgctgccaaaagagagaagagataaagtgctgtggaacttcaaaagcaggagaggttcgcagctgcatttgacccagcgttaggcctggtgcagatttcaggaaacagtaaagatcttttactttatacttttgtttttcatgtgttccttgtttgagcctttcagcttcatacaccagatgttgaatttaatattattattggtagtagtaattcaaatctgaattgtaggagaatgtattattcaaattgtagatgagacaaccctggccaaacatgcatgaattaaacatccactagtccagggtgtgatgaagctctgaatcagggaaagtaaaaagatggttaggaaaccgtgatgactgagactactaagaatttaggatgccccttctgttgttttgtactttaagagaggataacaatggcaaaacagaaagaaatatctaaaattgaagtttttctatctaattaagaatttggtcatagtctgattaaaattgtaagatagtacaagatgtaagtaaatcaatgttaagtacaggagagaaaagcaaaaacacagccaggcgtggtggctcatgcctgtaatcccaacactttggaaggccaaggcgggtggatcacctgaggtcaggagttcaagaccggcctggccaacatgctgaaaccccatctctactgaattagctgggcgtggtggcacgcacctgtagtcccagctacttgggaggctgaggcaggagaatcccctgaacccaggaggcagaggttgcagtgagccgagatcatatggctgtactccagcctgggggacagagcaagattccatctcaaaaaaacaaaacaaaacaaaacaaaaaagaaagaaaagcaaaaacacggtccttatttttaaattaatacttcagttcacttccttctatcatctttaagtatcatctactattaccagtccctcttgtctattcaataaaatttattttcctctaatgtttgttcaaattttcactgctatggattgtataataaaactcaatactgttgtgttttttcttttgtattcttgaccaactcaattccttttacacattttatgggcttctatcaacaagtttatctgaatgttagatagccatttttttctgacaaaaaagaaataaagaaaaagcctacaactttactctgaatgtgatgcactaccatttatttttgtcattaaaaaattatgtgatactgtctatattacaaagaaacggctgcaagtaagattttatagaatgccagaccatcttttaaagtttaagaacatatcaccttggcatatttatttatccacagcttatgttgt

SEQ ID NO: 86688 - DNA, 2374 bp, Homo sapiens
tataatattgaaatcatcacataggaacacctgtgaaagggagtttataattgtttttgaataattctaataaattgagaccattagccttctctgatgtattaattatgattagtttcatcttcatgtgatgggaaaaaagaatatgacagaaaaaaataatatgacagtggctgaaataacatccaattaaattttctcttgtaataatctgaataagaggttcacagccttcgttatcatcaaaaaccaagtttcttctatctcatttctccatcatcttcaatgtttgacttgcattttgtggtccaagatggtgttctagctctagtcatatcatctgtataccagtcagcaggacactttctgtaagttttgccagcacttctggatgttacattggccagaacttagatacacacagtgaaggctgatctacctggtctttattctgggaacaaatatgctcaactaacatttagaggttccatatctgagtaagaagtcatcacatgactacccattttaaatacttctgcatctctgtgtagaagatccttgatttggggttggggtttcattttattttcagcaattcttagcatggagagaaatcagggagtccatgctccacatcagaaatgtaatgactccctcagaacatatacatttttggaactagaatagcctcttatttggagagargcagcattttgagagacgacgaacgtcagtattggttttggtgcaaggataaaatacgtttttcctcttgcattttgtagcagcttgctagcctcatctaattcacaggtcatggtgggatgcaatagcaagcttgaaaagctatgaccggtatttttgattgactatgattttaactaacagggtcctatacagaactgggctccacatggagctctttctatagagctcaaacaaaatagtgagttttagagagtgatgaagtttcttcatttttactttactcccattatgggagctataagatggaacagagtttgctgccaaaagagagaagagataaagtgctgtggaacttcaaaagcaggagaggttcgcagctgcatttgacccagcgttaggcctggtgcagatttcaggaaacagtaaagatcttttactttatacttttgtttttcatgtgttccttgtttgagcctttcagcttcatacaccagatgttgaatttaatattattattggtagtagtaattcaaatctgaattgtaggagaatgtattattcaaattgtagatgagacaaccctggccaaacatgcatgaattaaacatccactagtccagggtgtgatgaagctctgaatcagggaaagtaaaaagatggttaggaaaccgtgatgactgagactactaagaatttaggatgccccttctgttgttttgtactttaagagaggataacaatggcaaaacagaaagaaatatctaaaattgaagtttttctatctaattaagaatttggtcatagtctgattaaaattgtaagatagtacaagatgtaagtaaatcaatgttaagtacaggagagaaaagcaaaaacacagccaggcgtggtggctcatgcctgtaatcccaacactttggaaggccaaggcgggtggatcacctgaggtcaggagttcaagaccggcctggccaacatgctgaaaccccatctctactgaattagctgggcgtggtggcacgcacctgtagtcccagctacttgggaggctgaggcaggagaatcccctgaacccaggaggcagaggttgcagtgagccgagatcatatggctgtactccagcctgggggacagagcaagattccatctcaaaaaaacaaaacaaaacaaaacaaaaaagaaagaaaagcaaaaacacggtccttatttttaaattaatacttcagttcacttccttctatcatctttaagtatcatctactattaccagtccctcttgtctattcaataaaatttattttcctctaatgtttgttcaaattttcactgctatggattgtataataaaactcaatactgttgtgttttttcttttgtattcttgaccaactcaattccttttacacattttatgggcttctatcaacaagtttatctgaatgttagatagccatttttttctgacaaaaaagaaataaagaaaaagcctacaactttactctgaatgtgatgcactaccatttatttttgtcattaaaaaattatgtgatactgtctatattacaaagaaacggctgcaagtaagattttatagaatgccagaccatcttttaaagtttaagaacatatcaccttggcatatttatttatccacagcttatgttgt

SEQ ID NO: 86689 - DNA, 2374 bp, Homo sapiens
tataatattgaaatcatcacataggaacacctgtgaaagggagtttataattgtttttgaataattctaataaattgagaccattagccttctctgatgtattaattatgattagtttcatcttcatgtgatgggaaaaaagaatatgacagaaaaaaataatatgacagtggctgaaataacatccaattaaattttctcttgtaataatctgaataagaggttcacagccttcgttatcatcaaaaaccaagtttcttctatctcatttctccatcatcttcaatgtttgacttgcattttgtggtccaagatggtgttctagctctagtcatatcatctgtataccagtcagcaggacactttctgtaagttttgccagcacttctggatgttacattggccagaacttagatacacacagtgaaggctgatctacctggtctttattctgggaacaaatatgctcaactaacatttagaggttccatatctgagtaagaagtcatcacatgactacccattttaaatacttctgcatctctgtgtagaagatccttgatttggggttggggtttcattttattttcagcaattcttagcatggagagaaatcagggagtccatgctccacatcagaaatgtaatgactccctcagaacatatacatttttggaactagaatagcctcttatttggagagaggcagcattttgagagacgacgaacgtcagtattggttttggtgcaaggataaaatacgtttttcctcttgcattttgtagcagcttgctagcctcatctaattcacaggtcatggtgggatgcaatagcaagcttgaaaagctatgaccggtatttttgattgactatgattttaactaacagggtcctatacagaactgggctccacatggagctctttctatagagctcaaacaaaatagtgagttttagagagtgatgaagtttcttcatttttactttactcccattatgggagctataagatggaacagagtttgctgccaaaagagagaagagataaagtgctgtggaacttcaaaagcaggagaggttcgcagctgcatttgacccagcgttaggcctggtgcagatttcaggaaacagtaaagatcttttactttatacttttgtttttcatgtgttccttgtttgagcctttcagcttcatacaccagatgttgaatttaatattattattggtagtagtaattcaaatctgaattgtaggagaatgtattattcaaattgtagatgagacaaccctggccaaacatgcatgaattaaacatccactagtccagggtgtgatgaagctctgaatcagggaaagtaaaaagatggttaggaaaccgtgatgactgagactactaagaatttaggatgccccttctgttgttttgtactttaagagaggataacaatggcaaaacagaaagaaatatctaaaattgaagtttttctatctaattaagaatttggtcatagtctgattaaaattgtaagatagtacaagatgtaagtaaatcaatgttaagtacaggagagaaaagcaaaaacacagccaggcgtggtggctcatgcctgtaatcccaacactttggaaggccaaggcgggtggatcacctgaggtcaggagttcaagaccggcctggccaacatgctgaaaccccatctctactgaattagctgggcgtggtggcacgcacctgtagtcccagctacttgggaggctgaggcaggagaatcccctgaacccaggaggcagaggttgcagtgagccgagatcatatggctgtactccagcctgggggacagagcaagattccatctcaaaaaaacaaaacaaaacaaaacaaaaaagaaagaaaagcaaaaacackgtccttatttttaaattaatacttcagttcacttccttctatcatctttaagtatcatctactattaccagtccctcttgtctattcaataaaatttattttcctctaatgtttgttcaaattttcactgctatggattgtataataaaactcaatactgttgtgttttttcttttgtattcttgaccaactcaattccttttacacattttatgggcttctatcaacaagtttatctgaatgttagatagccatttttttctgacaaaaaagaaataaagaaaaagcctacaactttactctgaatgtgatgcactaccatttatttttgtcattaaaaaattatgtgatactgtctatattacaaagaaacggctgcaagtaagattttatagaatgccagaccatcttttaaagtttaagaacatatcaccttggcatatttatttatccacagcttatgttgt

SEQ ID NO: 86690 - DNA, 721 bp, Homo sapiens
cagtggctgacaccggtaatcccaggacattgggagactgaggtgggcagattccttggcaccaggagtttgagaccagcctgggcaatatagggagaccccgtctctacaaaaaattttaaaattagctgagtgtggtgacacatgtctgtggaaccagctacttgagaggctgaggtgaaaggatctcatttgagcccaggacatggaggctacagtgagctgtgatcacatcactgcattctagcctgggcaacagagcaagaccctgacaaagcaagcaagcaagagagtgagagaaagaaaaagagagagaaggagagagaaagagaaaaaagcaagaatgaatgaaagagaaagagagaaggagagagagaargaaaagaatgagaaattgcagaaacaatgcatcaagttatgagacatttctagggggtaagagtcttcccgttgtcccagagctaatacccaattaccatgttgccacgaatacaaacctacttttgccattttggaaaacgtatatatgaggtggtttgtagaataaattcaaaggaaatatctgtggttttaagaaaatgtgatctctgctttcttggaagaactgaacctactactgctgacaaaaagagaacatgctctaatatgggggatttatagtttatcctggcaatagttctgggccttccttctcctctaagcctaaagacccagatagaaa

SEQ ID NO: 86691 - DNA, 721 bp, Homo sapiens
cagtggctgacaccggtaatcccaggacattgggagactgaggtgggcagattccttggcaccaggagtttgagaccagcctgggcaatatagggagaccccgtctctacaaaaaattttaaaattagctgagtgtggtgacacatgtctgtggaaccagctacttgagaggctgaggtgaaaggatctcatttgagcccaggacatggaggctacagtgagctgtgatcacatcactgcattctagcctgggcaacagagcaagaccctgacaaagcaagcaagcaagagagtgagagaaagaaaaagagagagaaggagagagaaagagaaaaaagcaagaatgaatgaaagagaaagagagaaggagagagagaaggaaaagaatgagaaattgcagaaacaatgcatcaagttatgagacatttctagggggtaagagtcttcccgttgtcccagagctaatacccaattaccatgttgccacgaatacaaacctacttttgccattttggaaaacgtatatatgaggtggtttgtagaataaattcaaaggaaatatctgtggttttaagaaaatgtgatctctgctttcttggaagaactgaaccyactactgctgacaaaaagagaacatgctctaatatgggggatttatagtttatcctggcaatagttctgggccttccttctcctctaagcctaaagacccagatagaaa

SEQ ID NO: 86692 - DNA, 2146 bp, Homo sapiens
aggggcctcccagaaccccagggaagcctcacattctggtctcctgaatgcaaagccaagagcatcctccatctccaagtccccgctctatctgcccagttgaacgtgtggcacctcgagggcggttcctgtccaaactctgtggctgctgagctgagcactgatgtggcgccaagtgctgcactaagtgctttacgtgcatgaactcagtccacggtacaaacaccttatgaagggggtaccatccccgtccccgtgctgcagatgaggaaaccgaggcaggaaggctgagggacttggtgtaggttccacggccagcaggaggagggaccgggatcaaccccggcagcctggcgggagctgacgtctctctcactcaggaaggtgggctactcttccacgtctcgggtgtcacgggagcagtcagtttctacctggcccgccgggacagggcgtcgggacccctctcggcccttctcttctgcacaaataggtgctttggtggcaaagtgaagacattcactaaatactgctgagtgaggcgatggcgagatggaggcgttgctgcggctttgagctgttctctgtgatacgcggctttacagacgggggctgtggtgggaggaaggcatttgacagggacacgggtggcacggaggtgggggcagctccagccctgctcttctgtcaaatcgcacccagaccactgggcaagaagcatccaggagcagtaacgagagatcccgagctttgcggtcccacaggcttgggtttgaatcctcgctccgcccctccctgcgctcaggcagctggcaccaagggagccttcaggagtgccctgtaggacacgcagagctcggctgggtgcttctgtgtgggggcgcagggcagaccccctcacctgtcccagccgcctctcacctccatttccacagagcagccagagtggccttttcccatgaggaacatttttaaaaatatgaatcatcaaaacaaacagcacacccctttccaccaggcctcttgcgctcacctcccgtcattcacagcaggggaacgagatgcatgctcacatcgagatgagctcggcatgggctgggccctgctgcctccgcctcctgacacacccgtccatcgggggtccccatggctgcccccgcctttcactgacctcaattcaaaggccaaggcccctgcaaggtggtcaccagccacgctccacctcaccagccaggatcactgctttgcagaattcctgctgccctaagactgaggccttgggatgtttctgtgtctgctggtctagactgtaaagtcccatgagggcaggcacaggttctccatcatgctggccgccagccccagaactgcagagtgagcacataacgagcacgtgcagaattaacccaggaacgcgagagcagctgctctccggagagggatcccctgtcaggatccagcgcagtctacagggaagctgctttgctttcgatgctgccagcacggccaggcgcctcattcccagctctcgctcccacctctctgagccacagaccccgtgtgggtgaggcggagcctgcagcagctcccatgacacacctgcaggaggctgtccgtggccagctctgtgcggggccctgggaggacgccccaccccgaccaccgcacccacaggagatgagcctgtgccacaggggccgagtgaaggaggtgcgggaggtgcgccagggcgggaaggggcatctgctgtttggggagccagcagggcctgggagtggggaagactgacaggtgaggtggctgggagggcccagggacagcagcagcccaggcaccagggcagggggcagaggctgcttagtggacagagaccaggccaggtggcctctcacgccctttatcctatgggagggraaggcaagaggcaaggtataaggtggcaagtgggcatccttcaattcatctgtggagtcagcgcctaactcggcgtcaggcacaaagagatagtccatgagccagcccaggacaagctgcatgcggggcctcccaccaccactgctgccccggctggaactgccaagggtcccctcaccgaggcacggtgcgtttcctggtgggaatgacaggaaatcaggaggccagggga

SEQ ID NO: 86693 - DNA, 640 bp, Homo sapiens
aaaaaaagccatgagtttgagaccagcctgggcaacatagtgagaccctatctctataaaaaatgaaaaaaaaaattagctgggcatagtggcacgcacctttagtcccagctacccaggaggctgaggtgggaggattgcttaagagcccaggcatttgaggcaaaagtaagccatggtcatgccactgtactccagcctccgggacagggcaagactctgaccaaaaaaaaaaaagccctgaactcagcttgaccagacacaaagaactgccacctgtgcttcatatcccacctccagctcctcactgctgtcagcaagccctgcagagcctcccctggcatggggtygctgataggagggagccatctcagcgagctgatgcccccagggctacccttcttccgtccataactgaatgaactcttcttttaacacaggaaatttcaagataactgttttttgtctttcctatcagttagctggatgccttcacatatgttgtcaggcttgctttccagaccctcacacacttgagcctgcctactgtgatggaaagtgttctctgaatgtgaggctgggatgggcctagcaggaagggagtggagctgacttctcacactcacgtactgtgactgat

SEQ ID NO: 86694 - DNA, 640 bp, Homo sapiens
aaaaaaagccatgagtttgagaccagcctgggcaacatagtgagaccctatctctataaaaaatgaaaaaaaaaattagctgggcatagtggcacgcacctttagtcccagctacccaggaggctgaggtgggaggattgcttaagagcccaggcatttgaggcaaaagtaagccatggtcatgccactgtactccagcctccgggacagggcaagactctgaccaaaaaaaaaaaagccctgaactcagcttgaccagacacaaagaactgccacctgtgcttcatatcccacctccagctcctcactgctgtcagcaagccctgcagagcctcccctggcatggggttgctgataggagggagccatctcagcgagctgatgcccccagggctrcccttcttccgtccataactgaatgaactcttcttttaacacaggaaatttcaagataactgttttttgtctttcctatcagttagctggatgccttcacatatgttgtcaggcttgctttccagaccctcacacacttgagcctgcctactgtgatggaaagtgttctctgaatgtgaggctgggatgggcctagcaggaagggagtggagctgacttctcacactcacgtactgtgactgat

SEQ ID NO: 86695 - DNA, 2244 bp, Homo sapiens
  misc_feature (1)...(2244): n = A,T,C or G
tgtcttcattccaaaaagagaaattatacaacccctcctccctcataacactgctgtgagaacattggagcaggagcataataagactttattgaaagcaccaccctgtagaaatgcaaagaaccaccagaagctgaggtatggcattttgcaaggatccacattgctcccatgtgctacacaggagcaatcatgaacaagcagaaatttgtaactatttgaaagataaatgaatctgaaaggggaaatagaaatgaaattgtctttctctagtcaatcttccaaatgagaaaatgtgtttctgtgtcttcatctaaaagcaagtaaatcagtagtttgatatgtcatgtgattcttgaagagaagggagttaatagtctaaaactacgtttctttctgtgttcaagttgctaagtggaattgatgtaaagaatgttgctgctgaaaccagtggatactttgaacaagtgtctatgacgtttaaattatgtcccaagcatcttacaggcacttctggatagtacagttcacttaattctaacaacaggaacgagggtactgtgggcttcatttcagagaagaggaaactgtgattgtagctgaagtaacttgaccaagagcagatggcaggtgaatgatacactcagcacttgaactcagattttctgattccgatttcacgactatagtcataaaaaactttaaaaaatcatttatcacgtagaanaatagatccagtgctttgcttcttggccttttggctacgatcaggcgtggttcccgagaaggccccccactggttcaacgaccttctgggcgagtgctttattcctaataacctcagaaacccttccttcggtcacaggttgcgggcctgcccttcgtggggcgcgcccgccgctcctgtcggtcggggtcgcctgctcgctgccctgttgcgtccggcggcgcgggcccgcccggtccccggggggggcggcggggtgggtgncgggtcgtctccgcgcgccgcctggtggccgcgctgcgccggtgcgcaccacacagaaaaaaaaannnnnnnnnnnnnnnnnnnnnnnnnnnnnnnnnnnnnnnnnnnnnnnnnnnnnnnnnnnnnnnnnnnnnnnnnnnnnnnnnnnnnnnnnnnnnnnnnnnngccttcagtattaatcctttctaaagccgttcactcctgcagccttttattctcacagtgtgaggcaggtggtgttggggctcagaactagtaaccctagtaacccaaaatacatgctgatatgctgaactgaggaagcctcaaggactctcaccttaaccccctccgcaacggtctccaccaaggaagctgaattcctttatctgcgtatgatccagacccaccaaggagaacaagtatctttccttcccctccctgttatctcattttctgttgcagaaaagaggaccaagatgtgaccacacctgaacgcacccttttaggaatataatgactatctccaagggtcatttaaataccagacagaactatttacaagktaatcttctttcctggattcagtcagtctccctagcaattatttattacagcccaatagaattcctcctctctccactgccataagctgttttatcaggatccaagccccctttttggaactatccccacagggttgacaataattgcattacaagttctaggccgggcaaggtggctcacacctgtaatcccagcactttgggaggccgaggcaggcagatgatgaggtcaggagatccagaccatcctggctaacacggtgaaaccttatctctactaaaaatacaaaaagattagcgggcgtggtggcgggcacctgtagtcccagctgctggggaggctgaggcaggagaatggcgtgaacctgggaggcggagtttgcagtgagcagagattgcgccactgcactccagcctgggcaacagagcgagactctgtctcaaaaaacaaaaacaaaacaaaaaaagaattgcattacagattctagacagaaatatggtttttgtcctgcaaaaggaaaataaaatctcaggactccaaactcactatgcctaaaggaaatgttaaacttggaaactgagtcatgaaaaaaaaatctgcctttgcttttgttcctaagccaagttttcctcaggtggcctcccttgctttgacaatgtaaattaacagtttatcctcatgggtacgggataagatgagactagaaa

SEQ ID NO: 86696 - DNA, 1519 bp, Homo sapiens
caaaataagcccatttcataattttatttaagcacagacaaaaacaagtttgctgtgccacccacaaaataccaaacatccttctctcttggctaaaatgagtgacgacagctccttatcaattacaatatttacacttgcactagtctggtttgtcctccccacagataagattagttgagacaccgagtgactgagttgcctctgcttttgtatgatttccaaaataaagcaaacccttcccttgaatcttcctcaattcatcaacgtaagcccaaatcatataaaagcttctgacacctccttgctgagatgccatggttctctgtggtgtgtgttctgctcactgcaactagcaataaacccaccttgttcaatcacaagggtgctcctggtgttctctgattcaaagacactgatagaaatagaagttcctctgagatgcagctgagatccgcactgcctcagactgggatgatgggctctgtgtattagtccgttttcacactgctataaaaatactatccaagcctgggtaatttataaatcataaaggaaagaggtttaatggactcacagttccatatggctggggaggcctcaggaaacttacaatcatggcagaagacaaaggggaagcaaagaccttcttcacatggtggcaggagagagaagtgcaagcaggaaatgccagatgcttataattccatcagatctcatgagaactcactcacgatcacgagaacagcatggggcaagctgaccccaggatccaatcactttccttcctccatccgtggggaggacgatttgagatgagatttgggtggggacagagacccaaagcatatcattcagtgagggagcacgcatctgcacagccctgcgccttgggtgccacctttcctggctgggaggtaagttcatgctacattgaactgctgtatttcagtctagcctttgggcaatgggtttattttgttttcctaggcgttatgtcccttgggatttttagttatcagatctaatttgtactattctttggcaaaattgtttcatggcacctaacacctgcttgtctaatgcaccagctgtttgtctgtctgcttgtctagtgtcctgaaagttatttgtctctgaggggaaagtttgtaagaagacagtgtttctaagcctgagagtccatcatcaaagccaacctcagaagaaactgagaaggtttcttctcaggcctgtgttctattggccctggattaccatttcaaaatcttgtaagtacttcttcctcagtcttgcttttgtgtccctgagaactgtttttatttaattttgtctgcttggaaccaggagattttgtctggcccctgatggatgacaatgggtctttgccaagctccagagacagaataagacaacagccatcggtagggacaggctgtaggtttcatgactctcttyaagatacacacaccccccttcaggctgaactgcagatttatgttttattactagaactctt

SEQ ID NO: 86697 - DNA, 791 bp, Homo sapiens
atatgtccaaatctttctttcatacatataactttctttcctctctttactaaaacaagatagttagcttggtctgaagagcacttccttttttcattctgtcacactcttatctcgtgagaaactttacccattaactgataaaaaaaattcagttgttgtatgcatatactctagaaagatttaactcagataaacagtcaaaattgtctaaaagagacagaaacaagttatcaggctatgtttctctttgtggctactgagaagttcatttacaagatagcctttgtcacaacagctataagataacaataagaggcttcggtttcaaaataaaaggaaaccttggcatgattcacagtcttcaacaattagcttaccgtaaaaaatgttagtacaatacttggattgttcaagaccaaggttaaatttyttgtgcttcaaatttcccacgtcagctttctaatttaaatttccactgttttcataacttgcttcaaactaaaaattatacgtataaatttgtattcaattgaatacagtaataatgatgatgtcgttttactaataaattttagctttagaatcgtattgtatgtgcagaaacattgtgaagatagcacatagcatttccattacgccacagtgggtttccctgttattaatatcttacattagtatggtgtatttgttgctattagtgaaccaatatcagcacactattatcaactaaagtccatactttaatcagaccaccttagttgcttacctaatgtctttttttggctcca

SEQ ID NO: 86698 - DNA, 515 bp, Homo sapiens
gactccagaattagacagacctaactatcctttcctaggcagcacttgactgaagctagttgaaaaaaataaagatcaaaagagctagtcagctttgttgatgatctggggtagtttgttttccttacaagctagagagggggatggcactatttcattgttatctctgagccaactagagccccgggtctttagtttctttaatttagttttatcactaaatggcttcttcatttgtcactcaagataaagattattggggaggggacggggataggtaaagggatattgcaacaatacatagagaaaaaaatagtcactccgaacaagtttcgcaggtatgcgccaaaagagaaaagggatggggagagagagtttaaaaagagcagctacatgtgrtaagtcatttgagggcatcaggataagacttagcatgaggatgatcccaggtgcacctgctcagaaggagctgatccttgctggagcatccacactctactgaggacgatgctggg

SEQ ID NO: 86699 - DNA, 601 bp, Homo sapiens
ggaactcctctttttaaaaccatcagatctcataagacttatgtgctatgatgagaacggcacaggaaacacttacccccatgattcaattaccttctaccaggttcctcccacaacatgtgggaattgtgggaactaccgttcaacatgaggtttgggtgaggacagagctaaatcatatcagaagtcataaacttgctattgactttatgtggtccaagcatgacttttctcgtataacatgtaatattatatattattacwtatcacatgttattacttacatactaacatgcaatattaaatgttattacacattacatgttatttcttacatagtaataacatgtaatattgctttcaggagcagaatgagctgacattgtaagagtcagctcaacatgtattattttcatttaagtggaaactttcataaaagcatctccaaaaccattgccctgccctggagtctgctcaccagcccccttgtagcactgtacctctgcaaaagggagctgggaagtcccacgatgcaccatttcctgggctgacgatgcaggtcaggatggcgtggccttccaagatgtagccagggaggcag

SEQ ID NO: 86700 - DNA, 601 bp, Homo sapiens
ggaactcctctttttaaaaccatcagatctcataagacttatgtgctatgatgagaacggcacaggaaacacttacccccatgattcaattaccttctaccaggttcctcccacaacatgtgggaattgtgggaactaccgttcaacatgaggtttgggtgaggacagagctaaatcatatcagaagtcataaacttgctattgactttatgtggtccaagcatgacttttctcgtataacatgtaatattatatattattacttatcacatgttattacttacatactaacatgcaatattaaatgttattacacattacatgttatttcttacatagtaataacatgtaatattgctttcaggagcagaatsagctgacattgtaagagtcagctcaacatgtattattttcatttaagtggaaactttcataaaagcatctccaaaaccattgccctgccctggagtctgctcaccagcccccttgtagcactgtacctctgcaaaagggagctgggaagtcccacgatgcaccatttcctgggctgacgatgcaggtcaggatggcgtggccttccaagatgtagccagggaggcag

SEQ ID NO: 86701 - DNA, 217 bp, Homo sapiens
caccccactgcacttggcctgagcgacagagtgaggccttgcctcagaataaataaataaataaataatggcaatattcttgggatgttasttttatttataattgatccttccccttgtcaaatccataggtaagcaagagagggaacagcacttgtttatgtccttttccttttaatctgcacatgcagatggcaatgtcagaatatctgatttc

SEQ ID NO: 86702 - DNA, 1265 bp, Homo sapiens
  misc_feature (1)...(1265): n = A,T,C or G
tatcttaaaaagcctattattttacagtaattctacagtgacagtctctgaaatatttcatgaatcaaattggtgtatttaaaaggtttccccattcccgaattgcatagacagggacggggagcattgtgggtgctgcracctcttcccaagcacagggtcattccacagagccaggagggtggtgcgagtgactgtgagtggagtgagggcagatacacatatgatcttccaataatctatttttaaaaaagggcatataagcaagggcactctcagaagaagctacttggaaaattgttaggaacaataataggattagccttattttcatttaatttggagtgaaattacccactgagctatgttttaagtcagggttgccatggcagcagtggaggcagtctaaatataggggatgatgtcatgtgccaaaattatctttatattaaacatacgttgggttcgtaatttaagcctcataggctataggtacattagttgaaactgacttttttttttaactagtcggattctaatttcatgcaggttggcttcctatcaatcccttgctttaacagagagttgccattttgagttcactttatagcatggtctagtcattatttttcttngcattaggaaggatttgtgtagtggtgagactagccaagtgttctttttttttttttttttttctgaagagatttgatggtgtagcctataacttgtacttctaataatatcaagaagaaagaaaattgatttcatttctgagttctccctctatggtttctaaattaagacatgatggttaacgggattaaggttgtatagtcttggctgggaacactgagggagcatttactccctttaaaatatgaacttatataacaaaagaaacaggcttccatacccttctgtgacagggaatgtgtagaggatagagaaggtaaggaaaaagaaaataaaaataaatgcattgaaaatgtgtcccaaaacaaatataaatgcatcgattcttaacttccatgactgagcttcagctccctgagacagagcctggaagcctcagtgtgccttcccaagctgtccacagctaccgatttggccccatcctggctccctccctgccaggcacgcccatccccttgcagtttgcccctgtgaacccatccctgtctttatgttactgggcgttttcatccctggtgcatttgttcagctgcacgtttccacgtggaaatcgcccactgcctatcttt

SEQ ID NO: 86703 - DNA, 1265 bp, Homo sapiens
  misc_feature (1)...(1265): n = A,T,C or G
tatcttaaaaagcctattattttacagtaattctacagtgacagtctctgaaatatttcatgaatcaaattggtgtatttaaaaggtttccccattcccgaattgcatagacagggacggggagcattgtgggtgctgcgacctcttcccaagcacagggtcattccacagagccaggagggtggtgcgagtgactgtgagtggagtgagggcagatacacatatgatcttccaataatctatttttaaaaaagggcatataagcaagggcactctcagaagaagctacttggaaaattgttaggaacaataataggattagccttattttcatttaatttggagtgaaattacccactgagctatgttttaagtcagggttgccatggcagcagtggaggcagtctaaatataggggatgatgtcatgtgccaaaattatctttatattaaacatacgttgggttcgtaatttaagcctcataggctataggtacattagttgaaactgacttttttttttaactagtcggattctaatttcatgcaggttggcttcctatcaatcccttgctttaacagagagttgccattttgagttcactttatagcatggtctagtcattatttttcttngcattaggaaggatttgtgtagtggtgagactagccaagtgttctttttttttttttttttttctgaagagatttgatggtgtagcctataacttgtacttctaataatatcaagaagaaagaaaattgatttcatttctgagttctccctctatggtttctaaattaagacatgatggttaacgggattaaggttgtatagtcttggctgggaacactgagggagcatttactccctttaaaatatgaacttatataacaaaagaaacaggcttccatacccttctgtgacagggaatgtgtagaggatagagaagstaaggaaaaagaaaataaaaataaatgcattgaaaatgtgtcccaaaacaaatataaatgcatcgattcttaacttccatgactgagcttcagctccctgagacagagcctggaagcctcagtgtgccttcccaagctgtccacagctaccgatttggccccatcctggctccctccctgccaggcacgcccatccccttgcagtttgcccctgtgaacccatccctgtctttatgttactgggcgttttcatccctggtgcatttgttcagctgcacgtttccacgtggaaatcgcccactgcctatcttt

SEQ ID NO: 86704 - DNA, 879 bp, Homo sapiens
ttctacctgcagaacccccttccagggaagcctggtgggcatgctgggatcacgggggcatgaggggagatgagaggggacgacacatactgtacgcagcgaaggctatggcaaagccgctagggcactggctctcagcagggggtgattttacccctgcccctatcctggggacattggttaacaactggaaacattttggtggaggccagagatgctgctcaatgtcccgcaatgcacaggatggccccccccccacaataaagaaggatccaagactggttgtggtggctcacgcctgtaatcccaacactttggaggctgaggcgggtggatcacctgaggtcaggagtttgagaccagcctggccaacatggtgaaaccctgtctctgctaaaaatacaaaaatgaaccaggtgtgatggcaaatgcacgcctgtagtcccarctactcgtgaggctgaggcagaagaatcagttgaacccgggaggcagagaggttgcaatgagcccagattgcatcactgcactccgccctgggtgacacagcgagactccgtctcagaaaaacaaaaagaatgatccgtctccaaatgccaggggtgctgaggctgagaacccctgtgctagtggtgtcatcctacccatgacttctcggggggaaaagccaggcagaacctgtgacattctgagtgcatatgcagcctctgactaaacggttccacttccagggacgcagcctgcagagccacctgcacctgggcaaaagtgaagagagatgagggtaccagaccccccgcaggactgcatgtgcaaaacaaaagacgggaacacctaagtgaccatcactaagggactgttcacataaattatggcaca

SEQ ID NO: 86705 - DNA, 638 bp, Homo sapiens
ggatccctgtcctgtgtgttccatgcttagtgtctgacatatcacatacgaaacagaatccacatccagaaaaatctccatgtgcactagactaaagctatctaaaagcagtcatttcattttgattcctaggatgtccaggaaataaaatatgtgtattttcatgaaatgaatgaccttggaaatatcaagtatttccagtgataaaatagacatttatatgagtcaaatgataaaggtcatgtaacagtaaatcttacacaacattctctgtttactatagtttgaagaactctgcaaaaggtagaatcattaatacagtaatttttacactgggctttctggagcactagaatttcaatagggggtgacttgggaattggagttgagcaagtgaggctctgggtcccttatccccacatcattcaaagcagctcatcctcataagtgttttatatactaggttcyattttttttcttttaaaaaagagttcagctgcttaaaaaaataaaaaataaagtttgaaaaccacataaagaaagttcaattccgtgacttttttttaactttttcaaagcctacctgtcacacaaaatttacaacagcttaaaatttcagcattgtgtcaaagcctgct

SEQ ID NO: 86706 - DNA, 761 bp, Homo sapiens
  misc_feature (1)...(761): n = A,T,C or G
ttattctattttccaatttcagtcctctcagttaacttttgttgttccttccactatatctcaaatcaaagagatggtaataaaatcctgactgctatcctctagactcattccagtgtgtcaatggctgctttaaaaagtggcagtgccaagggaacacagtactgcatgtagggactggcaggtacgtagaacctaagactgggtaatccatgtaatctaaatagtacttcttctgttctttttcctattttgctttttgtgaggctttaatttgccttgaaatctgaatcatcaaaatttgtcatggaacagcrcatgaagttttgtctatacagacttaggtgaccccggcctttgaagctagaagagtatctagtgatcatttagtctaactggttcatttacagatggaggaaaatttaagaagatatgccgagtgggagagctttctgaaaagttcacatcttccttaagggatgtacacaatgggacattcagaaggcctgtagccgtatgtcatttaatactctctatantaacccaatttccccagtgccacatgtggtaggcagaacaatgaccctccanagacgtgcatgtcctatgtcccagaatccataaacatgttaccttagatggcaaagagattttgcagatgtgattatggttcaaacccccctgggttatactggtaggcctgatctgattacatgcatctctaaaagtagaaaattttttctggatgcagtcagagaaaa

SEQ ID NO: 86707 - DNA, 761 bp, Homo sapiens
  misc_feature (1)...(761): n = A,T,C or G
ttattctattttccaatttcagtcctctcagttaacttttgttgttccttccactatatctcaaatcaaagagatggtaataaaatcctgactgctatcctctagactcattccagtgtgtcaatggctgctttaaaaagtggcagtgccaagggaacacagtactgcatgtagggactggcaggtacgtagaacctaagactgggtaatccatgtaatctaaatagtacttcttctgttctttttcctattttgctttttgtgaggctttaatttgccttgaaatctgaatcatcaaaatttgtcatggaacagcgcatgaagttttgtctatacagacttaggtgaccccggcctttgaagctagaagagtatctagtgatcatttagtctaactggttcatttacagatggaggaaaatttaasaagatatgccgagtgggagagctttctgaaaagttcacatcttccttaagggatgtacacaatgggacattcagaaggcctgtagccgtatgtcatttaatactctctatantaacccaatttccccagtgccacatgtggtaggcagaacaatgaccctccanagacgtgcatgtcctatgtcccagaatccataaacatgttaccttagatggcaaagagattttgcagatgtgattatggttcaaacccccctgggttatactggtaggcctgatctgattacatgcatctctaaaagtagaaaattttttctggatgcagtcagagaaaa

SEQ ID NO: 86708 - DNA, 1085 bp, Homo sapiens
caggagtgagttccaaacaagtggttctgaaaaattttccttcatcaagtaagggatagctagtaatgggagcgacaggaaacaggtggcatttaaatgtttaatctgttccaccattcctgcctgcttattcagcttcattttactttcatcttcactgttgtaatccagcacaatactccttgcttcggtcatactattcttctgagtccttgttcaaagtcatttagccttcgtcacctgcagggactgtggctgccaggtgccactggagccctgcttctcagtcttgctgctcactggaggaacggccaagcagctggatgcatcttttcaargcagctggcaccacgggaaatagcacataccaccactgctttcagcttccctttgcacgccaagtctgcataatactgggcttaaaacaagtaccccaggaggattattattaattaggaaaatcaaacaataagccacttgaaatcaagttcctatcatgtaaatgttactttacaattgaagcataatataaggaattggttggggtgatggttttggcctgtagctaattttgattttcaaaaatttttttttagcatttgctgcatttatcactcttggcattaaagaaaatgcttttaatttttgttgttttgtaattacttaatacatatgtgtagctgtatcttaaacatcagttttctccagagactggatccctgaaaatattttggaacaagattaaatgtttctatcaaaccatattgtattaaaaataatgtttttatgcagaaagtggaaggagaatgatgcttattgttgatgtattttgtctgaatcaatgctttattaagtgctctccatttatcatagacactacattaactgttagatccatgtgctgatttgaaacacatgaccttctgctactaggttgaatgttttctccctaagaacatgtccacccggaacctcagaatgtggtcttatttggaaaaattatcttggaagatataattaattaagatgagggccactggattagggtacccctaaattcaatgattgggtccttattaaaaaaa

SEQ ID NO: 86709 - DNA, 761 bp, Homo sapiens
tgtttgggaacgaggtggtatgccttaaagctacatgagacagcctggcacagctcctcaatgttacagaatcttccctttgacctgctggctgtcacctggaacttccaaactcagccctgccatgggatgctgcttctcgatgtggacgttagtggaggggagcaggatgggcaaggtacctttagcttgtcccttcttgaccccactgaaaccaggaccaggaccaagacctctaccttgtaaagttgttctagaayatgagaatttagggatgacctagaagtgactgtgatggaaattgaaagacaaaacttttaataatgtcaaactctttttaacttaatataactgctctccatagacaaggggaaaggagagaaaatccaataccttaacagagatttctagcctggcattgtttctcagacttctgggcaccctggtcccaagaccatctcctgcaaatacagtggagctgaactgtgaatccatattaactgaggagctctacctggaccaattaaatcagaaaatctggatatgggccctaggcatcagtatatatttttctttccccaggtgattttaatatgcagctaggattgaggctccttgcccttggataggtcctgtcccaccaccaggccatggggtagagtaggggtgggtgtgtggggggacaatgtcagcataggtcccaaagctggaattattcagtctagaccggagtttgcacattgaaagcccacccacaggct

SEQ ID NO: 86710 - DNA, 617 bp, Homo sapiens
atggaaatctcttttgaatggatgtgcgtaaagtattcgagatgtaggtatcaatttcataaaactttggtatattaatcttcaggcatttcttcagacccagaaggactgcaccctgtatggatagtgccactggcagcattagctttcttaggaaactggaagccagagaaaagatcaaaagcaacaccaagatatactttacctgctcctaacctctagaaggacctggcctctgtggtcctctggcttctaataaatattttgctaattaaatcagaagtgtaatcatatcctgcagaacatatatatatgtgtgttcctcagacatatatatatatgtctgaggaagagatggaaactcaaaaagtacaacttgrtattattattcctcctcaaaaaggaggaaattgaggcatagaaaagctaacttacccaaggctatgctgcccactttttttcaggatacattgaggtgatctatattctgctcttacgtattgcctttattcagaatctcatcacctcctgctttctcatagtcttaaccacctccattgtgatctccacccaactgtcagactatccttttgaaaatgcaaatacagtcatattgt

SEQ ID NO: 86711 - DNA, 2614 bp, Homo sapiens
gaaacatagttgcagtgcttataaaattcagcctaattaagggtaaagggagattggatacttttacagattgtaaccaatttaatttccttacgtttcttatccttttgccattcctgtcttttgaaaatgtgtgggcccaatacgaggcagtgagccaaataagcagtgtaagtatgtggaaaacctgctttttgttaaagaaagtctacttgaattttgattgaaaaaggtattttcttccaatatagatggttgatcaaatatgtaagtcagggaagcagaaaaaattgtttaaaatgaaccatcacaaggaaagaaaaagaaagtaaaaaaaaaaaaggagttaaaatggagcgagaaagaagtaagaaaactttatattcagaaaaattgtcttgccatttcaagtaatattcttattttactttgctggtgaatatattaaggtaggaaggatttttttagtcttatcagaatattataaatgtgtgtactattttaaataaatagtactttgttgtacatattcttttataacctatctactttagcagcttccattcataacttctctctccctttgactctctgatctagccacagtggatttctaatggtaccttatttgtacatattatcttacacagatctttctacctgggatgtttttccctccattctttcccaagttagcatatatgacaacttcatatgtcaggttacattgccattttctcaaagaaacttttttatcccctctttctagacaaattcgtcatagtatgtagtcttatagcactatctctccttcttagtagctaaagcagatataatgtttcatttttcttagatttaataatgtttttcttcaggaaaaataagctttccgtatgggaatggtcaaaacctttgcttgccatttctgaaatatttattagtgctctattctaattcttctgtgttgtctgcataacaaggatcctgaagcctgaaaattacattttctaaactcccttgcagctgggtattgcaaggattggataggttctgccaatagtagtctctggaaagaagtaagattcctgctgggagggaaaaggcattctgcctctgtttctagcataagccttggtggtagctacaggtgattatgtgcccgaggcagcagcatcagtagtttcagtaatgaaagcaggaaagctcctgcctggtctcatcgccctaattccatcacatgtgtaacagattcctgcattgaatccctcactgccttgcttagattggtttctgatttcctaactggatcctgaccagtaaacctagttcctagtgtgtattatagaaaaataaatatacctatttttcccactcaatatgccatagatactttttatgcaattaaatacaggtctaaatcaatattgattttccaaatccatttaaattactcccttctagctaagctataaaatggaaatacgattcttttaaatcctttctatattagtggaaggtacacttaatgtttaacttcctatttgtttattttgtcaggccttggccacaaatgataaggagttgtaactaggacttttgaattaaatggatttactgagaatgcatatggttctttttaagcttaatttttattaataatttagatttatgaaaactagttaatttgtccacactaataaagtatctttcaagatgtattttaatatattctatgtaaataaaaattattaagaaataaactggtcataaataatagctatatttggtatcctatttgactgatattttccttccttgtgatgttagaaaaaaattatcccagagttctatatagtcctaatgacatttctaaatcttcaagagagtaacataaaagtttcagacttgaagattagtatataattgaacagatcctggttcaccctaactttgagtgattttggaggcagaataatgtatccattgggagaagaatataacaaattaaaattgtcactctctttaaatttaaaatagttataataaagtgaaagccatgaaacattatctttgtgttaaaatcatttgttatatttaaaaaagtgtctcagtatgtacagaaatgaaaacaaaaatgacaggcatttgaactaaacaawgaaatgattaatttccaattgattaatcaaaatgaagttaaagtttcctggaagatttattttgacttacattttttctctagtaaaaaataacatttttatattatgtgttcttgccaaacaatataaacagttgaggcctttagttaaatattttaatgaaagagcctgtttttgtacatctaaagttttatatttgagtagaagtccatgtagtttgtttgaaataatcaagaaaattgaaaaatgattttggtaggatataaacttatgtttaaagtaattattatgtgaacattctgaatttttaaatattattgtttcactctgtggatctttaatttctaagaattattgaaaagctggtttagcttatagtttgtgggatagatattaaaatttgatgtctctagtctgaagaaatttacaacaaacttgcattaacaagttactgg

SEQ ID NO: 86712 - DNA, 738 bp, Homo sapiens
tttttatatttttagtagagatggagtttcaccatgttagacaggctggtcttgaactcctgacctcaggtgatccgcccaccttggcctcccaaagtgctaggattacaggcatgagccactgtgcccagccttttgcaatgttttttgagacggagtctctctctgttgctgggctggagtgcagtggcacaatctcagctcactgcaacctccacctctcaggctaaagcaattctcctgcctcagcctcccgagtagctggattacagtcatgcgccaccacgcccagctaatttttgtaattttagtagagaygggcttttgccatgttgtccattctggtctcaaactccaggcctcaggtgatccgcctgcctcggctttctaaagttctggaattacaagtgtgagccaccgcgcccagcctaaaatataagtttatgaaacaaaagaaatgtaaggctcattttacttcatttaaattatgaaggcagtatacagtcatataaacataatgtattttgatacaaatccttgtagatgggattccaaagccaatagcactgtcttccaatgtgaagatactaagtcaaatatgaagatattaagtaagtgaatgcataccactcacagggctgaagggattgaaatgccttaaaagaagcatccattccagcaaaatcccaaaacttaacatcagagtcatatcctcctgtcaccaaacgggcacctgag

SEQ ID NO: 86713 - DNA, 983 bp, Homo sapiens
aatgatgctgagttatgcgaacatcttccctagttatggctaatgtttagctaaaaaagaattcttcagacaacattaatatgagttgtctgcttcctaaaacaataaccaagggctgcatcctgtgtgtttctttgggaatataggtaattcatttttcaattaggaaatttcatatgccttaaaggttttttttattaacatttcacgrcattgtttctagctcagatatggatagaacctaatgacactcttatttggcattagagaggttaactagatattatgacatcttcattctattgtttcaagtggaagagctgttcatttagatagaaattgagagtattttttaaaaatgcgatctatcattttggggccgggttttttttttttttttttttttttttaatggcgtctcactctgttgcccaggctggagtgcagtggcgcaatcttggctcactgcgacctctgcctcctcggttcaagtgattctcctgcctcagcctcgatagtagctgggataacaggcacgtgccaccactcctggctaatttttgcattttgttttagtagagatggagtttcaccatgttgaccaggctggtctccaactcctgacctcaggtgatctgcccacctcggcctcccagaatgttgggattacaggcatgagccacggtgcctggctggtgctatttctctaagacagaatgaggcttcctgtttgcagagaatgtccagcctatcctgtgtcactctactcccaagggaagcctggctccacccttgatggctttcacttggcttggtgctagactactcttggacacatttttcccaagctgggatgagaacccaacctctattgatgtcactatagactctgatctgtgagtgtatttgtgaatgtgagggagatagaaaatcaccactgggcttcccttttccctgctcagctgacttctgcatccacatgc

SEQ ID NO: 86714 - DNA, 542 bp, Homo sapiens
tccaattcgcttcacaacgcagacgagggtctgctctgcacagcagcagacactgtgtttatcccaagattgctaagacattgccatgatctttgaggaactgacagtctactggagtgtgcctcatctcacgggtttcaatccagatttttctgccactttttaaaataccgtaactactcccaaacactttattgtctgtatttcattttgtgcttagcacagactatccagaaaggtgtttatcttcctatgtatatgggccatatttctaccaggattttaagcttttttatttttttgagatgaagtctcgctcttgtccccaggctgcagtgcaatggtgtgatcttggctcactgcaacctccgcctcctcggttcaaggaattctcctgcctcagcctccccagtagctgtgattacaggcacccgccaccacgcccagctaataatttgtatttttartagagacaggatttcaccatgttggccaggcttgtctcaaactcctgacctcaggtgatccgcctgcctcggcct

SEQ ID NO: 86715 - DNA, 346 bp, Homo sapiens
  misc_feature (1)...(346): n = A,T,C or G
tannnnnnnnnnnnnnnnnnnnnnnnnnnnnnnnnnnnnnnnnnnnnnnnnnnnnnnnnnnnnnnnnnnnnnnnnnnnnnnnnnnnnnnnnnnnnnnnnnnnactttttaaatttagtcttaaaattcttacaaaaaatagtagttttagactacttatatttaatattgttatctatattttggccttaaatctactatcataaaatttattttccataaaawttaatctgttctttattactattttccacttttgatgctttatcttggattaagtgtttaattttgaattttattttatttcaactaataagattattagtcatatgtttttgcttattttg

SEQ ID NO: 86716 - DNA, 346 bp, Homo sapiens
  misc_feature (1)...(346): n = A,T,C or G
tannnnnnnnnnnnnnnnnnnnnnnnnnnnnnnnnnnnnnnnnnnnnnnnnnnnnnnnnnnnnnnnnnnnnnnnnnnnnnnnnnnnnnnnnnnnnnnnnnnnactttttaaatttagtcttaaaattcttacaaaaaatagtagttttagactacttatatttaatattgttatctatattttggccttaaatctactatcataaaatttattttccataaaaattaatctgttctttattactattttccacttttgatgctttaycttggattaagtgtttaattttgaattttattttatttcaactaataagattattagtcatatgtttttgcttattttg

SEQ ID NO: 86717 - DNA, 747 bp, Homo sapiens
ggatccacagaaggaaggaagcccattttgcttatataaacatactaatgacagctcctgacaaacaatttgtttttttgctagcagragagtgattatctatcacagaaacgcttttagcagaatgtacttggtcgtttagaattgcttatggttaacaaagtagaaggttgtggatttatggggctccctggaaaatgtcacatataccacatatgtaactatctgcataaaaatgaagatatttgataattgagacaggtatctccatgtaaataaattgtcggcatacctctctagaagtctcatctatctgcctgggcaagggagtatctaatgacagaaccaaggatctaaagaatcagattaagagatctaaataattctctgatttgcccatgcctaatgattaactgagttcgtgagattactagtaaagctttatattttgtaagatcttagattctgataagtctaatgtcacaatccaatcagtttttcctatctcaaggaatcatgtccatataatggaattaatcctgaaactctgaaaagttttaatattctggggtaagggtagatgagaagtagtctccatatgacttataaacatgtaaggagaaatagtaaaattgttgtaaaattaaaagaagaacagaaattcataaaataacctataacaatcaggttaaacaacaaaaacaaaaagcaaagcgtctatcagtaacatgattgaatagaagagcc

SEQ ID NO: 86718 - DNA, 892 bp, Homo sapiens
gcatatttcacctgtgtgggaattcttgcagatctctatattattgatagccattttgctctgacattttatacaaagctgaatcagcaacagtatgactaaacacaaccaaaaaggaaagctagaaagattatattagacacttacgtgtatggatcattatggtgaggactgctaaaaaaacaaacaaacaaaaaaaaaaaacaaaaaacaccttcagccaaaataaatttacagtttaattgagtgatgaatgattcataaattggaaagcccccacaatcacagcagattcagagagactccaggggtgtctcatagtcagaatgaatttatagacaatacaaagtaaagtgatgtatagaaatcagaagtgaggtacagaaacagctggattggttacagcttggyacttgccttatttgaacactcagctgtatgcgactagttgaagtatggctgctggaattggccaagactcagcgattgttacaggtgcatattcctaagttaggttttagtcttgtgtacctattgaattaggttgcagttcattcacaaggactgaaatatagaagtatggcgtttttctcaggccatatttaatttgatttaacaggactttgggtatgtcattgtattttactaatatattttacaaacaccccatgttatcttaatctatttaagttcacactttttaatcaaattttactttaaatgtatctaacctcctaaatttctgcctttgtgaaccaataatactttttccaaattcttattatagcacatatcagactatatagctatagacactttggcatcattgttttcccatacaaaacacaatacatttaatgaattaatgaatgatgcatcagcaaagaaggtt

SEQ ID NO: 86719 - DNA, 892 bp, Homo sapiens
gcatatttcacctgtgtgggaattcttgcagatctctatattattgatagccattttgctctgacattttatacaaagctgaatcagcaacagtatgactaaacacaaccaaaaaggaaagctagaaagattatattagacacttacgtgtatggatcattatggtgaggactgctaaaaaaacaaacaaacaaaaaaaaaaaacaaaaaacaccttcagccaaaataaatttacagtttaattgagtgatgaatgattcataaattggaaagcccccacaatcacagcagattcagagagactccaggggtgtctcatagtcagaatgaatttatagacaatacaaagtaaagtgatgtatagaaatcagaagtgaggtacagaaacagctggattggttacagcttggcacttgccttatttgaacactcagctgtatgcgactagttgaagtatggctgctggaattggccaagactcagcgattrttacaggtgcatattcctaagttaggttttagtcttgtgtacctattgaattaggttgcagttcattcacaaggactgaaatatagaagtatggcgtttttctcaggccatatttaatttgatttaacaggactttgggtatgtcattgtattttactaatatattttacaaacaccccatgttatcttaatctatttaagttcacactttttaatcaaattttactttaaatgtatctaacctcctaaatttctgcctttgtgaaccaataatactttttccaaattcttattatagcacatatcagactatatagctatagacactttggcatcattgttttcccatacaaaacacaatacatttaatgaattaatgaatgatgcatcagcaaagaaggtt

SEQ ID NO: 86720 - DNA, 682 bp, Homo sapiens
atttgaaagagttaccagtttgaggtaagcacaatagagaataatgacagagtttataatggagagaatgtctttgaaagccaaaagcaaaagttgtcttaatagagaaagaaaccaaaggtttgaaaaagcatttgaatggaaagtttggtgtagacrtacgttatgaaccataaactgtcaaagtttattggtgatgcttgctggtttatttacttgttggttttcagaaggaaagaactataatagactgataactacaaattaaccgaaattgtatataccccgcctcctcatgattaggcaggtgaagatggggtgagcaaaatagtagcaacccattgaaagggctgttgaaggggttatattttccagacatatcaggagttcaagttgttactaaaaatgcaaaaagagtttgctaatcagaacataagcattcaatatctatcactatcaagatgtgagataagggataggtaattgattctgttggaaaagcagagtcatataatgatgaaagtctgataatacctctgtgacttgaaagggacagaagtaaacaggaacatgaagcaaagagttttagttctgatagtctctttgaggaggaggaataatggcactattgtcattttttgaatatttcccctagtatttttagtgatttcacaaatcgttc

SEQ ID NO: 86721 - DNA, 682 bp, Homo sapiens
atttgaaagagttaccagtttgaggtaagcacaatagagaataatgacagagtttataatggagagaatgtctttgaaagccaaaagcaaaagttgtcttaatagagaaagaaaccaaaggtttgaaaaagcatttgaatggaaagtttggtgtagacgtacgttatgaaccataaactgtcaaagtttattggtgatgcttgctggtttatttacttgttggttttcagaaggaaagaactataatagactgataactacaaattaacygaaattgtatataccccgcctcctcatgattaggcaggtgaagatggggtgagcaaaatagtagcaacccattgaaagggctgttgaaggggttatattttccagacatatcaggagttcaagttgttactaaaaatgcaaaaagagtttgctaatcagaacataagcattcaatatctatcactatcaagatgtgagataagggataggtaattgattctgttggaaaagcagagtcatataatgatgaaagtctgataatacctctgtgacttgaaagggacagaagtaaacaggaacatgaagcaaagagttttagttctgatagtctctttgaggaggaggaataatggcactattgtcattttttgaatatttcccctagtatttttagtgatttcacaaatcgttc

SEQ ID NO: 86722 - DNA, 711 bp, Homo sapiens
tgaggggatgggcaccccattctccatgatgtgcttatttcacattgcacacctgtatcaaaacatcttatgtaccccataaacataacacctactgtgtactcagaaaccttttaaaaataataaaaaaaagattttaaaaaataaactaataatttgtataaaactaataattgcattttaaatgtgtttcaagtattcccaacatcactgctttgaatttttgaatgcacttttagcctataaatgctgaaggaaaacaagtattgttcagtttggcactgttacaattccattgtactgcattgcaatattttacagctttattttgtcccaaaagagcatttcattttatggcaggtgaaacctgtgtcactatttctttctacccctgatgctgactagctttgtaatgcaacatgttcacactcaygggaaagaggacatatcttaattgctttactgctaaggaaagaaaacaagacttgtttattgaacttactcaattgtttgtaaaaacaaaacaaaaggaacaatatcctgatttgtaacataatattcacagaactatcagatcacaactttacttgactggaaagtttctgaaataaagcaatacctagattgtttctcttttgtaaaatctgcaaatggtcacatatttagtaaaatcttatagcaataattagacacatataaattataggttaa

SEQ ID NO: 86723 - DNA, 1049 bp, Homo sapiens
gacttgtttctctatttcacttatttaaattataaattttatccactatttttacagttttgtaraacaggatgatttcccactgaaactagaaaattattcctcagctctcaatcccctcaaaagcctaataattaattcatctaaatatgaagaatttttaagtagtcacaaaaatatctgaggtctaacctttgatataattgatgacacaaattgatataattgataatgcaaattgcattatcaaaaatattcttgtaatataagtaaaagaaaacaagagctctctgcaaataacttttttgtattattaataactgtgtttgccatcagcagatgataataaaaatacactttggaactgataaatttactatactctgtctcatactgtgggttatgtacaattaatatgatctagtcacctaaaaatcactaaagtacaatgtattaagtactagaaaaaaggtaaaaataataaaatgtattttatcaggaggattatgacagagattccagtaactggaagcagcatgaacatagatagggaactatgagaaattaaagcattttcaggaaggaaagattattcaagataacagatagaatatgtataaattcaggtgaccagaaatacacctaaattcgggggaaagaaactgtgtgtgaacatgtttgtacaacacagttgtctaagaagtttgtaattactttgccaggcaacagacaaatgttgaaaagttttatcaaaaatattatttttgacttgttgctgtacagaatacatagagtacatagagtatactgatgtcagttttaggttgaatttgaagaaggtgagaatccagatatgctaactggttaaaaggattaattttatagtttagacaagaggtgatgaaccttagagggaagggaaggtttaggtttactaagggaagtgtatagagaggttaagaatgtttacctctagctttcagtgttagatagttgtgttgtatatttttaaaattaatacaagtttattaaacaaattttgagaaaga

SEQ ID NO: 86724 - DNA, 1049 bp, Homo sapiens
gacttgtttctctatttcacttatttaaattataaattttatccactatttttacagttttgtaaaacaggatgatttcccactgaaactagaaaattattcctcagctctcaatcccctcaaaagcctaataattaattcatctaaatatgaagaatttttaagtagtcacaaaaatatctgaggtctaacctttgatataattgatgacacaaattgatataattgataatgcaaattgcattatcaaaaatattcttgtaatataagtaaaagaaaacaagagctctctgcaaataacttttttgtattattaataactgtgtttgccatcagcagatgataataaaaatacrctttggaactgataaatttactatactctgtctcatactgtgggttatgtacaattaatatgatctagtcacctaaaaatcactaaagtacaatgtattaagtactagaaaaaaggtaaaaataataaaatgtattttatcaggaggattatgacagagattccagtaactggaagcagcatgaacatagatagggaactatgagaaattaaagcattttcaggaaggaaagattattcaagataacagatagaatatgtataaattcaggtgaccagaaatacacctaaattcgggggaaagaaactgtgtgtgaacatgtttgtacaacacagttgtctaagaagtttgtaattactttgccaggcaacagacaaatgttgaaaagttttatcaaaaatattatttttgacttgttgctgtacagaatacatagagtacatagagtatactgatgtcagttttaggttgaatttgaagaaggtgagaatccagatatgctaactggttaaaaggattaattttatagtttagacaagaggtgatgaaccttagagggaagggaaggtttaggtttactaagggaagtgtatagagaggttaagaatgtttacctctagctttcagtgttagatagttgtgttgtatatttttaaaattaatacaagtttattaaacaaattttgagaaaga

SEQ ID NO: 86725 - DNA, 2603 bp, Homo sapiens
atcagctgccttgagatttcctgcagtttaccactcctaattacctctgaacttgcgaaacaggaagaaggtgtataaatgaagttgacagagtccctagacttcagtttaaagcactagttaaaacctttcagataagacatacaaaagagcacatgctgcagtgattccatttatatgaagttctagaataggcaaaatttagagtggaaaactaccagaagaggctgggtgaggactggctggctaaggaaggcactagggaactttctgggagtgacagtaatgttcagtatcttgataggaatttgggttagacaaatgtacgtatttatcaaaactcatggaataacagacttaatggatttcactttgtataaattttacccccctacccccaaataactataaacaaacatcgaactctagttaatcatatacacgttaaagtgtttggggatgagagtactgatgtctgcaacttactttgaaatgcatcaaaaaataacatgattgctaagtgcactgaggggtagacagatggatagatgcaataaagcacgtacagcaaaatgctaattatagaatccatgccctacgtggtggatattcagggattcactactcaagtctttcaagttttctgtagtttgaaaagtctcatactgaaatactggaaaaatctttcaggatcagatcttttagaggataataaattgtaagattaacactggtctgagtttcatttgtgatgaactctgttcaacatgctaataagcaaagacatgcccgagaggcgaaggaaacaaagagaaaggaatgtgggaaagtcgatggcaccattattccctgtcacaaagccttctgggtgaagggctctcagcacagcttctgtgttgtggtgtggctttctctattctggaacccaggctaaccccagacttgacagtctgaaaactcaattatcagtgttcccaggatgagtacaccctgggaaactggctcatattaatcagggtcaaaagaaatggatccctacatctgtgagttcctttagcatgataagcagcacattagaatacttagctagtagaatatgtttgtatcctctgtctccctgaatcaaataaaattagaaaatcaaatacaccttcaaaattctggagtatgtgaaagctatgtgaactacattgaaggctcattcatctttcctgaaaacagaattcatgtgctcacagcaaggtcgaccaccgaccctgaaagcacttttgttcaacaatgtgaaaactcaagacttgcagggtgttaggtcctgggctgggttctttcagtggggtcctcactgcactaggcactagctgactgccctcctggtgatccagtccctcctcacaagcaccctggtggggagctagcattcttcccactttaaagaagagaaaagcaaacatgagaaaatcaaaataacgtccgtggatcacagcactagccatatgtgggcactgctcaattccttatccacctaattcatggtgtccagcttgtttcaagcctcgctttcactctatgaaagctcagcataggatttcgaatgtactggatcgagaacattggaaaggcagtgtgtaggggtggaaagaacaaggacttatgaattaaaaacttgagttcaagttctggttctgccacctaattagttgtggaaccttggacaagtcatttaactttgttgactttcaacttcctcttctataaggtgaaaaaaagtcgtcactcatgggatcattgctatggacaaatgacctgacttctcttccttaagattcagtttcctcaaacacaaaatgcacatatcaacagaggcctgctgtaaagatctgagacaatgtacaagaggtctgagtgcagccctgctttcaaggcagggctctaatgaggagttaatttattatgacacaagtctgagcaagctgtgcattgcctaaaagacacagttttggtgtaattcattcattccctgagtgacatcatcctaaaatgcaaggttattgctgctgtaagcatggatggtgagatctgttcctcctccaaaggcaatgcctgtctacctctgttgctgggggattttagtccctgccatttcccagggccatagcaggagatactgtgcctgtttccctctgtaacttgaccagatgccagccttacttacactgggaaacatctgtagtcctcgtaaaaccacagatgccaggcaaatagtccacaccaccctcctcccttgcacatttcagtttacagcgattagacagggcttgtacttgccattcacatttatctggttccaaaataaacaaaattctatctaaaaaacaagttaatcaaaatccaggttcctttgttttttgttgttttgttttaaaagatacaccagagggaaagggcttccttttggcagagaacgtttagaacatgytgtgtgaacaatagctcacttcctggacactcagctggaggcagcttctccattcaggacaaaacgttttatgtgagggagtgacgcctttctacaaggcagctcttggggcgcgaagcaaaccgga

SEQ ID NO: 86726 - DNA, 1002 bp, Homo sapiens
ttcaggctacctaagtatcttcccatttataagggataaagccacgtgtgttgatgcagagaccatcctggattcgaatgagaacatccactttcattcgccacaggaaccagtatcctgcaacctccctcgagcaaaattttcaggtcccgcaagaaacaatttagaaaatccactgcacacagatctgagagctgtgtcccagtagtttttaatagctcattctcagtctgccaagcccaaatgcaattcatcaaatatgggacatttttgtaataaacatcactgcctagtgatagagctgaaatgccatatttaacttaaaccattagatttccagggaaactgtgctaggagaagtaagtcctgggttatttttttcccatggaaaaatcatttagacttaccrttttttcttcatcccgatccactttgatgagacttttgatgttaaaaaatattttggcaataatacgtctgaaaatgtgaccaacacatagccttacgtaattctgacaagaagaatattgaaaatattaagtctttggtcaaaagttgtagttgtctaaataatgctcctgtattcctcattgcctgacactacttgtgaaaaatcatcatcactgacttgtttttattgttctaggcagatcatcataccacttaggaccagaatgagagcacatatgattctttctagttaacagtaaagccagcccattccattctctgcttcatctccctctcctataattttattgccagtatgtatgtatttttatctgtgagtgtttacaaattttatgtgcctaccaagtgaatacaacatttcatcaaataaaaaggatttaagagctcttgcttatagtttaattcttctctgacttagaacataacttctagcaaaatagtatccctacttcaatgggctcttgagattaattttaaatagatttgattttggttggagagatgaatctctatatctaaataaatagagag

SEQ ID NO: 86727 - DNA, 1002 bp, Homo sapiens
ttcaggctacctaagtatcttcccatttataagggataaagccacgtgtgttgatgcagagaccatcctggattcgaatgagaacatccactttcattcgccacaggaaccagtatcctgcaacctccctcgagcaaaattttcaggtcccgcaagaaacaatttagaaaatccactgcacacagatctgagagctgtgtcccagtagtttttaatagctcattctcagtctgccaagcccaaatgcaattcatcaaatatgggacatttttgtaataaacatcactgcctagtgatagagctgaaatgccatatttaacttaaaccattagatttccagggaaactgtgctaggagaagtaagtcctgggttatttttttcccatggaaaaatcatttagacttaccattttttcttcatcccgatccactttgatgagacttttgatgttaaaaaatattttggcaataataygtctgaaaatgtgaccaacacatagccttacgtaattctgacaagaagaatattgaaaatattaagtctttggtcaaaagttgtagttgtctaaataatgctcctgtattcctcattgcctgacactacttgtgaaaaatcatcatcactgacttgtttttattgttctaggcagatcatcataccacttaggaccagaatgagagcacatatgattctttctagttaacagtaaagccagcccattccattctctgcttcatctccctctcctataattttattgccagtatgtatgtatttttatctgtgagtgtttacaaattttatgtgcctaccaagtgaatacaacatttcatcaaataaaaaggatttaagagctcttgcttatagtttaattcttctctgacttagaacataacttctagcaaaatagtatccctacttcaatgggctcttgagattaattttaaatagatttgattttggttggagagatgaatctctatatctaaataaatagagag

SEQ ID NO: 86728 - DNA, 684 bp, Homo sapiens
gatcctttaagcccatggcattggtgagagccagagagcccaaggtgggtgcacagaaagcctgtggtcaactggctgccttctcaggccttgcttctcaaagtgtggtgcctggaccagcaacattagcatcacttggrggcttcttagaaatgaagactcttaggccggccccacctctgatccactgaatcagaattttcattttaacaagactctccagtaatttgtatgcatattaaagtttaaaattgatgaatccgaagctacctacactggctgcacgttagaattacctggtgaatgaaaaaagagtaaatcagtgtctggacctatatctagaccatttatgtcatgggggtggagcccaagcacagataatgttttaaacatttccttagttaattctactgctgccagggtggagaatcactgctctgatctagacctttcattatataggcaggaaccctgaggcgtggagaaagcagagatgtccagggtcacccagcaggttggtttcagggtcagggccagggccagaccccagggctcctgatagtcagcttaatgcatttcctgtgtctcagctgtcatctttctctggatggacaggcatctgcccttcgtttaatgcagggtcaggcttccattcacctcttatgtggagcagatgacaagccc

SEQ ID NO: 86729 - DNA, 704 bp, Homo sapiens
atagagctgatatttgaactccagcctatgtgattccaaagcctgcaggtgtttagcaggcatggtgcagtaattttgatccttcttttaacagatataaaagcagtattggtttgtgctcataggatatttgcagcctgctaagataaaaatgacaataatgacagcaaaggagggaatatttggtgaatttgtttgattttacaaaaataaactatgttcctattctaagactgaatgtagtgagggaggcttctgtgaaaatttggaaagtgtgagggaggcggtaagggagagttcatataccatgctagtttgtctcctaagccccatgtgccttttcttataaatcaaagtgctcccatcagtcaatggggattttgatacttaaggtaatatcaacaatccggatctttctttagtccaagcattttagggctgtctttagtgactagcaatgtttggtagctctagatttagagtgtcactgaattcaattaagaaagaagatgcaagaggcccaggaaaagatcacttcaggtttagtaacagctaataagtgggtctcaattgggatgcacatgataatcacctggagagctctgaaaactcatgatgccttggccacaccccaacaaattacacgggaatytctgggagtgggatccaggcatcaatatttattgcaaggtccctagatgatt

SEQ ID NO: 86730 - DNA, 647 bp, Homo sapiens
gatcctccagccccagagtttcctaagaacactaagctcatagtttcattgacccaggtagaaatagaaatacaatggaggtggtttcagatgcttcgtatcttgtcaatatcctcttcagaagatagaaaggcaagaaagttatttttgctcatcatatgttggttgagaaatcatatgatgaatattcattataaccagaataatgcaataaattccctattctctctctattcaattaaaaccagcttcttgggttaattayaggttcaaaagctttaatccattcagcaagcttgtctttatatatttcaccattattttctaatgctcagaacacttcagtcaaaggtggccctataaattcttcttcacttggcaagtagactctaaattttctttcaagagaaatttctgttttcccaacctttagtcacctaaagtataggccagacacagccatggtcagaggaataaacgtgatctttgtgaaagccaacacaaagtaccttattccattaaaaatggtggaaggggctgggcacagtggctcacgcctatattcccagcactttgggaggccaaggcaggcggatcacgaggtcaagagatcgagaccatcctggtgaacacagtgaaaccccgtg

SEQ ID NO: 86731 - DNA, 694 bp, Homo sapiens
aacattgcatggactcacaaggcagttgggcttcattctatcagctatggtgagaaataaaaaagttttgatgaaataaatcccacaatcaaaactatgttttatagagagaagtaactgtgtaactagtctttacggaaattactcatctatgtttacgcaaaatagatcagtgattagggagagaaaaaaatttggaaacaggtagacctacttctaaaaatgatagactgctgtagttatccatgttagaggaaaaaagatccccaaccatagcagtggcagtgggaatttaaaaaggaaaggcatttcagaggtaaaactgacagcatcttatgaacaataagatttcggagcagtgagagtgasagcagctaaagatagatctgtggtttacattagtggacatcattggtgctctgccgcatccccctctgatccctttaccgggttagtatatgcttgccccagcacctgcatgcctttgtactttctttcctctttgcgggacaccagaaagctctaaatgctggaaacaaatgtctctatcacacaacctacagaataactggtgtgagagtagagaagtttagcttccttgtgtttaactgggaaaaacattggaggataatttattttcctgatatcctgggtgggaagaagttgaggtcggtactaaaattgcattcttgct

SEQ ID NO: 86732 - DNA, 694 bp, Homo sapiens
aacattgcatggactcacaaggcagttgggcttcattctatcagctatggtgagaaataaaaaagttttgatgaaataaatcccacaatcaaaactatgttttatagagagaagtaactgtgtaactagtctttacggaaattactcatctatgtttacgcaaaatagatcagtgattagggagagaaaaaaatttggaaacaggtagacctacttctaaaaatgatagactgctgtagttatccatgttagaggaaaaaagatccccaaccatagcagtggcagtgggaatttaaaaaggaaaggcatttcagaggtaaaactgacagcatcttatgaacaataagatttcggagcagtgagagtgacagcagctaaagatagatctgtggtttacattagtggacatcattggtgctctgccgcatccccctctgatccctttaccgggttagtatatgcttgccccagcacctgcatgcctttgtactttctttcctctttgcgggacaccagaaagctctaaatgctggaaacaaatgtctctatcacacaacctacagaataactggtgtgrgagtagagaagtttagcttccttgtgtttaactgggaaaaacattggaggataatttattttcctgatatcctgggtgggaagaagttgaggtcggtactaaaattgcattcttgct

SEQ ID NO: 86733 - DNA, 1626 bp, Homo sapiens
agtgggacacggatgagccagcagtgccagagccggaacgtaaatattcatgaggatgtgggtggctacccagaataggtcgcactccagggaaagccatcccacatcttcttgtcacaagatgcgctatgcagtcacagagaatataacaccctccgaaggggaaaaccctgggtcctcttaraacagtctttgggagcttctactcaggaatagtagcaaagtctgggagagatggtctgatggaatctgcaaagaaatttcctttgcagaaagctggagagatgatggaattagtgtttcacacgggctttatgcctatgatgctcatcatttgctttgcctctaaatctgctacggctcttgcaaaacagcttcagtaatagagccaatgttcatgacagtttctcaaccataacagtagaaaatacattctgtgattattgtgatcttattattttaaaaaagaaattacgtctctaaaataatgcacttgggtccaaataacaatatttatgatttcatgagaaaaaaacataattattttataggaactcagagaattccaattttctcaaataaggttgagtgagcttaaataaacacatattctaagacatgcgagtaaggaagaagattacaaaataatcctgtaatatactattaatagctgtccaaaggcatattaaatgtcttacatttgtttttacatttgctgtgtacaacaaacagttttaaaatcatttaaatctaaacgaaagaaagagaaagagaaaaggccatagagagaaaaaaagagagggagagagaaataggcagagggaagggaagggagagaagaaaatacaatttttttcaccaaacaatactactattattatgtgtaatgcatgctgatattttctattctattccattttgttctatttgattctatttcctaaaatatgattcatgacaccttaaattgaccacatgacccaccattcagtacctttacatctcagtaaagagatgtgaaaaactctctcatctaaaatgattaaattgctgaatcacatattaaacatatgtgtatatttctttatgtgatatatattcctggaaaagtagcaagtgccaaagtttgcctccactttaaatacctctgtgtaactatggagaattgagattttatttatgcaacttttcggtgtgtggatatcaggaaataaagctatgtgccagaaaagggtatcatgtaataggaaatgcccattagataagaccccaagaagttataagcaaaatatagtggtgactgagaactaagcaatggagctcagtaaagcaaagccagacatattcatcagttactagaacaaagaaatcttccttgaaaagtcagaatcatagacaatgctcaatcagtattccagtctgaatttgggtactaacatagatacataagcctctaaaagatgatttaaagtgttttaggtttttaattgctctctcctcacaagcaaccggcaaatgcaactgtaattcttaacttcaatctatgactcaaatcatttccacagaaaaaattcctaggtaaataaacagctcaagagtcaagaattacaaaatataatacaaaga

SEQ ID NO: 86734 - DNA, 1626 bp, Homo sapiens
agtgggacacggatgagccagcagtgccagagccggaacgtaaatattcatgaggatgtgggtggctacccagaataggtcgcactccagggaaagccatcccacatcttcttgtcacaagatgcgctatgcagtcacagagaatataacaccctccgaaggggaaaaccctgggtcctcttagaacagtctttgggagcttctactcaggaatagtagcaaagtctgggagagatggtctgatggaatctgcaaagaaatttcctttgcagaaagctggagagatgatggaattagtgtttcacacgggctttatgcctatgatgctcatcatttgctttgcctctaaatctgctacggctcttgcaaaacagcttcagtaatagagccaatgttcatgacagtttctcaaccataacagtagaaaatacattctgtgattattgtgatcttattattttaaaaaagaaattacrtctctaaaataatgcacttgggtccaaataacaatatttatgatttcatgagaaaaaaacataattattttataggaactcagagaattccaattttctcaaataaggttgagtgagcttaaataaacacatattctaagacatgcgagtaaggaagaagattacaaaataatcctgtaatatactattaatagctgtccaaaggcatattaaatgtcttacatttgtttttacatttgctgtgtacaacaaacagttttaaaatcatttaaatctaaacgaaagaaagagaaagagaaaaggccatagagagaaaaaaagagagggagagagaaataggcagagggaagggaagggagagaagaaaatacaatttttttcaccaaacaatactactattattatgtgtaatgcatgctgatattttctattctattccattttgttctatttgattctatttcctaaaatatgattcatgacaccttaaattgaccacatgacccaccattcagtacctttacatctcagtaaagagatgtgaaaaactctctcatctaaaatgattaaattgctgaatcacatattaaacatatgtgtatatttctttatgtgatatatattcctggaaaagtagcaagtgccaaagtttgcctccactttaaatacctctgtgtaactatggagaattgagattttatttatgcaacttttcggtgtgtggatatcaggaaataaagctatgtgccagaaaagggtatcatgtaataggaaatgcccattagataagaccccaagaagttataagcaaaatatagtggtgactgagaactaagcaatggagctcagtaaagcaaagccagacatattcatcagttactagaacaaagaaatcttccttgaaaagtcagaatcatagacaatgctcaatcagtattccagtctgaatttgggtactaacatagatacataagcctctaaaagatgatttaaagtgttttaggtttttaattgctctctcctcacaagcaaccggcaaatgcaactgtaattcttaacttcaatctatgactcaaatcatttccacagaaaaaattcctaggtaaataaacagctcaagagtcaagaattacaaaatataatacaaaga

SEQ ID NO: 86735 - DNA, 588 bp, Homo sapiens
ttgagtcagatgattttgtcatctgccagaagcccctggaacttcttggtgaaaaaagtgaacagtctggattatctgttacactggagtctacgggattagctgatgaaaaaagaaaatattcccactttcagcacctgctctataggtattatagtgctttttttttttttttttttaccagcattttatgtatatatgcctgcttaaagtacatggaagttatatttttccctttctctgtctttttaaacccacagacgttttgctcctgatatttcgtcctatgtcttgtctgatgacatcaagctacattccctccagctgctacccatttaccagaccggtaagcatgacagtgcaggagtgcgacagtgcagcaaggtgaaaatgctctgtctgggctgggagtgaagacccatgtgggtaataggtttggtggtttggttcttccactggagtctccttgtggccctttaacaaagtttttttttttgtttttttttkttttttttttgagactgagtctcgctttattgccagtctggagtgcagtggtgcgatctcggctcactgcaacttctactt

SEQ ID NO: 86736 - DNA, 1400 bp, Homo sapiens
atgaagcatagctatatgaacctaaacctcaccaaacaaattcagtattttactacatctagactttgctcaagagtttttttgtcatcatttctactcagttttttctacaaattcttactacctttttcacccattgttaggataataaagcacaaagccacttagacaaagcagctgtgttgcaggacatacaacttctcataaaaattataactgtacgtattgctgctggtttaagtagtgatgggtttattcttgataatgcaaatcactgattttcactaaccgagcactaattcagtagtrgtcaaagtgtggtccttggacctgcagcatctgcataacctgggtacttcttagaaatgcagacttttaaaatcagaaaccctgggagtggaactagcagtcgtttaataggcattccaggtgattctgatgcatgctaagtttgataaccacagccctaattaagctgatttaattccagttgatttgtcaaggctcacataggagaaatgcaactagtgtgtggccattgtaaaaagacgataagtaatataggctagaatgaaatataaaatggcttgatttctaaatgtctaaacatgatgtcaccatcttattacctttgtgaacacagcatttttcccatcttttaattttatataaactgaatatgtctaataagtttgccctttggtttaatgaatacttcatttttattttttgtttgtgtggttttaattttttcccacagaatctatattttagtcctaaaaaacctaactgggacctactagaaagcaggcaggtggtctgggtaaccttattttcgctttaggttttttttttttttttccagttatctttagattattcaggaggttttgtgtttgtgatggaaactttaatttctattgaattggtacatattagtttatggtttgagacattgctggcaataggacaaccaaaagcaggtgacagtgataatacaggcaaggcaggttgtatgtgaattttatacaacaaagatttttaaaatctacctaaaaagttctctttctttgccatgatttttcaacgctgtgtggatttaagtttctgattctccttgtttcttgaaaatattttctttttctgcattattttatttaaatacaatagaagatgataatttgattgggacacacactgaaattgaaaagcactgtgagacgtcaccaggtattgtatcagaagcaaatgtatgtgttgactaatggtccttaagtgtatctaaaatatttcgttatccaacttttccttttccagaattgtatgatgtctcagaaatcaagaattatgctaagattaactatttcagttttgtgctaattccatcaaattgctgtaca

SEQ ID NO: 86737 - DNA, 623 bp, Homo sapiens
gttagtctgcctgcctggcyggcccctgtcactggccggcccatgagctccttgggggtaggggctgagcctcattttctttatgattccagaccctgctgtgttgtttaatcttgggtggtatatgaccgtggactcaaccagaccctggtgatggaccctggtttccaattgttttgctgttatgaagaatgctgctaagaacgtccactgaaaagttttgtgtagtgtatccatagtgtaaaatcctgtcaatagacatctacatagggtgctctagttcttcactttctgaatttgaggagataccccttagggcaggagacgcaggagtcgtaaggggagggcagcaggaagatagacccctcctccagaggaggacaatcgtgccctgaggcagggggatggcagagaggcttcctggagttccttcctcattgccagtgggtctcgttttaagtaaacaaaggctgttgggagagggtggagccaggtggaggggcccatgtggcttgggcaagactgccagccgcacgccattgccaatcctggctctagggggtgtgcggtggatgccagccttcagccctcctcttggtcctctgcttccggcctttccctct

SEQ ID NO: 86738 - DNA, 665 bp, Homo sapiens
gatcatccagatttaatcatcagaatggggttctagtggcttccactgtatataaatttaaataatggcccatcctctcctgaaggaaggaaagtccatagactctgcccatctgttcggtgaggctgttcattttgaatttctgattaggtgcctcctactattcctacacatgccctatctccaaacaatgccatagtgtttgggggcgtttagtaatttatatatagtgcttgttattttggcttcaaatctgattcctctttggctattgacacaagggtttagggtggactgamcatggccagtgtctatttagatacactgtgcataagtggaagacagtgggagactctggggccacacagccactcaagaatgcgtcctgattgggtgtcaggctggatttcatatctgtgagtgtaatgccaatacctgcatggctagtttagctaatcacataagcccaagaaaaactggggacctgccacagggttgctggaaaataaaattaggacacagtgagaaactatctgaaataatatctaattgccttctttggaaagggggtagggctgtaaccataagcccctgttctcgtatcactttccaacgtgctctgactctgtcagttacctcttctctctcccctctacaagttggct

SEQ ID NO: 86739 - DNA, 665 bp, Homo sapiens
gatcatccagatttaatcatcagaatggggttctagtggcttccactgtatataaatttaaataatggcccatcctctcctgaaggaaggaaagtccatagactctgcccatctgttcggtgaggctgttcattttgaatttctgattaggtgcctcctactattcctacacatgccctatctccaaacaatgccatagtgtttgggggcgtttagtaatttatatatagtgcttgttattttggcttcaaatctgattcctctttggctattgacacaagggtttagggtggactgaacatggccagtgtctatttagatacactgtgcataagtggaagacagtgggagactctggggccacacagccactcaagaatgcgtcctgattgggtgtcaggctggatttcatatctgtgagtgtaatgccaatacctgcatggctagtttagctaatcacataagcccaagaaaaactggggacctgccacagggttgctggaaaatraaattaggacacagtgagaaactatctgaaataatatctaattgccttctttggaaagggggtagggctgtaaccataagcccctgttctcgtatcactttccaacgtgctctgactctgtcagttacctcttctctctcccctctacaagttggct

SEQ ID NO: 86740 - DNA, 819 bp, Homo sapiens
cccctccccatcaaattcatacattgaaaacctaatcaccaaggtgagctttgggaggtgactaaatcatggggaccaccctcctgaatgggatttgtctccttataatagaggccgcagagaggtgccttgaccctccaccctgtgaggactgtattagaaggccctgtctatgaggaaatgaactctttacccgatgccgaatccgtgttcatcttggacttcccagcctccagagctgtgagaaacaaatgtctcttgtttatatgattatggcatttttgtgacagcaaccggaatggacgaagacagagaatattttgcatttttcctatggagactgtggcaaatcttgctctgaaaaaaatactctttctagataacttttctgtgggtctttgccacatgatgttctaatttgtataacactgtgctgagactaggccagcactttctgatgctgagtaatgcaccatcttcagggcaagggaccagtgtccaggggccacagaaagcatcgcagaccaggaagagcacayggctttcacccaggtgactgttcccatccactggtagtagctggcttgtcatctggaagagccgggatcaaagccaaagaggattatgcctgagcaccctatgagctgcccaggccatctgcatactaagccctgctcttctgggattgggggttctccttgaatttccagatccttctcagggctcctctacgtctggcattgaaaatggcctctttgtcactccttggattatttttcatttttatttcttcagcttccagaagtactttaaaatttg

SEQ ID NO: 86741 - DNA, 725 bp, Homo sapiens
ttctatcttttttctttccccctccgaaggacgaaccctttatttttgacaacaaataagaggcatttggcaggtacggtgtgctgtgcaccatgaaatatttagtaaggcaataacgactccccggacagcttaagaaatccacgattatattcagagagaaagccatgagcaaacagagaggggggaacaaaaagaaagataaaggcaggcctttcatcaggacttcctgtccaataatgcagccaggcttgatccatatgttttgagaaaaatcaaagtgtcacaactatccaaaatgtcaatagctccggtaaggaatattgtctaacattttctattacaccgttcaagaatttgcctcccagcgcaatttggaagaagaaactctttcatttcgaaaacactcaaagaaaagaaagaaagagggggcggggtggaggggggggcagaacaaggcrcatttcagtgcaatgtgtaatacaataatgctctgggctccccggccatcctgaaagtcgatcctctgatgaaagtgagttctcctccacacctctcctctgttctgtcctttctttgcagacactcttgctcaggcacttcctggacagttggatataactgagcaatctccgtgcaacgggaaaccagaaaagcccaactttcagcaggcttaatatttggataatcctgcataatgatttcagggttaagtcacagaatgc

SEQ ID NO: 86742 - DNA, 551 bp, Homo sapiens
cacccactggtgcaacttcgccaggactaaggaaaaagcacagtccatgtaactctaggcagaagggatctttgggtttctagatctgccatccgtatcagatcctgccttcctggaaaaacatgttcttagatacagatttgtttggtctgacaaactcctccagggaaaggatgcaggcgtttctgacagttgcactgaggatgtttcccgctagacaggtaggagaaagtgtctgtgctgccaacctctttcctttacatcrgcacaaagactgatacctggtcctcttttcctaaacttcccatgtggcatttgaggggccccttgggaacacataagacctgcattttggcccctctcacaggttcaaaagtaatctgagctattctggtgttcacagctagtagtagtagcagtagcagcagtagttgtagtagtgttggtttactaagccttctttcctcattgtcaacaggctaggaaagtcctagtgacaaggaaggccactgagtggccaaatcaatccaagtgttcattttattctttga

SEQ ID NO: 86743 - DNA, 551 bp, Homo sapiens
cacccactggtgcaacttcgccaggactaaggaaaaagcacagtccatgtaactctaggcagaagggatctttgggtttctagatctgccatccgtatcagatcctgccttcctggaaaaacatgttcttagatacagatttgtttggtctgacaaactcctccagggaaaggatgcaggcgtttctgacagttgcactgaggatgtttcccgctagacaggtaggagaaagtgtctgtgctgccaacctctttcctttacatcggcacaaagactgatacctggtcctcttttcctaaacttcccatgtggcatttgaggggccccttgggaacacataagacctgcattttggcccctctcacaggttcaaaagyaatctgagctattctggtgttcacagctagtagtagtagcagtagcagcagtagttgtagtagtgttggtttactaagccttctttcctcattgtcaacaggctaggaaagtcctagtgacaaggaaggccactgagtggccaaatcaatccaagtgttcattttattctttga

SEQ ID NO: 86744 - DNA, 551 bp, Homo sapiens
cacccactggtgcaacttcgccaggactaaggaaaaagcacagtccatgtaactctaggcagaagggatctttgggtttctagatctgccatccgtatcagatcctgccttcctggaaaaacatgttcttagatacagatttgtttggtctgacaaactcctccagggaaaggatgcaggcgtttctgacagttgcactgaggatgtttcccgctagacaggtaggagaaagtgtctgtgctgccaacctctttcctttacatcggcacaaagactgatacctggtcctcttttcctaaacttcccatgtggcatttgaggggccccttgggaacacataagacctgcattttggcccctctcacaggttcaaaagtaatctgagctattctggtgttcacagctagtagtagtagcagtagcagcagtagttgtagtagtgttggtttactaagccttctttcctcattgtcaacrggctaggaaagtcctagtgacaaggaaggccactgagtggccaaatcaatccaagtgttcattttattctttga

SEQ ID NO: 86745 - DNA, 551 bp, Homo sapiens
cacccactggtgcaacttcgccaggactaaggaaaaagcacagtccatgtaactctaggcagaagggatctttgggtttctagatctgccatccgtatcagatcctgccttcctggaaaaacatgttcttagatacagatttgtttggtctgacaaactcctccagggaaaggatgcaggcgtttctgacagttgcactgaggatgtttcccgctagacaggtaggagaaagtgtctgtgctgccaacctctttcctttacatcggcacaaagactgatacctggtcctcttttcctaaacttcccatgtggcatttgaggggccccttgggaacacataagacctgcattttggcccctctcacaggttcaaaagtaatctgagctattctggtgttcacagctagtagtagtagcagtagcagcagtagttgtagtagtgttggtttactaagccttctttcctcattgtcaacaggctaggaaagtcctagtgacaaggaagsccactgagtggccaaatcaatccaagtgttcattttattctttga

SEQ ID NO: 86746 - DNA, 993 bp, Homo sapiens
tgcatgaacatagagtttatgtgtttggcaacaccgcgagccccttctccaggacggagctgggcctctgtgccttttgagttgttcctttgctcaatgagtgttccacagagaatgggacagaacctgctccctgagcacaagctgagggaggtgaattaaagtgcatttgcattcatgaggaaggatctgctcatccaggtgctctgtcctgtcgccgttagacgctccttggtccctcaaagagatgtcactctcacggccactgcattgcaccacctgtgagatacctttggaattgtggaaagttcagctagaaagttgtttctttttaatatttattcttttggtcccaaacctttaattaatgctcattttctaaaaatccccaaatttcataaaatgaaaaataaaaattgaaagagataagcattgttgataaatccttaatggatttattttggatataataattcacatttttttttaccagtgcagaatcatattatatttggtgatctacaatcagcttttcctccctcacttattgatatattgtggttacctttctaagtcagtacatatacatcttccgggttatttctgttataagtaaaaattttagccaagtgcacagagatcatacccatttaatcatcactaagatcaagaaacatatgaccagaagctcacctcaagcttctgacccctatcattcctcctgccagggtaactattctgattttgctcactctcagttacttttgccctgtttgcaaaattttataaatggaatcagatgttatgtacacttttatgtctgacttcttttgctaacattgtttataagatccattcaaatcatagtttgcttattctcattgctacatattattcagttttgtgaagataccacaatttatccatttttaggttgattgttttcagttttgcactgtttycactaggaacattctagtatgtgatttggta

SEQ ID NO: 86747 - DNA, 843 bp, Homo sapiens
taatctactccctttgggcccataaaaatgtagttatatgttatacgttttctattaaaagctgtttttataccgtttgttctatttcacagaggtagaagaatacataaagtcctcgatttgcaagcatccaacttgtgcatgactcaaatacaaaaatggcgaccacacctctctgatgtgcaaaactactggtataggagmctgtaaaggttttcacacacacccgtatgcccccatgggatcctagatacctcgtaccttctagcaaagccactcatccgaagatgactcactcatggcaaatgccttggccttgactctgaagctactgcagctagaaatccaccaccaggtatggtagaagagaccccaacaccatataagcagccacgaacatctccttaagaagtctcaatttctgtagaccctggcctaaactcaccactgtgaggatgcagaagttgtaggcatctgatcctttggacagattttttccacggaaataaaatacatgcttattcatctgctcattcattcagcaaacatttattgaatgtctattctatctcaaacactgggttgtacccaaaaaagcaatgttagcttacaaaatgtttgcacatgctgaattttgtagatgggtaaactgaagctccaaaaggtttagtgacctgcccagggccatctaactagtaggtgttggagtttgtactcaaactgaaggctatctgataacatttcatactcttttcaaaaaccatatttactacattatgcttgacacaggttttcataagctagcaggggagcccaaaagcatgcaaaatatagcttctacct

SEQ ID NO: 86748 - DNA, 661 bp, Homo sapiens
gggttgcttgccttggcatcagaagctagaagactcaaggaaggattctctcctagagctgtcagagagaacatgatgctgctgacacttttgacttcgtacttctagcttccagaactatgatagaattcattgttgttgttttaagccatctggtttataatattttgttaaagcagccctagaaaactaacatattraaaaaggggcataccaggatcttctatttaatgtcacatgggaaaagtgaccaatatctcagtttgcctgggttttctcagggattttcagtgataaaactgggaaagttccaagtacactgcgacaagatggtcacctggtgtggcagcctcctcccttagtaggcagagttccagggaggaagtaaagcagctttcacaaagttcctctttcgagggtaaagttagggaaaactgttagataggatatggcagccttaaccaatgcacagggacaaggaaaggtcaagagactctaaatataaatttaacatgaaggtcctagaaattatgattggtgaactagtccccacaggagctaaatcaggagagagataaagcaaagggtaatttcatctcggggagatgatgagaaataaaaatagtccatatttggcactcctggagcagattcaccaaat

SEQ ID NO: 86749 - DNA, 661 bp, Homo sapiens
gggttgcttgccttggcatcagaagctagaagactcaaggaaggattctctcctagagctgtcagagagaacatgatgctgctgacacttttgacttcgtacttctagcttccagaactatgatagaattcattgttgttgttttaagccatctggtttataatattttgttaaagcagccctagaaaactaacatattgaaaaaggggcataccaggatcttctatttaatgtcacatgggaaaagtgaccaatatctcagtttgcctgggttttctcagggattttcagtgataaaactgggaaagttccaagtacactgcgacaagatggtcacctggtgtggcagcctcctcccttagtaggcagagttccagggaggaagtaaagcagctttcacaaagttcctctttcgagggtaaagttagggaaaactgttagataggatatggcagccttaaccaatgcacagrgacaaggaaaggtcaagagactctaaatataaatttaacatgaaggtcctagaaattatgattggtgaactagtccccacaggagctaaatcaggagagagataaagcaaagggtaatttcatctcggggagatgatgagaaataaaaatagtccatatttggcactcctggagcagattcaccaaat

SEQ ID NO: 86750 - DNA, 661 bp, Homo sapiens
gggttgcttgccttggcatcagaagctagaagactcaaggaaggattctctcctagagctgtcagagagaacatgatgctgctgacacttttgacttcgtacttctagcttccagaactatgatagaattcattgttgttgttttaagccatctggtttataatattttgttaaagcagccctagaaaactaacatattgaaaaaggggcataccaggatcttctatttaatgtcacatgggaaaagtgaccaatatctcagtttgcctgggttttctcagggattttcagtgataaaactgggaaagttccaagtacactgcgacaagatggtcacctggtgtggcagcctcctcccttagtaggcagagttccagggaggaagtaaagcagctttcacaaagttcctctttcgagggtaaagttagggaaaactgttagataggatatggcagccttaaccaatgcacaggsacaaggaaaggtcaagagactctaaatataaatttaacatgaaggtcctagaaattatgattggtgaactagtccccacaggagctaaatcaggagagagataaagcaaagggtaatttcatctcggggagatgatgagaaataaaaatagtccatatttggcactcctggagcagattcaccaaat

SEQ ID NO: 86751 - DNA, 1258 bp, Homo sapiens
gcatcatgattacgatgataaaatccctttttccatgggcatggtatcttgtcatagtcacaggttcctcccacacttaagggaaggggattacacaagggtgagggtcagtgamagtcatcttagaattctgtcaccaacacctggcaatggtgacatgaggcattgatgtaagatggtcaaaaagcagtgtggagctggccaaaatgaccttctaataaattatatatataacatattatagtgatatgtaattataattacatattacatataatatgacatttatattacagtatataaataatattcatatagtttatataatatataaaaatttatattttatatgtatatattatatataatatatacttatatattgtattagtccattcccatgctgctgtaaggacatacccaagactgggtaatttataaagaaaaagaggtttaatggactcagtctcacgtggttggggaggcctcgcaatcatggcaaaaggcgaaggaggcacaaagtcacatcttacatggtggcaggcaagacagcctgtgcagaggaactgccctttataaaaccatgagatctcatgaggcttattcaatatcactagaacagcatgggaaaaacccacccccatgattcaattactccccactgggtccctcccactacacacggggattatgggagctacaattcaagatgagatttgggtggggacacagccaaaccatatcatatgtatagaaacttgagttgcaagttttccatagtggttaaaatttatttgtcatagcttatatataagttttatatatattatatataatgtaaatatctattatatatatctatataacatatagagatatatattagagagacagaaagtcattaattaaccttgcaaacctggagtcagactatgggaatcctccttgggctcagactctattgttcaagttgtttaattcctccaaaccttggagaagcttcctgctctgatgtccaataagtgacagtatatttctcataaggttgctgtgaggagtaacaattaaatccacgtggcttcctagcacagcacctggcaagtaggcgctgggtactcttagctattagaattaatattagcattgctgttaatatctttattgctattcatacttgagtgaaataagccgactgagttcacagcacagctgagaaaatttccattgcttgtgtggtttaacatggattctgggagca

SEQ ID NO: 86752 - DNA, 1258 bp, Homo sapiens
gcatcatgattacgatgataaaatccctttttccatgggcatggtatcttgtcatagtcacaggttcctcccacacttaagggaaggggattacacaagggtgagggtcagtgaaagtcatcttagaattctgtcaccaacacctggcaatggtgacatgaggcattgatgtaagatggtcaaaaagcagtgtggagctggccaaaatgaccttctaataaattatatatataacatattatagtgatatgtaattataattacatattacatataatatgacatttatattacagtatataaataatattcatatagtttatataatatataaaaatttatattttatatgtatatattatatataatatatacttatatattgtattagtccattcccatgctgctrtaaggacatacccaagactgggtaatttataaagaaaaagaggtttaatggactcagtctcacgtggttggggaggcctcgcaatcatggcaaaaggcgaaggaggcacaaagtcacatcttacatggtggcaggcaagacagcctgtgcagaggaactgccctttataaaaccatgagatctcatgaggcttattcaatatcactagaacagcatgggaaaaacccacccccatgattcaattactccccactgggtccctcccactacacacggggattatgggagctacaattcaagatgagatttgggtggggacacagccaaaccatatcatatgtatagaaacttgagttgcaagttttccatagtggttaaaatttatttgtcatagcttatatataagttttatatatattatatataatgtaaatatctattatatatatctatataacatatagagatatatattagagagacagaaagtcattaattaaccttgcaaacctggagtcagactatgggaatcctccttgggctcagactctattgttcaagttgtttaattcctccaaaccttggagaagcttcctgctctgatgtccaataagtgacagtatatttctcataaggttgctgtgaggagtaacaattaaatccacgtggcttcctagcacagcacctggcaagtaggcgctgggtactcttagctattagaattaatattagcattgctgttaatatctttattgctattcatacttgagtgaaataagccgactgagttcacagcacagctgagaaaatttccattgcttgtgtggtttaacatggattctgggagca

SEQ ID NO: 86753 - DNA, 1258 bp, Homo sapiens
gcatcatgattacgatgataaaatccctttttccatgggcatggtatcttgtcatagtcacaggttcctcccacacttaagggaaggggattacacaagggtgagggtcagtgaaagtcatcttagaattctgtcaccaacacctggcaatggtgacatgaggcattgatgtaagatggtcaaaaagcagtgtggagctggccaaaatgaccttctaataaattatatatataacatattatagtgatatgtaattataattacatattacatataatatgacatttatattacagtatataaataatattcatatagtttatataatatataaaaatttatattttatatgtatatattatatataatatatacttatatattgtattagtccattcccatgctgctgtaaggacatacccaagactgggtaatttataaagaaaaagaggtttaatggactcagtctcacgtggttggggaggcctcgcaatcatggcaaaaggcgaaggaggcacaaagtcacatcttacatggtggcaggcaagacagcctgtgcagaggaactgccctttataaaaccatgagatctcatgaggcttattcaatatcactagaacagcatgggaaaaacccacccccatgattcaattactccccactgggtccctcccactacacacggggattatgggagctacaattcaagatgagatttgggtggggacacagccaaaccatatcatatgtatagaaacttgagttgcaagttttccatagtggttaaaatttatttgtcatarcttatatataagttttatatatattatatataatgtaaatatctattatatatatctatataacatatagagatatatattagagagacagaaagtcattaattaaccttgcaaacctggagtcagactatgggaatcctccttgggctcagactctattgttcaagttgtttaattcctccaaaccttggagaagcttcctgctctgatgtccaataagtgacagtatatttctcataaggttgctgtgaggagtaacaattaaatccacgtggcttcctagcacagcacctggcaagtaggcgctgggtactcttagctattagaattaatattagcattgctgttaatatctttattgctattcatacttgagtgaaataagccgactgagttcacagcacagctgagaaaatttccattgcttgtgtggtttaacatggattctgggagca

SEQ ID NO: 86754 - DNA, 1581 bp, Homo sapiens
taggtctctgagactcttagaaatcatcagaataactctataacatgggtgttattatccccattttctagataagaaaattgaagcaaaatgggcttacttaagatcatacagccaccaagaaggaccaggatttacctggagcgtgtgctcctaaccattatgatgaaataaaggcgtggttgttatctgcatattttacaaccacagttttttgagacatttgctatggtgatgagaaaaaagaaaaaggacctaaaagcaagacagacaaaggaataaagagaaagatcaaaaagaggaaattatctctgatgaaagattaccatttatccatgagattaaaatacctccctggacacagtcagaacacagcacacttaaaatctcattgatttacaatgcaatttagattttttttttgaaaccaggtaatataaraacaagtataaactaaaagccttggatgacaaacttgggtcagcatcagagttcaaggagaaggtggtgacgactgagccaggttctcaaagagcagtacattcctttctctttaaaggcaatttatcaggatttatccaagcctgtaagaacaatcccttaagaccatccaatttcctttctttctaattccatacttagcagagcaaccttctgataattaatttggttcctcaggtaagtcaataccaggaaagagactgacagagttactgtgccagctacatcacctgctgtaaatgaataaattggtttgtggatttatcaatctacctccaagagttcagtttgcaaacaccacttttcctagggtgccctgtcatttgacttgcagacctgcaatgctaggtgaccaaagtgagaagggctcttttaagactttcataatcctggccattcttgtcataggaggtaccaccttgtattatgtcaagaatattaaaatgcactcactccctgggctgccatgttgacaagcccacttttgagtggagctccctggaattgtacaatatgtgaccccgcttccattgcatattaactgaaatgtattttgtgaaaaacaagtggaaagactgtttattaagctacttatttagttacgagttactcatttgcccaaaagttcccagcaatcattacgtatagcggagaatgctgccctgaccaccctatttaaaagtacaactcacacctgcccacaccaccatggaccctacttacttctcctcccctgccttattttctttatggaacttgtgaacataggatgctgatgcaggacaggcaaccccggattggagattagcccatgagggttcttggcttcacccaggaaacaattcaagggtgagccagtggtagggtagaagaaaacagctttattgaagtggcagtgttatagctcaggcagtattacatctctgtgactgctcctacagagttgggctaccccatgggcagtgtgctgagagtagcagctcagggcagttttgcagccatatttacacttacttttaatgacttggagattaagggccagttgatgcagaaatttccagaggaagggtggtaactttg

SEQ ID NO: 86755 - DNA, 1581 bp, Homo sapiens
taggtctctgagactcttagaaatcatcagaataactctataacatgggtgttattatccccattttctagataagaaaattgaagcaaaatgggcttacttaagatcatacagccaccaagaaggaccaggatttacctggagcgtgtgctcctaaccattatgatgaaataaaggcgtggttgttatctgcatattttacaaccacagttttttgagacatttgctatggtgatgagaaaaaagaaaaaggacctaaaagcaagacagacaaaggaataaagagaaagatcaaaaagaggaaattatctctgatgaaagattaccatttatccatgagattaaaatacctccctggacacagtcagaacacagcacacttaaaatctcattgatttacaatgcaatttagattttttttttgaaaccaggtaatataagaacaagtataaactaaaagccttggatgacaaacttgggtcagcatcagagttcaaggagaaggtggtgacgactgagccaggttctcaaagagcagtacattcctttctctttaaaggcaatttatcaggatttatccaagcctgtaagaacaatcccttaagaccatccaattwcctttctttctaattccatacttagcagagcaaccttctgataattaatttggttcctcaggtaagtcaataccaggaaagagactgacagagttactgtgccagctacatcacctgctgtaaatgaataaattggtttgtggatttatcaatctacctccaagagttcagtttgcaaacaccacttttcctagggtgccctgtcatttgacttgcagacctgcaatgctaggtgaccaaagtgagaagggctcttttaagactttcataatcctggccattcttgtcataggaggtaccaccttgtattatgtcaagaatattaaaatgcactcactccctgggctgccatgttgacaagcccacttttgagtggagctccctggaattgtacaatatgtgaccccgcttccattgcatattaactgaaatgtattttgtgaaaaacaagtggaaagactgtttattaagctacttatttagttacgagttactcatttgcccaaaagttcccagcaatcattacgtatagcggagaatgctgccctgaccaccctatttaaaagtacaactcacacctgcccacaccaccatggaccctacttacttctcctcccctgccttattttctttatggaacttgtgaacataggatgctgatgcaggacaggcaaccccggattggagattagcccatgagggttcttggcttcacccaggaaacaattcaagggtgagccagtggtagggtagaagaaaacagctttattgaagtggcagtgttatagctcaggcagtattacatctctgtgactgctcctacagagttgggctaccccatgggcagtgtgctgagagtagcagctcagggcagttttgcagccatatttacacttacttttaatgacttggagattaagggccagttgatgcagaaatttccagaggaagggtggtaactttg

SEQ ID NO: 86756 - DNA, 1581 bp, Homo sapiens
taggtctctgagactcttagaaatcatcagaataactctataacatgggtgttattatccccattttctagataagaaaattgaagcaaaatgggcttacttaagatcatacagccaccaagaaggaccaggatttacctggagcgtgtgctcctaaccattatgatgaaataaaggcgtggttgttatctgcatattttacaaccacagttttttgagacatttgctatggtgatgagaaaaaagaaaaaggacctaaaagcaagacagacaaaggaataaagagaaagatcaaaaagaggaaattatctctgatgaaagattaccatttatccatgagattaaaatacctccctggacacagtcagaacacagcacacttaaaatctcattgatttacaatgcaatttagattttttttttgaaaccaggtaatataagaacaagtataaactaaaagccttggatgacaaacttgggtcagcatcagagttcaaggagaaggtggtgacgactgagccaggttctcaaagagcagtacattcctttctctttaaaggcaatttatcaggatttatccaagcctgtaagaacaatcccttaagaccatccaatttcctttctttctaattccatacttagcagagcaaccttctgataattaatttggttcctcaggtaagtcaataccaggaaagagactgacagagttactgtgccagctacatcacctgctgtaaatgaataaattggtttgtggatttatcaatctacctccaagagttcagtttgcaaacaccacttttcctagggtgccctgtcatttgacttgcagacctgcaatgctaggtgaccaaagtgagaagggctcttttaagactttcataatcctggccattcttgtcataggaggtaccaccttgtattatgtcaagaatattaaaatgcactcactccctgggctgccatgttgacaagcccacttttgagtggagctccctggaattgtacaatatgtgaccccgcttccattgcatattaactgaaatgtattttgtgaaaaacaagtggaaagactgtttattaagctacttatttagttacgagttactcatttgcccaaaagttcccagcaatcattacgtatagcggagaatgctgccctgaccaccctatttaaaagtacaactcacacctgcccacaccaccatggaccctacttacttctcctcycctgccttattttctttatggaacttgtgaacataggatgctgatgcaggacaggcaaccccggattggagattagcccatgagggttcttggcttcacccaggaaacaattcaagggtgagccagtggtagggtagaagaaaacagctttattgaagtggcagtgttatagctcaggcagtattacatctctgtgactgctcctacagagttgggctaccccatgggcagtgtgctgagagtagcagctcagggcagttttgcagccatatttacacttacttttaatgacttggagattaagggccagttgatgcagaaatttccagaggaagggtggtaactttg

SEQ ID NO: 86757 - DNA, 1581 bp, Homo sapiens
taggtctctgagactcttagaaatcatcagaataactctataacatgggtgttattatccccattttctagataagaaaattgaagcaaaatgggcttacttaagatcatacagccaccaagaaggaccaggatttacctggagcgtgtgctcctaaccattatgatgaaataaaggcgtggttgttatctgcatattttacaaccacagttttttgagacatttgctatggtgatgagaaaaaagaaaaaggacctaaaagcaagacagacaaaggaataaagagaaagatcaaaaagaggaaattatctctgatgaaagattaccatttatccatgagattaaaatacctccctggacacagtcagaacacagcacacttaaaatctcattgatttacaatgcaatttagattttttttttgaaaccaggtaatataagaacaagtataaactaaaagccttggatgacaaacttgggtcagcatcagagttcaaggagaaggtggtgacgactgagccaggttctcaaagagcagtacattcctttctctttaaaggcaatttatcaggatttatccaagcctgtaagaacaatcccttaagaccatccaatttcctttctttctaattccatacttagcagagcaaccttctgataattaatttggttcctcaggtaagtcaataccaggaaagagactgacagagttactgtgccagctacatcacctgctgtaaatgaataaattggtttgtggatttatcaatctacctccaagagttcagtttgcaaacaccacttttcctagggtgccctgtcatttgacttgcagacctgcaatgctaggtgaccaaagtgagaagggctcttttaagactttcataatcctggccattcttgtcataggaggtaccaccttgtattatgtcaagaatattaaaatgcactcactccctgggctgccatgttgacaagcccacttttgagtggagctccctggaattgtacaatatgtgaccccgcttccattgcatattaactgaaatgtattttgtgaaaaacaagtggaaagactgtttattaagctacttatttagttacgagttactcatttgcccaaaagttcccagcaatcattacgtatagcggagaatgctgccctgaccaccctatttaaaagtacaactcacacctgcccacaccaccatggaccctacttacttctcctcccctgccttattttctttatggaacttgtgaacataggatgctgatgcaggacaggcaaccccggattggagattagcccatgagggttcttggcttcacccaggaaacaattcaagggtgagccagtggtagggtagaagaaaacagctttattgaagtggcagtgttatagctcaggcagtattacatctcygtgactgctcctacagagttgggctaccccatgggcagtgtgctgagagtagcagctcagggcagttttgcagccatatttacacttacttttaatgacttggagattaagggccagttgatgcagaaatttccagaggaagggtggtaactttg

SEQ ID NO: 86758 - DNA, 1902 bp, Homo sapiens
ttgtcattgtcactattataattgcacattgtaaaaagaatggaagcttttccacaggaattattcacgtgtattgctttctaggagtaattgaatagttgacattgcatttatatcaaagtaaaatatgtgatggttattctcatttgtattattcttaagcaataagaaatgtaaagtaatctctattaggtttctttattcggattcagaaatcttcatagttttctgtaatgtccaaatgtgtaccttcttataacagctatgggaactttctctcctctctgtaaaatggagagttatacctaccacgttgagctgttttgagagtcaatggagaaaatagtgagaaaaccactcaaatgtgttttgttacttgatgtgttctttcctctgtatgatccaacttcttacatgttttatcctattttgggtttcaatttggttcatcttcacaaagtagagcttcaagttttatttagaattaaataatattgatactggcttggaaaactgaataacacaagatttagagaaaaaatactctaagtaaaatgtcatgacaaattgaatgaatgatgatgtaaatayaacaatgcaaaagatttggaaggcatcttgattcactaagaaagccatacatcatggcttcaaagcactgcccctttgtagaaaacacacagccattgagggtaagtaggatttccttttcctccacataattctttattacagtctctgcagaggcctgagtcgcttagagatttaccttagttgtgtggaatctttcattgctctttgctagctagcccttgaatcatgtcactgttggcaggggtggagggtgttaccgtttgcccactgttcactggcttttgtattggtagtcagtccacttcttagaggacagatggcaatggctggcaatttgggcaagagaacaaagacactagatcctctccttatcagcagagatggtccatctaaatcagggtggagaatcaccagtgtaacttgtctagggaagttcctcttatcaatgaatgaaatgaccttacaaacatgtgtgagccatgcattcatctccctttgccatccattaaacacattttttttttgagatggagttttgttcttgttgcccaggctggaatgcaatggcgtgatctcagctcactgcaacctctgccgcctgagttcaagtgattctcctgcctcagcctcccaagtagctgggattacaagcatgtgccaccacacctagctaatttttttttttttttttgacatggagtttcgctctttttgtccaggctggagtgcaatgacacaatctcagcccactgcaacctctgcctcctgggttcaagagattctcttgtttcagcctcccaagtagctgggattacaggtgcctgccaccatacctggctaattttttgtatttttagtagagacgggggtttcatcatgttggtcaggctggtctcgaacttctgacctcaggtgatccacctgctttggcctcccaaagtgctgggattacaggcatgagccaccacgccgggccccattaaatacatgttttaagcagttaatttgtttatatactaaaatatatttaattatgttgcttttttcacaaccgccacttccatgagttctttcctctgtgtctatcctgttgatacttgatctacccccaactgcagtctggcggcatgtggacgagtgatgttaggacagtcacagaatcgtgacttccagttgaacaggtctgtctacacatggtcattttgcagcaacctaaaaagagtatttgttttcatcttgactttctcttacacacacagagtggtttatttgggctaaatactacaataagaaaaaaatggtcatata

SEQ ID NO: 86759 - DNA, 1902 bp, Homo sapiens
ttgtcattgtcactattataattgcacattgtaaaaagaatggaagcttttccacaggaattattcacgtgtattgctttctaggagtaattgaatagttgacattgcatttatatcaaagtaaaatatgtgatggttattctcatttgtattattcttaagcaataagaaatgtaaagtaatctctattaggtttctttattcggattcagaaatcttcatagttttctgtaatgtccaaatgtgtaccttcttataacagctatgggaactttctctcctctctgtaaaatggagagttatacctaccacgttgagctgttttgagagtcaatggagaaaatagtgagaaaaccactcaaatgtgttttgttacttgatgtgttctttcctctgtatgatccaacttcttacatgttttatcctattttgggtttcaatttggttcatcttcacaaagtagagcttcaagttttatttagaattaaataatattgatactggcttggaaaactgaataacacaagatttagagaaaaaatactctaagtaaaatgtcatgacaaattgaatgaatgatgatgtaaatacaacaatgcaaaagatttggaaggcatcttgattcactaagaaagccatacatmatggcttcaaagcactgcccctttgtagaaaacacacagccattgagggtaagtaggatttccttttcctccacataattctttattacagtctctgcagaggcctgagtcgcttagagatttaccttagttgtgtggaatctttcattgctctttgctagctagcccttgaatcatgtcactgttggcaggggtggagggtgttaccgtttgcccactgttcactggcttttgtattggtagtcagtccacttcttagaggacagatggcaatggctggcaatttgggcaagagaacaaagacactagatcctctccttatcagcagagatggtccatctaaatcagggtggagaatcaccagtgtaacttgtctagggaagttcctcttatcaatgaatgaaatgaccttacaaacatgtgtgagccatgcattcatctccctttgccatccattaaacacattttttttttgagatggagttttgttcttgttgcccaggctggaatgcaatggcgtgatctcagctcactgcaacctctgccgcctgagttcaagtgattctcctgcctcagcctcccaagtagctgggattacaagcatgtgccaccacacctagctaatttttttttttttttttgacatggagtttcgctctttttgtccaggctggagtgcaatgacacaatctcagcccactgcaacctctgcctcctgggttcaagagattctcttgtttcagcctcccaagtagctgggattacaggtgcctgccaccatacctggctaattttttgtatttttagtagagacgggggtttcatcatgttggtcaggctggtctcgaacttctgacctcaggtgatccacctgctttggcctcccaaagtgctgggattacaggcatgagccaccacgccgggccccattaaatacatgttttaagcagttaatttgtttatatactaaaatatatttaattatgttgcttttttcacaaccgccacttccatgagttctttcctctgtgtctatcctgttgatacttgatctacccccaactgcagtctggcggcatgtggacgagtgatgttaggacagtcacagaatcgtgacttccagttgaacaggtctgtctacacatggtcattttgcagcaacctaaaaagagtatttgttttcatcttgactttctcttacacacacagagtggtttatttgggctaaatactacaataagaaaaaaatggtcatata

SEQ ID NO: 86760 - DNA, 543 bp, Homo sapiens
ccgccaagcccacgcccaccgggaactctagctggcctgcaagtgccgcgcgcagccccagttccaggcagtgcctctccctccacacctccccgcaagccgagggagccggctccggcctcggccagcccagagaaggcctcccacagtgcagcggcgggctgaagggctcctcaagcgcggccagagtggacgccgggaggccgaggaggctccgagagcgagcaagggctgtagagggctgccagcacgctgtcacctctcaataggaagcgttcttttcctcaaagagcttacacaattgtgattacagagtttacactgtgagtacaaattttgcacaatataaaaattaccatagtgcacatcacattgaatgttatggaagtagttaccacagataaataaaaagagaaaaatcccatatcccaggctggggygttggtagacaaaatctttcctaattttttgtatgatagatgtcaaaagtgttcctagtaagcgtgtccagggtacctaccttctctttgggagcctggggaa

SEQ ID NO: 86761 - DNA, 1731 bp, Homo sapiens
tgttctcgtggtagtgaataagtctcatgagatctgatggttttataagggatttcccttcacttggctctcattctctcttgtctgccaccatgtaagacatgccttttgcctttcgccatgattgtgaggcctccccagccacatggaactgtgagtccattaaacctctttttctttataaattacccagtctcaggtatgtctttgtcagcagcgtgaaaacagacaaatacaccctacaaaaaattaagtaggcgttccagtcttttcttctgcttccttgatccctcgccactcctcagtctacttttccacagtctgcctttttccctgccttcatgtttaaaccagccgttatacatcacaaatgtcagtcttcagtgcatgatgtttggtcaaaggaaagtgatatttcagttcagaaaataccctatcacatcagtaacccatgatggtacgatttgatcagactgattcttgcttcagattcccagacttcagcttttaacatctttcctacaaaagaaaaagtattacttttgaaatttctggttttaatgtcatgaaacattttgctattccacagaacagctgcatcaacatcacccagaaactcaatacagaatgccagaccctacctcagacctactgagtaagaatctgcatttttgacaatgttcccaggtaatttatatgcacattatagtttatgattcatatgcatattaaagtttgagaagcactaatctagagttatttatgataacacaaattttaatattgcatgatactctgatttcaaaattctttattttagcaactaacaagcagttcatggattccacttttaatgcttccagttagcagcttctttttttcattacacattcccataggaaatctatatacaaatgtattaactgcaataagggaattccagtactgcatccctaagattacacaccctttgttaatgaaatttcatgttgtatcatcatgaaataccaactagcctgactcaagttaccaatcaagtttattcttctgagaaataaatactacaaatataattacattccattaaaaatatatatattcaactgtacttggacatctattcaaatgtcaagcattgttcttggcactaggaatacagcactgaaaaagtagacaaaaatctgttctctcatggaattcatattctggttagagacaaaagataaataagaaaaatatagcatacatgagatagtagtgagcactaaaaaaacggggaagggggattttttttttttttttttttttttgagatggagttttgctcttgtcgcctaggctggagtgcaatggcgccatctcggctcattgcgacctccrcctcctgggttcaagcaactctcctgcctcagcctcctgagtagctgggattacaggcacccaccaccatgcccagctaattttttgtattttttagtagagatggggtttcaccatgttggccaggctggtctcaaactcctgacctcaggtgatccagccacctcagcctcccaaagtgctgggattacaggcgtgagccaccgcacccggctcaggaagggggattttttaaaggcagagacataatgcgatcttatgaaggctggtcagtgaagaccctactgaaagggatattgagcaaagacgtgaaggtagtggagtgtgacaggcaaaataatagctccccaa

SEQ ID NO: 86762 - DNA, 1731 bp, Homo sapiens
tgttctcgtggtagtgaataagtctcatgagatctgatggttttataagggatttcccttcacttggctctcattctctcttgtctgccaccatgtaagacatgccttttgcctttcgccatgattgtgaggcctccccagccacatggaactgtgagtccattaaacctctttttctttataaattacccagtctcaggtatgtctttgtcagcagcgtgaaaacagacaaatacaccctacaaaaaattaagtaggcgttccagtcttttcttctgcttccttgatccctcgccactcctcagtctacttttccacagtctgcctttttccctgccttcatgtttaaaccagccgttatacatcacaaatgtcagtcttcagtgcatgatgtttggtcaaaggaaagtgatatttcagttcagaaaataccctatcacatcagtaacccatgatggtacgatttgatcagactgattcttgcttcagattcccagacttcagcttttaacatctttcctacaaaagaaaaagtattacttttgaaatttctggttttaatgtcatgaaacattttgctattccacagaacagctgcatcaacatcacccagaaactcaatacagaatgccagaccctacctcagacctactgagtaagaatctgcatttttgacaatgttcccaggtaatttatatgcacattatagtttatgattcatatgcatattaaagtttgagaagcactaatctagagttatttatgataacacaaattttaatattgcatgatactctgatttcaaaattctttattttagcaactaacaagcagttcatggattccacttttaatgcttccagttagcagcttctttttttcattacacattcccataggaaatctatatacaaatgtattaactgcaataagggaattccagtactgcatccctaagattacacaccctttgttaatgaaatttcatgttgtatcatcatgaaataccaactagcctgactcaagttaccaatcaagtttattcttctgagaaataaatactacaaatataattacattccattaaaaatatatatattcaactgtacttggacatctattcaaatgtcaagcattgttcttggcactaggaatacagcactgaaaaagtagacaaaaatctgttctctcatggaattcatattctggttagagacaaaagataaataagaaaaatatagcatacatgagatagtagtgagcactaaaaaaacggggaagggggattttttttttttttttttttttttgagatggagttttgctcttgtcgcctaggctggagtgcaatggcgccatctcggctcattgcgacctccacctcctgggttcaagcaactctcctgcctcagcctcctgagtagctgggattacaggcacccaccaccatgcccagctarttttttgtattttttagtagagatggggtttcaccatgttggccaggctggtctcaaactcctgacctcaggtgatccagccacctcagcctcccaaagtgctgggattacaggcgtgagccaccgcacccggctcaggaagggggattttttaaaggcagagacataatgcgatcttatgaaggctggtcagtgaagaccctactgaaagggatattgagcaaagacgtgaaggtagtggagtgtgacaggcaaaataatagctccccaa

SEQ ID NO: 86763 - DNA, 672 bp, Homo sapiens
tccaccttctgatccaaagtcaccaccttggccaggcatggtggctgctgcctgtaatccacgygctttgggaggctgaggtgggagaaccgcttgaggccaggagttgaagaccagcccacgcaacatagaaagaccccatgtctataaaatataaaaattaactgggtgtggtggtgcatgcttgtagtcccagctacttgggaggctgaggctggaggattgcttgaacccaggagggtggggctgcagtgagctatgattgtgccactgcactccagcctggatgacagagcaagacactgtctcaaaaaaaaaaaaaggtcacagtctgccctgctccaccccaaaacctagattgtaaaaatctccaacaggataccagacacttccaattctttattgagacaggataatggcacaatgtgagggcagggaagcccaggactgtgccatgtggggctccagtaccccctcgacctccaccctacaaaccatgtgtgctcttggccctttgatttcctttctttcctttcttctctctctctctctttctctctttctttcatcttcctttcttttcagacagagtctcactctatcgcccaggctggagtgcagtggcgtgatctcggctcactgcaacctctgcctccccggttcaagcaattc

SEQ ID NO: 86764 - DNA, 660 bp, Homo sapiens
tcctcctgcctcagcctcctaaatgttgggattacaggcgtgagccaccatgcccaaccatggcatcttgaagaaggcagaacctctgcagtgcaagaatccctttcttcctgcccctccagtggggcaggggtgtgtgtgtgcactcatattcattgtggaaggtgtttgtagggcagaagtgtctcctagagctgaaytgaattctccctccctgtaaccatctgctcagaactgggtcacctgctctgtcctgcatccgtcccctcccagcacctaagtgtaatgctcctggttacacatctccattggtggccatgccaatgcattctttccacactctgtgtgtcatcacatctccagtgtatggatctgtgagctgggcatcgtctgatcctgtagtcccagcccgggactgatcccatgcctttcctgtcataggaagccaaatggatgcttagatggacgcttttacaaagggggaaactgaggccagtagtcccagccctggaagagcacttcagtgtcagtgcatcatccttacaggcttcaggctgttctgagacttaatcctgagaagtggcatgttcaggttcttccccgatttgggcatcactaacttgttgacaccatattgtaagcaaaaggcccaaagctgct

SEQ ID NO: 86765 - DNA, 720 bp, Homo sapiens
attcatctgttcacgaacacttgagtttattgcatatcttggctattgtaaataatcctgcaataaacatgggaatatagagatctctttgagatcctgatttcttttgggtatatacacagaggtagaattgctggatcatatggtcattcagttttaattttttgtaaaatctccaaactgttttccatagtggctgtaccattatacactcctatcaacagtgcataagggttcccctttctctacctctttgccaaaacttgttatattttgcttttttcgataatarccattctaacaggtatgaggtggtatctccttgtgctttaaatttgcatttccttgataattagtgatgctgagtaccttttcaggtacctgttacctatttgtatgtcttcttttgagaaatctctattcaggtactttgcccatttttaaagctatttcaaattttgaattttcatgtctttgctctggatttgccttaaccctgggtaccaagagcacacaatgagggaattacagtctctttaagaaatggagttagaaaaatatccacatgtaaaagaataaagtgggatccatatcttacaccatacacacacaaaaaaactcaaaatggattaaagacaaatgtttaaaacctgaaactgtaaaatttctagaagaaaatataggagaaaaactccatgacatcgattttggcagtgattt

SEQ ID NO: 86766 - DNA, 822 bp, Homo sapiens
gcatgccacagagcaaaaaatgattggtaagaactgttaaagataacctatccaagcaccatgggagaacagagaccggggtcgttaattcttcaaaatcagagtacgcttcctgttggcatttgagtaggagatgagaatagagaacagaaatttggaacaaatgatgtagagctttgaatgtcctgccraatttttctgtaacagtattgttgaagtttttgagcagaggaataaacatgatcttatctcagcaacaatgtagagattagattgccccagcgggagagattaaaggttagaaaaccagtaagaatgttgttgcaataaggcagatgagagataagggcctgctttagaggactgggaagtgagggtaatgatgggaaacgacatttcagggagctggactgggcaggtcctgatgaataattggatggtgggggtcaaacagaagataatgcaagacttctgtcttgggtgatttggtgaatggtgatgctattattcaatccgggaaactcaggagcagtgtgcaaggggaagaaggtgaggttgattggggtcagatagagcttgagatatttcagagatacactggtggaaatattctgcaggctgctggaatttttcttctttttttgagacagggtcttgctccgttgcccaggctggagtgcagtggcaccatcttggcttactgcagcctcaacctggcaggctccagagatcctcccacctcagtctctcgagtagctgggaccacaggcactcatcaccacacctggataattgtgtttattttttatagagacgggatct

SEQ ID NO: 86767 - DNA, 708 bp, Homo sapiens
ggatccacccctttctgcccaggagcctgtctgcctcctgctgccatctacatgtcatccagggcacccagactgttcatgtctacgggtgcctgcaggcccaccctgagctgccttcggcatctccagcagcctccctcccatgctagtcagcacccaaagtctggagggggctgaggcagcagggggctggcatatcagtgctgccctgagtgtgcgcgcaaccggccaggtcgccamagcgcctgagctcatcctcaactttgatctgaaatcagagcaggtgctgggagcagaggaacccaggtaatggaagcagggaacctgcgggatacgggtggcttcccaggaccccaagggtgcagaggtgcccaggtttgtagccttggctatgcaactgcagctgcaccagggagtgaggggctcccattccaccaactaggtaggaggcggggctcctgccagctcccagcccccagtagcccaggtatgccagggtctggaaccacagctgggcagctatagctgtgcggggaaacacggggctccggcccagaggacctggaagtgggagaggcccccactggctccgcggagcacgcagcccctctgtaccgcccccatattagccgacatcttctcagtggccatcccggacgggctgccgctgccatgattattaacattcataatttgtaatctttcagt

SEQ ID NO: 86768 - DNA, 708 bp, Homo sapiens
ggatccacccctttctgcccaggagcctgtctgcctcctgctgccatctacatgtcatccagggcacccagactgttcatgtctacgggtgcctgcaggcccaccctgagctgccttcggcatctccagcagcctccctcccatgctagtcagcacccaaagtctggagggggctgaggcagcagggggctggcatatcagtgctgccctgagtgtgcgcgcaaccggccaggtcgccaaagcgcctgagctcatcctcaactttgatctgaaatcagagcaggtgctgggagcagaggaacccaggtaatggaagcagggaacctgcgggatacgggtggcttcccaggaccccaagggtgcagaggtgcccaggtttgtagccttggctatgcaactgcagctgcaccagggagtgaggggctmccattccaccaactaggtaggaggcggggctcctgccagctcccagcccccagtagcccaggtatgccagggtctggaaccacagctgggcagctatagctgtgcggggaaacacggggctccggcccagaggacctggaagtgggagaggcccccactggctccgcggagcacgcagcccctctgtaccgcccccatattagccgacatcttctcagtggccatcccggacgggctgccgctgccatgattattaacattcataatttgtaatctttcagt

SEQ ID NO: 86769 - DNA, 939 bp, Homo sapiens
gaagttgaagatctctgatcttcagataataagtagtaaaccacaacatttaacttcagacccagtggatgcaacccaaaaacatcagattcacccacttagccaggatagcaactaatgagagaggtttttcattcacttacacaggaggaaggaaggctttagttagcaagttcacttaagcactagaccaaacagagacaagccgcgggctgccgcccactgatctcagaggtttcccaagacactgaaggctttaggtacctgtcctcccaaatgaggctctaccttaagtaattattagcatacttccacataaaaatactgtccatgggtgtgtgagtatttatgacaaggatatagctttggtcaaatacaggtcagttgttggttacgtgttaagatgttttagccaaacttattgtgaattaatattttttagagattaatctcccccattatccatttcttatcttttcatctaatatgaataatcaataagagctcaagtaaaacatttattttttacttaatttcctactatctacacataggagaagcagggaaaatgggattttcctctttcccctgcttcttctacaagaaaaggaataaaggaagggcaaaagataaagtaggggaaagggaattttttcacttgccttcttatagtttttaccctctaatgttctacaaaaataatttgctcattccaatagacaagagaatgaaaaatgttcttgctattgagataagaaaatatggtcataaaattaatcttgaaaacawacagctacagttatattgattagcacaatccaagaaccagaaatccatttggcctggccccaaaagtcaatgtctggaaaaacaataataatttaaattctaatctatgttttctggtgcagtaaagcatttcttaagactgtttatgcc

SEQ ID NO: 86770 - DNA, 918 bp, Homo sapiens
ttaaatgtggcttacaggcgtcatttgctttggtttcttatcacctatgcttgtttcaccttcagagtgaggaaaaagcagaaaaaaagagaaatatgtgaaattaccaataaatgtattctttccaactcatctcaaagtaaagcaacagtgcttactctaataattctgtacctcagaaatatacacatttagcctaatagtgtcttttttttgtttttttggtttgtttktttttttttgagacaaggtctcactctgtcacccaggcgggactgcagtggtacaatcctaactccctgtagcctccacctcccaggctcaagcaatcctgctgcctcagtctcccaagtagctgagactacaggtgcatgccaccatatccagctaatttttttaatttttcttttgtagagatggggtcttgctatgtcaaccaggctggtttccagctcctggtcttaagcaatcctccttcctcagccccctaaagtgctgggattacacacatgagccatgaaggccggcctgcattcttaatcaatttccacaaggaagagtaagtaaacatttttctaagaaataaagaaaagatgtcataaataataacattttaacattttaaaataaaatccctttacttacagaaaagaagcagattatcccacacagcagtctgaaagaaagctctcatcagcgaatctagcacagacaaaacattttaaaatgccctattcatctaatactgttttcaaagtaatgacagaaatagcatacatcactgctttatttcactgcttatagagcacagaccaacctttttttttttttgaaatagggtgtccctttgtcgctaaggctggagcgcagtggtgcaatcacagctcactgcagcctcgaccttctgggctcaaggga

SEQ ID NO: 86771 - DNA, 918 bp, Homo sapiens
ttaaatgtggcttacaggcgtcatttgctttggtttcttatcacctatgcttgtttcaccttcagagtgaggaaaaagcagaaaaaaagagaaatatgtgaaattaccaataaatgtattctttccaactcatctcaaagtaaagcaacagtgcttactctaataattctgtacctcagaaatatacacatttagcctaatagtgtcttttttttgtttttttggtttgtttgtttttttttgagacaaggtctcactctgtcacccaggcgggactgcagtggtacaatcctaactccctgtagcctccacctcccaggctcaagcaatcctgctgcctcagtctcccaagtagctgagactacaggtgcatgccamcatatccagctaatttttttaatttttcttttgtagagatggggtcttgctatgtcaaccaggctggtttccagctcctggtcttaagcaatcctccttcctcagccccctaaagtgctgggattacacacatgagccatgaaggccggcctgcattcttaatcaatttccacaaggaagagtaagtaaacatttttctaagaaataaagaaaagatgtcataaataataacattttaacattttaaaataaaatccctttacttacagaaaagaagcagattatcccacacagcagtctgaaagaaagctctcatcagcgaatctagcacagacaaaacattttaaaatgccctattcatctaatactgttttcaaagtaatgacagaaatagcatacatcactgctttatttcactgcttatagagcacagaccaacctttttttttttttgaaatagggtgtccctttgtcgctaaggctggagcgcagtggtgcaatcacagctcactgcagcctcgaccttctgggctcaaggga

SEQ ID NO: 86772 - DNA, 918 bp, Homo sapiens
ttaaatgtggcttacaggcgtcatttgctttggtttcttatcacctatgcttgtttcaccttcagagtgaggaaaaagcagaaaaaaagagaaatatgtgaaattaccaataaatgtattctttccaactcatctcaaagtaaagcaacagtgcttactctaataattctgtacctcagaaatatacacatttagcctaatagtgtcttttttttgtttttttggtttgtttgtttttttttgagacaaggtctcactctgtcacccaggcgggactgcagtggtacaatcctaactccctgtagcctccacctcccaggctcaagcaatcctgctgcctcagtctcccaagtagctgagactacaggtgcatgccaccayatccagctaatttttttaatttttcttttgtagagatggggtcttgctatgtcaaccaggctggtttccagctcctggtcttaagcaatcctccttcctcagccccctaaagtgctgggattacacacatgagccatgaaggccggcctgcattcttaatcaatttccacaaggaagagtaagtaaacatttttctaagaaataaagaaaagatgtcataaataataacattttaacattttaaaataaaatccctttacttacagaaaagaagcagattatcccacacagcagtctgaaagaaagctctcatcagcgaatctagcacagacaaaacattttaaaatgccctattcatctaatactgttttcaaagtaatgacagaaatagcatacatcactgctttatttcactgcttatagagcacagaccaacctttttttttttttgaaatagggtgtccctttgtcgctaaggctggagcgcagtggtgcaatcacagctcactgcagcctcgaccttctgggctcaaggga

SEQ ID NO: 86773 - DNA, 918 bp, Homo sapiens
ttaaatgtggcttacaggcgtcatttgctttggtttcttatcacctatgcttgtttcaccttcagagtgaggaaaaagcagaaaaaaagagaaatatgtgaaattaccaataaatgtattctttccaactcatctcaaagtaaagcaacagtgcttactctaataattctgtacctcagaaatatacacatttagcctaatagtgtcttttttttgtttttttggtttgtttgtttttttttgagacaaggtctcactctgtcacccaggcgggactgcagtggtacaatcctaactccctgtagcctccacctcccaggctcaagcaatcctgctgcctcagtctcccaagtagctgagactacaggtgcatgccaccatatccagctaattttttwaatttttcttttgtagagatggggtcttgctatgtcaaccaggctggtttccagctcctggtcttaagcaatcctccttcctcagccccctaaagtgctgggattacacacatgagccatgaaggccggcctgcattcttaatcaatttccacaaggaagagtaagtaaacatttttctaagaaataaagaaaagatgtcataaataataacattttaacattttaaaataaaatccctttacttacagaaaagaagcagattatcccacacagcagtctgaaagaaagctctcatcagcgaatctagcacagacaaaacattttaaaatgccctattcatctaatactgttttcaaagtaatgacagaaatagcatacatcactgctttatttcactgcttatagagcacagaccaacctttttttttttttgaaatagggtgtccctttgtcgctaaggctggagcgcagtggtgcaatcacagctcactgcagcctcgaccttctgggctcaaggga

SEQ ID NO: 86774 - DNA, 918 bp, Homo sapiens
ttaaatgtggcttacaggcgtcatttgctttggtttcttatcacctatgcttgtttcaccttcagagtgaggaaaaagcagaaaaaaagagaaatatgtgaaattaccaataaatgtattctttccaactcatctcaaagtaaagcaacagtgcttactctaataattctgtacctcagaaatatacacatttagcctaatagtgtcttttttttgtttttttggtttgtttgtttttttttgagacaaggtctcactctgtcacccaggcgggactgcagtggtacaatcctaactccctgtagcctccacctcccaggctcaagcaatcctgctgcctcagtctcccaagtagctgagactacaggtgcatgccaccatatccagctaatttttttaatttttcttttgtagagatggggtcttgctatgtcaaccaggctggtttccagctcctggtcttaarcaatcctccttcctcagccccctaaagtgctgggattacacacatgagccatgaaggccggcctgcattcttaatcaatttccacaaggaagagtaagtaaacatttttctaagaaataaagaaaagatgtcataaataataacattttaacattttaaaataaaatccctttacttacagaaaagaagcagattatcccacacagcagtctgaaagaaagctctcatcagcgaatctagcacagacaaaacattttaaaatgccctattcatctaatactgttttcaaagtaatgacagaaatagcatacatcactgctttatttcactgcttatagagcacagaccaacctttttttttttttgaaatagggtgtccctttgtcgctaaggctggagcgcagtggtgcaatcacagctcactgcagcctcgaccttctgggctcaaggga

SEQ ID NO: 86775 - DNA, 918 bp, Homo sapiens
ttaaatgtggcttacaggcgtcatttgctttggtttcttatcacctatgcttgtttcaccttcagagtgaggaaaaagcagaaaaaaagagaaatatgtgaaattaccaataaatgtattctttccaactcatctcaaagtaaagcaacagtgcttactctaataattctgtacctcagaaatatacacatttagcctaatagtgtcttttttttgtttttttggtttgtttgtttttttttgagacaaggtctcactctgtcacccaggcgggactgcagtggtacaatcctaactccctgtagcctccacctcccaggctcaagcaatcctgctgcctcagtctcccaagtagctgagactacaggtgcatgccaccatatccagctaatttttttaatttttcttttgtagagatggggtcttgctatgtcaaccaggctggtttccagctcctggtcttaagcaatcctccttcctcagccccctaaagtgctgggattacacacatgagccatgaaggccggcctgcattcttaatcaatttccacaaggaagagtaagtaaacatttttctaagaaataaagaaaagatgtcataaataataacattttaacattttaaaataaaatccctttacttacagaaaagaagcagattatcccacacarcagtctgaaagaaagctctcatcagcgaatctagcacagacaaaacattttaaaatgccctattcatctaatactgttttcaaagtaatgacagaaatagcatacatcactgctttatttcactgcttatagagcacagaccaacctttttttttttttgaaatagggtgtccctttgtcgctaaggctggagcgcagtggtgcaatcacagctcactgcagcctcgaccttctgggctcaaggga

SEQ ID NO: 86776 - DNA, 753 bp, Homo sapiens
ggtggagagagggacagatgattgcgggggcggggggcaggtttatggggacggacagacacacacagacatacacacagtaaaggggaaaaggacatcacctttaccttggtctatgtctatatttatctacatctgtgcctatgccgacgtctatatttatatctgtatttatgtgtacatctagagctctgtctatattgacatgtgtattagtctgttttcacactgctgataaagacatacctgagactgggtaatttgtcaagaagaagcggtttaacagattcacagttccctgtgggtgggaggtcctcacagtcatggtggaaggtgaaaggcacatcttacatggcrgcaggcaagagagacagtgagcgccaagcaaaaggggtttccttttataaaaccatcagatctcgtgagactcattcactaccaagagaacagaatgggggaaccacccccatgattcagttatctcccactgggtccttcccacagcaggagggaattctgggagctacaattcaaggtgagatttgagtagggacacagccagcccatatcaacatcaatgtctcgcatgtctatatgtatataatttgtaaaagtgacagcagacctcctgagaccgtgtgagtgtgatttcatgccctaaccagctcagtgtcaggggtgacatgctggggagagggacatggagcaggtgtgaccggcagtactctggtggggtggttttgtgtgacctgt

SEQ ID NO: 86777 - DNA, 1431 bp, Homo sapiens
tgtgtttcgctaccttgtgtatcccaagtgcctagacaataaatctgtgttgattgagggacttagaatacccagtcaacaaggtacactgtctctaggcaaagagatggtgtcagtggagctgatgacagtgctgtggccagctccacaccagattaacaaccagcaggttgacagtggccacccggcttgtggcgtgctgggacccaaatgggacccaaagaagccgctgcagtcaggtttagggtgtagacagtgccgcactcggtagttgagcttgcagcacgggtccgctggtccagtgtggaccacagtgaggtgccagagcaggccataggaggcatctgagaggaacaaggcaagacgaggtgctttctagacacctgtagacatcatttcagatatgatagcgatagaattggatagaccaaggctgagattaatagctgagttgcagagaaagcagacttacctgtccgaagtccaagtgtaaccatgtctaacatgaaagacgatggaatgtgaggcttgatgcatatccacactagagttacggtgggggcggttctgatcccagggtgtgtttgctcatgggcttcctggttatttgtctgagggcagagacactgggcagttgttaatgcctggcaacatctttgtgtgtgtatgcaggagaaatactgttacatttgccccgatatagtcaaggaatttgccaagtatgatgtggatccccggaagtggatcaaacagtacacgggtatcaatgcgatcaaccagaagaagtttgttatagacgttggttacgaaagattcctgggacctgaaatattctttcacccggaggtgagatgtttccttttttgtgtgctcaagtgtgggatggagcgatactgccacccagagtgtagaaagagcagttcccagcgaagggcctgtgagcagggtggccgtcattcggtctctctgcatccccygtgcagtttgtctgcttgacagattgttcagtttgcctctccgtagagctggttatctgttttaatagttaaggatgggttataccacaaataggaagacttttaggagcaatagatgacaatagaattaaaagtaatctccaagggttgtgggtggtcacatgccagcattacaagtagctactctcaaggcctatatggaggttgcctgtgcataagagtgggataatatgtaacctttctatctttggtgattgcccttcctaacttctaattttaaccctggacagttggtcctgctctattccctgctgcaagttaggtaaagcttctgtctaaggccagcatttctattatttagataatcttaagaattagaaatgtcatcattttaactagtagtcataaggaattattagtgcttttgcagaaagcagtaattaagaggcacatt

SEQ ID NO: 86778 - DNA, 774 bp, Homo sapiens
ttcccgagagcgaggacctgtgccaagcccctcagcacctctggggcgttctgactgatgcctgttattgacagcaccatgttcctctgggagaagtggttgagacgaagggcttgggataaataagccacagcatgctgggccatggtagttcctgactctccctgtaaagcagaggacagacgcaatgatgtgctgaagaatatgatttaattatttaagtcatccattaggctttcacacttgagtcatgacttagagcacagcgggtctgcctggaagggctttttgcttctcctgctgcatggttcaggggtccttgggttcaggggcgaggcgttctcttgcacccacctctaactgtccggcacactgcaccgtggtcactgctcacggaccatgcagtagacggttagccgtgcccacagagcgcctggctttggcccttgacctttggtccctgggaggttggtccccaggccactggggtgtcctgtcgggagcactttgttacctgagcacctcaggcccccctagatagtgtgcgctgacaatggtgtttatagtggggaccttgggccacactctattggcttgacctcccagggctggacatggaaggcagccagggtcagaagtgaggtggtcctgrggacccccaagctccgcagttagtttcatcaatgaggtggtcttggaacccccaaggtccacagtttgggtgagaagtgaggtggtcttggggcccccaggctacacagctggggtcagaag

SEQ ID NO: 86779 - DNA, 670 bp, Homo sapiens
ggatccacacttcactggaaatttcataaaatgtgatatgaattttagctgttttcttctctatttttggttagttttgttcatttttaggaggttccaggaagtagtgttacatgaatgtatatttatagcaccatatgcccaataaactattaaagaatcttttagtatgaaaaggatataagacatatggtaaaatcaatgctacagagaacttttcctaaatgaagcttttatggcagttgtaagggraagagtatagtaatttatggctctgtcctctatcaatacaggtccaatgcaacatgaaaagaatgcacataaaatataataaatttgttgactactaataatttttttaattagaagtaaaaggctttttttttttttttacaaatcagatgctgaaacggagaaagggagagaggaagaagagatgcaagctaatttcataattactcatagttgggagccaacagaaaacagccacaaataaaaggactatatataatgataacaattagacaaaaatacagtctgccctaaagtgcaccaaaaaagatattaataaaataaaatggactacatggcaaaagatgtttaaatacatatatatgtaaatattgcaaaactgaggccaaatatatcaatcatatcaatacatataaat

SEQ ID NO: 86780 - DNA, 670 bp, Homo sapiens
ggatccacacttcactggaaatttcataaaatgtgatatgaattttagctgttttcttctctatttttggttagttttgttcatttttaggaggttccaggaagtagtgttacatgaatgtatatttatagcaccatatgcccaataaactattaaagaatcttttagtatgaaaaggatataagacatatggtaaaatcaatgctacagagaacttttcctaaatgaagcttttatggcagttgtaagggaaagagtatagtaatttatggctctgtcctctrtcaatacaggtccaatgcaacatgaaaagaatgcacataaaatataataaatttgttgactactaataatttttttaattagaagtaaaaggctttttttttttttttacaaatcagatgctgaaacggagaaagggagagaggaagaagagatgcaagctaatttcataattactcatagttgggagccaacagaaaacagccacaaataaaaggactatatataatgataacaattagacaaaaatacagtctgccctaaagtgcaccaaaaaagatattaataaaataaaatggactacatggcaaaagatgtttaaatacatatatatgtaaatattgcaaaactgaggccaaatatatcaatcatatcaatacatataaat

SEQ ID NO: 86781 - DNA, 670 bp, Homo sapiens
ggatccacacttcactggaaatttcataaaatgtgatatgaattttagctgttttcttctctatttttggttagttttgttcatttttaggaggttccaggaagtagtgttacatgaatgtatatttatagcaccatatgcccaataaactattaaagaatcttttagtatgaaaaggatataagacatatggtaaaatcaatgctacagagaacttttcctaaatgaagcttttatggcagttgtaagggaaagagtatagtaatttatggctctgtcctctatcaatacaggtccaatgcaacatgaaaagaatgcacataaaatataataaatttgttgactactaataatttttttaattagaartaaaaggctttttttttttttttacaaatcagatgctgaaacggagaaagggagagaggaagaagagatgcaagctaatttcataattactcatagttgggagccaacagaaaacagccacaaataaaaggactatatataatgataacaattagacaaaaatacagtctgccctaaagtgcaccaaaaaagatattaataaaataaaatggactacatggcaaaagatgtttaaatacatatatatgtaaatattgcaaaactgaggccaaatatatcaatcatatcaatacatataaat

SEQ ID NO: 86782 - DNA, 670 bp, Homo sapiens
ggatccacacttcactggaaatttcataaaatgtgatatgaattttagctgttttcttctctatttttggttagttttgttcatttttaggaggttccaggaagtagtgttacatgaatgtatatttatagcaccatatgcccaataaactattaaagaatcttttagtatgaaaaggatataagacatatggtaaaatcaatgctacagagaacttttcctaaatgaagcttttatggcagttgtaagggaaagagtatagtaatttatggctctgtcctctatcaatacaggtccaatgcaacatgaaaagaatgcacataaaatataataaatttgttgactactaataatttttttaattagaagtaaaaggctttttttttttttttacaaatcagatgctgaaasggagaaagggagagaggaagaagagatgcaagctaatttcataattactcatagttgggagccaacagaaaacagccacaaataaaaggactatatataatgataacaattagacaaaaatacagtctgccctaaagtgcaccaaaaaagatattaataaaataaaatggactacatggcaaaagatgtttaaatacatatatatgtaaatattgcaaaactgaggccaaatatatcaatcatatcaatacatataaat

SEQ ID NO: 86783 - DNA, 670 bp, Homo sapiens
ggatccacacttcactggaaatttcataaaatgtgatatgaattttagctgttttcttctctatttttggttagttttgttcatttttaggaggttccaggaagtagtgttacatgaatgtatatttatagcaccatatgcccaataaactattaaagaatcttttagtatgaaaaggatataagacatatggtaaaatcaatgctacagagaacttttcctaaatgaagcttttatggcagttgtaagggaaagagtatagtaatttatggctctgtcctctatcaatacaggtccaatgcaacatgaaaagaatgcacataaaatataataaatttgttgactactaataatttttttaattagaagtaaaaggctttttttttttttttacaaatcagatgctgaaacggagaaagggagagrggaagaagagatgcaagctaatttcataattactcatagttgggagccaacagaaaacagccacaaataaaaggactatatataatgataacaattagacaaaaatacagtctgccctaaagtgcaccaaaaaagatattaataaaataaaatggactacatggcaaaagatgtttaaatacatatatatgtaaatattgcaaaactgaggccaaatatatcaatcatatcaatacatataaat

SEQ ID NO: 86784 - DNA, 821 bp, Homo sapiens
gagttgaacaatgagaagacatggacacagggaggagaacaccacacatccgggcctgttggtgggcctgttaggggagggagagcattaggagagatacctaatgtagatgacgggttggtgggtgcagcaaaccaccgtggcacgtgtatacctgtgtaacaaacctgcacgttctgcacatgtaccccagaacttaaagtataataataatttaaaaagtagtaatgcttcctccatttcccactgtgtcagatgtagaggtttttacagccactgaccactttttgctctattaggagatggcaagtcatttgacgttgattggccctcaaggccagggttccacytcactgcttcagagtctttctgtttgtcctggggagacatgctgtgttgatgggtgttgtgtgctgctgtggaggggagtccacattataagagggttgttgttgggttttgaagtatatccagaggagcatccccagaacagcaagagttcctgaaaagatgaccggtgagaaatggttgagggaagtagcattgtttgacttgcgacctggcagggagcatgaggctgtcttgggacatgtgatgggcagctagacggtgagcagtgccaaggaaagagagaaaccagggccaggtgggtaccagatttcagctcagcacagggagagctactttacaaattggtctatacaaggtggggtccgaattctgtgtcacaggaagggaggcagtgtggactggtggttagagcgctgtgctgagcacatgggctgcggggcggggggtggcgccatgtgtgttgagtgcgt

SEQ ID NO: 86785 - DNA, 821 bp, Homo sapiens
gagttgaacaatgagaagacatggacacagggaggagaacaccacacatccgggcctgttggtgggcctgttaggggagggagagcattaggagagatacctaatgtagatgacgggttggtgggtgcagcaaaccaccgtggcacgtgtatacctgtgtaacaaacctgcacgttctgcacatgtaccccagaacttaaagtataataataatttaaaaagtagtaatgcttcctccatttcccactgtgtcagatgtagaggtttttacagccactgaccactttttgctctattaggagatggcaagtcatttgacgttgattggccctcaaggccagggttccacttcactgcttcagagtctttctgtttgtcctggggagacatgctgtgttgatgggtgttgtgtkctgctgtggaggggagtccacattataagagggttgttgttgggttttgaagtatatccagaggagcatccccagaacagcaagagttcctgaaaagatgaccggtgagaaatggttgagggaagtagcattgtttgacttgcgacctggcagggagcatgaggctgtcttgggacatgtgatgggcagctagacggtgagcagtgccaaggaaagagagaaaccagggccaggtgggtaccagatttcagctcagcacagggagagctactttacaaattggtctatacaaggtggggtccgaattctgtgtcacaggaagggaggcagtgtggactggtggttagagcgctgtgctgagcacatgggctgcggggcggggggtggcgccatgtgtgttgagtgcgt

SEQ ID NO: 86786 - DNA, 821 bp, Homo sapiens
gagttgaacaatgagaagacatggacacagggaggagaacaccacacatccgggcctgttggtgggcctgttaggggagggagagcattaggagagatacctaatgtagatgacgggttggtgggtgcagcaaaccaccgtggcacgtgtatacctgtgtaacaaacctgcacgttctgcacatgtaccccagaacttaaagtataataataatttaaaaagtagtaatgcttcctccatttcccactgtgtcagatgtagaggtttttacagccactgaccactttttgctctattaggagatggcaagtcatttgacgttgattggccctcaaggccagggttccacttcactgcttcagagtctttctgtttgtcctggggagacatgctgtgttgatgggtgttgtgtgctgctgtggaggggagtccacattataagagggttgttgttggrttttgaagtatatccagaggagcatccccagaacagcaagagttcctgaaaagatgaccggtgagaaatggttgagggaagtagcattgtttgacttgcgacctggcagggagcatgaggctgtcttgggacatgtgatgggcagctagacggtgagcagtgccaaggaaagagagaaaccagggccaggtgggtaccagatttcagctcagcacagggagagctactttacaaattggtctatacaaggtggggtccgaattctgtgtcacaggaagggaggcagtgtggactggtggttagagcgctgtgctgagcacatgggctgcggggcggggggtggcgccatgtgtgttgagtgcgt

SEQ ID NO: 86787 - DNA, 821 bp, Homo sapiens
gagttgaacaatgagaagacatggacacagggaggagaacaccacacatccgggcctgttggtgggcctgttaggggagggagagcattaggagagatacctaatgtagatgacgggttggtgggtgcagcaaaccaccgtggcacgtgtatacctgtgtaacaaacctgcacgttctgcacatgtaccccagaacttaaagtataataataatttaaaaagtagtaatgcttcctccatttcccactgtgtcagatgtagaggtttttacagccactgaccactttttgctctattaggagatggcaagtcatttgacgttgattggccctcaaggccagggttccacttcactgcttcagagtctttctgtttgtcctggggagacatgctgtgttgatgggtgttgtgtgctgctgtggaggggagtccacattataagagggttgttgttgggttttgaagtatatccagaggagcatccccagaacagcaagagttcctgaaaagatgaccggtgagaaatggttgagggaagtagcattgtttgacttgcgacctggcagggagcatgaggctgtcttgggacatgtgatgggcagctagacggtgagcagtgccaaggaaagagagaaaccagggccaggtgggtaccagatttcagctcagcacagggagagctactttacaaattggtctatacaaggtggggtccgaattctgtgtcacaggaagggaggcagtgtggactggtggttagagygctgtgctgagcacatgggctgcggggcggggggtggcgccatgtgtgttgagtgcgt

SEQ ID NO: 86788 - DNA, 762 bp, Homo sapiens
tccgttttcctgttgataaaatgagactgtcaggcctctgarcccaagcctgcacatatacatccagatggcctgaagcaagtaaagaatcacaaaagaagtgaaaatggccggttcctgccctaactgatgacattaccttgtgaaattccttctcctggctcagaagctcccccactgagcaccttgtgacccccgtccctgcccaccagagaacaaccccctttgactgtaattttccactacctacccaaatcctataaaacagccccaccggtatctcccttcgctgactctcttttaggactcagcccgcctgcacccaggtgaaataaacagccttgttcctcacacaaagcctgtttggtggtctcttcacacggacacgtgtgacagagacatcgactgcacaggggtattgggaccacccaagaggataataatacggagaagtgctttgtcaggtatctgccaaatgacttttgttatgacgatttttagagtgtggcagatgcccgtctaaaggggcatcatttttggagcatttgttgaccaaaatagtgggatagaagacacagccgctattctaaaaatgtgcatttctgatgcagggagaagttatcgtcacgacgtgctaaacaacacaacataccaatgtcaaacgaggctatggggaggggctccagggccaaaaccatgtgaggccatgtggtctccatgattggacaaagtcttatggagggtgtgagacttaactggggc

SEQ ID NO: 86789 - DNA, 762 bp, Homo sapiens
tccgttttcctgttgataaaatgagactgtcaggcctctgagcccaagcctgcacatatacatccagatggcctgaagcaagtaaagaatcacaaaagaagtgaaaatggccggttcctgccctaactgatgacattaccttgtgaaattccttctcctggctcagaagctcccccactgagcaccttgtgacccccgtccctgcccaccagagaacaaccccctttgactgtaattttccactacctacccaaatcctataaaacagccccacckgtatctcccttcgctgactctcttttaggactcagcccgcctgcacccaggtgaaataaacagccttgttcctcacacaaagcctgtttggtggtctcttcacacggacacgtgtgacagagacatcgactgcacaggggtattgggaccacccaagaggataataatacggagaagtgctttgtcaggtatctgccaaatgacttttgttatgacgatttttagagtgtggcagatgcccgtctaaaggggcatcatttttggagcatttgttgaccaaaatagtgggatagaagacacagccgctattctaaaaatgtgcatttctgatgcagggagaagttatcgtcacgacgtgctaaacaacacaacataccaatgtcaaacgaggctatggggaggggctccagggccaaaaccatgtgaggccatgtggtctccatgattggacaaagtcttatggagggtgtgagacttaactggggc

SEQ ID NO: 86790 - DNA, 762 bp, Homo sapiens
tccgttttcctgttgataaaatgagactgtcaggcctctgagcccaagcctgcacatatacatccagatggcctgaagcaagtaaagaatcacaaaagaagtgaaaatggccggttcctgccctaactgatgacattaccttgtgaaattccttctcctggctcagaagctcccccactgagcaccttgtgacccccgtccctgcccaccagagaacaaccccctttgactgtaattttccactacctacccaaatcctataaaacagccccaccggtatctcccttcgctgactctcttttaggactcagcccgcctgcacccaggtgaaataaacagccttgttsctcacacaaagcctgtttggtggtctcttcacacggacacgtgtgacagagacatcgactgcacaggggtattgggaccacccaagaggataataatacggagaagtgctttgtcaggtatctgccaaatgacttttgttatgacgatttttagagtgtggcagatgcccgtctaaaggggcatcatttttggagcatttgttgaccaaaatagtgggatagaagacacagccgctattctaaaaatgtgcatttctgatgcagggagaagttatcgtcacgacgtgctaaacaacacaacataccaatgtcaaacgaggctatggggaggggctccagggccaaaaccatgtgaggccatgtggtctccatgattggacaaagtcttatggagggtgtgagacttaactggggc

SEQ ID NO: 86791 - DNA, 762 bp, Homo sapiens
tccgttttcctgttgataaaatgagactgtcaggcctctgagcccaagcctgcacatatacatccagatggcctgaagcaagtaaagaatcacaaaagaagtgaaaatggccggttcctgccctaactgatgacattaccttgtgaaattccttctcctggctcagaagctcccccactgagcaccttgtgacccccgtccctgcccaccagagaacaaccccctttgactgtaattttccactacctacccaaatcctataaaacagccccaccggtatctcccttcgctgactctcttttaggactcagcccgcctgcacccaggtgaaataaacagccttgttcctcacacaaagcctgtttggtggtctcttcacacggacacgtgtgacagagacatcgactgcacaggggtattgggaccacccaagaggataataatacggagaagtgctttgtcaggtatctgccaaatgactwttgttatgacgatttttagagtgtggcagatgcccgtctaaaggggcatcatttttggagcatttgttgaccaaaatagtgggatagaagacacagccgctattctaaaaatgtgcatttctgatgcagggagaagttatcgtcacgacgtgctaaacaacacaacataccaatgtcaaacgaggctatggggaggggctccagggccaaaaccatgtgaggccatgtggtctccatgattggacaaagtcttatggagggtgtgagacttaactggggc

SEQ ID NO: 86792 - DNA, 722 bp, Homo sapiens
aataactttcgacaatgtaatgggatcacagaccacaatgcttgaaagccactgttaacagcaaaaaaagtgaattaactaggactacatacaacatagatgaaactggcaatcatgacgttgggtccaagaaacgagacagaaacattcatataacatgatgccagttacataaagtacaaaaaggggtaaactacactgtttaggatgcataagtaggtggtaaaaccacagaacaaagcaagtaagtgatttacataaaagtcatgattgtgtttatcttttgaaggacattgagggattatgagtggggacacacatgaaggggattcgtggtatatggcaatattttacttcttgatctatactatggtggttataattttatcattatttattttattgtatatttacgttttaattatagaaaatttctgaactaaaatatattttaaaaatcagggaaagcttcatcatcactacaggaaaaaacagtaagtagtacaaaacattaaaatagaggtaggtagtatattyattctgataactaaaagagattttacggcaaaaaacatttctagagatctagggatagcatataatagaggattcaattcactaagatgatataaataatctataatcttatacaggtaacaacaattcaaaatacataaaacaaaaattaagaaaacagtaagtagaagttaacaaatctattg

SEQ ID NO: 86793 - DNA, 835 bp, Homo sapiens
ggttgtcccagtgtagtagcagtaatggaatttggccaaaagctcccatcattgtgattacaatttgacactgctagtaatatatgagaattggggttttaggattccaaaggtttcaacagggcaatggctattagaagctccaagggcatctgctgttgttcagagcccctgatgttaacagttcagagctccattcaaattcagcatttccttatcccctggcagttctgtgaatggagaataataatattaccagatatgatatatgatttattcataaatcaatcaatcaattttttagtctcttgttttgattttggagctcacagaataataagttatttttgattgtttgaggaatgtcttctagtgatttcagcccaaataatttctaaaaatcctcagaaaaaatactgcttgtgtttgaccctatattttagaaagtttaatcaatcactccctggtggctgtattatttaccatcatttgtaattcagtttgacattcagattaaaacagaattacatcatcaaaataattaataacagtaattttcaattgaatataatgtctcctcactataatgtggcaataaacaagacaatttaaatgtcctctgggaacacagtaattatgcattggtatccatctttactggctttgaatttgttmtgaaatagaaatagaagataatatattagttaaatagatcacaaaataccaatctccctagcttgatgcacattttgaattgttaacacaactttaggtatggctgaggttattgtagtgatcacattatttagtcccaatagttaacagttaacctcca

SEQ ID NO: 86794 - DNA, 780 bp, Homo sapiens
cttgaacccaggaggtggaggttgcagtgagtcaagattgcgcccctgcactccagcctgggcgacacaatgagactccatctcaaaataaataaataaataaataaataaaaatgtaaaataaaaatactaagcattacaaagaatttaaatttattccatgatatacaacttttggggtgtattaatttaccgatgttcagatttgatattatttgattggactttgaagaccatacttcaattacatttatcaatttctatttgtttatccttaaaaataattacattaataataaaaacatttagacttgtaatcttgtgacctgcctgcaagtcatttatcaaataaattgctgattctttaaatagttcttaagaggacctccaatttcagaactactgggttaactgttttcaatctgttcaattatacagtttgataacatgtatttacaaagcaccagcaatgtgctgaatcctaggaaaacagtgtaagtgaaaacaaatgagatgccatcttccgtctgtgtgactctgcaaaggcacggctgatgtcttattttagtatgttgcctttcatttttggccatgtcttactacaagggctcctattgctatttttattttttattttttttattattwttttttttagtatttattgatcattcttgggtgtttctcggagagggggatgtggcagggtcataggacaatagtggagggaaggtcagcagataaacatgtgaacaagggtctctggttttcctaggcaga

SEQ ID NO: 86795 - DNA, 847 bp, Homo sapiens
tgcatataaagtacatagctcagagtcagacacatactaagcattcagtaaataacatataaaatgacacaacaatgatagtgatgatgatgaggatgatgagggtgatgatgataatgatgaggaggaggagaagggattttaacagtttttgataatctttgcaattttccaaactagattccctctttcagtctatgtaggtaaacagtatattctagcagtttaggcttaaagtaatacaataagaagtatgtgtgttcataagggagaattttggtatcaagaaacatagccactcagaaagtaaaaagattatgtgaaaagtcatcatgaattatttattgtatccacattttcccaaaactattcgctggtgattgctcttggtggtgggttttgcttgtttgtaaaagcaatagaggttgatttctatatgttgattatctttactagataaaatacaataaatcttgaacatcgttgtcaaatgacctgtttgttctaccttgggaacgtaggaagaaagtgcatcttaccctaaaacagccagtggcagggtgatatataytcctgacgtccggcatgcttcactcattagacggaaatcctcatctagtatttgttttcactcagcctactgagcaaaagatatatgtaacattctggagtccattaagcaaaagctgaagataacaataagacaaaatgatggactaaggtgtagctgccagcttagtgtgattaattcaaagaaatttcttctaaggctattgttcaataatcaatatttataaagttttatcacgggatattgagaacatccttttcaatacatctttaacag

SEQ ID NO: 86796 - DNA, 1825 bp, Homo sapiens
ttaaagttcataatcagttacctttaagtaagagaggatcagcctagattatctgagtgggcctgatccaatcagttgaaaggctttaagagaggaactgagggttccctgataaagacgccattctgcctttggctagaagattcagccccgaagttccagcctgcccttcctgatatccagctctacagatttcagacttgcctatctagctcccacaattacataagccagttccttttaataaatctctcaatatatatctcctactggtttatcttctttggttgaatcttgactgttacagggccccaatgacgtgatgacatgcagatgttccgcactcataaggtactgatatctaatacatattttaatccagcagaactttgtaggtatttaaaaactaacatttcatttaaaaacattttttactttttaaaaagtttctgagacagttatgcccgtatcccaatacttgaagggaaaaaggcactcgcattaatttttttaaatggcatctacttcttatgaagtcatgttgttgattataaaactgggaaagctttttcaagcaattgctgtaaactttacygaacaataaagagattgcaatttaggaaaacttcaagcaagacaaatggtcttagccaatggccattaatggtaggtaccagcatgatgtctcaaaacatcagacagaactgacacaggggttacacatccagagaagaaacagaatttgtcactctaggagaagccaaggaagattcagaatgaatgtggatccatgatcctcccttttcccaaatctcaccagcagcttggcccctgatattccaagattataaaaccaaccctccataaatcccattaccatctgttaaatttttttatttttaatttttgtgggtacatattatgtgtatatatttatgaggtatatgcgatattttgatacaggcatacaatgtgtaatcacattaggataaatagagtatccatcacctcaagcatttattcacagtgttacaaacaatccaatcatacccattaccattttaaagagaatcatagtgggtgaaagaaatgtaagacactaagcatttataccaaagacactgagccataataaagaggttatgtaaactggaaaagactgttaaactataaattaccaagtttctacaattgtttttcttccacattatccagtaaagcaaaatcttgtaaagaagttctgatctaggggccgggcgtggtggctcacccctgtaatctcagcactttgggaggctgaggtgggtggatcacaaggtcaggagatcgagaccatcctggctaacacggtgaaaccctgtctctactaaaaatacaaaaaattagccgaacgtgatggtgggcacctgtagtcccagcggttcgggagactgaggcaggagaatggcgtgaacccgggaggcggaggttgcagtgagccgagatcgcgtcactgcactccaggctgggcgacagagcgagactccgtctcaaaaaaaaaaaaaaaatctgatctattaaaagaggaagttatattttattggcacatttaaggcagtgtaaatacattttcaaccgtgtcataaaagggctcttttaatgaaaggcctgggattcagagtttaaatgatttcccaaaatgtccagaaatatgcctttgattttacaactgtaaaaggagtgagagtaggggagtggttgttgaagatgagttaaggtagaaaaataatggaagggagtacatggcatctattccttttcagacaaactggtctggactgagttt

SEQ ID NO: 86797 - DNA, 561 bp, Homo sapiens
aatatgtataacaaatacaccagaagacctgggttcaagtaggaagctctgccgtttaccagctgtttaatcttgggcaagttacctactcatagtaatcttttattgagcccttactatatgcatctatagactgcaggcatccttttgtgtgataccacaaattatyttattacatgctatcttattagttttattcttattttactccccaacaatgctatgaagtaggttctttgattatccccaactgaggcacagaagaattaacttcccaatgacacaaaggtgaagctgagatttgaattgagtaccctgatcaaaggcccaggggtttgatcattaggctctacttgcttctctaagagttttgatttttctcatctggaaatggaaatcacagtaattaatctctcaggtttggtacaagaattgaaagataagttacatgaaagaagtcattattgtcactattctgttttctcagactcccaaatcaaaagccagaagagtgtttttatttcaaaccattcctttgtcccccaaatccagtctctacca

SEQ ID NO: 86798 - DNA, 773 bp, Homo sapiens
agcactgatgaggccaggcagattagayagaaaaattgaatttagcttgcctgatctagagggtcggacccacatctttaagattcacgctcattcaatgagtgttgaaagatatatcagatttgaattgttagcacgactgtgtccaaatggcactgctgctgagattagaagtgtctgcacagaagctggtatgtttgccatcagagcacggtgaaaaattgctactgagaaggatctcttggagaaggatctcttggaagctgtaagtaaggtcattaagtcttatgccaaattcagtgctactcctcactacatgacatacaactgaactttgaaggctttcaatttaaaacttttaattggaaatcctaaccttatatagacttgttaataaccacttcacaaaaaaaaatggcttcaaaattgaaaaaaagaacagtcttcaagaagtatgggattatgtaaagtgattttaagaagtatggaattatgtaatggtattgtgcaaatctatgaattattggcattcctgagaaaggagaaaacaaacaacctagaaaacatatttgagggaataattcaagaaaattccctaatcttgctacagaggtagacatccagacataagaaatcaagagagcacctgcaagatactatacaaaattaacatcacctttctcaaagagcttaaaacagagctaccatttgaaccatggtctatatacccaaaggaatatagattattataccaaaaagatacatgcacttat

SEQ ID NO: 86799 - DNA, 555 bp, Homo sapiens
tgagactccgtttcaaaaacaaaaacaaaacaaaattgaaataggcatatcccattcaccrttacaacaaaccgtatgtataaataaactaagactaaattaagatgtttaattaagtattataatacgttatagaagaccgtataattactgaacaaaatggtgagctgtatcttgtttaatcatgggaagtgatatggtttggtttttgtctcccaaatctcatctcaaattgtaacccccacatttcaagggagggacctggtgggtggtgactggatcataagggtggttttcctcatgctctgtgatagtgagtgagttctcatgagatctgatggtttatcagtatttggcagttcctccttcgctctctttctcacctgcctccatgtaagacttacctgcttccccttctgccataattttaagttttctgaggcctctccagccgtgaggaactgtgagtcaattaaatagtttttctttataaattacccagtctcaaggaggtttgattcattttaaggaattagctctcatgatatttgggac

SEQ ID NO: 86800 - DNA, 962 bp, Homo sapiens
tgatggcaatgtgaattgataacaacttcgtaggttggtacctatccctctatcatgtgtaggaaggatacatacagaaagacagtcaaacacatttatataaattatcagtgcattgtttgaagaggggaaacaatgtaatcaactatgtcagggccctcttttttttttttttttttttaaagtgttcctcttatctattgaaattacctgagcattctccacttgacggttttctctccagacctgcccttaaggcacamtacaagtactagggcattagcactctgggaagaccccagcagggagaaatggaagtgtgaggatagcatccccagcttcctaacctcagcagtcagtggtctctaacacaccctgttctgatttccttccccttcctcttactttcccataaccttgcagggtccctcccagtgaaccacagaaacaagagtccttgtctaggtatctgcttctcaggaaacacaacataaaatgctggatgtacaggaaacaagcaagagagaagtttctcacagtagtttctgttcctttcaatttcaaatatattactattaaaaattcaaatatcgcatgctaggaattggtttataggactaggcacattaatatcctgagctctaggaactaccttttggaatttgggcatccccctaaaatacggcctaccagttatgtaaaaaaaattttttttgaagtaggttatttccacaaatgactcatttgtcacctacattttttttttttttacatgttagagaagacttatccttcagctttgaggtcaaattttgctgttaccttatgtattgattttatttccctccctgtattttgtaaataaaatgttggtgacagttgcctaatctaacatcaaattgagctatgaagtatttgttataaatttattctagtagccaagctcatctaattaactcttt

SEQ ID NO: 86801 - DNA, 773 bp, Homo sapiens
aatacttttgttatggaaaaaaatattatcagcaaaataaaatcagatactaagtgactaaaaaatgggagggttaccaaaaaaaaaaaaaatcaggtactaagtgactaaaaaatgagagggttacaaaatataatctctctttcaaagcatgattgttcattcttgccttactacttttaagatgatctgctgctcataaaccagatatagaattttgaaatgtttatattggggagatggcatgatggtgttgggcatgacttcaaggaagtacttattcttttggaattcagatggaaagtctaaaggtttagagaacatactgtttttgagcaaagagaagggtattggcagaagaaattttatttgaaagaaaagaaaatttgtagcctttttgtatactaaaagaagctatgtgtcaatgatggcaattttaattaaatccttagtatttatattgttctagtatcagatgctccccataaagcacagagaaatgaatttttccacaaattgagtttagcaagaaagactgtgatcttctttaataagagsgcaaaatgtgaatttattttaaggaattaaaaataaagagtttggctgggtgtggtggctcattcctgtaatcccagcactttgggaggccaaggtaggaggatcacttgaacccaggagtttgagaccagcttggtcaatgtagtgagactatctctattagaaaaaaaaaagttaaaaaaaaaaaaggccgaactcaatctttttataggatc

SEQ ID NO: 86802 - DNA, 674 bp, Homo sapiens
atccttgcctattcccagctgctggtggccactgccaagaccttggcatttcttggcttgcagctgtgtcactccaacccctgcccctgtcatcacatggcattctcccctccatgtctctgtgtcttcacattgtcttcttataaggacaccaagtcataccatataaagagctcaccctactgcagtatgaccttaccttcacttcttccagctgccaagacatgacatccaaataaggtcacattctgaggcactgagggttaggacttcaaagtatcttttttggggacacaattcaacctacaacagtttctatagattcaaaataatagaaaactgcttctgaaataattctgtaatgtagttttgcagtatagtgagaacaaatgtgtttagaattcttcatttttcttcttttcatcacattcttttttcttctgtattaggtctgggtcttaaagttaatttgtcatgagtgytattctactttatttaggaaattttccttcatataaacatttaaatttataagactgtcaccactagtcaagatggaataatagagaccatatttatcctactgcatgaaaacctaaaacaccagacaaaacaaatgaaacatttttttttgaagacattggacatcaaggaacaaaggacaatgatccttg

SEQ ID NO: 86803 - DNA, 544 bp, Homo sapiens
tccagctcggctgagttgagctagctgaaacactccacgaagcagagatgagcaactccctagtgccctgcccaagttgcagacatatgagaaamtaatgagactagtgttgttctaggccactacgtttttgggataacagacaactgaaacattgtatttgatctttttttaatgactctaatgactcatggttatcatgttttgatgaacccaatagatatcagaagatgtgggttcaccatttataatcaggttgcttggctattggtgttcccagttttcccgtgtacaaatcctgacaaccccacagggatgttgtacagatcaagtgacataaaacacattactgtgctttcaaaactattctatatatctgagcctattcactgttagcatatttcccttgactccagattctaatttcttatctattactacctatataaaagaaaattttggagccaaacaggtaacttaatttttttcatcaatatacttgattttctatataattttaagttggtaagccacagtcaccacc

SEQ ID NO: 86804 - DNA, 1076 bp, Homo sapiens
tagcttcagttattcaattttgctcaaattacagtggactactagtgaattgtcactatagatattcataggcttcatataaaatattggccatgttcctatatgattctggttgctccagaggtcttggattcataattacctgagcgtttctaacatgtattaacatgaagcatcaattgtttctggtaaatgaggaataagtggtttttgttcagaattgctctctgtagattctctgctagtattataatcctctttgattgaggtaaaaataacctggatgactaaaggtaaatttttccacaaaggagaattaatgcactgtctgttttctgtagaattatgacagattttatgcctttgttaaatcctaagattagttggtataactactttcaatgctctggcctattttctttgttgctaaaatgaaaatagatcagaaacaccttttgaggcctctggatttataatttaagaattaactctgagaaagtagtaggtgaataaatagagttataatctaagacaacgttacattccttgtgtgagtctcacatctaagacccggcagtactttcttcctctgtgcattctcacgaatacccacacactgtaagcatagtttctaagattccataattatgaatcctaacaataagaatgactcagaatgcagaatattacaatgcagactctgtcctgtcaggtaaagtaaggaaaggtaaatactgcttaccgatacacattattaaatggtctgttctaatttctaattgtaacttcttggtttcaatattagacatacatagaaagttctgcctaagtaacttgaggctgattccctgtggcacaggtccttactaatagrtggtggttttagaatttgcattaagtctttctatctagttcatttcaacaaatatttaccgaatatccactctagtcgaggcactgtgctaccatatgggaacataaagatgactaggacaatccctatcctgcaggagtgtacaattacaaagcagagatgtgttgattgttatgattaatataaagtatagcagggttcc

SEQ ID NO: 86805 - DNA, 1275 bp, Homo sapiens
tctacattttttacataaaataaaataaacttaaggctgaagaagcaatcagataagcatttacctcagatgagcgaagtgaagactttgagttctgtcctttgtcctgtatttgtgaagacaagctatcaatgtacatggtcagggtaaaattcaacataactgtctcaggataaagatcttggggcccacaaggaatttgctcttgggaaaattatgagggagctatgtagctttttcatgtttttagccatcttagaaacaaaatgggaggcaggttgcatgacgcagttcccagtttaaattttccttttgactgagggagtttggaatcctgagatttattttcctttcacatattttgctcaatttattcatgaactgtgattttattcaaaattattttattttcaaattcattgcattcaaataatcataaaatgtgtacctgcattaaatgaggcagtgttgttctttttcttccttcatttacaaaagcttttttccacttttttcattgaataaaaaagaaacttagttatggctaggataaataatgtaatatgtgactattttgccagttatgtttcttctactgtgaatagcctatgccataaataacccatttttcaaatgagcaggcatttcttctattattagtttgcatgagctctttaaatatatcttatgtagcaattttcagttggttagatacatgagtttatccctagcttttctaatagcactatttccaatgttacacacacacacacacacacacacacacacacayacagcactcacttataagttgagtgaactccaggtaagataaaccaaagaattccatgccaagagacatttacaaatcttgaagagccagagaaaacccacaccgtacctttagagataaataatacaaatggcagtagatttcttatcagaaaccatggagtcctgaaacaagtggcacaatgcaatgctgaaagaaaaggccttttaattgagcatcctagacccagtgaaaatgtcctcccagattgaaggggaaatcaagccattctcagatgagaaaacattaatttgttattatcaaacctaccataaataatggctaaagaaatttgttctctaaacaaaggaaatgacgttccaaaaatcttggaacatctgaaagaaagaaacaatacagtaagcaaaacttttgtaaatacagtaggatttgttgagttttctaaaatatgtttgatggtagaagaaaaaattataactttg

SEQ ID NO: 86806 - DNA, 505 bp, Homo sapiens
cattattaacaaaattattgtattcaactaattttaaaaacaattttacaattaagaaatcctagtgatgtaacacttatgaaatgtatggcactcacttggtaactaaacatggtgatacatccaaatatgtgcacactctcggaaccaatgtgtttataactaaaatgatagtagaatattgtcacatgaagtattaagaaaagattttcactgctattaatacctttgtgtaaacaaactccctttacttctaaaaattaataatggttaccawtcattaaatgctttcattttacaaattgggaaactaaggaggggaagaccccttaggaagccattaagataggtgggagaggattaggacctgggtaaagtattggtagagggtagaaaactgaatcaagataattgggaagtagaattgacagactttactgattgataatgggaagtgagagggagaagttgaagacgccgtttaggtttctggcttgaatgagta

SEQ ID NO: 86807 - DNA, 1141 bp, Homo sapiens
gctggccccatcctcacctgcaatcgtagagcctaattgtatcktattactggggacgtgggctgtcagtctccacggtggtctgactgcaggaggccccagcttaggttttaccttgggccagtgagtatgtcggggcaattttatctcctgtaatttagaggtgatctgccctgagatttggaagctcatgggagttattattttcttacattggcctgaggaaactgcttggtaagtgagctttcccctgcaagataactgatggcaaatatgtcagtctcatttgtatcatctcagttgacatctgtggcaccagggttgaagatggtacccatctctagttttcagtggtgagagagcattttctttccacatcagtgagacacgtgggtaaagaacttggagaaggatagagatcaagatggcatgttcttagtctgcactatgctcacatttccctgataataagaattgtggagtgagagccgcttaggcatactacattcaatgtaacaatccattttatgcaaacaatcagaatttagaaagaggactaccttttttcccttactaggtaatagtcctttcccattcagaaaggattgataccagtcaaattgttctgcaggtaaatgaggttagaaagaaaattttctagaatttggaggtgtaataaaatgtaacatggcagtgttcactatatagaaaaaaaataaatttttcaagaaagaacttcttaacagtcatatttcatggaaacatgtaagagccatatcaaaaactaaacattctagttagaggcctgacactacctgacttcaataattattatagagctataataattaagacagcatggcatgggccaataaatagaccaatagatcaatggaacaaaatagagaacacagaaatacatactcaactgatttttgacaaaggaacaagggtaattcaatggaaaaagagaattcctgcaataaatggtactggacatccacatgcaaaaaaaaaaaaaaaaaaagaacctagacacagaccttgcacatttcacaaaaattaactcagatgaattatacaattgtccctcagtaaacactggagattgggtccaggatctccccacccccaccccatg

SEQ ID NO: 86808 - DNA, 1141 bp, Homo sapiens
gctggccccatcctcacctgcaatcgtagagcctaattgtatcgtattactggggacgtgggctgtcagtctccacggtggtctgactgcaggaggccccagcttaggttttaccttgggccagtgagtatgtcggggcaattttatctcctgtaatttagaggtgatctgccctgagatttggaagctcatgggagttattattttcttacattggcctgaggaaactgcttggtaagtgagctttcccctgcaagataactgatggcaaatatgtcagtctcatttgtatcatctcagttgacatctgtggcaccagggttgaagatggtacccatctctagttttcagtggtgagagagcattttctttccacatcagtgagacacgtgggtaaagaacttggagaasgatagagatcaagatggcatgttcttagtctgcactatgctcacatttccctgataataagaattgtggagtgagagccgcttaggcatactacattcaatgtaacaatccattttatgcaaacaatcagaatttagaaagaggactaccttttttcccttactaggtaatagtcctttcccattcagaaaggattgataccagtcaaattgttctgcaggtaaatgaggttagaaagaaaattttctagaatttggaggtgtaataaaatgtaacatggcagtgttcactatatagaaaaaaaataaatttttcaagaaagaacttcttaacagtcatatttcatggaaacatgtaagagccatatcaaaaactaaacattctagttagaggcctgacactacctgacttcaataattattatagagctataataattaagacagcatggcatgggccaataaatagaccaatagatcaatggaacaaaatagagaacacagaaatacatactcaactgatttttgacaaaggaacaagggtaattcaatggaaaaagagaattcctgcaataaatggtactggacatccacatgcaaaaaaaaaaaaaaaaaaagaacctagacacagaccttgcacatttcacaaaaattaactcagatgaattatacaattgtccctcagtaaacactggagattgggtccaggatctccccacccccaccccatg

SEQ ID NO: 86809 - DNA, 1141 bp, Homo sapiens
gctggccccatcctcacctgcaatcgtagagcctaattgtatcgtattactggggacgtgggctgtcagtctccacggtggtctgactgcaggaggccccagcttaggttttaccttgggccagtgagtatgtcggggcaattttatctcctgtaatttagaggtgatctgccctgagatttggaagctcatgggagttattattttcttacattggcctgaggaaactgcttggtaagtgagctttcccctgcaagataactgatggcaaatatgtcagtctcatttgtatcatctcagttgacatctgtggcaccagggttgaagatggtacccatctctagttttcagtggtgagagagcattttctttccacatcagtgagacacgtgggtaaagaacttggagaaggatagagatcaagatggcatgttcttagtctgcactatgctcacatttccctgataataagaattgtggagtgagagccgcttaggcatactacattcaatgtaacaatccattttatgcaaacaatcagaatttagaaagaggactaccttttttcccttactaggtaatagtcctttcccattcagaaaggattgataccagtcaaattgttctgcaggtaaatgaggttagaaagaaaattttctagaatttggaggtgtaataaaatgtaacatggcagtgttcactatatagaaaaaaaataaatttttcaagaaagaacttcttaacagtcatatttcatggaaacatgtaagagccatatcaaaaactaaacattctagttagaggcctgacactacctgacttcaatrattattatagagctataataattaagacagcatggcatgggccaataaatagaccaatagatcaatggaacaaaatagagaacacagaaatacatactcaactgatttttgacaaaggaacaagggtaattcaatggaaaaagagaattcctgcaataaatggtactggacatccacatgcaaaaaaaaaaaaaaaaaaagaacctagacacagaccttgcacatttcacaaaaattaactcagatgaattatacaattgtccctcagtaaacactggagattgggtccaggatctccccacccccaccccatg

SEQ ID NO: 86810 - DNA, 712 bp, Homo sapiens
acacatatattataaaaattatgagatatcaattgtaaatgacttatacctagattttaaacatattaaagattggaatggtgttttattcaccattttatatagctggcacagacaagttcaaacactattgttattaaatattaggtaacactgaatgagatatagattttaaaaaagcaactaaaaattaaaaactatacttagatgctgccctactcaagaatttatcacaaaaatgcaaaaatgataaggctatggtagctgctattcagcatcctttccccactgggggtccaatctttttctacrgctactgagtagtgctagtttccacattccacaatgtaattaagatttagtgatacaggaggtcttatatctattttatagagcaatttcatcagaagcaattggccatttgaaataaccaactatagattttttctatattagacttatttttaattagaatgtaacttatgattgccctgaaaaatcgaaccaaaatttagaactgtataaagaaaaaaataacctttcaaagtttaatatatatttgccaactatggcttattgttttccataccatccgggtaatgttttaggagatctcccagactgggcagtgacagaggcaagaggagatgagtgaatacaggagtggttgctgaggtgaggcatctgcgtactagaagctatggaactcagg

SEQ ID NO: 86811 - DNA, 712 bp, Homo sapiens
acacatatattataaaaattatgagatatcaattgtaaatgacttatacctagattttaaacatattaaagattggaatggtgttttattcaccattttatatagctggcacagacaagttcaaacactattgttattaaatattaggtaacactgaatgagatatagattttaaaaaagcaactaaaaattaaaaactatacttagatgctgccctactcaagaatttatcacaaaaatgcaaaaatgataaggctatggtagctgctattcagcatcctttccccactgggggtccaatctttttctacagctactgagtagtgctagtttccacattccacaatgtaattaagatttagtgatacaggaggtcttatatctattttatagagcaatttcatcagaagcaattggccatttgaaataaccaactatagattttttctatattagacttatttttaattagaatgtaacttatgaktgccctgaaaaatcgaaccaaaatttagaactgtataaagaaaaaaataacctttcaaagtttaatatatatttgccaactatggcttattgttttccataccatccgggtaatgttttaggagatctcccagactgggcagtgacagaggcaagaggagatgagtgaatacaggagtggttgctgaggtgaggcatctgcgtactagaagctatggaactcagg

SEQ ID NO: 86812 - DNA, 1651 bp, Homo sapiens
atattttacagttttcattataggcatcttttactactttggttaagtttatttctaggtaacttatttgtagctattgtaaatgagattagtttcttgattttttttgtttgtttgttttttgttttttttcagattgaccactgctggcatatagaaatgctactgatttttgaatgttgatattgtgttctacaactttactgaacttatcagttcaattagttttttggtggtgtctttaggtttgtctaaatataagattatattatctgcaaacaaggttaatttgacttcctcctttccaatttagatactctttatttacttatcttctctaattgccctggcaaggatatccagtactatgtcaaataagtgttgaaagtgggcattcttgttttattccagattttagaagaaaggctttcaatttttcatggggaaaatcatgtagaatatgatcagaaggtgacattggtaaaaatgactggaacartgtatatattgtgagctgataaatacttattaaattttccttgtctctcctccaaagaaacagagccactttagtaagaatcccaaaatctgccaataaaattacttggattttttccttcctcatgagcaatataattttaaaaagattatatttaaaaaagactaatatcctccctcatgagcaatatatttaaaaaagattttaaacatagtgggtattcagaaggtgttacataactgaaatagactttatcattcaggtcattaaactatctcctaccacattgctgtttttctgaccctaaacagctctgttttgggaatagtgcaaatggttgacactttaggacacttgttatttgttagatactttcacaaaattgagtttgacagtagagagaagaagagattatttaaaagtaattaaatgtaaatgtttggtggtatgatctgttagatcttggaaatgtctaagagttctttgccacctacctatattactaagggcttctttgaggattttgtgatgtgtaatagctgttgtccataggattattcaccagcaaatagtttaagatttgaatgtagatatataatctgatacttaatcagtgaaaataggcaatggctattaatatttaaagctataattgatttttagatttttttgtctgtacagtgacaaactatttgaacagaaaaagttaaaagtcgaaaattgtgagctttgtttaaatagtgccaattatacaaacttttcaccatttccaaataatgattggatatattcacttttctttgtgtgattggcattgtttgagttccagtggtagtcatgcttaaaactgcttgacataatgggctttcttctattggaatattttgtattagtttaaccttgctttgtgggatttacagtttattgaataagaacagaatatgattatttctttttaataaaatatgaaaaataaacatgggaatacattgcttttaagaagtaaatgtaaaatcaaatgactttaaacctagtacagttctctagtgacatttgtaataacttgcctaaggcattaattctaatcactttgtcattatttgcagttttattttaagcaagttttatattaattccccttactgttttagt

SEQ ID NO: 86813 - DNA, 1351 bp, Homo sapiens
aagggagtagttattgttaaatacatgttgtagtatttgtaaattgtcagctctcttattttctttctcagaaatatttccccatggtgtctcaaagtttccaaacttgcctgatcatgaagttcttctgagaaactctttaaaatggacgttcagagcccctcccctggagaggctgatgcatctgggtgggggaagaaattcatatatctaactgtttccccaggtggttcttatgatcaggcaggaataggaaaaagcgcatcagctgatctgcccattttgctgattgggggaatgtgtattcatgcaagtcaaccaccaaaattacattttgtctaagtcacagcgtgctcaaattcagtaattgttccctcagacttagcagtgggttgaagcctgcagggctgaaaagttaattacagtgaaggttgagaaggtaacttggccacacagccctttgtggcaggattatatttcacagagttaatctctgtgttttcagagtaattccttccctcactgtttctcactcatgcactgaggggctcttttcttccctcccacactcttccctccttccttccctccatccagccaacaccaaagcagaaacaaagactgaaagaagcttcggcttcagtgtcagacaatagggctggaagatatacttgccaagatagggtcggcctagaaggaagtaagtaaggagaaaacagaaactaaagggagataagaggacagagtggcaggcgaggggccacagaataggaagggaggggagaacttctatctcaggactaggaagtggggattcagcactgatctggagtataggtactctgctgacctgctgtctaatagtccttccacttaggaggagagatgactcaacactttgtgcagagatgacactgtgatggaaggacatcacccttgatttgcatggcctgttgagaaccgatctttgagaactgaagtgtacagttgaaacataagctcagaaaactaaatccttaccttttggcaaaaattttttagcccctttgataatatcttcatcattattgagtcaagctcatttctctcttctttctacactaaggccagaccataaaagcacatataagtatgtccaaagcttttgaatttgtcaattcttatttctaatgaaaaataataaatgtcattctcatgmcccagttacattagtgaagacaggcaaactcctaacaatcccaaagtttctgtggcttgacccaataaaggtttacttcttgattgctaggttctagccactagacctggagatttttctattacattgatcaagtaacccttttataaggta

SEQ ID NO: 86814 - DNA, 1054 bp, Homo sapiens
aagttggaaagactgtacctagatggttaacagttaacagtaatcatctttggggagggactggaaaagggtgtgtttgaaaggagattttcactctacactcaccacatatttatgcaagcagtatgtattcctatgtcacttatgtaagtgatgtggtmtttttaaagtcaaaagttgaaattaacatattgtgcaggtttatttcatataggtaatgggtctaagtactgtctaactttgttataatcagatattagtgaacccctgtgaaacacaaactttttttgaaactgttagaacccagcattgataatagagccagatgagaaaactgtttttctagatttttcttttttctgtagctaaaagaggaagaaagaaaagaggaaggaaagaaggaaggaaggtccaatttccttttccctaaaattttaaacaggctaatttttaaaacaaacaaacaaaaagtacctcaataactctatcagtttctgattataggaagtgagttcaccacaaatgaatattgattattatattgttgtccgtttgtattatttttccttttcaaaaaagcaacttttatggatagcataattttacggagaaacttttatatcaatatcttgctggcaaaagttaagaattactagcaatggtttcatttgaattcttttttaaacacagaatcagcatcaggtttcacatgcttacaaaaagactaagaaaacccccaataactccaaaaggcaatgtggataacttcctttgaaaataattaatgataattgtaaacattgctttcctggatattctgccattatgttggcccttcctcacacgttaccactagaatctttaggagcatcttcttgccaacataaactgtgtgaaaactttacaaacacagctgggaagaatagaccaatgacctctgtatgacttcttggcagctttgcaagtcagaggcctaatttgaagtgtggaattggtggtttgaccagttttggctaacactgggtccacatgtcagagagatgcagcagctccc

SEQ ID NO: 86815 - DNA, 1778 bp, Homo sapiens
atagtaataattttcatatttattatctattctaatattcagttagattgctgtaatgtaacattcaatacatctaaggtactgcttttaaaaaataaataatgcttgccttggactgaagggactgagtcaataggagaaagaatcagaagatttgtactaaccttttctaaaaccagacaagaaccctagacaattgtcgtcaggcttttcccagttgttttctactggcacaaaccaacaatgtttattcaaataagcatatctgattctactttggcaatccatacacattgtcctttttcaactccaaaggatcatctgtgatttttgctgcttgtagtttattctctaattcactagttaaatcctttttcagagatacataagcagattaggaaacttaactgtcatgtgagaaattaycttaatacaatggtagtcttcaagctaccccagagatgctcacagactaaactaagatgcttgaatcattcagtttattaaatcaattagaaacacagaaagaagaaagagaagtgggaggttaacacatcaagtctaaaaggcaagcagggcagaaagaccacagaaactaaattttcttttaatccatgtttatatgatctgcctcctctgctgcattaggattccttattgatcttggagtaatgaggaccagagtgggtttataaagaccagagttaaaggtaagcaagagggcttagcaaatggaaagtgttcagagttaacaatatacacaattgctctagcaaacagacatagggataagtagtgtccacagctgttgttcaccatctggcttcatgagatgctatcaattttatttgtacttttggccagaatgtgtgtcaacctggatggttattataaggtgtcagaaatgctgagtgcttaatatgtctaatgtatcattatatcataaatactaggtgccttttggtccttcaatccttgcttctttatctatggtccatgtcccatatattaatgtctggcttatctgtgttaactcacgtaaggacttctgaccatgtcttaaaagccacttgcttattcattatttatacctatacatttggtaagtttcacctatatcttacaaacaactaatttattcattatctatgtttaacatggattttaagttttattcatcctattttttcttgtattccataacaaaatgaaatatttcaagttaatgcattaaatgcacattataataattaatggaaaatgtcacttaaatatgattaactatgtctaaagcattacatgtattatacttgtaatagaacttacttcaggattttatctgatgaatacaaatgagatcacattaaatagtgataagctgcattttactagctaatgctctcatcatgctaatacaggacctcgtcctatccaaattttctgacaggtaatttgggtggccctcagagttcctcaggtaaactcataaatagtctgcttcatctgagtattgtgcttctctggtggataaaatgtactcatgtgtttcaggtatgcaacacacttactctttagaaggtgtatgagccaccaacacagatacttatattctattgtcatttagcatttattttaaattctcttcatccatctctctgtggttcttagatatgagtccagtgtggaagctaggtaaaagcagatctcaatgattctgagtcattctaagaatagtacagtgtctggggtagccttaccagatcaaacccaatcttgaa

SEQ ID NO: 86816 - DNA, 952 bp, Homo sapiens
tacacctgtgtaacgcaaatccctgtcaagatatagaatgttacaatcacctagaaagtttcattgcctatttctcactttctgccttgtcctgccacagcagacattcttccagtttttctatcatcgacaagatttacctgcgctagaactgcatatgagtggactcataaaatgtgtactcggcatgtaaagcttttttcactcagcattattttttgagcttcgtccatattgtttgtgtataggtggctcattcctttgtactgctgaatcctactccagtgtttaaatgcaccacagtttatccagtctcctgctgagggacacctgggctgggaaaggtgtaatgtgcacgtgtaatgttttcttaaatcatcaacatcacaacagggaatctcctgggtggtagattttggagaccaacttttctacttacatgctttctaggtcttctacaattaaccttcaataattaacaaataatttaccgttttgaattacyagactgcatgtggtatactgtaaggagctgataacagtcaacattgagctataagccgagtctccttccctgaaatcactgggaagaacaaaaatgtaatgcttggctggaagagccaccacagatgaccgtctccccacagaagcctgtaaagccaccaaagtgctatctgtggaaaaacatcttgtgaaaaactcttttctaaacaaagactcagactggagccctgtgcctggattagaaagccacctcgtaaaatctcccaaagctattttttctctttcttacaaagatggtgaattgaccttttcttgtttcctagggagaacaggatgaaaaaagaaataaagtattttactaaaggtgattgagaataaataatgaagaggggaagcgggaaatctaagcttgtatgaaagggcaaaaaaattaatgcccactaaatgc

SEQ ID NO: 86817 - DNA, 1032 bp, Homo sapiens
taacttggcttggatagaccagagaagatgtcacagaggaaatgctggggctggatcttcaaggaagaattgggagtcacaggaagatgagagaaaaaaaagagctttttagagagggagcaacgtatagaccattcaacaatgctgggttgagtgatgtgagggaaacgaaaatttgttgaagactgcagtagagaggagaaaagacttccaggtttcagaacgttccatgagagtgccaagatgtagtttctgttttgtatctgccacagtgacaatttcccaggaatccttatagatccagaaaacatgaatgattattaatactaacgaatagaagaaaagttgagtggctagtttgtgagatcttcctcagagaatatccctggaaacagatacactttgagcaggatttcttaggtattaaaagcacaatcccactgtgtggatttcgccaccacatatccttggtctttgatttaagckattctcaatattctccagcaggtttcataagtgtcttgggtcagttgcttttttcctccataaatcttcctttctagccccctttcacatccttcactaccttcagctgcagttcagaagacctagactcctgatttaggacaaaaatagaggctttctggctggggatccttcagcttcctgccctacactgccgagcatgtctggaaactgcccactgtctctctcctcccctccagcttcaatagaaaagatattcatgctgttaatggctaatcactctactgtgctttgaatctgtctctttctaatttctcagatgcctcctcccgtccatcatcccctctcctgtgtatctttaacgtctcactggctgcttatttcagagcaccatcccaccctgccacatcctactgcctgtaacctccattgcttctttccagcccaataatacttctagagcaaatctgaccacttccctgcttgaactccccagttgctttctgttatatttagaaaaaacaaaaaatgcaaacttcctacctt

SEQ ID NO: 86818 - DNA, 1032 bp, Homo sapiens
taacttggcttggatagaccagagaagatgtcacagaggaaatgctggggctggatcttcaaggaagaattgggagtcacaggaagatgagagaaaaaaaagagctttttagagagggagcaacgtatagaccattcaacaatgctgggttgagtgatgtgagggaaacgaaaatttgttgaagactgcagtagagaggagaaaagacttccaggtttcagaacgttccatgagagtgccaagatgtagtttctgttttgtatctgccacagtgacaatttcccaggaatccttatagatccagaaaacatgaatgattattaatactaacgaatagaagaaaagttgagtggctagtttgtgagatcttcctcagagaatatccctggaaacagatacactttgagcaggatttcttaggtattaaaagcacaatcccactgtgtggatttcgccaccacatatccttggtctttgatttaagctattctcaatattctccagcaggtttcataagtgtcttgggtcagttgcttttttcctccataaatcttcctttctagccccctttcacatccttcactaccttcagctgcagttcagaagacctagactcctgatttaggacaaaaatagaggctttctggctggggatccttcagcttcctgccctacactgccgagcatgtctggaaactgcccactgtctctctcctcccctccagcttcartagaaaagatattcatgctgttaatggctaatcactctactgtgctttgaatctgtctctttctaatttctcagatgcctcctcccgtccatcatcccctctcctgtgtatctttaacgtctcactggctgcttatttcagagcaccatcccaccctgccacatcctactgcctgtaacctccattgcttctttccagcccaataatacttctagagcaaatctgaccacttccctgcttgaactccccagttgctttctgttatatttagaaaaaacaaaaaatgcaaacttcctacctt

SEQ ID NO: 86819 - DNA, 1676 bp, Homo sapiens
tttggaggggaatgcatagatatctttgcttacctgctagtctgcctgcataactgaaaaaggcagaactgggacaatgggtgaaggttagaggacgtcacattgaggtttgacataaggatttcttcttaaaatttagaaccatgcagtgaagaaaggggctgcctcccmccgctgggcatgctccatccctggacttggttcaagcagagtccctaagccagtctgatcagtgtgttgcagtggggatgcctgcactgagacagagggaggcaggcctgcatgacctacaaactcccttgcagttccatgaagctgtggtttacttacatcatgtcttaaacctgaggagccttttataacagctactttgatttggaactggaatcccaagattcctcccagcaagttgcaagatttttaaaaaattattttttcgtttctatctatccaggagtctcatttgccattgtgcacattgacatccctgccacattaagacaaatgtctggaaccaatatatctagacatctctaggtgacatccacatagaattctaacagtgagtcagaggctgggccattgattgaagtcactcaagaagcttaaagtcagactaggatgagagtcttcagggtcttcatcctggttactactgtctccggaaatgggacctgggataaaggtcactaaggaatgatggatccaacaatagcaaatgtgtccccaaattccctcttccaatgcccttcacgttgttgagattggaacaaggcctttcttatacaatttattgtttgaaaactctaccagcaaattgtctagctcagcgttactcagatattaacgtgcataggaatcacccggggatctgcaaaaatgcagattctgatttaggaggtctcaggtggggcctgagattctgcatctccaataagctcccaggagatgccagtgctgtttcaagcatcacactttgaagagcaaagaaccacaggcaaggctgtggggcaggtcaggctgcatgatgctggattccatggggtgattgctatgaaggcccaaagctagtcagaccgtccccaaaactgaccagagaccccacttccaaggaaatcctatgaaaaacaggagatagcccgctataggctattgattatttttagttttttaagagggggaatgtgcagagaagagcgagtagcaggaaggagtccctggggaggacactgagtgactcctgtgctgattattttaggaggagaagctgaggaaaagtatctgcatctcagaaggagataattactttccacttagctcttcagtttttcaggaagtttgcaaggagggcaagtaattagtctcttgggaggtgaaagagacaagttctcaggatgaaaaacttttccctgctggtctttacagcagaatcagaagtatctgcccacttttggcaaggcccacaaatgcaaaaatgtactgtgggggttgaaaaagaaaaagagctatgttagagatcaagctaaatggcagagacagtaagacagtggtgcctccaagctctgtgtcctggaaggcttcccctgaaaccattcttcatagtcttggccctgtggggtggctcccacactgtgacaccacactgcaagttatgagcagggcctctcctctaggga

SEQ ID NO: 86820 - DNA, 913 bp, Homo sapiens
ccgtaactggaagagccataactgaatctgatagagaggatagttcatcttctgggtaactggtcatctgaactttgagttagatactgtgactggaaacactttgtattgcttgggagtcattaagggctttaagtggctgtgaatgagtaaaatgagttaagtgaatctttaawgaagagtaaaatggactgtagtgaaggcacctgtaagtgtcacacaatctttatcttcttccttcagcccacataattagattgtattttctgggctttttttttttcttttttatctaggtgtggtaatgccactgaattctaatcaatgaaatgtgaagagatagatgtgcattgcttctaggtcagtcccatccattaaaatctccaatacgtgatcccccattctcacttattattccctctccatcaataatacatctttctatgtggttctatataatggtggagcaacaggatgccaggaacctggtctctgaatcattgctgtaaagatagccatgtggccgggcgaggtggctcacacctgtaatcccagcattttgggaggccgaggcgggtggatcatctgaggtcaggagttcaagactagccttgccataatggtgaaactgtctctaccaaaaaattaaccaggtgtggtggtacagggctttaatcccggatactcaagtggcagatgcaggagaattgcttgaacccaggaggcagaggttgcagtgagctgagattgtgccaccacactcccgcctgggtgacagagtgagactctgtctcaaaacaaacaaacaaacaaacaaacaaacaaaaacaaaccagatagccatgcaggagttccatgtaaccagaatcactggaaataaactgttacataagcaattaaaggaacactctgg

SEQ ID NO: 86821 - DNA, 913 bp, Homo sapiens
ccgtaactggaagagccataactgaatctgatagagaggatagttcatcttctgggtaactggtcatctgaactttgagttagatactgtgactggaaacactttgtattgcttgggagtcattaagggctttaagtggctgtgaatgagtaaaatgagttaagtgaatctttaatgaagagtaaaatggactgtagtgaaggcacctgtaagtgtcacacaatctttatcttcttccttcagcccacataattagattgtattttctgggctttttttttttcttttttatctaggtgtggtaatgccactgaattctaatcaatgaaatgtgaagrgatagatgtgcattgcttctaggtcagtcccatccattaaaatctccaatacgtgatcccccattctcacttattattccctctccatcaataatacatctttctatgtggttctatataatggtggagcaacaggatgccaggaacctggtctctgaatcattgctgtaaagatagccatgtggccgggcgaggtggctcacacctgtaatcccagcattttgggaggccgaggcgggtggatcatctgaggtcaggagttcaagactagccttgccataatggtgaaactgtctctaccaaaaaattaaccaggtgtggtggtacagggctttaatcccggatactcaagtggcagatgcaggagaattgcttgaacccaggaggcagaggttgcagtgagctgagattgtgccaccacactcccgcctgggtgacagagtgagactctgtctcaaaacaaacaaacaaacaaacaaacaaacaaaaacaaaccagatagccatgcaggagttccatgtaaccagaatcactggaaataaactgttacataagcaattaaaggaacactctgg

SEQ ID NO: 86822 - DNA, 913 bp, Homo sapiens
ccgtaactggaagagccataactgaatctgatagagaggatagttcatcttctgggtaactggtcatctgaactttgagttagatactgtgactggaaacactttgtattgcttgggagtcattaagggctttaagtggctgtgaatgagtaaaatgagttaagtgaatctttaatgaagagtaaaatggactgtagtgaaggcacctgtaagtgtcacacaatctttatcttcttccttcagcccacataattagattgtattttctgggctttttttttttcttttttatctaggtgtggtaatgccactgaattctaatcaatgaaatgtgaagagatagatgtgcattgcttctaggtcagtcccatccattaaaatctccaatacgtgatcccccattctcacttattattccctctccatcaataatacatctttctatgtggttctatataatggtggagcaacaggatgccaggaacctggtctctgaatcattgctgtaaagatagccatgtggccgggcgaggtggctcacacctgtaatcccagcattttgggaggccgaggygggtggatcatctgaggtcaggagttcaagactagccttgccataatggtgaaactgtctctaccaaaaaattaaccaggtgtggtggtacagggctttaatcccggatactcaagtggcagatgcaggagaattgcttgaacccaggaggcagaggttgcagtgagctgagattgtgccaccacactcccgcctgggtgacagagtgagactctgtctcaaaacaaacaaacaaacaaacaaacaaacaaaaacaaaccagatagccatgcaggagttccatgtaaccagaatcactggaaataaactgttacataagcaattaaaggaacactctgg

SEQ ID NO: 86823 - DNA, 913 bp, Homo sapiens
ccgtaactggaagagccataactgaatctgatagagaggatagttcatcttctgggtaactggtcatctgaactttgagttagatactgtgactggaaacactttgtattgcttgggagtcattaagggctttaagtggctgtgaatgagtaaaatgagttaagtgaatctttaatgaagagtaaaatggactgtagtgaaggcacctgtaagtgtcacacaatctttatcttcttccttcagcccacataattagattgtattttctgggctttttttttttcttttttatctaggtgtggtaatgccactgaattctaatcaatgaaatgtgaagagatagatgtgcattgcttctaggtcagtcccatccattaaaatctccaatacgtgatcccccattctcacttattattccctctccatcaataatacatctttctatgtggttctatataatggtggagcaacaggatgccaggaacctggtctctgaatcattgctgtaaagatagccatgtggccgggcgaggtggctcacacctgtaatcccagcattttgggaggccgaggcgggtggatcatctgaggtcaggagttcaagactagccttgccataatggtgaaactgtctctaccaaaaaattaaccaggtgtggtggtacakggctttaatcccggatactcaagtggcagatgcaggagaattgcttgaacccaggaggcagaggttgcagtgagctgagattgtgccaccacactcccgcctgggtgacagagtgagactctgtctcaaaacaaacaaacaaacaaacaaacaaacaaaaacaaaccagatagccatgcaggagttccatgtaaccagaatcactggaaataaactgttacataagcaattaaaggaacactctgg

SEQ ID NO: 86824 - DNA, 1260 bp, Homo sapiens
tggaactttatcaagcaaaaggggcttgctgctgaatacgctagaagccaatactataccaggtttttgaggacagaaaagctttatattgaaagtccactcccgaggagacaggagtcaagctccaagctgtctccctgtgctggcttcaagactatattttcattagaaaagattcaggggttggattctgagattatcaggttttattggtggaaggaaaggagaggtctggaaagtccttgggcatgcacagttaccttttttatgctaactcatttgcatgtgcagattctggagggagttggtatgagacatgcaatgaaaattcaggctatgatgtcagcaagctacttcygcacaaactccagttgaccaaactgatttcagccagttcttttatctcataagtggagggagtttcagtgttttagcaagttgtttcctttcttatccaccattctgcaaactcaagaatttctgttagtcactggttgctttaactctttgggacatggtttcagaacttctcccaaattgggtaattagaagctatttaaccaaatgccagaaagagaggaaaaaaagaaccataattttgttagcttaagttctcagacctttgagcagtgttagtgtttaaatattcctttttggcacgatcaacattatggtgcttttaccatccaatagcaacaaaggaggataagattaaggctcaaaccaagatcaacagaagatcacatctaatgctagccaaacacagctggcattatgatcttggttctcaccatccagtcatgtctagaattgctaattaaaaataacattcctaaactataaaaggattcatgatataattaaaccatttaataatatcttcttagtatattcttacctactaaacacgcttttaaataatcatctttaagtgaatttcataaagctatataatggaaaagatgagtcatgacttcataattcgtaatattattgggagagtagcaaattttcagtgtctcacttaaagtacgttgaaaatatcacaagaatttctgcaggctgttgctccttcctaaggctgcaagtccaaatgaaaactctgtgtcagacacatttaggggttttataaagctgtacactatgcagactctgggcatagaattcccagcataggctcggcttcttccttctcttttcagttgtgtcataaatcactcattgtcatcagttgagtattcctatgcacagagtggttcc

SEQ ID NO: 86825 - DNA, 799 bp, Homo sapiens
caggatttctgtttcaggtgatcaaaatgtgcccaattttattttgatgatattggcacaactctgaatctagttaaaaaacattgaattgtacactttaagtaggtgaattttatggtattatatttcaataaagctgttaaagaaaagtggctaacattaggttccatgaaaccagcagtactattcaagctttttaaaactaccaaataaaataaattgagataatatcttaacatttatgtaccactgctcattttgttcttaagttaggaaatgtccttcaagctacagcataaaatttgcagagaggcaccctgggctgccattagttctgtgtttgaaacttcagggaacgctatcctgaagaggtcaacgtctccactgacgtcccagcwgcctcctgacaagttgtgctgtgaccgtcttccactcccatcttggacggcccagatgtgggctgtgaagccaccctcttctgtctgcacttcacgcttgcttcccctccatctgctgggtccagctcacctcataaccaagagtctaatgctgatggctcccgggaaccaccactttcttggcaagaaggatccatgcagtgtttctcatcaaggagtaaggggcgtgcttctgcatttctgttcacatcgtctttcttcctacctttctattgctttttcttgtttttgcctgcattccttttatttgcctatcatattttcttcttattttttgtttactttaatattagctcaaactccagtttcattatgaggctttccttggttactgtagtgta

SEQ ID NO: 86826 - DNA, 585 bp, Homo sapiens
gaggctcactcagcatgctgcacaggtgcagaggtgtccaggagcctcagctggtgcatggtggtcactgctgagccatgactatactgctgatgctgggtgcaccccatctcggccctcttgccgtggtctggagccttgagtgggagctcccaatcactatgacaccagggactgtgcaggctggggcaggggcactcatccaggcagtctaagaaggagggctcccccacagctggacccaacctccccctcttgtggtcccccacagcctctgctcctccaggccttgaaggctgtgtagaggacaaagcacccctcccctgagcttaatgtgcaggaaagatggctcacaatgtcaccatgctttggatcattcagagccatcatttttaggagcgggctgacccaggaggcagaccatgagaagcccccaagcttactgcctggccgtctctgccgctggcctgccttccccagagctttctaacctcagggcttcatggcctccacrcacttggatttgcctagggcaaccctaggccatcagggttactaaacatgtctccccaacacatgcccgca

SEQ ID NO: 86827 - DNA, 1247 bp, Homo sapiens
aggtcctctaaaaataatatttattaggttttctgttaactgactgcacttaagatacttacatacatctctgcagctggtctgtccctttcctgatcctttggccagagagagcagcctttttggtttgatgttcttgcccacacctgctagcagttccagcttgcaggactcactggagcatagtctggcatgtacaggaaagttttaaaaagccaagggacccaccgcagtgttgatcctcgagccttaaggtctgcagcactctaccttcttctctttatctttcagagacctttcatatttgcctacttacttattcccagggattttcacagtgcttagaggaagaactgtggaaaaggcatctccatcatcttgtcccaggacatacaaatattcatttttacactttttttattttatcctcatgaatattagaaactaagtaatcaaagaaatgactaatcttgaaaaaataaaacgagagcactttggcttcttcctcccctccccatggggaagagaagacatgtccccctctctagccaagtcggggtccagtaggcagcacttaggagacctgggggtccgagaaatgagtgtcccgcctccttggctagggactgcggtgattcgcaggtgcatggcttgtgtgtgtgttggtgttagtggggatgatttgttaatagtggaggttaggaatgaaatgttagggagggttgggaaacaggatctaaccaaaaccaagtaaatttaagtcattgtctctgggttttattctctgatgagtggccccaccctccctgtctgggctggagcccactccgtcagcaccccgagggtaaagaaagggcagacccttttcatgtgtgtgtctccacacccgcacaccctgccagaacacagcagggccccttgcacatgctgccttgctagagtggaagtgtctgctgagcttctgcagtagaacacatgcggtccttccaaaggggctgtcagagcacatgtgggccttaggaagagctctggttaggcgaccctggaagccactcattcacatagagaggatacaaggtcagatcgtctgggattacagccaccttctgtaaaggattttttatttgagagagcttctggagtatgtgagtcccattccccacgcagacaaaaargattaaaatagaaaatcaggtttcctttgaccctttctaacaggccgttgtgggtgagggtgcaggtgaaca

SEQ ID NO: 86828 - DNA, 1247 bp, Homo sapiens
aggtcctctaaaaataatatttattaggttttctgttaactgactgcacttaagatacttacatacatctctgcagctggtctgtccctttcctgatcctttggccagagagagcagcctttttggtttgatgttcttgcccacacctgctagcagttccagcttgcaggactcactggagcatagtctggcatgtacaggaaagttttaaaaagccaagggacccaccgcagtgttgatcctcgagccttaaggtctgcagcactctaccttcttctctttatctttcagagacctttcatatttgcctacttacttattcccagggattttcacagtgcttagaggaagaactgtggaaaaggcatctccatcatcttgtcccaggacatacaaatattcatttttacactttttttattttatcctcatgaatattagaaactaagtaatcaaagaaatgactaatcttgaaaaaataaaacgagagcactttggcttcttcctcccctccccatggggaagagaagacatgtccccctctctagccaagtcggggtccagtaggcagcacttaggagacctgggggtccgagaaatgagtgtcccgcctccttggctagggactgcggtgattcgcaggtgcatggcttgtgtgtgtgttggtgttagtggggatgatttgttaatagtggaggttaggaatgaaatgttagggagggttgggaaacaggatctaaccaaaaccaagtaaatttaagtcattgtctctgggttttattctctgatgagtggccccaccctccctgtctgggctggagcccactccgtcagcaccccgagggtaaagaaagggcagacccttttcatgtgtgtgtctccacacccgcacaccctgccagaacacagcagggccccttgcacatgctgccttgctagagtggaagtgtctgctgagcttctgcagtagaacacatgcggtccttccaaaggggctgtcagagcacatgtgggccttaggaagagctctggttaggcgaccctggaagccactcattcacatagagaggatacaaggtcagatcgtctgggattacagccaccttctgtaaaggattttttatttgagagagcttctggagtatgtgagtcccattccccacgcagacaaaaaggattaaaatagaaaatcaggtttcctttraccctttctaacaggccgttgtgggtgagggtgcaggtgaaca

SEQ ID NO: 86829 - DNA, 855 bp, Homo sapiens
accttttagggtctatcttggaaccttgctacatgaatatcatcttaatatagttgaggacacccaggttctgtacatactaccaagaacagacaagcaaaacgctcggtgtccactgctgtctgtaaaagacagtgcataaaatgagctggtgtgggtttagcccctgtgctcttcactgccaactttcatggtgaggttgtgtgagggtaggaaagctccaagctccagagtcttgtcctgaagtgcagtggcagtgaccttctcccctctaatgcccctcatgggtgtccctgcaggattccctcagtgtctacagggcgctctgctgtggctctgctctaggaggtaccttacatggtgctgcttcctactgccaacagtggtcacttcctgggactcatcacgtccagtcttcagtgggttcactgtgagccttgctgtgacaccctyggctctctgcagcagatgggcagggagctcccagcccctctttggaagcccactctattagacagccgtggatgctggatgagcacgttctctgggaatcagtggagcaaaaaggcgagactaccctaggagagaagaggggagaggaacagacagactctgcacccacaggcagaagaggagccccgcagactcaagtgaagagaccttctgtgggtccaggcctccagttactgggctgacaaaagagtatcaagaagggacagtgtggccacagcatcaaggaagtgatgccggggctggggaggatgggcaccccctgcagcctttctgcttctgtgtcttggactggtccatgcttgatatggctttgttctcaccagctgtagactgatgtgggac

SEQ ID NO: 86830 - DNA, 1070 bp, Homo sapiens
gcaaaaggaacccacggcattgacgcgcacagccaggtcccaggtggcctagcaggatgtggggcttcctggagcactctgtgcagaactgattgtgggggagaaggggagtgagacaacagtgcaggatgagcgttccgaggargggggcagccagagcagctggctgctgagtgtgtgtggaaaccccgtggactggtcagagaacaggaagacttggggactggccagagcttgggtttgagcttgggtggccgagaggtgccacctttgactggctttgagcctgaatggctgagaggtgccacctttggcaaccacagggacccagggaggccggtgggttggggccaccaaaacccaacttcagacaggtcatggtgaggcctgttaggcagttggaaatccaggtcttgcaagtctttcagggctgaaggagagcttgcatgcagctgagactactgttttcttgtcctgctgagaggtctgtgggtcagccttgtgtcttgggcatttagcgttgccaggagagagctactcttcacgacacagcccagcacctgctgcccaccctgcctactgcagctgactgctctgaacacaggccctgcccctaacccctgtcctgccatttcaaacttgggaacttgaaagcaaatggatggatcctacttgatcaggaagttgtgagatgtaaaacacatgggtgttgttggcagctctgattttacaaatgtggccatgtagagaaagctgatcatcagtaaaggaaagtaaggtggcacctggagacaacgaacgtgcaaggctgagctgtgacatggagacacctgcctgacactgccacctcaggccaggagcactggaggagagccccatagctctgtccatggcctccgtgttgaagtttcttcagattgtgcagccaatacatcccattctcatctcagtctaatcagaaaactcagtttgtatatcattttcacaaatccccattgtgctctggttgtatatgctcagaggtgttcagtagcttgcagcatggaagcctgtgtggcagtcaggactca

SEQ ID NO: 86831 - DNA, 1070 bp, Homo sapiens
gcaaaaggaacccacggcattgacgcgcacagccaggtcccaggtggcctagcaggatgtggggcttcctggagcactctgtgcagaactgattgtgggggagaaggggagtgagacaacagtgcaggatgagcgttccgaggaagggggcagccagagcagctggctgctgagtgtgtgtggaaaccccgtggactggtcagagaacaggaagacttggggactggccagagcttgggtttgagcttgggtggccgagaggtgccacctttgactggctttgagcctgaatggctgagaggtgccacctttggcaaccacagggacccagggaggccggtgggttggggccaccaaaacccaacttcagacaggtcatggtgaggcctgttaggcagttggaaatccaggtcttgcaagtctttcagggctgaaggagagcttgcatgcagctgagactactgttttcttgtcctgctgagaggtctgtgggtcagccttgtgtcttgggcatttagcgttgccaggagagagctacycttcacgacacagcccagcacctgctgcccaccctgcctactgcagctgactgctctgaacacaggccctgcccctaacccctgtcctgccatttcaaacttgggaacttgaaagcaaatggatggatcctacttgatcaggaagttgtgagatgtaaaacacatgggtgttgttggcagctctgattttacaaatgtggccatgtagagaaagctgatcatcagtaaaggaaagtaaggtggcacctggagacaacgaacgtgcaaggctgagctgtgacatggagacacctgcctgacactgccacctcaggccaggagcactggaggagagccccatagctctgtccatggcctccgtgttgaagtttcttcagattgtgcagccaatacatcccattctcatctcagtctaatcagaaaactcagtttgtatatcattttcacaaatccccattgtgctctggttgtatatgctcagaggtgttcagtagcttgcagcatggaagcctgtgtggcagtcaggactca

SEQ ID NO: 86832 - DNA, 749 bp, Homo sapiens
tttttagccagtaagagtagtgttgactattgactggagaatgttgtggattggatttttttaatgttaaggatgtgtttaattaactgaatttaccaaatggtgtttgatttgctcattctgttttgttttaaaagcagggatggcttttaaactatatcagatacctttgggtatctatgaagatgatcatgtggtttttctgtgttgaactactagtataatgaattgtattactgtatagcctaatattgaattgtttttgcattccgcggaatttttaacaaaatgctgaattttacttgctaaaatttctataagatttttacatatataagtatgagtgagataggtctgcagttttctactatttttgttagcttttggcattggaagaattatatgtaaagggaatctggaagatttctgtctttccttgcatgatatactgcattttrgaaggaacttttgagtacacatgagtaaatatgcttggaaaacattaatttctggtgtggctgcctaatattccttattaacgatctcttagttttcttcaatgaaggtctcaagtgtttcttcttttttattaatgttggaagttttcaaacatagactaataagattggtatcattttgtgcatccctttcactttactgtttttttttcttgagtattttgagcattgctacttcaggtgtggtttgagggttggcagcctgagtgttacctgggcatttgctacaga

SEQ ID NO: 86833 - DNA, 282 bp, Homo sapiens
gcatcactcatttataaataaatttataaataattaacatactgcctaaaccatggcttargtagctctatctctatggaacattaggaatcagttgtagaagtctacacatttcagtcatgatatattcgaaatgcagtccttttaaatgattgtccttttttagcatatttattttataggttatgcaacacaaattatttttccaagaagtctatgtgtcctcaaaaattcaaatggtagatgctttgagatgtgcaatgtactttaaaatatttcaac

SEQ ID NO: 86834 - DNA, 1122 bp, Homo sapiens
tctggaatttccttatttccttagtagttctttgtgtttttaattattttatttgagatacaatgtcactctgtcaccgaggcttgagtgcagaagtacaatattggctcactgcaacctctacctcctgggctcaagggatcctcccacctcagccttctgagtagctgggaccacaggtggaccatacccagctattttttttttttgtatttyttgtagagatggggtttcgtcatgttgcccaggctggtcttgaactcctggactcaagccatgcacccaactcagcctcccagagtgctgggattacaggcatgagccgctgcacctggcccgatagttctttcagcaaaggcctgttgaggtaaatgttcttgtttgaaaatgtatgtcctgggctgggtgggatggctgaagcctgaagcctgtaatcccagcactttgggaggccaaggcgggcagatcaccacgtcaggagttcaagaccagcctggccaatatggcaaaaccccaactctattaaaaatacaaaattagccgggcgtggtggtgcgtgcatgtaatcccagctattggggaggctgaggcgggagaattgcttgaactcaggaggtggaggttgcagtgagctgagatcgcaccactgtactccagcctgggtgataagagtgcaactccgtctcaaaaaaaaaaaaaaaaaagtccttatttcaccttaagacagcttagctggagcctggtgcgatggtccgtgcctgtagtcccagctcctcaggaggctgaggcaggctggagttggaggctgcagtgaggcatgatggcgccaacacctccagcctgggcgagcaaagagaggccaagactctaccacaaaatgtttttgaaatggctcagctgggatgtgcagactcctacactggcccctgctttctctcagcgttcagaggcctcgttctgtcgcgtttctgcttgttgctgccgctagggagtctgccgcccctctcgtcacccgcccgtgggtgaccggtgtcttctccctggaggtctgtgagccgtctccctgtctttgatggcctgtgttttttccactgaggcctgtttcggtttggattttttctc

SEQ ID NO: 86835 - DNA, 1122 bp, Homo sapiens
tctggaatttccttatttccttagtagttctttgtgtttttaattattttatttgagatacaatgtcactctgtcaccgaggcttgagtgcagaagtacaatattggctcactgcaacctctacctcctgggctcaagggatcctcccacctcagccttctgagtagctgggaccacaggtggaccatacccagctattttttttttttgtattttttgtagagatggggtttcgtcatgttgcccaggctggtcttgaactcctggactcaagccatgcacccaactcagcctcccagagtgctgggattacaggcatgagccgctgcacctggcccgatagttctttcagcaaaggcctgttgaggtaaatgttcttgtttgaaaatgtatgtcctgggctgggtgggatggctgaagcctgaagcctgtaatcccagcactttgggaggccaaggcgggcagatcaccacgtcaggagttcaagaccagcctggccaatatggcaaaaccccaactctattaaaaatacaaaattagccgggcgtggtggtgcgtgcatgtaatcccagctattggggaggctgaggcgggagaattgcttgaactcaggaggtggaggttgcagtsagctgagatcgcaccactgtactccagcctgggtgataagagtgcaactccgtctcaaaaaaaaaaaaaaaaaagtccttatttcaccttaagacagcttagctggagcctggtgcgatggtccgtgcctgtagtcccagctcctcaggaggctgaggcaggctggagttggaggctgcagtgaggcatgatggcgccaacacctccagcctgggcgagcaaagagaggccaagactctaccacaaaatgtttttgaaatggctcagctgggatgtgcagactcctacactggcccctgctttctctcagcgttcagaggcctcgttctgtcgcgtttctgcttgttgctgccgctagggagtctgccgcccctctcgtcacccgcccgtgggtgaccggtgtcttctccctggaggtctgtgagccgtctccctgtctttgatggcctgtgttttttccactgaggcctgtttcggtttggattttttctc

SEQ ID NO: 86836 - DNA, 1122 bp, Homo sapiens
tctggaatttccttatttccttagtagttctttgtgtttttaattattttatttgagatacaatgtcactctgtcaccgaggcttgagtgcagaagtacaatattggctcactgcaacctctacctcctgggctcaagggatcctcccacctcagccttctgagtagctgggaccacaggtggaccatacccagctattttttttttttgtattttttgtagagatggggtttcgtcatgttgcccaggctggtcttgaactcctggactcaagccatgcacccaactcagcctcccagagtgctgggattacaggcatgagccgctgcacctggcccgatagttctttcagcaaaggcctgttgaggtaaatgttcttgtttgaaaatgtatgtcctgggctgggtgggatggctgaagcctgaagcctgtaatcccagcactttgggaggccaaggcgggcagatcaccacgtcaggagttcaagaccagcctggccaatatggcaaaaccccaactctattaaaaatacaaaattagccgggcgtggtggtgcgtgcatgtaatcccagctattggggaggctgaggcgggagaattgcttgaactcaggaggtggaggttgcagtgagctgagatcgcaccactgtactccagcctgggtgataagagtgcaactccgtctcaaaaaaaaaaaaaaaaaagtccttatttcaccttaagacagcttagctggagcctggtgcgatggtccgtgcctgtagtcccagctcctcaggaggctgaggcaggctggagttggaggctgcagtgaggcatgatggcgccaacacctccagcctgggcgagcaaagagaggccaagactctacyacaaaatgtttttgaaatggctcagctgggatgtgcagactcctacactggcccctgctttctctcagcgttcagaggcctcgttctgtcgcgtttctgcttgttgctgccgctagggagtctgccgcccctctcgtcacccgcccgtgggtgaccggtgtcttctccctggaggtctgtgagccgtctccctgtctttgatggcctgtgttttttccactgaggcctgtttcggtttggattttttctc

SEQ ID NO: 86837 - DNA, 1122 bp, Homo sapiens
tctggaatttccttatttccttagtagttctttgtgtttttaattattttatttgagatacaatgtcactctgtcaccgaggcttgagtgcagaagtacaatattggctcactgcaacctctacctcctgggctcaagggatcctcccacctcagccttctgagtagctgggaccacaggtggaccatacccagctattttttttttttgtattttttgtagagatggggtttcgtcatgttgcccaggctggtcttgaactcctggactcaagccatgcacccaactcagcctcccagagtgctgggattacaggcatgagccgctgcacctggcccgatagttctttcagcaaaggcctgttgaggtaaatgttcttgtttgaaaatgtatgtcctgggctgggtgggatggctgaagcctgaagcctgtaatcccagcactttgggaggccaaggcgggcagatcaccacgtcaggagttcaagaccagcctggccaatatggcaaaaccccaactctattaaaaatacaaaattagccgggcgtggtggtgcgtgcatgtaatcccagctattggggaggctgaggcgggagaattgcttgaactcaggaggtggaggttgcagtgagctgagatcgcaccactgtactccagcctgggtgataagagtgcaactccgtctcaaaaaaaaaaaaaaaaaagtccttatttcaccttaagacagcttagctggagcctggtgcgatggtccgtgcctgtagtcccagctcctcaggaggctgaggcaggctggagttggaggctgcagtgaggcatgatggcgccaacacctccagcctgggcgagcaaagagaggccaagactctaccacaaaatgtttttgaaatggctcagctgggatgtgcagactcctacactggcccctgctttctctcagcrttcagaggcctcgttctgtcgcgtttctgcttgttgctgccgctagggagtctgccgcccctctcgtcacccgcccgtgggtgaccggtgtcttctccctggaggtctgtgagccgtctccctgtctttgatggcctgtgttttttccactgaggcctgtttcggtttggattttttctc

SEQ ID NO: 86838 - DNA, 746 bp, Homo sapiens
agtagatgggtgcagcaaaccaacatggcacgtgtatacctatgtatcaaacctgcatgttgtgcacatgtaccctagaacttaaagtataataataaaaaaggcaaaaaaaggaaaaaagaaaatgttatatatgtgtgtgtgtgtgtgtgtgtgtgtgtgtgtgtgtgtgtgtacacacatacatacatacgtaccatggaatactactcagccataaaaagtattgaaacaatggcattcacagcaacccggctggagtaggagataattattccaagtgaagtaactcaggaatggtaaaccaaacatcgtatgttctgacttataagtgggagctatgatacgaggacgcaaaggcataagaaggatataatgagctctggagactcgcagggaagggtgggaggtgggtgagggaataaaagactacatactgggtacagtgtacactgctcatgtggtgggagcaccaaaatcaccaaaatctcagaattaccactaaagaacttatccatgtaaccaactacctgttccmccaaaactattgaaataataataataatattaataaaaacacttgagcttttgggaaagggcagattgatagtaactagcattggtactgcccactcatgattagtccaagaagtgatcattgcccagaagaaagaaactgtctacgaagcatttctttccccagccatggtcacttctggcagtgctgctatatcacttctattcat

SEQ ID NO: 86839 - DNA, 750 bp, Homo sapiens
tgcatgcttctgttcagggtgttccttctgcctggcttaaacttgttgcctctgcttccctgtgtaattgacagcatctatctcttcttgaaaacttatctcaaatgctccctcttttacaaatatcatgttgaatcactatcaaacacaggtctccttgatgaaaactttgtcataattcttgagtaactttcttatgatacctgccttactgtgacttttgttcagttattagtatttttgcgttttaactatcttatcaaagttgtaaactcctaaagataatgtgtttatttctctcagtatcatttctagagactaacgttgtttcttgtacatggtaagagttcaatatatttattgtattgaacgttataataataacagtatctctttctataaatgtcaatcttctttgatccttattactctgggactgggcagagattatcacactgtcatattagagaactgaaaccaatgcaatttatcrtcccatgttaaaaagatactgaacacaaacatactttcctttcccaatattgagaataacttagctacctactccagggtacaccaaattgaagaggataatactgtgaaccaactaaaacagtatttttttttaaaaaatcaagactaacagtttactcagcaagactttcttcaagaccttcacctcaggctgagcatggtggcttatgccagcaatcccagcactttgggaggacaaagcaagagaattgcttg

SEQ ID NO: 86840 - DNA, 750 bp, Homo sapiens
tgcatgcttctgttcagggtgttccttctgcctggcttaaacttgttgcctctgcttccctgtgtaattgacagcatctatctcttcttgaaaacttatctcaaatgctccctcttttacaaatatcatgttgaatcactatcaaacacaggtctccttgatgaaaactttgtcataattcttgagtaactttcttatgatacctgccttactgtgacttttgttcagttattagtatttttgcgttttaactatcttatcaaagttgtaaactcctaaagataatgtgtttatttctctcagtatcatttctagagactaacgttgtttcttgtacatggtaagagttcaatatatttattgtattgaacgttataataataacagtatctctttctataaatgtcaatcttctttgatccttattactctgggactgggcagagattatcacactgtcatattagagaactgaaaccaatgcaatttatcgtcccatgttaaaaagatactgaacacaaacatactttcctttcccaatattgagaataacttagctacctactccagggtacaccaaattgaagaggataatactgtgaaccaactaaaacagtatttttttttwaaaaatcaagactaacagtttactcagcaagactttcttcaagaccttcacctcaggctgagcatggtggcttatgccagcaatcccagcactttgggaggacaaagcaagagaattgcttg

SEQ ID NO: 86841 - DNA, 729 bp, Homo sapiens
catattcacaaatgtgtaatttttaatctgttgcggagttcacaagaacataaaacaaatctctaaagggcaagaaaaaatagaggcaaatgcagaagcctgtgctgctgtagtgaaaatggaaatatcagaagtctagaactatgagattgagtttctcatggggaagtagaagatgctgttaagggtgataccctcattggagagtgggctagggaaggtctgcagcctgcaaaggaagccgatgagatcactgtgggtcttcactaatgctcagagtagggtgaaaaaaacagaaaaggggccgggcgcggtggctcacgcctgtaatcccagcactttsggaggctgaggcaggcagatcacaaggtcaggagatggagaccatcctggctaacacagtgaaaccccgtctctactaaaaatacaaaaaattagccgggcgtggtggcaggcgcttgtagtcccagctactcgggaggctgaggcaggagaatggcgtgaacctgggaggtgtagcttgcagtgagccgagattgcgccacttcactccagcctgggcgacagtgcgagactccatctcaaaaaaacaaaaacaaaacagaaaaagatactctgggagtttgtaaacatattcctgttctcacaagggtctatggtccggttttatactacccctctgattaaggaatttctaagacaggaaattgaaatggttacaagtatctt

SEQ ID NO: 86842 - DNA, 729 bp, Homo sapiens
catattcacaaatgtgtaatttttaatctgttgcggagttcacaagaacataaaacaaatctctaaagggcaagaaaaaatagaggcaaatgcagaagcctgtgctgctgtagtgaaaatggaaatatcagaagtctagaactatgagattgagtttctcatggggaagtagaagatgctgttaagggtgataccctcattggagagtgggctagggaaggtctgcagcctgcaaaggaagccgatgagatcactgtgggtcttcactaatgctcagagtagggtgaaaaaaacagaaaaggggccgggcgcggtggctcacgcctgtaatcccagcactttgggaggctgaggcaggcagatcacaaggtcaggagatggagaccatcctggctaacacagtgaaaccccgtctctactaaaaatacaaaaaattagccgggcgtggtggcaggcgcttgtagtcccagctactcgggaggctgaggcaggagaatggcgtgaaccygggaggtgtagcttgcagtgagccgagattgcgccacttcactccagcctgggcgacagtgcgagactccatctcaaaaaaacaaaaacaaaacagaaaaagatactctgggagtttgtaaacatattcctgttctcacaagggtctatggtccggttttatactacccctctgattaaggaatttctaagacaggaaattgaaatggttacaagtatctt

SEQ ID NO: 86843 - DNA, 729 bp, Homo sapiens
catattcacaaatgtgtaatttttaatctgttgcggagttcacaagaacataaaacaaatctctaaagggcaagaaaaaatagaggcaaatgcagaagcctgtgctgctgtagtgaaaatggaaatatcagaagtctagaactatgagattgagtttctcatggggaagtagaagatgctgttaagggtgataccctcattggagagtgggctagggaaggtctgcagcctgcaaaggaagccgatgagatcactgtgggtcttcactaatgctcagagtagggtgaaaaaaacagaaaaggggccgggcgcggtggctcacgcctgtaatcccagcactttgggaggctgaggcaggcagatcacaaggtcaggagatggagaccatcctggctaacacagtgaaaccccgtctctactaaaaatacaaaaaattagccgggcgtggtggcaggcgcttgtagtcccagctactcgggaggctgaggcaggagaatggcgtgaacctgggaggtgtagcttgcartgagccgagattgcgccacttcactccagcctgggcgacagtgcgagactccatctcaaaaaaacaaaaacaaaacagaaaaagatactctgggagtttgtaaacatattcctgttctcacaagggtctatggtccggttttatactacccctctgattaaggaatttctaagacaggaaattgaaatggttacaagtatctt

SEQ ID NO: 86844 - DNA, 1397 bp, Homo sapiens
acgtgctggatttctggtggaacaagtgtgcaggtcctctggacaaagggaacctccccagggatgtatatgccagagccacccccactttaatcctcccatttcttgctcctggcagtgtaaccagccacctggttccatcttcctcctccttttctacctaggcagatgtccaaacaaggggcacatcaaagattcacttcttactggtgcccagagtttttatgagtgattctcctattcctcttccttgaccttagagtggaggttgggggacccagtcttctaccttacccaaaaaaggcgggggagatgccatggcctccccgtcgtggctgataattcacactgtgcagatggcctcctttgccctcttcctccctatggtactttctgtagaaggcatgcatggaggtagaggagggtggggtattgagatgtgtcttaccaaaccctggaaggactaactgtcctaacccatgtccattaccttcagaatgtgcacatactcaccacctctttgtccttaattgaagtcctagtctgtgctagaggaaaagatcactcaatgaattcttgtcaccaactctgttcaccctccttttaaatcatcaaaaaatccttcatgccttagctaaactacatgttgactcacagtctgtgcatctctgatgccagttgatttttcagatttcagtgatgtgctttttacatcctttaaaaaaattttttacaacatgacttcggtattttacagagtgctatcttctccattrtcagtgtgacttactgtgaatgtctcctcacctaccccattcatagcattttaactacgcgttctaaatccctgaattccaggtacattgctcagtactagtccccctccttaatgaatgactagattatataagacgtttgaaacatttgaaattatgatgaagctgaatgttaaaatcatagcgtagagctctccaaactccctcacagctgtgctgataaatgccaccacgctaacaaagggaggtgggtatttcttcttgccagctaaaggatccagtcctgtggccacagtataaacatgcttacagttttgacacacagatttgaagtggttacatatatttttgatatattttgaaattttgggaaaatttgtattccaagttgtgctcaaaatgtgatttcattgaggtcttttcatgtacactacataaattttgaacaattaacacttacataaaatgctatcacactgttactaaaggtctatcattagaagtgtttagcagcctttgtggtacaaataaccatccaagagtgacttgttgagaaggagctaggggccatttgagtcatctagagccatagtcggcttctttccctgaaagaaatggttc

SEQ ID NO: 86845 - DNA, 563 bp, Homo sapiens
acatcttctaattctttaaacatggcttctttacatttcgcaaacatatttataattgctgctttgaagtctttgttacatctagtatctgcactcactcaggaatagtttctgttgactgctttatttcttgattgaaacaaacwcacttctcatttatttgcatgttgcatagtcatgttgaaaactggacatgtaagaaaacatattgttgtctactctggattctgtagtagccaatgtctctgctcagattttctttttcaattcttattttcattttttagtctggcttcctaaggggttgctactgtatctacacatttcaatgatcagccaaagattggttagaggttttactcaagcactgtgagcccatgagacttccatcttctgcagatgtatctctgtttagttagggagcatatttagagttcaccagtttgaagcttttttttgttatttgttttccactctgccctcttagatctcgtgatcatcatgtctctgtagcctgccagtcactcagagatgaatgaagagttatctcactcttcaagtgc

SEQ ID NO: 86846 - DNA, 674 bp, Homo sapiens
tccatgatatcactactacttttctattacaaagaacagaaaaattggtaactgaagtaatgatttttgtcttatgtttgtctgccttttgagacagaggagtttagctcctgtcatccagtgcaatggcgcaatctgggctcgctgcaacctctgcctcctgagttcagcaattctcctgcctcagcctcctaagtagcttggattacaggcagctgccacaatgcccagctaatttttgcatttttagtagagacggagtttcaccatgttggccaggctggtctcaaaaagaaaagatatcaaaatgttcaataaacatatgaaaagtagttcaaaatcattagtacaaaggaaaatgaaagttaaaactttaatgaggtaacctctataacactcaccagaatgaatgcaatttaaaaattctgaggaatgycaagtggtgatgagaatgtatagcattgggagctcacataaactactagtatgtgagaaaaattgagaactatatactgcagttgaagctgcacagattttaagaaccaaaatcatacacctagatatatacccaacagtaattcatgcacatgtgcactaagagatgtgtaacagaatgtcccataacagcaatacaggcataaattgaattttcaattgacactaaatgaataaac

SEQ ID NO: 86847 - DNA, 979 bp, Homo sapiens
catggcatatctcaaaattcaaaagaaactggtaatagtagttgcctctgggaaggtatacagggtggcagggctacagggcacaggcgtaggaaggggractaatttaatttaatttaattgtatatcctttgaatgctataccttaagtatgtattaactattcaaaaaaactaaatttttttttaaagaacatctgttctttaaagtcgtagaacattttcatcactccaagaagttccttcatgcccctttgcaaagttgtttggcttttccaagcctctgtgaaaccccaggaattcaaggaggccatggagaagaatccacttttctatagtagcaaaatatggtgaggaaagagaagtgattactcctaaaaagaacatataattgttggttattcaatgacaaggagtgacagtgtaggtaaggggcccagagccagaacccaaggcaagtgtgtttaataacaggaaaaaagctaaataacttttggtacagctacctagcagtatattctgcagtcattaattctttatgaagaattatacaacaacatgacaaaatacttagggtgtaatgttatgtaccgaaaagaaggggagccaatcataatcccaaaagatagtccagaacatcatagtcctaaagtgtttaaattccaaaagactaaaatccctaaagtctaaaatccgaaaaccacagcccagaaaatatcaaaatccccaaaatataattatggaagaaatagttttaaaaacttaaagatatttattttttaaaggggaacttatttgagaaacataaaaacacaacagaatactttatacaccacttaatataataaaacagacaataataacatacatttttgcaagcataaacactcaggttactaataacatttgggtgggtctaacagttatgagcagatgagccatatttataaagaaattggtcataaagggaaaggtataaa

SEQ ID NO: 86848 - DNA, 979 bp, Homo sapiens
catggcatatctcaaaattcaaaagaaactggtaatagtagttgcctctgggaaggtatacagggtggcagggctacagggcacaggcgtaggaaggggaactaatttaatttaatttaattgtatatcctttgaatgctataccttaagtatgtattaactattcaaaaaaactaaatttttttttaaagaacatctgttctttaaagtcgtagaacattttcatcactccaagaagttccttcatgcccctttgcaaagttgtttggcttttccaagcctctgtgaaaccccaggaattcaaggaggccatggagaagaatccacttttctatagtagcaaaatatggtgaggaaagagaagtgattackcctaaaaagaacatataattgttggttattcaatgacaaggagtgacagtgtaggtaaggggcccagagccagaacccaaggcaagtgtgtttaataacaggaaaaaagctaaataacttttggtacagctacctagcagtatattctgcagtcattaattctttatgaagaattatacaacaacatgacaaaatacttagggtgtaatgttatgtaccgaaaagaaggggagccaatcataatcccaaaagatagtccagaacatcatagtcctaaagtgtttaaattccaaaagactaaaatccctaaagtctaaaatccgaaaaccacagcccagaaaatatcaaaatccccaaaatataattatggaagaaatagttttaaaaacttaaagatatttattttttaaaggggaacttatttgagaaacataaaaacacaacagaatactttatacaccacttaatataataaaacagacaataataacatacatttttgcaagcataaacactcaggttactaataacatttgggtgggtctaacagttatgagcagatgagccatatttataaagaaattggtcataaagggaaaggtataaa

SEQ ID NO: 86849 - DNA, 979 bp, Homo sapiens
catggcatatctcaaaattcaaaagaaactggtaatagtagttgcctctgggaaggtatacagggtggcagggctacagggcacaggcgtaggaaggggaactaatttaatttaatttaattgtatatcctttgaatgctataccttaagtatgtattaactattcaaaaaaactaaatttttttttaaagaacatctgttctttaaagtcgtagaacattttcatcactccaagaagttccttcatgcccctttgcaaagttgtttggcttttccaagcctctgtgaaaccccaggaattcaaggaggccatggagaagaatccacttttctatagtagcaaaatatggtgaggaaagagaagtgattactcctaaaaagaacayataattgttggttattcaatgacaaggagtgacagtgtaggtaaggggcccagagccagaacccaaggcaagtgtgtttaataacaggaaaaaagctaaataacttttggtacagctacctagcagtatattctgcagtcattaattctttatgaagaattatacaacaacatgacaaaatacttagggtgtaatgttatgtaccgaaaagaaggggagccaatcataatcccaaaagatagtccagaacatcatagtcctaaagtgtttaaattccaaaagactaaaatccctaaagtctaaaatccgaaaaccacagcccagaaaatatcaaaatccccaaaatataattatggaagaaatagttttaaaaacttaaagatatttattttttaaaggggaacttatttgagaaacataaaaacacaacagaatactttatacaccacttaatataataaaacagacaataataacatacatttttgcaagcataaacactcaggttactaataacatttgggtgggtctaacagttatgagcagatgagccatatttataaagaaattggtcataaagggaaaggtataaa

SEQ ID NO: 86850 - DNA, 979 bp, Homo sapiens
catggcatatctcaaaattcaaaagaaactggtaatagtagttgcctctgggaaggtatacagggtggcagggctacagggcacaggcgtaggaaggggaactaatttaatttaatttaattgtatatcctttgaatgctataccttaagtatgtattaactattcaaaaaaactaaatttttttttaaagaacatctgttctttaaagtcgtagaacattttcatcactccaagaagttccttcatgcccctttgcaaagttgtttggcttttccaagcctctgtgaaaccccaggaattcaaggaggccatggagaagaatccacttttctatagtagcaaaatatggtgaggaaagagaagtgattactcctaaaaagaacatataattgttggttattcaatgacaaggagtgacagtgtaggtaaggggcccagagccagaacccaaggcaagtgtgtttaataacaggaaaaaagctaaataacttttggtacagctacctagcagtatattctgcagtcattaattctttatgaagaattatacaacaacatgacaaaatacttagggtgtaatgttatgtaccgaaaagaaggggagccaatcataatcccaaaagatagtccagaacatcatagtcctaaastgtttaaattccaaaagactaaaatccctaaagtctaaaatccgaaaaccacagcccagaaaatatcaaaatccccaaaatataattatggaagaaatagttttaaaaacttaaagatatttattttttaaaggggaacttatttgagaaacataaaaacacaacagaatactttatacaccacttaatataataaaacagacaataataacatacatttttgcaagcataaacactcaggttactaataacatttgggtgggtctaacagttatgagcagatgagccatatttataaagaaattggtcataaagggaaaggtataaa

SEQ ID NO: 86851 - DNA, 979 bp, Homo sapiens
catggcatatctcaaaattcaaaagaaactggtaatagtagttgcctctgggaaggtatacagggtggcagggctacagggcacaggcgtaggaaggggaactaatttaatttaatttaattgtatatcctttgaatgctataccttaagtatgtattaactattcaaaaaaactaaatttttttttaaagaacatctgttctttaaagtcgtagaacattttcatcactccaagaagttccttcatgcccctttgcaaagttgtttggcttttccaagcctctgtgaaaccccaggaattcaaggaggccatggagaagaatccacttttctatagtagcaaaatatggtgaggaaagagaagtgattactcctaaaaagaacatataattgttggttattcaatgacaaggagtgacagtgtaggtaaggggcccagagccagaacccaaggcaagtgtgtttaataacaggaaaaaagctaaataacttttggtacagctacctagcagtatattctgcagtcattaattctttatgaagaattatacaacaacatgacaaaatacttagggtgtaatgttatgtaccgaaaagaaggggagccaatcataatcccaaaagatagtccagaacatcatagtcctaaagtgtttaaattccaaaagactaaaatccctaaagtctaaaatccgaaaaccacagcccagaaaatatcaaaatccccaaaatataattatggaagaaatarttttaaaaacttaaagatatttattttttaaaggggaacttatttgagaaacataaaaacacaacagaatactttatacaccacttaatataataaaacagacaataataacatacatttttgcaagcataaacactcaggttactaataacatttgggtgggtctaacagttatgagcagatgagccatatttataaagaaattggtcataaagggaaaggtataaa

SEQ ID NO: 86852 - DNA, 979 bp, Homo sapiens
catggcatatctcaaaattcaaaagaaactggtaatagtagttgcctctgggaaggtatacagggtggcagggctacagggcacaggcgtaggaaggggaactaatttaatttaatttaattgtatatcctttgaatgctataccttaagtatgtattaactattcaaaaaaactaaatttttttttaaagaacatctgttctttaaagtcgtagaacattttcatcactccaagaagttccttcatgcccctttgcaaagttgtttggcttttccaagcctctgtgaaaccccaggaattcaaggaggccatggagaagaatccacttttctatagtagcaaaatatggtgaggaaagagaagtgattactcctaaaaagaacatataattgttggttattcaatgacaaggagtgacagtgtaggtaaggggcccagagccagaacccaaggcaagtgtgtttaataacaggaaaaaagctaaataacttttggtacagctacctagcagtatattctgcagtcattaattctttatgaagaattatacaacaacatgacaaaatacttagggtgtaatgttatgtaccgaaaagaaggggagccaatcataatcccaaaagatagtccagaacatcatagtcctaaagtgtttaaattccaaaagactaaaatccctaaagtctaaaatccgaaaaccacagcccagaaaatatcaaaatccccaaaatataattatggaagaaatagttttaaaaayttaaagatatttattttttaaaggggaacttatttgagaaacataaaaacacaacagaatactttatacaccacttaatataataaaacagacaataataacatacatttttgcaagcataaacactcaggttactaataacatttgggtgggtctaacagttatgagcagatgagccatatttataaagaaattggtcataaagggaaaggtataaa

SEQ ID NO: 86853 - DNA, 1338 bp, Homo sapiens
gcctcccaaagtggttggattataggcatgagctaccgtgctggccaaaatagaatgttagtgacacaccctacattgaatttacttggaaggctgattcttttcccatgccctccctaggagagtgagctgggtgttaggaccttaactctgcccataagatgctcaggccaggagagatgcccttcaccccttggattacaagggtttcaactccctttctgcttgtttgagccttgccctcagttctttttatccctgytctgctgtgcttgtttcaaacaacacatttttggactgtggcatgaacggctcatcttcagagagtctgttttagttgtgtttcctaggatctgcatctgcctcttcgcgtgtaactttggtagcccttgtgcaggtcttggagtctccagtgactttttgtcttctagttttgctgaatatgggatttctgcctcattcccccccactatgtctccctatcactttgcataatttctaggaggaggaaggggaagattcggtcaaatattgctgcagttcttatactataatcatattgctttgtaatataaatttcccccactttttccattataaagatagctgtaggccagatgtggtggctcatgtctataatcccagcgcttgaacccggaaggtggagattgcagtgagttgagattgcaccactgcactccagcctggacggcgacagagccacgcactgtctcaaaaacataaaaataaataaataaatgaatgtttcatcttttatatagctgtatagacatagatgtataaccatataccatacctggatatagacacacgtagagatttatttgttcaaaaatgggggctcacattatatatatgttctgcaacttcctttattcatgtgacatatcatgggcatatttccatggtgtgacttattttgaatgctaatgtttatattaaatcacatttcaaactgtgttcttttaagacattcatgctattttaatgtattggtattatttgtttatttatttattttgagatggaatctttctccgtcaccaggctggagtgcagtagcgcgatctcggctcactgcaacctccacctcctgggttcaagcgattcccctgcctcagcctcccaagtagctgggactacaggtgtggaccaccatgcccagctacttttttgtattttagtagagatggggtttcaccatgttggccaggatggtctcgatctcctgacatcgtgatctgcctgccccggcctcccaaagtgctgggattacaggtgtgaaccaccgtgcccaggcagcaatgtattgctatt

SEQ ID NO: 86854 - DNA, 592 bp, Homo sapiens
tgtgtgaagagttgattgatagttgccaactgtcattgagcactttgaacatgtgaagttaagtgcttgatcatagttctcacatcctcataactcccctgtgaaatatatggtgttttttcatatccgcgttaaagaaactgggatttacaatgatgtaacattggacaaattaaggtctcaggacaggaggtcacggagtgatgagccctgaattactctaggtgggtttaactccaaagcccatgcccttacccaggggaacacactgcttctgaagatctcattcaccatgttaatgaccacacccccgccaaccccaccacgtgcctcctaacactaggcatgctccatgtgtgatgagtgaatagatgactaatacttygtatgcttaaggtcatttacaattcacaaaacttgttgacagctatacttgatttccatatgatttccccaacatctctgacgcagctccacaggaaatgttatctccatttcacagaggctgagagagttcagagtcctccagaagctcacattgctatttagtaacaggcatagacaggacttcagcccacgtgttctgccttca

SEQ ID NO: 86855 - DNA, 562 bp, Homo sapiens
tataatgcattggcaattcagtgtggtctaatcaaattagcttaaccatgggattgcgcttagatttgctcattcattttaaccataaacacttactgaatgtgtaccatgggacagacacctttctagagactggctatattgtggtgaaaatacaccatgggacagacacctttytagagactggctatattgtggtgaaaatacaggccaaatccctgccttcgtgtggcttctattgtggtgggaactagacaaaaactgtccaagtgaataaatgaatcagtaatttcaggtaggtgagaatgctatgaacaatatagctgagtaggggctagaaggtgatggggtaggcgaaggggcttcgtaggctcaaaaaagggccccaaagagccccaaagatatccaggtcctaatctctggaacctgtgaattatgaccctgcatggcaaaaggcactttgcacatgtgattaagctaagaattttgaggtgtggatattacggtggggaaatacaattaaaaacaaaatgtcctgttgacccagaaaacctctccacaa

SEQ ID NO: 86856 - DNA, 962 bp, Homo sapiens
aagtctccatatgttcatgtatgcttgtatgtatttgtatgaacataraaaaagatagaagtatatataccagttaacaactgttacttttctggtggagtgggaatgcaaagatcattaatttttatattatggacatttacctcataacaatcttttgaatttagagaacactaaataatttgaactgggctatgtaaggttaaagaaatctgataatgacagctaaatggagaggatgcagggagagggatggttgagggtgtcaatgatattgggcaaagccaggcaagaaagcagagggaagatttccttggctggcatgaagatttaacaaagataaggttaaaatgaagtctaggaagtttctaagactagcaggttcatcaagattgcatactgttttttcacctcctttcttgattccacaacaataaatattttggaactaagtatcaggattccccaggcaggagaaggggatgtcagttaggtgtttggttctctatcctgttgtctccatttgccagacttgggggggtggggaacgggattccaaattatattggacaattaacctcaggttagaataagcttcctttccatactgggagcagtgagggaaggagacgttggaaacatcaccttctccgagaaccagtcctagcagcatcaggggatctaaggatcactgccattgtggacaggtccacaaagaccaacaaagaccatgaccagggccttgatttgaccacatctgactcagcagatcattctgaattaatacttcaatttccttttttttttttttttttttttcagtttgtggaagatgaggttatagatctgtgtgcactatttcgttcctttattttctaggattgtgtgacataagcagcatactcagagggagacaagccacagcagcaagttgatctttaagaatcattaagctcacactg

SEQ ID NO: 86857 - DNA, 575 bp, Homo sapiens
tcctagaagcagagcctgagacaaggattcttgttcaggcagggaaggtgagaattgtcagggaagggttctagagagggagagtggccggaagcagcacagggcagagaaagaagccagcaatgttcccccaggagagcagcttcagtctgatacctttgtgtgggcagtcatttgccagggggcacccccaggctgggcagctgtaggccatcagcggcccacactcacaaccgctggaaggtggctgggctggggctctgagagcatcacagcaggtgtctccaccatgggcatgatgagaaaggtcagrctcagatgttaaggaggtttgggcactgtggctcacgcctgtaatcccagcactttgggaggcagaagtaggtgaatcacctgaggtcaggagttcgagaccagcctgactaacatggaaaaactccatctctactgaaagtacaaaaattagccaggtgtggtagcatgtacctgtaatcccagctactcgggaggctgaggtaggataatcacttgaacccggaaggcagaggttgcagtgagctgacatagtgccactg

SEQ ID NO: 86858 - DNA, 575 bp, Homo sapiens
tcctagaagcagagcctgagacaaggattcttgttcaggcagggaaggtgagaattgtcagggaagggttctagagagggagagtggccggaagcagcacagggcagagaaagaagccagcaatgttcccccaggagagcagcttcagtctgatacctttgtgtgggcagtcatttgccagggggcacccccaggctgggcagctgtaggccatcagcggcccacactcacaaccgctggaaggtggctgggctggggctctgagagcatcacagcaggtgtctccaccatgggcatgatgagaaaggtcaggctcagatgttaaggaggkttgggcactgtggctcacgcctgtaatcccagcactttgggaggcagaagtaggtgaatcacctgaggtcaggagttcgagaccagcctgactaacatggaaaaactccatctctactgaaagtacaaaaattagccaggtgtggtagcatgtacctgtaatcccagctactcgggaggctgaggtaggataatcacttgaacccggaaggcagaggttgcagtgagctgacatagtgccactg

SEQ ID NO: 86859 - DNA, 1554 bp, Homo sapiens
tgcatagatgaaaaaagtctgtgcatatgtttcagttcactgaaggaagcaatgaactataatgtggaaagaaaaggaaacatacttctttacrtaaatattcttacttctggaaaagaattgttgaatcagtcaggaatttgacagcaagatttcaactattggagcagacaactttatattgtaattgatggatctggtggacttttaaatattttttttccctattctgtgctttttcacattgtttctatatctttttgtttttttgcaaagttctttaattgatcaatattttcttttgtgatatgtgttttattgctcacaagaaaaaaatttctctatttaaatgttatactctcttacactttctttcaaactgtcacttataccactgcaattcaccccaaattattttagtatatgatgtgaaatccaagtctagctttacttttttcacctttattcaattgtcccagaaacatttatcaattattccacatttcttcactgatttgtaatatgccctttgtcttaaaccatgcaaagctccccagcatcaatagaaagagagaggaagtagatgataaccttttgcagtgggaaacaaaaaagatattttaaaactcttgtttgtgtttggaactgtcacctcctatgacatgtcaaacaaccttatttggcattggatagtgtaagtaattttttgccctgacaaaatatatttaggtacccacttgagcaaaacttataatatagatttaatcatatattcactgttatcatcgacttcattgtgttcttctacctctgcctgatgcacctcttgattattcagcattgttgccaagcatttgctgttagtagctgataacattcatcttcttttgctaaatatttctcatatacaagaagatttaagactgtttatccctgtagttggaagatttttcctctaaaagctgtttatacttttcctagcacgaagacctgcttatatgccacacaagtgtctcttaaaaagttagtcactcaatgccctgctaataggagtgaaaaagacactagaaacaaaaatcttttctaaccagaaaaccacttttgtataaattttgagctccttgcaccacagtgactacagtgtgcctcactaaggtaaacatagaaaatggtatcatttattgtttcaaattaatagggtaattgtaaatatgataagtttatcgaagatattacagaagtatacattttaagacaaccctagaaataattcttttaagagcatgttacaattattattttaaaatgcattactcctaccctaattttagttggaagagatgtatgaaaattacaatgattgtactgcatagaatatgtcatttttgtttgattttttaattagcagtttaatttgtgcagtgtcgaatataagagataattctgataggtttgtcatcacagagtctctggcagttaacatgaatacaaaatattaaatgtattacttaccgcagtaaacggtcactagtcagtaggttgataattcgcatc

SEQ ID NO: 86860 - DNA, 757 bp, Homo sapiens
  misc_feature (1)...(757): n = A,T,C or G
tcannnnnnnnnnnnnnnnnnnnnnnnnnnnnnnnnnnnnnnnnnnnnnnnnnnnnnnnnnnnnnnnnnnnnnnnnnnnnnnnnnnnnnnnnnnnnnnnnnnnttaaactgaccaagtttaaaaagtaattactaaaatcaagaatacaagagaggacgttactactgactttacctaattcctacttttactgcagtgcctgaaatataaaagtcattctataaatgtttttgcgagaagccattaaaggtctcccaagcagaggcataaaaatgagacaacaccataatcaatagaggtggctactaaatgcttctgtcattgagtagagagtaagtagtgtttaccaaagtgtcttttgcatcaracatgaattaaggccccacctcattcacttactctctgaacattggttacaatgagtatcacaatactaactcatattgttgttttataggttaattgaggagatgtgtgtaaagcatttagcacaacagtaagtgctaaagcataattagcactccatgcaggatacatgctactactgttaccgttggcactataattatcgtcctggaagttactgtagaaggcaaattaaaaccacataatcacactgtgttcaggttacatgtaaagaaaaataggaaacaatatataaggtgtcccctttctttcccactcaagtcaacatgaagtttttatcatcactcacatttcatcaactttttatttaacttctcagcattcttgggt

SEQ ID NO: 86861 - DNA, 729 bp, Homo sapiens
ataatttggtaaataaggtaactctgttgaaagctctatttagaataaaaaaaamcaaattttatataaagtgtagtgggaccacaaatataatctcaatgaaaaggctctcactgaggctaatacagaatttctgcatctcacaaatctctgacatgtttcaggacatatattaaacactaccgatggtaaacaaccaaacaagcaaaaagtatttatttttgagatgtttgacataaactacatcttaagtcttagggatggaggagtagaaatacatagatttgatgttatttttctgtgccaaactatgtgtctccccaataaccatttattcttccaatttccctggaaacattacaacaaaatgtcaaatctgcagtttcagcacaccactcaaaatggtggcacaatcttcaagtgacctcttctaatgctcaatttttcccacagaaaatatctatttttatccatatttactccttcagcctcaattctcatccatttgaataaactagtgctctatttttatgtgaccttgaacctaactaatttaggattcagcttcctcagtctaacctttcttacctgcaaatgtagagtagactagaacatctcttggataattttcacaatgatatcctgtgattttcatgagtgttgctgtgtgaacagactcaaacctatcatgttcattttgaatcactaaaatattttggacctcaccat

SEQ ID NO: 86862 - DNA, 378 bp, Homo sapiens
gatcccatcatgggacagagcccttataagaagaataagagggaccagaccactcacaaagagatgaggtcatagtgagcacacagcaagaagatggccatccgcacaccgggacgaggagcctccccatggatccaaatccactggcaccttgatcttggatttgmagatttcagaattgtgagaaataaatgctctgtgtgtttaaacctcccagtctatggtattttgttatagccagcccaaaccgactgagacaccatcctacctgcctgttctaaaaaaggaaagctgcactcagtacagtcggagggtctatgtaatcgggtctacagaggaattgcatcatctctgattgctttgagcagtgttttgtag

SEQ ID NO: 86863 - DNA, 745 bp, Homo sapiens
accacttgtaccctaaaagctattaaaataaaatatatgtattttaacaagttttcttagtgtaattgacagcaaataatgagcagtgatgactagtacaaaagtcatcacccagctgatgttttggtaaatccaggaaatggtatatctgattcaatcccatgcttggtttcaaaggcaaaatgttacttaaaaaaataaatgttgactatatacctgcttgataataagaaacattcacctctcttcrtttaagttcaacttaaagaagaaacatttttgaaaagtgagaagtgtgttacattggtggtattatgataataattcaagtgtgcttgatgctggggataaaatgacaaatcagatgtgttctctggccttgcgttgttcagacaaacacatgagccaataaataaaacacaaagagaatatggacagtaatggctttcaaaacttaaaaaaatctaataataaatcattacaatttgttgcctgaggaaataatcctcatcatgtaaaccagaagtcaattattgatttttctgaccacaatcaacaccacagccgagtatgctctgtgcaggaaaatccctactcctcttcagacctgcctgtaacactctatacatatttaatcattaataacataacacttatcctattgcttcacaattatgtatatgtctatttcttcttttgaatgtgagttccaggagggcaaatgcttagcgcaggaaacatctgc

SEQ ID NO: 86864 - DNA, 1109 bp, Homo sapiens
ctcaggaggctgaggtaagagaatttcttgaacccaggaggcagaggttgcagtgagccgagattgggccactgcactccagcctgggagacagagcaagactccatcttaaaaaaaaaagattttgagcaataatgctttagggaaaaatgaggggtgtgtgtgtgtgtgtgtgtgtgtgtgtgtgtgtgtgtgagagagagagagagaaagagagatacaaatcttctcatccttctctttcttgttgtagcctattggacctgccagctgttggtgaccaggtgaaatagatatcctgagcacacctgtttgattccaaggtaggtgctagtggcaacatattacgtatttcttgtgaggtgctgattctcacagctggtctgtgcagatattatagaattcattcttcctcggttatatagaaactccctttcwttctcagttatataaaaattagctggctttttgtctagaaggatgtagttttttaaataaatatattcagtgtgacagttagcaaaatcgcaagactgttttacaaattaatttcatcatgtttgtgctatataccattcacacaaaaaaattaataaagacacaatgcccctgatgacctcatattccagtgggggagacagacttgtaaacagatatgttaacatagaaggtggtaagtgctcttctgaagattgagcaaagagctgtcagtgcaaaagcacagaggactttgttggagggagtcaaggtttaacagaataggtgacatttgagctggatcttgaaggatgggcaggagtttgccaggtgaatgaggtgatctctatataaagtgcctagtaaagggtcaggcacttggtaagacccaataaatgttcacatctagttccagctaaagaagtgttccaggcaaaggacataggtcagttcaattcaaggaacatttattgagtactttgtatatgtcaggcattggtccaggttctttggccttatgtgccaggcacatcttgtgaagatagagaattatacaagggtctggtgtgagccatattcagatcaactatttatagattttgttgtcagaatggagcagggatgttttaaca

SEQ ID NO: 86865 - DNA, 675 bp, Homo sapiens
tattgctaatgaattcatgaattcattctacaaataaattggttttgtcccatcctcacaagttatgcccataaccctggttagcaattttgcaaagatatattgctaaccatgaggcaaaattgtgacatatagttacatttattgcacctattggaaaaccaatttaaatttcataccatcattatttttgcctatacgcagacacgtttaagatttgtttttttcagactttccttagcattctggaaggatttgtaaaaagggagaatagtttgctagttaaagaagactaaacaaaaagcattcctgtcatctgtaagcagcacaattatgttcttgctggagagacactagagtatatataatttaaaaaattattagattcttattaaaggtctgtttcttttatggtcccacctggctaaagtcttgctgctggcatggctggggataaatgtawgtatgtagacttgcatactatcatgatctgttagcaaggaaaaagaagttgttctcctcactgtatgataccagtgagaatcaatccttttctttctcttttcctccacttgctaccgctaggaaaggttgagtggatttattttatttctgactcgcttgtacataaggcaacaattttttgagtaacaaatattgactgcgttgaagaaa

SEQ ID NO: 86866 - DNA, 1165 bp, Homo sapiens
aatactcactgactaaaagctgtcacgtagttgaaggcatgcagagactgggtcagtctggttttctggttttcttctgccacatttagttgcatgaatttgggtaataacagctcccctcactcagtttatatttttgtagaaggttaataagtgctaagttaacaktaaaataataatatttaaagtgatagattaaatcattgaaaaatttgaataatttcaaatttagggacaattaagaaaaacatttcttgatggtaggaaaaatagacttaagttagaagataatgctgtatgtaaatctagatatttagattgctaaataattccatttggacagaatcgtgagttttaaatttgctaatcatatgaaaaaatagctagagtgtgagttgatttttgctttcctattagtgaacagtgtgattttattgcttaaaaattaatgaaagtttatgttgcatttgtagtcatgttgagaacagaggtcattatttcaagaaacgagatgtcgccagaatcactgcagcaactttcaaagtcataaaatgattccctgtcttattagtgtcccctctaattcattttccacaaccatggaatgacattttgaaatttgcatatgaagttctccaatttaaaatcagcctatggtttcctaatactgtaggcaaaagtgtccatgttatcagcatgacatacacatccccttccggtaagactcctgttaaatctcctggccttatctatgtccattccccctgctccctctcaccctggacaccagtcatgacatactatcttgtcacacctggctgtctcagttcttcatgtctttaccatagtgcatcctcttccaggatttgcctcatcattctgttccagtcctcattcttgacttagtatgcttaaagtaatccttattatctttggagacgcaacttaatcactacctgctctaagagctactttgtgatagttaaccactctttcctttcaatatgccctttcttagtatctgcaacatattattttctgactactggtttataagcgtcttttagatatcatgtctgtctcactttttgtatccccagcatccagcttattctcaaggacatacttagcactaagtaagtggtgagtggatggatatgtgttt

SEQ ID NO: 86867 - DNA, 1165 bp, Homo sapiens
aatactcactgactaaaagctgtcacgtagttgaaggcatgcagagactgggtcagtctggttttctggttttcttctgccacatttagttgcatgaatttgggtaataacagctcccctcactcagtttatatttttgtagaaggttaataagtgctaagttaacagtaaaataataatatttaaagtgatagattaaatcattgaaaaatttgaataatttcaaatttagggacaattaagaaaaacatttcttgatggtaggaaaaatagacttaagttagaagataatgctgtatgtaaatctagatatttagattgctaaataattccatttggacagaatcgtgagttttaaatttgctaatcatatgaaaaaatagctagagtgtgagttgatttttgctttcctattagtgaacagtgtgattttattgcttaaaaattaatgaaagtttatgttgcatttgtagtcatgttgagaacagaggtcattatttcaagaaacgagatgtcgccagaatcactgcagcaactttcaaagtcataaaatgattccctgtcttattagtgtcccctctaattcattttccacaaccatggaatgacattttgaaatttgcatatgaagttctccaatttaaaatcagccyatggtttcctaatactgtaggcaaaagtgtccatgttatcagcatgacatacacatccccttccggtaagactcctgttaaatctcctggccttatctatgtccattccccctgctccctctcaccctggacaccagtcatgacatactatcttgtcacacctggctgtctcagttcttcatgtctttaccatagtgcatcctcttccaggatttgcctcatcattctgttccagtcctcattcttgacttagtatgcttaaagtaatccttattatctttggagacgcaacttaatcactacctgctctaagagctactttgtgatagttaaccactctttcctttcaatatgccctttcttagtatctgcaacatattattttctgactactggtttataagcgtcttttagatatcatgtctgtctcactttttgtatccccagcatccagcttattctcaaggacatacttagcactaagtaagtggtgagtggatggatatgtgttt

SEQ ID NO: 86868 - DNA, 1053 bp, Homo sapiens
cttctccttgtctttgactttcagtatttatactataaagtatctgcttgtgggcatctttgctttttttccggagcattcattaagcttcttggatgtataggttattgctttctaataaaattggaaagttttctgccattatttctccaaatattttcttttctctcctggtactcagcacaagggctacaggattacagctgctcttatgttaatggacctcgggctgctttgcttttttagattcttacgtttattctctgctttcctctgttgtcctttcatattgtcagctgttgctacttaactactgtgagtttgtttcttttgctccaacttgctttttgtgtatttctactcagatgatctaggaaacttgataattaaacttattatgttatgtctaaattaagagcaaaatagctctgcttaaatctgtgaaaggctgtgctgtgagcaatagccagatagccaagactaaagttgcccctaccctgaagtaagaagtagtaacaccaggcgcagtggctcacacctgtaatcctagcactttgggaggctgaggcaggcggattacttgaggtcaggagtttgagaccagcctggccaacatggtgaaaccccatatctactaaaagtacaaaaattaaccaggtgtggtggcatgcctctgtaatcccagctgcttgggaggctgaggtatgagaatcgcttgaacctgggaggtagagattgcagtgaggcaagattgtgccactgcattccagcctgggtgacagagtgaaactccatctcaaaaaaaaaaaaggaaaaaaaaaaagtagtagttactagytgcccagttgatttggttctgtccagcaggtaaggattactagggctgcttgctaggagtctgcttttcttgtgaatgttactgctgttattttttgtatttcttttttaagaattcatgaattttcaagaaccagagcaatatatccccaagttttgctagtgttgagtcagtggtttctaaatgactcatcagcaatgtgagaaattgagggg

SEQ ID NO: 86869 - DNA, 920 bp, Homo sapiens
tcacctgggaatcttgataaaayacagcatctggccgggcacagtggctcatgtctgtaatcccaatgtcccagtgctttgggatactgaggagggaggatcacttgaggccaggagttcaagatcagcctgggcaagatagcaagaccctgtctctgtaaaaaatctaaaaattagccaggcttgatggtgcatacctgtagtcccagatgctcaggaggctgaagtgggaggatcccttgagcccaggagtttgaggttacagtgagttgtatggctccagagatcctgtcttttacattattaaaaaacaaacaaacaaacaaaaaaaaaaaacagcatctgcatcagtaggttaaagtctgatgctctgcatttccaacaagctcccaagggattctgatgttgctggtcgaccattacacttggtggctaatcttgaatgtagtcttgagctcgagtatttacaaagtgaaacacatattactttattacaattttttcttattttattaaggccaatgctttctttaaagtactgtaaaatattttctatgaacatgggatgtaggtagggtcaagaaccactgctctagaagtcttacacaacagatacctaacatatacaggaatattccttatagtactgtttaatagcaaacaaatggaaacaacaaaaatgaccatcaacagaaacctgacatagttatataacagagcacataccacctaacagtaaaagtaaataaactagagctacctaaataaacatagataaatcttggccaagttgtgtgaagaaagcaagctaaataaagatatctgtatttaaatagtcttaagacaatcaaaataaaactatatatatataatgttcataggataaaggtatgtagttaagtatcaacacgtggatatag

SEQ ID NO: 86870 - DNA, 706 bp, Homo sapiens
atcttattatttattaaagtatgttttagtaatatattgatcacttcctcattcttattaaagggatttttgcaatagttatttgtcttgtactctcattacataaacatttcaacttccacaatgtctgctttggtctcataagtggattattctttgacaacaaagcagctgaagaatattgctcattgatgagtaggcaactttctgaagtttttatttgttctcaaacttcttcttgttaattatgaaaaaatagctggtctactgaaaactaccagagagaatagatttggggaatattgatcgacaggatgtatcttgctaaactcatccagcccactgagctgtgataagcactttccttcatctggatgagtgagcacatggtgtgtctcatttaaaaaccaaaacagttttcagaaatttatagcagcatgaagctgtactatagtaatgtcctcttaacaataagcgtatctataaaaaagactggggttgactaagtgaggacctttgaggaagatgttaaaaatgctgaygttgcaaaggcattgaccccagttggcaggtcttttttgacctttctgcctctcatgaactgagcagaaagtagccatgaaaccaaatatgtggcagagaaaatgaccaacctgtaatatttactctagactctgaccattatccagtattttatgatagagac

SEQ ID NO: 86871 - DNA, 737 bp, Homo sapiens
attttccatcctcaactggatgagggcaagggagaagcaggctaggggtgtgtttttctctcttcccctcaacaagcaaggcagacttactggcggtagttgtaggcaatgtcagcaaactgcttccgtcttgcacggtacacaggatctttaaaaccctaggagaaaagagacacctgatttttcaaggcttcataggaagaggtctggtacctttatgaatgctttgaatgggggctctcaagccatgacagtgcatgtctccttcccttggttataccctaaaactaaagtctcggttaaacttagctctcctaccagatactgtgagtgacaccttattagtaactcctttgatttagcatgagcctccttgctgtrgattccaatgtgcatgatctgttcttaaagaaacctcatctacagcatatctgactgacacacttgctaaactaagcaaagttcataggatggatgtctatgatgaagatgtacaatatccatttaattcctgattaaggtttgtgtctagctctaccttttaatttcttgatagacgagcaggcacatgcttattgctcttgcaatttttaaaaataccattgattaaatacatactatgtgccagtttgtgagtactaggaactgattttacatataattctcacaacaaacttgcgagttcgatgagtatgattatcctgttctttccggaataaatggtggttcagagaagt

SEQ ID NO: 86872 - DNA, 737 bp, Homo sapiens
attttccatcctcaactggatgagggcaagggagaagcaggctaggggtgtgtttttctctcttcccctcaacaagcaaggcagacttactggcggtagttgtaggcaatgtcagcaaactgcttccgtcttgcacggtacacaggatctttaaaaccctaggagaaaagagacacctgatttttcaaggcttcataggaagaggtctggtacctttatgaatgctttgaatgggggctctcaagccatgacagtgcatgtctccttcccttggttataccctaaaactaaagtctcggttaaacttagctctcctaccagatactgtgagtgacaccttattagtaactcctttgatttagcatgagcctccttgctgtggattccaatgtgcatgatctgttcttaaagaaacctcatctacagcatatctgactgacacacttgctaaactaagcaaagttcayaggatggatgtctatgatgaagatgtacaatatccatttaattcctgattaaggtttgtgtctagctctaccttttaatttcttgatagacgagcaggcacatgcttattgctcttgcaatttttaaaaataccattgattaaatacatactatgtgccagtttgtgagtactaggaactgattttacatataattctcacaacaaacttgcgagttcgatgagtatgattatcctgttctttccggaataaatggtggttcagagaagt

SEQ ID NO: 86873 - DNA, 737 bp, Homo sapiens
attttccatcctcaactggatgagggcaagggagaagcaggctaggggtgtgtttttctctcttcccctcaacaagcaaggcagacttactggcggtagttgtaggcaatgtcagcaaactgcttccgtcttgcacggtacacaggatctttaaaaccctaggagaaaagagacacctgatttttcaaggcttcataggaagaggtctggtacctttatgaatgctttgaatgggggctctcaagccatgacagtgcatgtctccttcccttggttataccctaaaactaaagtctcggttaaacttagctctcctaccagatactgtgagtgacaccttattagtaactcctttgatttagcatgagcctccttgctgtggattccaatgtgcatgatctgttcttaaagaaacctcatctacagcatatctgactgacacacttgctaaactaagcaaagttcataggatggatgtctatgatgaagatgtacaatatccatttaattcctgattaaggtttgtgtctagctctaccttttaatttcttgatagacgagcaggcacatgcttattgctcttgcaatttttaaaaataccattgattaaatacatactatgtgccagtttgtgagtactaggaactgattttacatataattctcacaacaaacttgygagttcgatgagtatgattatcctgttctttccggaataaatggtggttcagagaagt

SEQ ID NO: 86874 - DNA, 855 bp, Homo sapiens
  misc_feature (1)...(855): n = A,T,C or G
ccccactctagtctggaggaggagatcttggagaggttcaagctggaccttccatgggattctcaccccaaagaccatcttttgggatctcactcttgcttcctcttggcatgtctcctgtgtgattctttggacattttttctttcagtcacctcccacttcatgagattatttcttcccccaccctcccttccaggtggctggggctgcctaactcaggggagactccttgcaggagaaagccagggttgcagcttaatctggctcagctcacgcctttagagaaaagaactgtcttttctttgtgtttcttttcctataccaccaaattggtaaaatattctaggtcaaaaagaccctgtgggctgggcacggtggctcacgcctgtaatcccagcaccctgggaggccaaggcaggtggatcacctgaggtcaggagttcgagaacagcctggccaacatagtgaaaccccgtctcaactaaaaatacaaaaattagccaggcatagtggcaggtgcctgtaatcccagctactcaggaagctgaggcaagagagtctcttgaccagggaggtggaggttgaggtggnctgagatcgtaccaatgcactgtagcctgggggatagagtgagattctgtctcanaaaaaaaaamccacacacacactaaaaaacaaacaaaaaaaaacaaccttatgtatggagcaataatcacaactcatatgctatcaataggccacaacctctgtgatcattgaatatctgatgaggtcattgatctctgaatatctgatgaggtcatgatcactgggtatctgatgagatcattgaatatctgatgagggggaggagt

SEQ ID NO: 86875 - DNA, 855 bp, Homo sapiens
  misc_feature (1)...(855): n = A,T,C or G
ccccactctagtctggaggaggagatcttggagaggttcaagctggaccttccatgggattctcaccccaaagaccatcttttgggatctcactcttgcttcctcttggcatgtctcctgtgtgattctttggacattttttctttcagtcacctcccacttcatgagattatttcttcccccaccctcccttccaggtggctggggctgcctaactcaggggagactccttgcaggagaaagccagggttgcagcttaatctggctcagctcacgcctttagagaaaagaactgtcttttctttgtgtttcttttcctataccaccaaattggtaaaatattctaggtcaaaaagaccctgtgggctgggcacggtggctcacgcctgtaatcccagcaccctgggaggccaaggcaggtggatcacctgaggtcaggagttcgagaacagcctggccaacatagtgaaaccccgtctcaactaaaaatacaaaaattagccaggcatagtggcaggtgcctgtaatcccagctactcaggaagctgaggcaagagagtctcttgaccagggaggtggaggttgaggtggnctgagatcgtaccaatgcactgtagcctgggggatagagtgagattctgtctcanaaaaaaaaaamcacacacacactaaaaaacaaacaaaaaaaaacaaccttatgtatggagcaataatcacaactcatatgctatcaataggccacaacctctgtgatcattgaatatctgatgaggtcattgatctctgaatatctgatgaggtcatgatcactgggtatctgatgagatcattgaatatctgatgagggggaggagt

SEQ ID NO: 86876 - DNA, 855 bp, Homo sapiens
  misc_feature (1)...(855): n = A,T,C or G
ccccactctagtctggaggaggagatcttggagaggttcaagctggaccttccatgggattctcaccccaaagaccatcttttgggatctcactcttgcttcctcttggcatgtctcctgtgtgattctttggacattttttctttcagtcacctcccacttcatgagattatttcttcccccaccctcccttccaggtggctggggctgcctaactcaggggagactccttgcaggagaaagccagggttgcagcttaatctggctcagctcacgcctttagagaaaagaactgtcttttctttgtgtttcttttcctataccaccaaattggtaaaatattctaggtcaaaaagaccctgtgggctgggcacggtggctcacgcctgtaatcccagcaccctgggaggccaaggcaggtggatcacctgaggtcaggagttcgagaacagcctggccaacatagtgaaaccccgtctcaactaaaaatacaaaaattagccaggcatagtggcaggtgcctgtaatcccagctactcaggaagctgaggcaagagagtctcttgaccagggaggtggaggttgaggtggnctgagatcgtaccaatgcactgtagcctgggggatagagtgagattctgtctcanaaaaaaaaaaccacacacacactmaaaaacaaacaaaaaaaaacaaccttatgtatggagcaataatcacaactcatatgctatcaataggccacaacctctgtgatcattgaatatctgatgaggtcattgatctctgaatatctgatgaggtcatgatcactgggtatctgatgagatcattgaatatctgatgagggggaggagt

SEQ ID NO: 86877 - DNA, 759 bp, Homo sapiens
  misc_feature (1)...(759): n = A,T,C or G
ttgtcaaaaaaagcagtatttatatcattatttttaatgctataattttatgtaatacrtacggctgttttctacaatgaccagaaaagctgcagaaggaaaaccctaaagattgtataagaattcattatttttagaaacttanatgagaaagccagagagatcacttacactaacaggcacagtggttaagaatgtgaattcttgctatactgcacagggtcaagtcctggctctacatttactagcttgtgaccttgaatggttcttagccatttattgcctcaattcttcctctataaaaggggctattattatttcttcataaggttatggggaagattaatcagatgaccagtgtaatattaatggaacagggtacacaataagcacttaacaaatgtagctattgcttttgttcttttcacttttgcttgtggaaggcaaccttaccttgtgcttgccttattttttctgccaggaaatgtgctctgaagatcaagaggtccttctcagcaggctacaatatgatcagctgcagcatagatgtgttggactcaccccaaagagtcaagatggtcttcaatgaaatgaaagcaaatttggaataactcggctttgaccttgagaaagtttcctaagcttcagctacatatcttggagtagcttttatctaccgtggaatttttccaagactgttacatgaatcatgagaaggtttcttaggctgtcctcaccatgtttaaagcaagagtattt

SEQ ID NO: 86878 - DNA, 759 bp, Homo sapiens
  misc_feature (1)...(759): n = A,T,C or G
ttgtcaaaaaaagcagtatttatatcattatttttaatgctataattttatgtaatacgtacggctgttttctacaatgaccagaaaagctgcagaaggaaaaccctaaagattgtataagaattcattatttttagaaacttanatgagaaagccagagagatcacttacactaacaggcacagtggttaagaatgtgaattyttgctatactgcacagggtcaagtcctggctctacatttactagcttgtgaccttgaatggttcttagccatttattgcctcaattcttcctctataaaaggggctattattatttcttcataaggttatggggaagattaatcagatgaccagtgtaatattaatggaacagggtacacaataagcacttaacaaatgtagctattgcttttgttcttttcacttttgcttgtggaaggcaaccttaccttgtgcttgccttattttttctgccaggaaatgtgctctgaagatcaagaggtccttctcagcaggctacaatatgatcagctgcagcatagatgtgttggactcaccccaaagagtcaagatggtcttcaatgaaatgaaagcaaatttggaataactcggctttgaccttgagaaagtttcctaagcttcagctacatatcttggagtagcttttatctaccgtggaatttttccaagactgttacatgaatcatgagaaggtttcttaggctgtcctcaccatgtttaaagcaagagtattt

SEQ ID NO: 86879 - DNA, 606 bp, Homo sapiens
ccaggtttgcatgggcttgagaaaggaatcagcactttagagtcacccagggctcagcatcttctaaaagatctttcttgcttctccaggacattgccaccaaggggtttcaatgaatggcacccacctggacaagggggcctgactctttcctctatgttcaggaccatggataatctcatccccacactgcggaggtagcctgcctccactcattcatcatctctcttttgcctgggaatcgttcataattctggcagtaactgctgcccccagaaataaggcagaacaagtcctttcttgctgcaaccccttcttacttaggggacatttagaatgaccaaaggagattccacaaatatgtactgagcacctcctgcgtaccaagcacaaagcattgtggggtgcatacaagggagtcaccatcctagtggtgcttacattctggcagggacaacacgagataagcaataaataaatgtaaatacatgacaatgtcaggaaattcttgaagaagaagaataaagaagcataaggaaatggaaagtgatggggatgctcttttttaaattstttttaaaaaattccatctttattggggtataa

SEQ ID NO: 86880 - DNA, 663 bp, Homo sapiens
ctccaagaagctctgtgactaagtgtcaccatcaaggacgagaagagtctacaccagtgattctcaacactggctatgtattagaactttttgggagatctgaaaattttctgggcccagattccaccccagagcaattaaatgagaatctctttcattaaggtacaggcattggtgctttttgaaaagctccccaagtgatcctcgtatgcttccagggttgagaagctctggtctataggacacctatacttccaatagatgcagcatgctcaaatcaatcagatcagttgctgtgctgatgagtcaattcagtccaagtagccatgttagcatgtaaagcctatgactattttgttgtgtcttttagccagatattgagccagcacaatagagcagttaaaaaggaggackgcctggggtcaaattctgtgtccactcatgggctatgtgactttagaaaagtcacttaactcttttgaggcttagtttcatcatctgtaaaatgggggcaatggtaggaattacaacacagattgtgttgagtattaacttagaaaatatttatggaagtcttagagcagtgcccatcacagagtgagccctcactaactgcgcactgtagttatgtgtctagatttaagccagctggaagtgccagga

SEQ ID NO: 86881 - DNA, 976 bp, Homo sapiens
tcttccctaatccccaaatttgcattttctagagcgtcaatatgcactttctatttctgtgtacctcttatgctttttctaccctatgggtttctataagtcactaaatatcaacatgaaggccgactgaggcaaagaaatagcaaactaatgttacctatatctattttgttacttcttctaattcacctttcactctgcagccaggagtgatatttcaaaaatccttaactgatcatctgtcactatgaacaggtctaaggaatcaaagcaagagatgaggcaaagaccatataaaaggagccttgtaagccatgcagaagtgtcaccattggcagggcgcggtggctcatgcctgtaatcccagcactttgggaggccaaggcgggtggatcacgaggtcaggagatcgagaccattctggctaacatggtgaaaccccgtctctattaaaaatacaaaaaaaaattagctgggcgtggtggtgggcacctgtagtcccagctactccagaggctgaggcaggagaatggcatgaacctgggaggcggagcttgcagtgagccgagatcgcgccactgcactccagcctgggaagcagagagagaccccatctcaacataaaaaaaaaaaaaaaaaaaggaagaagaagaagaagtgtcaccattgaggttctctagtatcactggcaacayggtagggtaaatgggtcagtggagaagccagctgttagaaaaggtaccaccctttgattaccttctgtacatgttttatgactctcagatttggcctcactgaattatattagagtatctttcaatgttttaactgtttgcatctctcccctgccctcctcctgcattagaccataaggttcttgaagacaaatacaatttttacttactaacttatttattttgagacaagatctcactttgtctcctaggctggagtacagtggcacgatcatagctca

SEQ ID NO: 86882 - DNA, 721 bp, Homo sapiens
tcttatttcttaaaatcatctgcattgccacccaagacttcaccctaatgatgttctctgcattacttcctcaaataatctctgttgatcacattcaattcctgggccatttcctgaggttctgatgtgtttgatcatatcaacttgtatatggatctatttgaattaattttgtttacattttgtatcagagctcattccttaggtggactgaaggagaacagcaaagctcatttggattttacattttgcttcagttgtgaagaggttcttgctgcacatggaggctcttggttgattgttctcttttctgtctcctggttgactattctcttttctgtctgaactgcttctgatctttcagtctcattttaaatrttttgtattacgtgtatttttaacatgataagctactgtaaatgtttgtgaagtgtgtattaaaaaattatactttagaaaaattagctttcattgactgtgactgaaggaatgaataaatgaatgaaggtagtgacaaatattacttttttatcaaactgtttattggatgtggttgcctcatggtctttccacttagattacaagcttctagaagacaggaattaccttatgtttcatcagtatattccttggtctttagcccaaggttggagtgtaggacttgtgtgaacacttgtaagaaagtatatttaagaaggaaagccctctaaagttaaagaaa

SEQ ID NO: 86883 - DNA, 1581 bp, Homo sapiens
ataataattagcattaaatttagctcaagctagattatatacaatgatttgagtgctgagttttcattgccttgataggtgactttaggcatgtattgtcttatgtcagctgtccttaaatgacatctgggatatctgtcattctcctgagatcattttttttgaaacagagtgaaggagcctctctaaaatcattttagccttctcatgtgacacactgcctaatactatttttcttccgaaaacccagtctattggtttgatgagcaataatgcagcatcagttctgaacactaagcattctttcacctcatatatagtcaagaagaaagatatttatgatggtgtggacattgcatctctcccaaagaattttattgaccccgagaataagccctggagatgagggataacatttgcgttgccatgtgggatatggccttgcatactcccagacaccctgaggggaggctggagaatgttattcacacaaggccagcatcagatcctgggctaatcaacaggggtgcttgtaacatakgaatcacgtccattatctggcccacacttaggattctgagtctgtcaatgaagttggtcaaattggcaaaaatgtctgttctgatctctgtgaacaccagagagctataaaatttctctgagtggaaaattcaactctagcagaaattacaagtctgcagccaacaccaccaagcaaactgaataccggccagaatattaaaaaaacaaatgaccacaaaccatagaaaatattcagatctgtggtaaaaagaaaaatactccaaggactccaaaagtctgatttattaaagacctgggttcctgcaaatgtataaaatcatacaattactcatagaaaattggtcctcaatgcattttgcaccaggtagaagatataagaagaaaagccccatttatagatcactatgatttattaggcaatttgcccacgtgcaatgctgtgtgaggacgaggcccagcatggaaccctaaccaggagaagaaatcaagatgcagccagagggccctggaatacctctggcttaaaggcatgtttgtgtgcaacttggcagtgatgagaccatgtagggaggctggaaatcgtaaagaaagaaaaaaattccccttggactccaacaactaaaggaggaaggttttccctggggaaagacatttattcacagcccactctgctcttctttgagacgttaaggcctaaccagagcccccactttccttccaagaaggcagaggtggctgtctgatccactatgatggagccactgctcacagtggaagctgtgagtcctgctcacacatggaccttagtgagagtatccagccctctagctgaaagctcttactcttttgtgtcccattccctgaggggcagttaagttgtgcttgtccagaagattaagttttgcaccaagttgcacagaattattatgccttagggatgcacagacagggaagaggatcctaggtgataatcctgaaggcatgtgtgttgctgagaaaaaaatgcctaaaactactgtctctgtgatcctgctgaat

SEQ ID NO: 86884 - DNA, 653 bp, Homo sapiens
tgcatttaaagccatattttttaaaagttaaaacaaaacaagtgtgtcaaaagcatttttatttaaaaaggtgaatgaaacagacctagggaaagtgaagcaaaagggagaaaagttgttttaaaagacatgatctctttcacagtatttctggtattctattttggcactatgaattatacacagcatcacttagatttaagagttttggccaggtgcggtggctcacgtctgtaatccaagcactttgggaggctgaggcgggcaggtcacsaggtcaggagtttgagaccagcctggccaagatggtgaaaccccatctctactaaaaatacaaaaatagctgggcacagtggtgggtgcctataatcccagctacttgggaggctgaggcagaagaactgattgaacccgggaggtggaggttgcagtgagccgagatcacgccatgcactccagcctgggtgacagagcaagactccgtctcaggaaaaaaaaaaaagaagttacaacaatacatttgaaaccaaaaacgttaattcataaaagtacttacctacaacaccattcaatacgaccttcgccctcacaagtttttgcccaatgattatctgccaaatttttcattgcaacggcatattcacaaagagttt

SEQ ID NO: 86885 - DNA, 1478 bp, Homo sapiens
gcaccgcaacaaagagccggagtccacatgccgacccaccgcagaggcaaatactcacccgggcagaactcagtgctgggatgcccacactgcccaccacgcggaacgctggcccggaagtgactccgagactaccactcccataaggtcttggggctttcttgcctagaactcccagaagcccatgcgacacttccgctggatgcgcctacggctccggggtcccgcttggcctacaactcccagaaacacttgcattgctctttctgccgctcccaaaatacactgctccccctccccccgcgtttactttctgcgctgcgcggccgcagggagcggcggagctgcgtgtactgttgtcatggcagcgcgctgtcacccggcaggttgctggatgggcgaagtagttgtattctgattaactgattttgtgggattattataggattttaaggggattacagggcctatgatttctgccctttgaggcggggttgcgggtgggaattgaaggtggaactgcaggggttggtcgctagtgtaaaaggcgcagatagccatgcgtagagcagacttcgaggattggagtggaactccgcgcgcacgcgggggctgtcgtgatgcgcgtgctggagacccagactctaaacagaaggatccaaagacccttctcacctaacccaggagcccagaggctcagagactcagacccttgagactaagggggttaaaaacgcagacccctggcaccaaagcacctgagagaaccagtagacctggagacaaccgtctgcaccctagacacagggatctggaggcctccaccctccccacaaggcccaagggtcttgaagacccggtgactcaaataccggggcacaaggagtttaaggactcagatatctgagacccttgagatccaggtccccaaacctaggtcctcgaaaaaactgaggctcaaaattcctctagayggcgcggtggcttacacctgtaatcccagcactttgggaggccgaggcgggtggatcacgaggtcaaaagatggagaccatcctggccaacatggtgaaacctcatctctactaaaaatacaaaaattagctgggcgtagtggtgcgcgcctgtagtcccagctactcgggaggctgaggcaggagaatggcttgaacccagaaggcagaggttgcagtgagccgagatcgcgccactgcactccagcctggccacagagtgagactctgtctcaaaaaaaaaaaaaaaaaatcctctagattaagggaccaccagagccttagactgagatgtggagatgtgcagagagccccaggatgtgtaggtctacggccggtgatgacgtgagaaggaaccccatgcaccctgtagcccatttttttcccccataacaggaaaccatgatgccttcctttcatattaaatgagctccgtgaggtcactcttaagccttatcatgggcc

SEQ ID NO: 86886 - DNA, 1207 bp, Homo sapiens
  misc_feature (1)...(1207): n = A,T,C or G
ccgcgcccagccaaaattctagtctttttgtcctagaacattaaaattctatgttcaaatcttagatttaattcagataatgttagaatcctggagtttttttgatccaggggaatctggaatgttagaatcttggattcataaaactctaaaccttgagcctctagattctagaatcatggataatagtgtgtcggaatctgagaattctagaatcttaggttctgggcattctaatagtatcctggaatccacctgatgcaggaatcctctctccattgcctctgaaaagtgaccatccatactgttccaattttcttccctccatgagtaaagcactgattgtggtaagagatgctgtgtgggaatttcccatcatgcattgctccatgatggaacctcctttaacttaagcctatacatcagactgggagarcgatgttcagatttcagccgaaagtgaagcaggagaaatgcagagatatgaaggtggaagagagtgagaggcaggggaagggtagggggatgaagggatgtaggggtgaggactacttttccagatccagagccaagacagcaagaatgacagagagagacagacacagatgtttctggttccccaaccctgaattcgcagtcattagcctgctgcctaatgtcagaggtcagaggctggggaatggacttgtcatccccgaaaggatcccagctgtctagggcatggaccagaaatgaaacaagtgcgctgagactgtggtgagggcttaaggtnagactacaggtagacatgcattgtaatggtgatgatatgatagactagtaaagctgtggtcagagttgatccnnnnnnnnnnnnnnnnnnnnnnnnnnnnnnnnnnnnnnnnnnnnnnnnnnnnnnnnnnnnnnnnnnnnnnnnnnnnnnnnnnnnnnnnnnnnnnnnnnnnaggaaagagaacagagaactgctggctggacaatgccctccagaaggcaagagaggacaggataccagcaccagtggaggcgtctatcttagctgcaggtgcagactgttcatctagagaaatgggagaggagacagaggatgtgggcacgcaggctaggtggcaagaccgacctttctaatttttgctattctgatggatgaaagcgatgtgttattgctgcctgggatgcatgatgactggagccacatcctgaataacac

SEQ ID NO: 86887 - DNA, 584 bp, Homo sapiens
acttccaaagacccatgattaccatggccctgtcaggctgtaattgctgcaatttccaatttacaattgtcatcatctatggttgataaaggtatagcaatatttctatttcctcatgataatgaaggtcaattacaactgccagtataataacttatttctttgtctgccaacctacatacacaaggaagccaaaatgacagggagctactaaaactttattcttattggaatgcttactatgtacccagaagaagcattctccctactccagcagagcttaatgctgtaggtccaggaagctcaaattctccaagggagttttagtgagaggagccactctcaccctctgcccttggtttacaaacctgtatattctaggacccaatatcttacaatgtccattggttcaaagtataacatgttaaagcacagagccccaactctgaaaagtaccatccctaaattggcayttagttgcacctttatatccacctttaaaagaaatatcttttaatgttctatcagactgatagattctgtttaatatagtatattatagcaccagtggatcatttggttgt

SEQ ID NO: 86888 - DNA, 584 bp, Homo sapiens
acttccaaagacccatgattaccatggccctgtcaggctgtaattgctgcaatttccaatttacaattgtcatcatctatggttgataaaggtatagcaatatttctatttcctcatgataatgaaggtcaattacaactgccagtataataacttatttctttgtctgccaacctacatacacaaggaagccaaaatgacagggagctactaaaactttattcttattggaatgcttactatgtacccagaagaagcattctccctactccagcagagcttaatgctgtaggtccaggaagctcaaattctccaagggagttttagtgagaggagccactctcaccctctgcccttggtttacaaacctgtatattctaggacccaatatcttacaatgtccattggttcaaagtataacatgttaaagcacagagccccaactctgaaaagtaccatccctaaattggcatttagttgcacctttatatccacctttaaaagaaatatcttttaatgttctatcagactgatagattctgtttaatatagtrtattatagcaccagtggatcatttggttgt

SEQ ID NO: 86889 - DNA, 189 bp, Homo sapiens
acaccaaattggaagacagcaggagctgccccataataccagtaaagtgagaagcagagataaactagtcctagacagcygactcatgttgggggcagcccactcacagtggccctgacccaactctgactagaggccacttgctctcaacaccagggtgctcaatggcccgtcctggtactctgctct

SEQ ID NO: 86890 - DNA, 2393 bp, Homo sapiens
gcatcctgcccctgggactcctctgccagagcctgagagctttctcctgcccacaggctaggggtagggcagttggaattgatccatgccttctagctagactgtgggtcccctcagtcttgggcatggtgacagcccagcatcagacagaggtcagtatcaaactagaaaatktaataaatactgtcagatttgtagacccaagaaaatataaactgccaatcacggaggaaaaaaatctctcaatgatcttatctttatatgattcccttgctgcctggagattgacatttccttggggataatctggtcataggattggtgaaggtggaagggaggcaacctccaaaggtggggccctctgctcacctgggacagggagggcctgaggtaggtgtctgtgtgggctggggaggaggatgggagcagtgcttctagatgtttccactttctcctcattagataataacgaatgggtgatttccctagtcactgcagtgtgaggaaatctacaaaattaatttcacaatacgctttacaggataggtggagaaacacatgaagtacaactgcagtgggttataaaaaacggcctttcgagttgagcaataaattcgttcaagcagccattctgaaggacaaactggctctgtatttaagaggggcattccagcacttctctagccactgggttgacaatgactcaccaaagcctctggtagccaccacaggacacccagagcatatgttttaaagctgaacaccaaactgcggacttcgggagtaagtgaactgactggtttttattttgttttactgcttttaacattacagtaactgttacaggttccagcaggctaactgggtggaaatgagtttggtttcacttagtctctctaaagagaaagcaagtcggtagactaatacctaataaaagcaaagctgccaacaattgaaattgcctaggctgctctgtgtgtcccacatgcatgggtgtgggtgccagtgtgtgtgcgtgtgtgcatgcatgtgcatgtgtgttgggatagagtggtaagaaaatgggaaataataagaatgttcagtccatagcccttcattataaaaaggtgagctgtaataaatactagtgccacatttagccaaaactttactccagccaaaggtgatattttcatgataacatcctgtgattgctttgttcttcgtcttttatgttcttcctagatgggctcagaacatacaagaattaagtacacatcttattttccagtgataatgctaccggcaaattctgttgtttgtataaacatcagccatgtttatataactaaactagtgttttgttttgtcaattcagcaagaaattagaccaaatggtggcttaatgctgcattgatttggctatcaatttgttttcacttttctgcaaaataattaatacattattaaattgaattgtgctgatgccacagttgttcttatctcaagtgtcttaaaattcatttaatttgtttttcctttggtttcattattcaaattttaacttcagttctcaagattttatctgatggaagagatggagtccattactaaggactccattgtgctccatcatgccagagttgtaaaatagatcttttaaaggaaatttactgtgattttttttctatttaagagcttcctctccagttgagcatgtaagaaaattataccaggagaatacagtaaactctatgaggcaagctataaacatgtagcattgtgattagggctggttctccttctagagacatggtaggattgcaatttcataccatccttgaagttagagagagccacgtgactcatttagccaatgaactgtgagcagaatgacatgtcacttccagctgaagctttaacaatctgagagacattcatacattttccatgtgctgtagccttatacccaaagcctgggtcccaagtgaccatgacaggcagagctccctgttgagccacagagatttagagaatggctgttaacacagcataatccagcccatcctgactaatctgatattaacatgtataataaagaattctatcaatgctgagggaagatgactagttaaggtcctaggttgcaagtctcaaaacctcttctaaggattgtagacaggaaattaaatgacttctagtccctagagttcccaatctcctaccatcccatcctaatatgacagaagtaattcctgagttgcttctgaaaccagagcttccctcagaacccttagcctgccagatggcttcttggagagccctcactcacttttctccttctgctattgctgctcattcattccagtttttaaaaattcatctttatccaggaacctcgcttctagaaa

SEQ ID NO: 86891 - DNA, 2393 bp, Homo sapiens
gcatcctgcccctgggactcctctgccagagcctgagagctttctcctgcccacaggctaggggtagggcagttggaattgatccatgccttctagctagactgtgggtcccctcagtcttgggcatggtgacagcccagcatcagacagaggtcagtatcaaactagaaaatttaataaatactgtcagatttgtagacccaagaaaatataaactgccaatcayggaggaaaaaaatctctcaatgatcttatctttatatgattcccttgctgcctggagattgacatttccttggggataatctggtcataggattggtgaaggtggaagggaggcaacctccaaaggtggggccctctgctcacctgggacagggagggcctgaggtaggtgtctgtgtgggctggggaggaggatgggagcagtgcttctagatgtttccactttctcctcattagataataacgaatgggtgatttccctagtcactgcagtgtgaggaaatctacaaaattaatttcacaatacgctttacaggataggtggagaaacacatgaagtacaactgcagtgggttataaaaaacggcctttcgagttgagcaataaattcgttcaagcagccattctgaaggacaaactggctctgtatttaagaggggcattccagcacttctctagccactgggttgacaatgactcaccaaagcctctggtagccaccacaggacacccagagcatatgttttaaagctgaacaccaaactgcggacttcgggagtaagtgaactgactggtttttattttgttttactgcttttaacattacagtaactgttacaggttccagcaggctaactgggtggaaatgagtttggtttcacttagtctctctaaagagaaagcaagtcggtagactaatacctaataaaagcaaagctgccaacaattgaaattgcctaggctgctctgtgtgtcccacatgcatgggtgtgggtgccagtgtgtgtgcgtgtgtgcatgcatgtgcatgtgtgttgggatagagtggtaagaaaatgggaaataataagaatgttcagtccatagcccttcattataaaaaggtgagctgtaataaatactagtgccacatttagccaaaactttactccagccaaaggtgatattttcatgataacatcctgtgattgctttgttcttcgtcttttatgttcttcctagatgggctcagaacatacaagaattaagtacacatcttattttccagtgataatgctaccggcaaattctgttgtttgtataaacatcagccatgtttatataactaaactagtgttttgttttgtcaattcagcaagaaattagaccaaatggtggcttaatgctgcattgatttggctatcaatttgttttcacttttctgcaaaataattaatacattattaaattgaattgtgctgatgccacagttgttcttatctcaagtgtcttaaaattcatttaatttgtttttcctttggtttcattattcaaattttaacttcagttctcaagattttatctgatggaagagatggagtccattactaaggactccattgtgctccatcatgccagagttgtaaaatagatcttttaaaggaaatttactgtgattttttttctatttaagagcttcctctccagttgagcatgtaagaaaattataccaggagaatacagtaaactctatgaggcaagctataaacatgtagcattgtgattagggctggttctccttctagagacatggtaggattgcaatttcataccatccttgaagttagagagagccacgtgactcatttagccaatgaactgtgagcagaatgacatgtcacttccagctgaagctttaacaatctgagagacattcatacattttccatgtgctgtagccttatacccaaagcctgggtcccaagtgaccatgacaggcagagctccctgttgagccacagagatttagagaatggctgttaacacagcataatccagcccatcctgactaatctgatattaacatgtataataaagaattctatcaatgctgagggaagatgactagttaaggtcctaggttgcaagtctcaaaacctcttctaaggattgtagacaggaaattaaatgacttctagtccctagagttcccaatctcctaccatcccatcctaatatgacagaagtaattcctgagttgcttctgaaaccagagcttccctcagaacccttagcctgccagatggcttcttggagagccctcactcacttttctccttctgctattgctgctcattcattccagtttttaaaaattcatctttatccaggaacctcgcttctagaaa

SEQ ID NO: 86892 - DNA, 2393 bp, Homo sapiens
gcatcctgcccctgggactcctctgccagagcctgagagctttctcctgcccacaggctaggggtagggcagttggaattgatccatgccttctagctagactgtgggtcccctcagtcttgggcatggtgacagcccagcatcagacagaggtcagtatcaaactagaaaatttaataaatactgtcagatttgtagacccaagaaaatataaactgccaatcacggaggaaaaaaatctctcaatgatcttatctttatatgattcccttgctgcctggagattgacatttccttggggataatctggtcataggattggtgaaggtggaagggaggcaacctccaaaggtggggccctctgctcacctgggacagggagggcctgaggtaggtgtctgtgtgggctggggaggaggatgggagcagtgcttctagatgtttccactttctcctcattagataataacgaatgggtgatttccctagtcactgcagtgtgaggaaatctacaaaattaatttcacaatacgctttacaggataggtggagaaacacatgaagtacaactgcagtgggttataaaaaacggcctttygagttgagcaataaattcgttcaagcagccattctgaaggacaaactggctctgtatttaagaggggcattccagcacttctctagccactgggttgacaatgactcaccaaagcctctggtagccaccacaggacacccagagcatatgttttaaagctgaacaccaaactgcggacttcgggagtaagtgaactgactggtttttattttgttttactgcttttaacattacagtaactgttacaggttccagcaggctaactgggtggaaatgagtttggtttcacttagtctctctaaagagaaagcaagtcggtagactaatacctaataaaagcaaagctgccaacaattgaaattgcctaggctgctctgtgtgtcccacatgcatgggtgtgggtgccagtgtgtgtgcgtgtgtgcatgcatgtgcatgtgtgttgggatagagtggtaagaaaatgggaaataataagaatgttcagtccatagcccttcattataaaaaggtgagctgtaataaatactagtgccacatttagccaaaactttactccagccaaaggtgatattttcatgataacatcctgtgattgctttgttcttcgtcttttatgttcttcctagatgggctcagaacatacaagaattaagtacacatcttattttccagtgataatgctaccggcaaattctgttgtttgtataaacatcagccatgtttatataactaaactagtgttttgttttgtcaattcagcaagaaattagaccaaatggtggcttaatgctgcattgatttggctatcaatttgttttcacttttctgcaaaataattaatacattattaaattgaattgtgctgatgccacagttgttcttatctcaagtgtcttaaaattcatttaatttgtttttcctttggtttcattattcaaattttaacttcagttctcaagattttatctgatggaagagatggagtccattactaaggactccattgtgctccatcatgccagagttgtaaaatagatcttttaaaggaaatttactgtgattttttttctatttaagagcttcctctccagttgagcatgtaagaaaattataccaggagaatacagtaaactctatgaggcaagctataaacatgtagcattgtgattagggctggttctccttctagagacatggtaggattgcaatttcataccatccttgaagttagagagagccacgtgactcatttagccaatgaactgtgagcagaatgacatgtcacttccagctgaagctttaacaatctgagagacattcatacattttccatgtgctgtagccttatacccaaagcctgggtcccaagtgaccatgacaggcagagctccctgttgagccacagagatttagagaatggctgttaacacagcataatccagcccatcctgactaatctgatattaacatgtataataaagaattctatcaatgctgagggaagatgactagttaaggtcctaggttgcaagtctcaaaacctcttctaaggattgtagacaggaaattaaatgacttctagtccctagagttcccaatctcctaccatcccatcctaatatgacagaagtaattcctgagttgcttctgaaaccagagcttccctcagaacccttagcctgccagatggcttcttggagagccctcactcacttttctccttctgctattgctgctcattcattccagtttttaaaaattcatctttatccaggaacctcgcttctagaaa

SEQ ID NO: 86893 - DNA, 986 bp, Homo sapiens
tgacatttgtactgtctctctttggagaattagtattataaggatctgttatctcttgtcaccttccttatgtcatatgatatgtcacatttcccactgcggagaccaaacatgttcacatcgtgtgcgttccattttcctaatggaaagtggggggaagtgattttctgtcctcatatagagaatgctggggccattccctctgtatgccatatttgataaagcatttgataatcttagtcaatgcctgggccaagaattaaaggggtaattatcagaatgaaaatggtttaatgaaactgtgtctatcagttctgaaaagggcctctatcacaatgaactaaggtagttatgaatagagctaaaacttaggcaacaccatcctggacataggaaygggcaaagatttcatgacaaagacacggaaaccaatcacaacaaaagcaaaaattgagaagtggaatctaataaaacaatagcttctgcacagcaaaagaagctaccaacaaagtaaacagacaacctacagaatgggagaaaatatttgccaactgtaagtctgacaaaaatctaatatctggcagctataaggaacttaactttacaagacaaaaacaaccccattaaaaagtgggcaaagaacatgaatagacactctcaaaagaagatatacatatggttaacaagcatatgaaaaaaaagctcaatatactgagcattagagaaatgcaaatcaaaaccatattgagatatcatctcataccaggcagaatggctattattaaaaagtcaaaaataacagatatcggtgaggttacagagaaaagggaacacttatacactgttggtgggactgtaaattatttcaaccattgtggaaagcagtatgggatggcgattcctcaaaaagccaaaaacagaactatcattcaacccagcaattccattactgggtatatacccagaagaatataaatcgttctacc

SEQ ID NO: 86894 - DNA, 986 bp, Homo sapiens
tgacatttgtactgtctctctttggagaattagtattataaggatctgttatctcttgtcaccttccttatgtcatatgatatgtcacatttcccactgcggagaccaaacatgttcacatcgtgtgcgttccattttcctaatggaaagtggggggaagtgattttctgtcctcatatagagaatgctggggccattccctctgtatgccatatttgataaagcatttgataatcttagtcaatgcctgggccaagaattaaaggggtaattatcagaatgaaaatggtttaatgaaactgtgtctatcagttctgaaaagggcctctatcacaatgaactaaggtagttatgaatagagctaaaacttaggcaacaccatcctggacataggaacgggcaaagatttcatgacaaagacacggaaaccaatcacaacaaaagcaaaaattgagaagtggaatctaataaaacaatagcttctgcacagcaaaagaagctaccaacaaagtaaacagacaacctacagaatgggagaaaatatttgccaactgtaagtctgacaaaaatctaatatctggcagctataaggaacttaactttacaagacaaaaacaaccccattaaaaagtgggcaaagaacatgaatagacactctcaaaagaagatatacatatggttaacaagcatatgaaaaaaaagctcaatatactgagcattagagaaatgcaaatcaaaaccatattgagatatcatctcataccaggcagaatggctattattaaaaagtcaaaaataacagatatcggtgaggttacagagaaaagggaacacttatacactgttggtgggactgtaaattatttcaaccattgtggaaagcagyatgggatggcgattcctcaaaaagccaaaaacagaactatcattcaacccagcaattccattactgggtatatacccagaagaatataaatcgttctacc

SEQ ID NO: 86895 - DNA, 986 bp, Homo sapiens
tgacatttgtactgtctctctttggagaattagtattataaggatctgttatctcttgtcaccttccttatgtcatatgatatgtcacatttcccactgcggagaccaaacatgttcacatcgtgtgcgttccattttcctaatggaaagtggggggaagtgattttctgtcctcatatagagaatgctggggccattccctctgtatgccatatttgataaagcatttgataatcttagtcaatgcctgggccaagaattaaaggggtaattatcagaatgaaaatggtttaatgaaactgtgtctatcagttctgaaaagggcctctatcacaatgaactaaggtagttatgaatagagctaaaacttaggcaacaccatcctggacataggaacgggcaaagatttcatgacaaagacacggaaaccaatcacaacaaaagcaaaaattgagaagtggaatctaataaaacaatagcttctgcacagcaaaagaagctaccaacaaagtaaacagacaacctacagaatgggagaaaatatttgccaactgtaagtctgacaaaaatctaatatctggcagctataaggaacttaactttacaagacaaaaacaaccccattaaaaagtgggcaaagaacatgaatagacactctcaaaagaagatatacatatggttaacaagcatatgaaaaaaaagctcaatatactgagcattagagaaatgcaaatcaaaaccatattgagatatcatctcataccaggcagaatggctattattaaaaagtcaaaaataacagatatcggtgaggttacagagaaaagggaacacttatacactgttggtgggactgtaaattatttcaaccattgtggaaagcagtatgggatggcgattcctcaaaaagccaaaaacagaactrtcattcaacccagcaattccattactgggtatatacccagaagaatataaatcgttctacc

SEQ ID NO: 86896 - DNA, 1658 bp, Homo sapiens
acaacaggcagtggggtctacttgaggacgacgggaagagggagaggagcagaaaagataactactgactaccgggcgctacctgggggatgaaacaatctgtacaacgaacccccaggacatgagtttacctatgtaacaaaccttcacgtgtacccccgaacctaaaataaaagtcaaaaaraaaaagaaaaaaagaaaaatccatgcatatgatacatcagttaacaaggcactggtgaaattaattttaagtattattgtctctttgtgtttttggtctcagaaaagttacgatttcccttagttccttagggcagagagaatcttcaatcactgaagtcaggagacacacattctatctgattttctacattatctgtttgaaaaggttacccacttattagtgttaaagccaagatatccagcaaggatagcaaccaactcttaaggtactctcccttaggaggattcctgattctttaatgttttctaaaaaagcaaaacaaacaaacaaacaaaacaaaacactaaatgttttctctttcaacttatttgaatacactcttttctcactgctctgagcatgaattcaatatttcagggcaaactaactgaatgttagaaccaactcctgataagtcttgaacaaaagataggatcctctataaacaggttaatcgccacgacatagtagtatttagagttactagtaagcctgatgccactacacaattctagcttttctctttaggatgattgtttcattcagtcttatctcttttagaaaacataggaaaaaattatttaataataaaatttaattggcaaaatgaaggtatggcttataagagtgttttcctattgttttcagtgtaggactcactgttctaaataactgggacacccaaggattctgtaaaatgccatccagttatcatttatattccctaactcaaaattcattcacatgtattcatttttttctaaacaaattagcatgtagaattctggttaaaatttggcatagaacacccgggtattttttcataatgcacccaataactgtcattcactaattgagaatggtgatttaacaaaggataataaagttatgaaaccaatgccacaaaacatctgtctctaactggtgtgtgtgtgtgtgtgtgtgtgtgtgtgtgtaagagggagagagagaaaatttcactccctccataaatctcacagtattcttttctttttcctttcctttccttgctcttctttctctcctattgctttcctttcatttccttctcataaaagaaaaataacaatatagaaaataacaaaatatagatggtcaacctttttaatattaaggttacctaaaatgccattatccaaagtggttctctagagatgctgatgtatatacttacatattttacagtgtattcaaataaagagtatattacataagacatatccttttgtaaccaacttttgtcattaacaatttactggacttgtcaacaaacctaaatctgtatcgtctataatggctacgttcattttggtatgaatcttaattacccctttctgcattatttaatgattttctcatatgtcactcttaaatgtacttctaatttttcactttacatcacataatgaat

SEQ ID NO: 86897 - DNA, 683 bp, Homo sapiens
gatatcatgtagataatatacaaacacgtagatagacatatacatacatgtagacacaaaatatagcttacacatgtatgtatctaaaagccctagagatgcaggagttcattgtaaaagagtagagcttcagacctgagagcaacctgtccacccacaactcttggggytccatgaggaaaaatagaggtaccctgccaaagacggagaagcctgtggtgctttatctgtgttcttcaaggggtccaaggctgctagaagtttcctttaggttctctcacatggtaccaaaaggtcgcaaaaggaagatgagatagatagaagtaaacagaagagttaattctagaaaaggccgtttgagaagatttaggtttccaaaaagccagtaaagttttacattatccttggcaaaaatcatgtgagcaagagaagagacagagggagcacacatagttagcatgagtttagggaaagaggaattgagttgactgagaagcttatataaaaaaacccacaggcctcaaattaatatatacataaatagcctgaatatcagttataagtggacttttgactgtagagctcttaaattttttaaaattaaattttagccaagtaaatagcaaacattacttgtttttttctttctaaagtttacatcaagatgaaattttggaggtggg

SEQ ID NO: 86898 - DNA, 774 bp, Homo sapiens
acacatcatagtcaaactgctgaaaaccgaagataaagaaaaaaatctttagggcaaccaaaaagaaaaggagaaattacatacagaggaacaaagaattacatcagacgtcttgtcagtaactctgcaagccagaagacatggaggaacatctataaaatgttgaagaaaaattgcaaacccaaagttctatagctagcaaaaatatctttcaaaaatgaaggtaagataataatttgttttcagataggcaaaagtgatggaaagtcactgccagaagcaagaaatatcataggaatttatttagaaagaatgagaattttactagttggaaagctggatctgcataaagaagtggagagtgaaaaaacttggggagttgggcatggtggctcactcttataatcccagcactttgggaggccaaagcaggaggatcacttgagcccaggagttcaagaccagcctgggcaatagggagatcccatttctacaaaaaagtttaaaaattagctgggtgtggtggcacatgtctgaggttccagctactcaagtttctcaaatgagaggatcacttgagtctaggagattcasgctgcagtgagctatgattatgtcactgcactccaggctaggcgaaagagcaagacccagtctcaaaaaaggttttggatttggatctacataaagaaataaggggttaaaaaaaaggcggggtaaaaatatcagtgaaaataaaagacatttcttaattttaatcaacttagaagataa

SEQ ID NO: 86899 - DNA, 835 bp, Homo sapiens
ctaaatgtcctctgtccaagtgttacaacatctaaaaacccaccattgactttttcactccctttgggatcattactgtctctcaaggcaagactcttggctgcatctttccatctcaaattgaaacctaacttgaactattttaaattaaaaaaggtttttattgaccaaaccagagacagagtgggcttggaaatggcttcaggggtacggtcacttcctgttggttacgctctcctccaactttcctgagtgctcttcctttcatggtctccctctcacaccttcctctctggatttttggaatgttcttgttgggccttattctctcaaactggccatccacaagaggccagagcaatggcttcagttagctctagcatacattcataaagtttgacagccagggaaggaagggggctctctccacagccccaggtcaaaaaaaaagcctgggtcccaggcttgcagtcatctaataagcgggcaarctcactgggattaggagagtcatactggaaactccacagtgtatatatgagtcggggctggggaggtaaggggagagcaagctaaagtaaacagctgtacacaacacattttttacttcaagatattgcctagcaccagcctggatcccaaaccctgcaagatccagacactgtttttgcttctttattttgttgtttttactggctgtggcataccccaggcatgtgttcctttcccagaactgcctgatcgagcaggtaacaccacccatagatcacctcaccttcttgcctatctagaacagtcttttcccagtctctttttctctcccataaaacagaaa

SEQ ID NO: 86900 - DNA, 670 bp, Homo sapiens
ttaagagaataagtatgtcaatttttctaataaagggaactgatactgtgataaattagtaaattgtataatgtaacacagctagtgaatacagagatctgggttgaaactcaacttgatgtgactcaaagcccattttctctcctccgcttaayattttcaaagtggcctcttgttacagttatactgatgttcatgccttacctcaagattctaattcaattggtctggggtggagccctttctaggtattttttttacaaagtcccttacatgatgttcacatataggctgggtgagcaccattgctctacatgtgctgacactcaaaacccaataaatgtggagaaagtgacagtaataatatgggcaggaagcattcacatatggaaatatattattgaagaatcagtgaaataactcagtttgatcaatgaaaatacctgttttgagctgaagggttttcttcattcagagcttaggcattcagttaatcagaaaagtttctcttgtcaataaagatggtgttacagcttatgtaacaggaagtttaatcatcacactctaatggcttctttggcctaataggacagtaatgattaaaggtcaatctaacacttgctatggatttttcatcaaaggttgtcaatgaataccattaagtccaaca

SEQ ID NO: 86901 - DNA, 550 bp, Homo sapiens
tgcttttggcattttcctgaaatagttggtaacttgtaattacatggctttgctaattctgtgctcttgtcatatgtcaagaaatttttttcatctaatgaagacattgtttaaatatgttcttggtaataataatctggacattttattttacatatcaaagtactacacatgctcaattataaccagtctgcctcctattttgttctcagttcattttgttatacttcaattgaactatccaatttcctataaacaatatatttaatttccttactactgatggtcactgcctattcagttttcagctgagaaaaaaatcctatcaataaacattttacttctctttaaggattataaagtaataaagcctgttataaaacttcaagcagaagaactatataataaaaaatgaaagtccccctttactcacatcctaatgtgtctctctcctcctttgcaaaattccagttcccccaacacataaatgtaatttattgtgatactgatttatgctttcttcttgctgcartttctcctcactcatgta

SEQ ID NO: 86902 - DNA, 1323 bp, Homo sapiens
actaatacaacttccaaaaagatatattgaaatattaaccctcaatatctcaaaatgtgatcttgacaatttccaagtaagatctttgcagatttaaccaagttattgatgaggtcattagagtaagccctaatacaatatgattggtgtccttataaaaagtggaaatttggacatagacccacacagagggaagaaaatatgaagatacagaaagaagaaattcaagtgactggagtgatgcatttataaactaaggaatacccagaattgctagaaaacaccttaaaactagaagaggcaagggaagattctcccccagagccatgagagaaagcatggccctgatgacaacttgattgaggatttctaacctccagaactggaaaacaacacatttctgttgttttatgccacctggtttttggtacttcgtcagagcagccctgggaaacagatgtctgtcatactgcctccatccatgtgaggccattgtgaggtcacagctatcttgagcatagctgtcttttagtctgatctcagaagaagaaaactattttcctttctattaacaatggaatggttgcatccataatcccccatggcacaattgattctaggttattaaatttgatgatatgtttctgggggtacaataaaaggcaagtcaacacaaggagtaatttacaaccattgtccaggccaagacctattctagattctttaccagaatcttcatgacccagagaagcttactattttttccagcagcatcccctaacacactccatctgtgagaaaatgactttcacctcacttcagtckaaaacccatctcctgagccttgccctgacctcttaccagaatgactgaaaattaaaatgtttctactctgcagaagaaaccacactcctatcaattcaaagcatgtgatctatccctgtgaccttaacaaaacaaacttgtaaaattgtaatagtacatttttcagtttagattagaaaaaaaatcttgcagtccagtcttacaatttgtcttctggtgatgatgtgaaaatgatcaggatataataaaatgtaaaaccatgttattagtccataatcatcgagttgagatccagtaaagacagaaattgagaagtctggtagtttttatcattaggccagtgaccaattccagaaaaagtgactcaatgactgagcagtgttcttgacagcttcagagtcagggggaagaatttgaatcctggggcccttctttttttgtgattgggaccctgaaagactgcactgctggaataaaggtgcaccagaagtaacagcc

SEQ ID NO: 86903 - DNA, 1057 bp, Homo sapiens
tattggttgtaggaaacaaatggagagaaagaaacaagtttcactgctaataaactctgaaggatttaggttcataacatatgtagactagagagtagttataatatatttttatccttgtaaatacagcttggacatgtaaaatgtttaagtacatctgatataattttatccataaattacttgcaaccattttggcaattaaaccagcaaaacatgacccagtggctctggaagttttaaccacaacgtatgtaaaaatattgtgaaaatacaagaataaactgtttctacttggttctcataaagatcaagttctctgagcttcctaataccagaactgtttagagaggggaatatcatttatgacaaattttagagctgttcttttttgacttggtttgctgccaaagaacaaccttcattgtttggacaataaaagcaatgttctacctcaatctcatttctaatgggctacgtaaaaatgacttcaaatggtgatttggggtaataccttaaactgcaaagcctcagatgacctttccgcagtctgttctccagcttatcctcctttctctttcctagccaagttttgagttcttcttcaagagatcatctatctttaataatttctgttcaatctgcatgtctgtaatgtacttgtcatctgatcctgagccaagttattttattatattttattttattttttagacagagtctcgctctgtcacctaggccagagtgcagtggtgtgatttcggctcactgcaagctccgcctcccgggttcaagcaattcttctgcctcagcctcccgagtagaagggtttacaggtgcgtgccaccacgcgggctaatttttgtatttttaatagagacaaagtttcaccatagtggccaggctggtctcgaactcctgaccyggtgatctacctgtcttggtctcccaaaacgctgggattacaggtgtgagccactgtgcctggcccaagttatttttgtttgtaatagtaacacataatgaacactacgcatgccaggaattgtgctttata

SEQ ID NO: 86904 - DNA, 1029 bp, Homo sapiens
  misc_feature (1)...(1029): n = A,T,C or G
tgaaaaacacatttatatgtgatgttgatcagtcaaatggaaacaaacntcttgtggagatcaaacacaaaattaatctgacctgtggaaaattagcttggaatctgggctcttccatacaaatcttcacaaatgtgttctgggtaaactcttccagttttgaaaatccttcagggaaaggttcatgaaaatgttctgagatatactctggtaaggaaatattctgagagctggttcagttaagactgatacagccgggagggttggtatctaaattagtttgatacttcagcagccctctaaaattaaattaaaaaaaaacaaacagagaaatgaaaagatttgagatcaggggacacggtaaaagaaaataatgtctttgtttttgtttttttttttgctaactttacacaacatttatctaaaaagtgttccttatgtattatgtttaggagaaattgaaaaatcttaaaaaatgttaagaaattcttatctataggactaaaacaaaaattttggcactccaaacaaatgctataaatatgcagtagaaaagaatacatgcaatctctccaggcattgttgaatttgacggcctttacttcaagactattaggcattcatacaatcacatacaagttttcacttcaataaacagtataatgaggaatattttgctagatctccaaacataagggaaaaatacagggaacatatttaacttggccaagccatggataaaacaagccttgcgcatttgcagagaaatgttaaacagaaataactggaactggaagcttgtctctcctatggtctgaaaacaatgtatatacagcaatcagtccctaaatctgtttacttttcaatttctccatagacagaaccacataaaaagttcaaaataataaatcaggtaggagagcccacaccataaaaayctcattctgattatttcttattttgtgagaaaccaagacaaaccattcaactttctgtgtcctgcctttcttgtcaagaagtggttaacat

SEQ ID NO: 86905 - DNA, 857 bp, Homo sapiens
attcaagactcacagtgccttaaatctgtcataatgagaaatgaaaacttctatttcagtatgctgacaagaaggcttggagacatattctcagaaagaggcagaaatctgaagtccaggagtagaagctcagctgggggtcagagcgaggttgggcgggggccagacaaagatgggggcggcagaagccaacaagtccaggcagttgaggcagaggggcctcagaagcctaagtcggtgctcaaaatacatatcattcactttttcctcaagagtgaatgaatgggcctggcgggtgtttctgttacacagaagccttcatcttgacgatctgtctgggctttcagaagattttgtgaaatgttctgccagtatttactcagctgcatgaacctctttactttttaagtaaacatcttttagattcaagagtaaatgaaaccttagggagtcaaagcaagcaggcagaagattgcaaatctgctgattgcagtctcctatctatatgttcaaaatcaagaactggctccaggtagctatccagccctggagcttaagtcaccatgactggatgcagctgggcctgggtgctacttcagtgtctccacccaggtgtcaagttctgcgccaacagcccccaaccaggagtctgccaggcagcaaacccaattctcctactcaggctggcactagcccaagaaaagagaatgcagggcaatcatgagcagggacaaggcatggccttttccaacagagtccacccttccaggctcctctctagaaagcaaagtagagccaggacatgtctttgcctgaacactccttcagaggttcttgcattttggacaactgcmgtt

SEQ ID NO: 86906 - DNA, 644 bp, Homo sapiens
cccttcctgcacattatgagtgagtttccattcccaaacagcattgatctcttcttctctggggctgcctcagcactgtggagacttttttccctttgtgtacagaattgtactgtaattgatttttatccccactgaactgggactccccaagggcagggactccttgttcctcattgtggccccagcctgggaccatgctcaggaagatgggtatggttctaacaygcctcacagcaccttattcctctgagaaggcccgaggatgtgccggacatcctatctgggggggctttggtcccctgaagaatccaggctgtcctatatccgggagatcccttccccaaacactccccagagatacgttctccctgcaactaaacacgaggctggctctacgggggctgggcgctggcgagagcctggtgaggagccctctttacagccaggacacaccaagccctcccttcctcttcttcctccattgctgccattatccattaaagcagcactgccccagaggaccaggagagccggaggagtagacagattatagggagttctcctccacccattccctctcctcccctctagctctctttctcctttaaaaaaaacatttgtgggcagcttaccatgggatc

SEQ ID NO: 86907 - DNA, 636 bp, Homo sapiens
actggtttggctaagtttactctgggttaaagccaaaacttaatatgtctttgttgatcgataaaagaaaaaaattcatgtagtagaaatccctacgtcacccacatctggttttcctctccttcctggcacatatgaagattacagtttcatgtccaggtgggcagaagtgagtgatatgtgtcactcccagggcaaagcatttaactgctggaatgaacaccctaacacagtccgtccttgagcaatgaccaaggagctgcaggttcccagtggagcaattacagagcattcattatccccaaaacgtcacttggacttactcaactttgtaatcaagaaacaaacctttcttctgtgaggccactgagatatgggggttgtttgtcactacagcataacttatccaatcctgattaacataacaacgcagtatcacacttcaatgtattgacatacattcaacatcttttagcaaacggaataccctagaccaatacctggcagaaasgtcatgaggagcaaaccgcttcttcccaaagactgtttgatctcagtgtgctgggtggtatcagcctccacctggtaataaagtgttttgaagccttttctgcatctgagaaggcttttgggatc

SEQ ID NO: 86908 - DNA, 703 bp, Homo sapiens
tttgaactgacaaccacaatgatagaatttgaatttttttatgtcattaagctttgtttcactttccagtacagttaatgtcatttttcctccaagatgaaatttttttattttttatttttatatatttaggggatacaagtacaattttgttacatagatatattgcagtggtgaaatccgggcttctggkgtaaccattacctgaatagtgtacatggtattcattaggtaatttgtcatccttcaccacactctaatgctcccacctttctgagtctctattatctaccattacactttctaagtccatgtgtgcacattgtttagctcccacttataagtcagaacatgtagtatttgactttctgagttttcacttaaggacctccagttccatccatgtcactgcaaaagacatgatttcgctcttttttatgatttcattcatttttatggctgagtggtattctatgcgatgtgtgtgtgtgtgtgtatatacatatatctatatacacatatatataaaatatatatatatatgcagatatctttttgatataatattttcctttgggtatatacccaggagtgggattgtatatgtgtatatatatacaatatatatgtatgcaggtatctttttgatataatatttcctttggtatatacccttgagtgggattgctggatggaatggcgg

SEQ ID NO: 86909 - DNA, 819 bp, Homo sapiens
tatatattgcctgttgattatttctaaataagtttttatgatactttttgcggtagctaaaatttacagtttgcctatactcattgcagaactggatgtctctgctacataagaagtttaggtttgatgttcattcttaaaatatgtaaatttcattttgaccctaatttttcctatttaaattaaatgttactatatattaatttatatgtagaaaaaaaaatgtttcaaaataaaacaactttttttggcatgaagtttttttccacagcctccattcaaccaaatttgctttgctttccaatatataaatgcccatttcatgtaaaatcgtatttagattaataggtcccttctgttcctttaacagattaagaatttgtcaccaggtgcagtggtttatgcctgtaatcccagcactttgggaggccggccggcagatcacttgaggtcaggaattggagaccaacctggccaacatggtgaaaccccgtctctactaaaaatacaaaaattagccaggcgtggtggcgygcacctgtaatcccagctactagggaggctgagtcaggagaatcacttcaatccgggaggcagaggttgcagtgagcctagatcatgccactgcactccagcctggatgacacagcaagatcctgtctcaaaaaaaaaaaaaaagaatttgtgaaagtgtcataagtttgcatattaatgtttttaattaaaaagacaaagtctaaatgttttatcagtatgtgagcacttacaaagatattttatctctattgatctagagttataatcaagaaaagatgacca

SEQ ID NO: 86910 - DNA, 692 bp, Homo sapiens
ggatccggtgctgagacacaggcttcagcctcagaaaagaccccatgctccatgcctgtcatggaggcctgggaactgcccgccctcaaggaatccctcagcctcccaccaggaacatctcagtagacagcaatatagaccaaaggcccaagggcccttcccaatttctcattaccttgttccagatttagaaaaataaaataccattctttttcttattaccaggatgctatgaactaaaatttattgcagggtgtgtgttggggaaagaacaccaattcccactttttccccaataagcctttgttcccaccactttcttggacaccttcttatgtggccttctagaagggccttcctgagcccagcctgtgagccacagcaggtgctgctgcctggaggcgaggattgggaagagtcaaattaactgttttaacagtgcctctctgcagcagtggctttgaggtgaggagacagggaccaggaaacaccacaacctctccctgctccccagtttagcatttttccatccctgccccccagatatttctcacaccagaatagcatggtgtctcttcactctctttatccactcttttccccaggccycttgtcacttctagggttccaggtaagcacataccccctcaaggataggagggagatgggctatggcctagtgatggatatag

SEQ ID NO: 86911 - DNA, 661 bp, Homo sapiens
ctatcgttgcaataaaatggaaatttcgggactccaaggaactgagaatgagttacacagtttttaccactctccccactttatcctctatcaaatgtagtgtccagtaatatttagctatgtctggatcgccagccatccaccaccacttcccagggtataatcttattacacctcctgatagacttttcctttgggagataaagagacaagtcctggccgggcacagtggctcatgcatgtaatcccaccactttgggaggctgaggcgggcagatcacaaggtcaggagattgagaccatcctggccaacatggtgaaacccgtctctactaaagatacacmaaattagctggctgtggtggcatatgcatcgtagtccccgctaattgggaggtgaggccggcgaatcgcttgaaaaccggagagcggaggttgccgtgagatgagatagcctaactgaactcccgactggtgacagagtgggactcccttttcaaaaaaaaaaaaaaaaaagacacaagaccttaccttcatcgattagggaatatccatgtcaaaagaactctgggcagtgaatttgtgtgcattattcattgttcctcagtgccttatggaaagggctcagggactttgggtagggataggttcagaattcatt

SEQ ID NO: 86912 - DNA, 746 bp, Homo sapiens
tccaggccccatggcgacttctcccagggcctggctgacatggaagtgcagccgggggaggccgccacactctcctgtaccctcaccagtgacctgggaccyggcacctggtttaaggatggcgtcaaggtactgcctcccctcacaccttctctttaccagtgggagggacagaggtaaagcagagaggggcaagagcgtagaggctttgaaagaaagatttttcattcttcattttgctaatgtatccacctcaggagaagtttaaatagccaataacttggtgtgtttaaaataaaattggatttttaaatgatgtgtatcctatgcccctcagcataccccttgttcttccaccatccaaaatgcctcttctatacccatacctgctgaatcctacccatccttcaaggcctcgtacaaatgccatcgtctcatcccaaccagaagggggccctcgtctccctgcacaatcctctgtcctccattaaagctgtcaccccaagagacatcacagtgactcagggcatggggctcagtatcagctaagtctggcttcagatcccagctctgccactaccagttataagacttcaagcaagctggcaaacagtctggcttcctcatctataaagtgggacaaataatagtacttacttcataaggctgttacgacaattaaataaggtgctaagcacagagagcattggcacacaataagcattccattcacacagctgttatca

SEQ ID NO: 86913 - DNA, 625 bp, Homo sapiens
ggcccagcccmaccccagcaggcctaaagtcaaggcctgggggacagcctctagtagggtgatatgacctggaaagagtggaggggagcgggaacagaaaggtgccgagagaggcatctggtcccaggaatgtcagaacagaatacctaagtcgaatgtggatcgactgcatagacatttgttgagccattctcatattcagagcactgtggcaggcctgctgctgaagccaagagcccacagtgcacctaatcacttagcatgatgcactaaatggcaaaggaggcacaattccctctaagagctcaaggaaggaggtgtcacccccagctggggacatctgggagggttgttggggagatgagagcatttgatttgggcttcaaagggcagagccgtgatgggattcaaaggggcagcgatgaagtcgcagctgtgtctggcagagagagccgcaagtgacccgtggctcctgactcaagcctggtcagagggagactccgaccctttgggagcagcctgaagcccagggccttactgaacacagatggggcaggtgcccggtcctttgcttgttattggcgatcctaataagaaggcacctggcagaggctttccgcaggag

SEQ ID NO: 86914 - DNA, 625 bp, Homo sapiens
ggcccagcccaaccccagcaggcctaaagtcaaggcctgggggacagcctctagtagggtgatatgacctggaaagagtggaggggagcgggaacagaaaggtgccgagagaggcatctggtcccaggaatgtcagaacagaatacctaagtcgaatgtggatcgactgcatagacatttgttgagccattctcatattcagagcactgtggcaggcctgctgctgaagccaagagcccacagtgcacctaatcacttagcatgatgcactaaatggcaaaggaggcacaattcyctctaagagctcaaggaaggaggtgtcacccccagctggggacatctgggagggttgttggggagatgagagcatttgatttgggcttcaaagggcagagccgtgatgggattcaaaggggcagcgatgaagtcgcagctgtgtctggcagagagagccgcaagtgacccgtggctcctgactcaagcctggtcagagggagactccgaccctttgggagcagcctgaagcccagggccttactgaacacagatggggcaggtgcccggtcctttgcttgttattggcgatcctaataagaaggcacctggcagaggctttccgcaggag

SEQ ID NO: 86915 - DNA, 804 bp, Homo sapiens
ccttatcttattagtattgaacctttctattctttttcagagtaagcatataagctacaaattttcttctacattttattttcactggattctacaagttttgatatgtagttttaaaaatcattatttagttctatatattttcttttttattatgaatttttctttgcataattaattgttcaatggtatgcttttgaatttccaaatgtatggactttttatatatcttttttattttaaaatatctatactgatcattctctcttgcttctcagaacttatctctagaatcatttctcttctatctgaagttaatgagtgaaaattattcagtttattggttaattctctcagctcttttttgtcctcataataatacattcagagaagttaaattattgtattgccaagagatctatacatgttaaggyttttggtatatattaactaattttcctgcagatatattctattaatttatagaacagcagtatatgaaagtttatgtttttgatacattgaaaaattagttattataattctttaactcttgctaaactgatgggtgacaagtggcacataattgcaatacattgcttcataatttttataaactccctgattccttttcgtacaattgtctattacaatgttgtccttttcttattgacttatgagaactctatttattatcaaaatttgactgccatatatgttgtgaaaattttaaaccaatttttcatttgtcttttaactttgtttacggtcgttttaaaattcaaaagttattttgttaagcag

SEQ ID NO: 86916 - DNA, 479 bp, Homo sapiens
tcgaatgggatttaaatcccagtgacctgacttactacctgtgtaattaatttccacaatgccagacacatagcagatactcaatgaatgttaactattaagaagtaccaaagacctacatttacgactatcatagccgactgacataactacttttgacgcacaagttaaaaggtcacattcctttattaaaagaaaaacaagatcagcaaatatcttgtcttctaaggctgaatgttgtagaaagaagcttatttgccctcacaggaggagttcttggtctacattcatctctctcaccagcactgaaaagtagagtttaggtcagaatgtcragaagacttgaagcttagccccggggcaggaacaagagtaggtcatcaggaagctattccttggcaaaggcagccccatgtcccaggaaaacatgtggtttcctccttcctgccatccaccttttcccatgccaaaactcactg

SEQ ID NO: 86917 - DNA, 1562 bp, Homo sapiens
tgcagcttcattttttatatatgaggattatatcatgataaaggaaggaaaaatctagttatttcagcctgtttgtgtgtgtgtgtgtgtgtgtgtgtgtgtgttaaagtagaagatgctaatgattaatttatttggacagagattgatatttcatctaccttctagtttctaaaaatttgcatattgaaatgatcacaaaaatttctgcagattggctgattatttttatttctcagattgatatttcatctaccttctagtttctaaaaatttgcatattgaaatgatcacaaaaatttctgcagattggctgattatttttatttctcaggtgtgttcacctttgtttcattttaagttaaattgattttcattaattctgctccaacatctgaaattccaagcaaaccagtcttactaagttgtggttactgtggtaaagaaaaggaatggttagtttaagatcatcatagaataagaaaaaaaaagtattgatttttttatattgctatgtcacaaatcaccacgaatttagcttcttaaaacaacaccaatttatatcttacattctctatgggtcaggartatgggcatagcttacctgagttgtctacttgagttatcataggctacagtcaagacgggatcccatctgagcctcgggattttcctccaaactcatatggttatcagcagaatttatttcattgaagctttaaaatttatggtggcttgctttttcaagtctagacgagaaagaatttctgacttctacaccctcttttaagacacaacataccagaatctctgggataccttcaaagcagtgtgtagagggaaatttatagcactaaatgcccacaaaagaaagcaggaaagatccaaaattgataccctaacatcacaattagaagaactagaaaagcaagagcaaacacattcaaaagctagcagaaggcaagaaataactaaaatcagagcagaactgaaggaaatagagacacaaaaaacccttcaaaaaattaatgaatctaggagctggttttttgaaaggatcaacaaaattgatagaccgctagtaagactaataaagaagaaaagagagaagaatcaaatagacgcaataaaaaatgataaaggggatatcaccaccgatcccacagaaatacaaactaccatcagagaatactacaaacacctctatgcaaataaactagaaaatctagaagaaatggataaattcctcgacacatacaccctcccaagactaaaccaggaagaatttgaatctctgaatagaccaataacaggctctgaaattgtggcaataatcaatagcttaccaaccaaaaagagtccaggaccagatggattcacagccgaattctaccagaggtacaaggaggaactggtaccattccttctgaaactattccaatcaatagaaaaagaggaatcctccctaactcattttatgaggccagcatcatcctgataccaaagcctggcagagacacaacccaaaaaagagaattttagaccaatatccttgatgaaca

SEQ ID NO: 86918 - DNA, 933 bp, Homo sapiens
ccctatcaagacatgccctacctgccctctcagttctacttcttccttgaaacagtgaaaaagacttgggaggacatagaagacatctcctgccgtgacttcatagaggagtatgtcactgcctaccccaaccgccccatggtactgctcaagagtggccagcttatcaagactgagtgggaaggcacgtggtggaagtcccgagttgaggaggtggatggcagcctagtcaggatcctcttcctggtactgttcttctctacaattttggaggcagaggttggtggggggggaacttaagaagcagtaatgaggatggttttatagctattccatagccttcctctttcttatcctcgtatgtgttctcactgtttttggtcaaattttactttgccctttttgttgttcctctgcaggtcattgttgaaaataaattatctgaattataatacgaatctgcatggttttgatttatttattttttttctttaggagtattcacattgtgtgtaggtacagaaagggcagccaattccatttttccagggttaaggttttagtaggatagtgggacgaagaagagggatcaaggagtcctgattatctttcaaggctcagtttaactcttaggtattttgtactcatccttttctcccttctctctcccttcttagaatcatatttcttatttttaaaagttttaaaaacattttttaatactgctgcttgcagaacaaggctayctgataggcagtgtgccagagtagccagaagaaattagaagttatatttcttcttggtgttacctcagcccgttacttctaaggccttatgatccttatcatgctttttgtttggtgttttgttttgttttcagacggagtttcactcttgttgcccaggctagagtgcaatggcacgatctcggct

SEQ ID NO: 86919 - DNA, 2811 bp, Homo sapiens
tgcattgcaccctggtgtacccactggagctctatcctgccttctttggctattacttcttcaattccatgatgggagttctacagctgctgcatatcttctgggcctacctcattttgcgcatggcccacaagttcataactggaaaggtgaagccctgttcccattgtgtaggccttactactctctacaacttcctgaactcccatcttgccagtaactctctaaaaaactagtgtggagccctgggtataacaggaacaagccctcagagagaagcagtacttaggggtttgaggatctcatgtaataacccttcttgtcccttttccacagctggtagaagatgaacgcagtgaccgggaagaaacagagagctcagagggggaggaggctgcagctgggggaggagcaaagagccggcccctagccaatggccaccccatcctcaataacaaccatcgtaagaatgactgaaccattactccagctgcctcccagattaatgcataaagccaaggaactaccccgctccctgcgctatagggtcactttaagctctggggaaaaaggagaaagtgagaggagagttctctgcatcctccctccttgcttgtcacccagttgcctttaaaccaaattctaaccagcctatccccaggtagggggacgttggttatattctgttagagggggacggtcgtattttcctccctacccgccaagtcatcctttctactgcttttgaggccctccctcagctctctgtgggtaggggttacaattcacattccttattctgagaatttggccccagctgtttgcctttgactccctgacctccagagccagggttgtgccttattgtcccatctgtgggcctcattctgccaaagctggaccaaggctaacctttctaagctccctaacttgggccagaaaccaaagctgagcttttaactttctccctctatgacacaaatgaattgagggtaggaggagggtgcacataacccttaccctacctctgccaaaaagtgggggctgtactggggactgctcggatgatctttcttagtgctacttctttcagctgtccctgtagcgacaggtctaagatctgactgcctcctcctttctctggcctcttcccccttccctcttctcttcagctaggctagctggctttggagtagaatggcaactaattctaatttttatttattaaatatttggggttttggttttaaagccagaattacggctagcacctagcatttcagcagagggaccattttagaccaaaatgtactgttaatgggttttttttwaaaattaaaagattaaataaaaaatattaaataaaacatggcaataagtgtcagactattaggaattgagaagggggatcaactaaataaacgaagagagtctttcttatgccttccttgcagttatgtaatattttcttttttaaatttcacatgcatgtaatttgagcactttgaggggccaaggagggtggatcactagaggtcaggagtttgagaccagcctggccaacatggcgaaaccccatctctactaaaaatacatctagctgggtgtggtggcgggcgactgtaatctcagctacttaggaggctgaggcaggagaatcacctgaacccgggaggcggaggctgcagtgagtcgagattgcaccattgcactccagcctgggtgacagagcgagaactccatctaaaaaaattcacatgcaagaagcaaaggtagacaaggtagaagatgaatgacagcagcccacagggaggatggggataatacctcactgaaagatccagaattgggagtatcgggctgagagagagaaacaaaaccacaatcttagttttatcatattgttaaaagactttcaagaaataatacaaactggagatagtagatacacaggctccattctaagaacaaagtctgttagaagcaggaacacttggacaaatatgggatgggagggatgtcaggccgaggttagagtggtgatctctccccaccctttagggcctttggaggtggagaagggatcctgcctgctagcaccacattggaagggatcatctggtccagaacccccatttctatcaactaggagctggggggagtagctagcccagagacttcgggtcagggttcaacaatcaggaagacccagttcctgaggaaacgacagttcaagaagggttgggaagaaggctgtcctctaaagaagacgtcctctgcattcaatggccccacagcaacagagtagctccttgccttccacactgcccacctcgtagttgtagtcccaagtaagttctgtcccagcccggattcttctgaagaggaagaaaaggatggtgtgtggcaaagacagcagataacccaggcacttggggttactgaatatgtaggtggagttggatcatgaatggaggaggggcccttagaacttcagtggtccttgcccctccccagtcatcccctttcctgactccttacttgctggcaaagaaggccacccaggggaagcgaagatcatgggtatccacgaagacattctggacaaacaggttggggctgcaactgtgctgtaggtttaaggacaggatcaaataagaaccagggaaactgaacctggctttgcagggagagtgagagttggaagaaaaatgatgccatctgaccctccccattataatagatgctttgaaagaaagctacctctttaagatcctttgagatcaagagtttataacaagaaaagggctt

SEQ ID NO: 86920 - DNA, 554 bp, Homo sapiens
ttttcagaatcatggaagtcgaggtcattttttatgtttttttgtgtccctgagttcaaaccaacacaggtagattatctaagcatactagtaagtagacaccctttgaaacttaaattttttccattatgtatttagaagatacatggataaattgattttcagaccaggaatttattatattcacttattgcaggtagttttctgactactttcttgggaggcatattaagctgattaatatttagataaaagcattcatttatgatattaacatttttttctgtgacttttaagacaattgtcagctgacaaatkttatgggttaaagagtcaagatttgtttagtatcagatcttaccctgatagctgtgtgaccttgggcaatttttaaaaacttttttattgtttaactttgcataataatagtgattaagccaaaattgaccttggactgtgaactcatttactccccacagtaaccacatgacataggtgaggaaatgaaggcatgtagtggttacacaactaatggtaaaggtgagatttgaatt

SEQ ID NO: 86921 - DNA, 569 bp, Homo sapiens
cccagaaccagacttaaccaagacccagaaaaagagccatgaggaggggaaagtagaaaacagtcagcaagtgtaaaggctctaactgtttaatgaggttcatccctggaggcaaggtgagcctggatgtaaacagccaactaggcaaagctggctcagcaggtgagtcacctgggcatcccagtggaacatccacctgtcaaaggaaaactcagacaacagcatttaggacgggagtttacttgcaaagaaggctgcaagaaaattttcaggctttagaaggacaggctcacaaataaaaaggacaacagttatttgaaagaaaaataactttcctaagaaccagtattactgaattaaaaattaggctggtcagggtgtaaaatgacaattttctcatgtaatcatttacctcacatcttcaaacatcttgaaaaactgtttttcttatttatcttaggttgtaagtcccttccctacccaacckcccccaactgtgggatgcttacttaactgaaagcaaggtaagaaatttggacttgttgcaccccggccacctccatcccttt

SEQ ID NO: 86922 - DNA, 511 bp, Homo sapiens
gtatgaaataggttttttttttaatgtatggatactttttggtgatgttttgttgagctcatagtaaatttcrgtaactggaagttggaacttttgtaattataattgtatgagtttctatacgtaatttgagtaaaataatatcacaattttcaatgagataatttcttaccttgaaatttaaatttctaataaaatgtctccttatgctgtagttatattgggagctagtttcaagatgaaatactaattctaagtaagtataactttgtagcctacttatccttttgtatatgcatttgcaaatataaatgtacagatgtttttgtacatactttgttgtatttctcatgctaggatttcatttaacagtttgtataactatttctgtcctgtacctttgcattgccactaggattttttaaaaaagtaattgcagatgctctgtaaatctctctatacatataaattttgtatattgttttgtggagataaattttcaagtatacac

SEQ ID NO: 86923 - DNA, 511 bp, Homo sapiens
gtatgaaataggttttttttttaatgtatggatactttttggtgatgttttgttgagctcatagtaaatttcggtaactggaagttggaacttttgtaattataattgtatgagtttctatacgtaatttgagtaaaataataycacaattttcaatgagataatttcttaccttgaaatttaaatttctaataaaatgtctccttatgctgtagttatattgggagctagtttcaagatgaaatactaattctaagtaagtataactttgtagcctacttatccttttgtatatgcatttgcaaatataaatgtacagatgtttttgtacatactttgttgtatttctcatgctaggatttcatttaacagtttgtataactatttctgtcctgtacctttgcattgccactaggattttttaaaaaagtaattgcagatgctctgtaaatctctctatacatataaattttgtatattgttttgtggagataaattttcaagtatacac

SEQ ID NO: 86924 - DNA, 761 bp, Homo sapiens
caccatccctgggagagtaaataccatcccagtcatcacccagcaagttaccaccgcagcatttcccatgtgttccaaaatgaataaaggtgattctcatcacaagtgcaaataaaaagtcatttatcatgtttttaatctaaactgtcacagtttagtttactattttgttctttttgtgctaaaacatttgtttttcattatttgagacagagtctcgctctgtcacscaggcaggagtatggtggtgcaatctcagctcactgaaacctctgcctcctgggttcaattaattctcctacctcagcctgtccagtagctgaaaactacaggcgtgtgctaccacacctggcaaatttttgtatttttagtagagacggtttttcaccgtgtttgccaggctggtctcaaactactgacctcaggtgatgcacctgcctcggactcccaaagtgttgggattacaggcatgagccaccccatctggccaaacatttgtttttcatatatttttaatttttttaaggcagagtctcactcctgcccaggctggagtgcagtggcatgatctcaggtcactgcagcctctgccttgtaggtttgagcaattctcctgcatcagcctcccaagtaactgggattacaggtgcctgccaccacatccagctaatttttgtatttttagtagagacagagtttcaccatgttggccaggctggtctcgaactcctgacctcaggtgatatacttgctttggcctc

SEQ ID NO: 86925 - DNA, 739 bp, Homo sapiens
cgcggaggattccaggctatgctagatgacggagcctgagtacctggctgactgcgtggagctgagatctgccaactgccaggaccggggctcgagcgaaaaatcaacctttattgtggtgcccacagtttcttggcataaatgtggatgatgcagaccaaataccataacatgaacacactgtacgcccatcccacttcagaaatagaaatgaggtccctatgaatctttctcattgcactcccattattatcccatattttgtgtttataatttctttgcttttataattttaccatgtgtttttttcattttgaactttatgatattgatacatttctccaatctgttttcttgcttgcattcttgctaatttttctctattataaatartgctttgctgagcatgcttgtcactatgttttacgtacatccacatttatttcctcagagtaaaatactggatttaagttgctgggtccaagtatatgtacatattttagggcttttgacaaatattaccttcagaagaattattatgaattctgccagcctttgccaacactgtgtattattgggaattatatgtggaaaatcattataatgattataatgattttgagtgaatgataatgaataatggttttttaatgaatgacagtgatttgccataattacaatgagttgtaattataatgatttagttcatatataattgccaatttgaagggagaaaaat

SEQ ID NO: 86926 - DNA, 869 bp, Homo sapiens
tgcatcttcctaacagtaccctcacttttacattaaaacataattctgttcaartcactgcctcccttttttagagttttggagcagttataacttcagtgtcatagagggacatctgtgatacaaatgtccaacaataacgtgtgagcacaatattgactgtacagacaggggccctctgatacttttaaaacaaatatataattgctaaaatgtggaagctcctttttgtcaaactccttttcccttcactttaaagaggctcagccaacacagctgggtgttcccggtggctgatctctgctgccaggtgtgcttttccactgtgtttcaactgagccctgtggagagcaagcaggtgccaggaaccaggctgtcctgtggggacccttcctcctgggcagttccattttcatgagttctgcagacagtggccaccatctgttttcaccactgctggccacttgggagcaagccagcacggctctgccactgacgggctgcaggtggctgcggccagctcctcctggcagggcttctgcatagaataccattcagacaccttgctttgccctgctggttccaaaacaaatttctctcctccagaaagcatagagccaaagatgtcaagatcccatacttagtctttaaaacttaattctgtcctctacattaagattcttgaacatgaggaacgaggaggaatatcagaatcttctgggggtaggaaggcatcagtggtaatttgaaaaagcatatatattttgtatttcaaaatagctagaagagaagatttgaaatgttcccagcataaataaatgataaatgttcaaggtaatggacatcctgaatacatcattacacattgt

SEQ ID NO: 86927 - DNA, 869 bp, Homo sapiens
tgcatcttcctaacagtaccctcacttttacattaaaacataattctgttcaaatcactgcctcccttttttagagttttggagcagttataacttcagtgtcatagagggacatctgtgatacaaatgtccaacaataacgtgtgagcacaatattgactgtacagacaggggccctctgatacttttaaaacaaatatataattgctaaaatgtggaagctcctttttgtcaaactccttttcccttcactttaaagaggctcagccracacagctgggtgttcccggtggctgatctctgctgccaggtgtgcttttccactgtgtttcaactgagccctgtggagagcaagcaggtgccaggaaccaggctgtcctgtggggacccttcctcctgggcagttccattttcatgagttctgcagacagtggccaccatctgttttcaccactgctggccacttgggagcaagccagcacggctctgccactgacgggctgcaggtggctgcggccagctcctcctggcagggcttctgcatagaataccattcagacaccttgctttgccctgctggttccaaaacaaatttctctcctccagaaagcatagagccaaagatgtcaagatcccatacttagtctttaaaacttaattctgtcctctacattaagattcttgaacatgaggaacgaggaggaatatcagaatcttctgggggtaggaaggcatcagtggtaatttgaaaaagcatatatattttgtatttcaaaatagctagaagagaagatttgaaatgttcccagcataaataaatgataaatgttcaaggtaatggacatcctgaatacatcattacacattgt

SEQ ID NO: 86928 - DNA, 869 bp, Homo sapiens
tgcatcttcctaacagtaccctcacttttacattaaaacataattctgttcaaatcactgcctcccttttttagagttttggagcagttataacttcagtgtcatagagggacatctgtgatacaaatgtccaacaataacgtgtgagcacaatattgactgtacagacaggggccctctgatacttttaaaacaaatatataattgctaaaatgtggaagctcctttttgtcaaactccttttcccttcactttaaagaggctcagccaacacagctgggtgttcccrgtggctgatctctgctgccaggtgtgcttttccactgtgtttcaactgagccctgtggagagcaagcaggtgccaggaaccaggctgtcctgtggggacccttcctcctgggcagttccattttcatgagttctgcagacagtggccaccatctgttttcaccactgctggccacttgggagcaagccagcacggctctgccactgacgggctgcaggtggctgcggccagctcctcctggcagggcttctgcatagaataccattcagacaccttgctttgccctgctggttccaaaacaaatttctctcctccagaaagcatagagccaaagatgtcaagatcccatacttagtctttaaaacttaattctgtcctctacattaagattcttgaacatgaggaacgaggaggaatatcagaatcttctgggggtaggaaggcatcagtggtaatttgaaaaagcatatatattttgtatttcaaaatagctagaagagaagatttgaaatgttcccagcataaataaatgataaatgttcaaggtaatggacatcctgaatacatcattacacattgt

SEQ ID NO: 86929 - DNA, 869 bp, Homo sapiens
tgcatcttcctaacagtaccctcacttttacattaaaacataattctgttcaaatcactgcctcccttttttagagttttggagcagttataacttcagtgtcatagagggacatctgtgatacaaatgtccaacaataacgtgtgagcacaatattgactgtacagacaggggccctctgatacttttaaaacaaatatataattgctaaaatgtggaagctcctttttgtcaaactccttttcccttcactttaaagaggctcagccaacacagctgggtgttcccggtggctgatctctgctgccaggtgtgcttttccactgtgtttcaactgagccctgtggagagcaagcaggtgccaggaaccaggctgtcctgtggggacccttcctcctgggcagttccattttcatgagttctgcagacagtggccaccatctgttttcaccactgctggccacttgggagcaagccagcacggctctgycactgacgggctgcaggtggctgcggccagctcctcctggcagggcttctgcatagaataccattcagacaccttgctttgccctgctggttccaaaacaaatttctctcctccagaaagcatagagccaaagatgtcaagatcccatacttagtctttaaaacttaattctgtcctctacattaagattcttgaacatgaggaacgaggaggaatatcagaatcttctgggggtaggaaggcatcagtggtaatttgaaaaagcatatatattttgtatttcaaaatagctagaagagaagatttgaaatgttcccagcataaataaatgataaatgttcaaggtaatggacatcctgaatacatcattacacattgt

SEQ ID NO: 86930 - DNA, 869 bp, Homo sapiens
tgcatcttcctaacagtaccctcacttttacattaaaacataattctgttcaaatcactgcctcccttttttagagttttggagcagttataacttcagtgtcatagagggacatctgtgatacaaatgtccaacaataacgtgtgagcacaatattgactgtacagacaggggccctctgatacttttaaaacaaatatataattgctaaaatgtggaagctcctttttgtcaaactccttttcccttcactttaaagaggctcagccaacacagctgggtgttcccggtggctgatctctgctgccaggtgtgcttttccactgtgtttcaactgagccctgtggagagcaagcaggtgccaggaaccaggctgtcctgtggggacccttcctcctgggcagttccattttcatgagttctgcagacagtggccaccatctgttttcaccactgctggccacttgggagcaagccagcacggctctgccactgacgggctgcaggtggctgcggccagctcctcctggcagggcttctgcayagaataccattcagacaccttgctttgccctgctggttccaaaacaaatttctctcctccagaaagcatagagccaaagatgtcaagatcccatacttagtctttaaaacttaattctgtcctctacattaagattcttgaacatgaggaacgaggaggaatatcagaatcttctgggggtaggaaggcatcagtggtaatttgaaaaagcatatatattttgtatttcaaaatagctagaagagaagatttgaaatgttcccagcataaataaatgataaatgttcaaggtaatggacatcctgaatacatcattacacattgt

SEQ ID NO: 86931 - DNA, 1519 bp, Homo sapiens
atataacagagttaatgcctgaactctaaatggagtttatcaacttgataatagcaccttcagagccccagtgggtcaaaagctttggatgtacagctccctaaaggcgggaagttaataggtcacctccttcccctgtgcctcgccagtgcctggcagacagaactgtgggggactctcaccaaattcccgtcaggggacggagggattattaagccgtgtgcctagcaatgcaggccattgtggcaaactggccggctggaggagccactgggagggctcactggcacctggcaccccttctggaggagctcactcctgctggagtgcaccgcccagtggatccrctgcccacacacctgagcaggaaagccaggctcatccccgcagggcctgctgtagggcctcctaggcttgttatgggtccctgtttacttctcatgggcactcctaggtcagtggttttctaattttttaaacaagtttctggaacctttctttaaacaaaaacttacagagaaggctgggaacaccccagatgaccgtcagtaggaaaaatgggtaaacaatctgcagtgtactgttcagcagtaagaaggggccaactatgaacaggcacagaacgtgaatgaattgcaggaaccctgacgaaggagccagatacaagggctgtacactgtggccatgctcataagagtgccagagcaggcagaactaatccatggtggaccaagaccaggctgctggttacctctggggggaccacagggatgggagggactggagaggggcacttggaacttcctggggtgatggaaatattccaggtcttaatcgggttttgtttgcacatgtatatgcattttacaaacctcagagaagtacattttggatttatgtgttttattgtacgtgaattttacatcaaaagaaaaactgtaaacaaaaaccctgtaagggaggattgttctgatttgagtggggacaggagacctggaggccttggtgggctactagcaccttctccaccccacacccttcctaagctgctgtgagtctagttgaaaacccactgctcaattactgcaatgatttggggtggggattttgaccaaattgaggtttgttaaaaataacattcttcaaatatcaagaagatataaaatgcaactttgagcatatacaggctctgaggggaagctccgtgtgtaggaatatcgtaattagcagcatccataacttccatagcgattctgtgatgccaccttaaagtttcaagatataagattaaagcccagtaaccagttttttaaatataagatagtgaggaaaactggtgttattatattacctgccaggtgctaaatataaggatatctttggtttttaatgaagtcatctttagagtcctcagcacctttcccacatgcttgcagcccctggtaagggaaatgattaaaagtcactgttatagacactacccttatgccattcctaagaggctcctcattttacattg

SEQ ID NO: 86932 - DNA, 2906 bp, Homo sapiens
tggctgaattcaccttaggataaacacaggtatgactacactccagtatgactagaaaaataacacaggcgtgactgcagttggaatcacagcttgcgggccacactggttacacatccaccgggactcaagagggatccactgagctgaacactgcctgctcgtgctctgtgcctaaggctccctgtctggcaagccccatggaagctcacagatctgtcatttgtggagagctgcagctcttgtgtttaaaaaggaatgatttggctgggtgcagtgactcacaccagcactctgggaggctgaggtaggcggatcccttgagcccaggagtttgagamcagcccgggccacacagcaagaccccaactctacaaaaaaaaatacaaaaattagcatggtggcacatgcctgtaataccagctattcaggaagctgaggtgggaggaccacctgagcctgagaggtcaaggttgcgatgagccgtgattgcaccactgcactccagtctgggtgacagaatgagaccctgtctcaattaaaaaaaataaaataaagaaaagaaaaagtgaaaaaacggaaggatttactaagcccagctgttcaatcagctcacagatactcactaagcactccacagctctggcctgtgctagaagacaaggactcagtcatgaggagggcacaggtggtgccatctcctgagttacaagacagtcgagggagatgtagacaggatctgacccatgaatgaagatataattcccaggtagctcactaagttgagaatagttgtacaaagagaacacttaagggaaaggcggaattatatgctctatggaccgtgaggtggtaggatgcaagaagttttggcaaaactgaaatgagcctaaatcaatacgccatgatgaactgaatctcccaacagaaaaagggacattaatggaaaaactggagagatccaaataaagcaattttaattaatagcaatataccaatgttggtttcctttttaggcaaatgcagcatggcaatgtaagttattaaattagtggaaactgggttatacagcaactctgtatttgctctgcaaatgtgctttgcaaattttctataaatctaaacttattccaaaattaaaagttgatttaaaaaatatacaaatatattgtgctcccccgccaagaaataagtgataccaccacgaccaccaccacccctgaattaaggctccagctttgaagcacagagcccaaagggaggggcgatggagcagaggccagcaggccgagagctcaggccatgcagagcctgggaggctaagccatgggatcaggtctgcatcctaaaaccaacaggaagcacctccacaaatgggagctacaggccttgtccccagtgcccctgaacatggagaaggacagccttcatttcactgatgagcgagtcagagcagagatgactcagcaacacagctctctcgacccacattctgccaaccgcccagactggcagaaggccatgcaatttgtaatccctctgacctggattttagcagccccaggtcagctgttaagacttgggagaagccgacagagctgtaggagggagtggtgggttgggtcttgattccactgttctcacctaatgccagctaacatccagatccaaccctgtcccacctctgaggctggggacgggggacaaaggggctccaggggttccacagataacaggaccccaacaggactgaggctaccttccccctggggctacatgcattcatgtagaaatgaataggaagagtggcaggcaaggtgggctccaaggctttctaaggttgatgccatacgcacaccaaggctgggagtgaaatttgggctaattaacagtgacatgtaagtacaggaatctttaatttaaacgtaagcctctgcataccaataaaccttgccaactttttgggagttacagaacctcatgtaaacttgagaaacaacaggaatacacctttacagagagctctggagcacggaactaagtatgcccatcatgcaaccctttacttgactaacaaaccagttgagttgggaatgatcgtctcctactagctaccaatagacatgttttgtttggcccatgatagctttgagataaagaaactttacacaaaatctagatattcaatttttcctgaaaaatccaaagactcattaaccatcagctagacctgagtggtgcctggttccctcttccccgccatatctttcacacagcaagatcttttccattttaccacacttcccatcactccctagtagatgtggctgggcaggctgtgccctgagcctgcaggcatgtgcatttactaccctgtgcacagagaatgtctcttcttccaacttctcttaaaagcacaccagcagtttcagtcacctgtttgattcccctccaagggctttctaaaaatttccaccaaaataccccgacagccacctaagaccgtgaccgcagattctgggaatgggaggcaggtgaatggagatgtggtcttaaatgacactcagtgggatgcaaaatttgtctgacatcccaagctttaccttagaagttcacgcccttgcattctatttcgtttacacatgttgtattctactccattatatatttgcattaaatttcacacataatgttttcaattatcaattaaaaggttgcctttaacccccaacccctaaacatgtcaagtaaaatgggggctccaggaagatctgccaggtttatgctgcctgtgtcttcccctcctcccagcagaccccaatgactaatttgagaagagcagtggctgaccgcctggtcctcagaggctccgccctctgcccctccggactcggggatacccgggg

SEQ ID NO: 86933 - DNA, 2906 bp, Homo sapiens
tggctgaattcaccttaggataaacacaggtatgactacactccagtatgactagaaaaataacacaggcgtgactgcagttggaatcacagcttgcgggccacactggttacacatccaccgggactcaagagggatccactgagctgaacactgcctgctcgtgctctgtgcctaaggctccctgtctggcaagccccatggaagctcacagatctgtcatttgtggagagctgcagctcttgtgtttaaaaaggaatgatttggctgggtgcagtgactcacaccagcactctgggaggctgaggtaggcggatcccttgagcccaggagtttgagaccagcccgggccacacagcaagaccccaactctacaaaaaaaaatacaaaaattagcatggtggcacatgcctgtaataccagctattcaggaagctgaggtgggaggaccacctgagcctgagaggtcaaggttgcgatgagccgtgattgcaccactgcactccagtctgggtgacagaatgagaccctgtctcaattaaaaaaaataaaataaagaaaagaaaaagtgaaaaaacggaaggatttactaagcccagctgttcaatcagctcacagatactcactaagcactccacagctctggcctgtgctagaagacaaggactcagtcatgaggagggcacaggtggtgccatctcctgagttacaagacagtcgagggagatgtagacaggatctgacccatgaatgaagatataattcccaggtagctcactaagttgagaatagttgtacaaagagaacacttaagggaaaggcggaattatatgctctatggaccgtgaggtggtaggatgcaagaagttttggcaaaactgaaatgagcctaaatcaatacgccatgatgaactgaatctcccaacagaaaaagggacattaatggaaaaactggagagatccaaataaagcaattttaattaatagcaatataccaatgttggtttcctttttaggcaaatgcagcatggcaatgtaagttattaaattagtggaaactgggttatacagcaactctgtatttgctctgcaaatgtgctttgcaaattttctataaatctaaacttattccaaaattaaaagttgatttaaaaaatatacaaatatattgtgctcccccgccaagaaataagtgataccaccacgaccaccaccacccctgaattaaggctccagctttgaagcacagagcccaaagggaggggcgatggagcagaggccagcaggccgagagctcaggccatgcagagcctgggaggctaagccatgggatcaggtctgcatcctaaaaccaacaggaagcacctccacaaatgggagctacaggccttgtccccagtgcccctgaacatggagaaggacagccttcatttcactgatgagcgagtcagagcagagatgactcagcaacacagctctctcgacccacattctgccaaccgcccagactggcagaaggccatgcaatttgtaatccctctgacctggattttagcagccccaggtcagctgttaagacttgggagaagccgacagagctgtaggagggagtggtgggttgggtcttgattccactgttctcacctaatgccagctaacatccagatccaaccctgtcccacctctgaggctggggacgggggacaaaggggctccaggggttccacagataacaggaccccaacaggactgaggctaccttccccctggggctacatgcattcatgtagaaatgaataggaagagtggcaggcaaggtgggctccaaggctttctaaggttgatgccatacgcacaccaaggctgggagtgaaatttgggctaattaacagtgacatgtaagtacaggaatctttaatttaaacgtaagcctctgcataccaataaaccttgccaactttttgggagttacagaacctcatgtaaacttgagaaacaacaggaatacacctttacagagagctctggagcacggaactaagtatgcccatcatgcaaccctttacttgactaacaaaccagttgagttgggaatgatcgtctcctactagctaccaatagacatgttttgtttggcccatgatagctttgagataaagaaactttacacaaaatctagatattcaatttttcctgaaaaatccaaagactcattaaccatcagctagacctgagtggtgcctggttccctcttccccgccatatctttcacacagcaagatcttttccattttaccacacttcccatcactccctagtagatgtggctgggcaggctgtgccctgagcctgcaggcatgtgcatttactaccctgtgcacagagaatgtctcttcttccaacttctcttaaaagcacaccagcagtttcagtcacctgtttgattcccctccaagggctttctaaaaatttccaccaaaataccccgacagccacctaagaccgtgaccgcagattctgggaatgggaggcaggtgaatggagatgtggtcttaaatgacactcagtgggatgcaaaatttgtctgacatcccaagctttaccttagaagttcacgcccttgcattctatttcgtttacacatgttgtattctactccattatatatttgcattaaatttcacacataatgttttcaattatcaattaaaaggttgcctttaacccccaacccctaaacatgtcaagtaaaatgggggctccaggaagatctgccaggtttatgctgcctgtgtcttcccctcctcccagcagaccccaatgactaatttgagaagagcagtggctgaccgcctggtcctcagaggctccgccctctgcccctccggactcggggatacccsggg

SEQ ID NO: 86934 - DNA, 692 bp, Homo sapiens
cggaggcagggagttttcagaggccagggcagaacagaagaggtgggaagtcctggagcaatctctagcttcctcgcagcatttattcagacccataatgagggatttgaatgtttgggccaaatgtgtcacatccacaatccattcctttattttctattcaagcacttgttcattcacacttctgctcacctacaaataattgtgtacctgccatgtgccaggaatggtcataactaatgaaaacagatggagatggtaacagcagcacacagctgtctgttctaatggagctcacaattgtgcatgggcacgtgtgtgtgtgtgtgtgtgtgtgtcagggcagcggggagaccaccatcacccaataatcatacaaataagtagaagattacagttccggtacaagcgattaaaacaggtgcacagggctgtgagaactgaaacctgaagagatgtggaggaattaattctgcccagctgcagagggcacagcacaaacctgactaggcaggtccctttaggccacattgtgccaaaggatggtgtgtccagcacagttttgtttgtttactttaagttctgggatacatgtgcagaatgtgcaggtttgttacataggtataccacatgtgcyatggtggtttgctgcacctatcaacttctcatctaggttttaagcccgggatgca

SEQ ID NO: 86935 - DNA, 2362 bp, Homo sapiens
taatctcttgtaatggatgagtttaatttgataacttggaggtttataacatttcttactctagacatgaaataagtcataaatcacgaaacaaagatttttggaaagcaataattttaatcctgaccacacccactctggcaaggttttaaaaaatgggaaggttgaggccactgaaaaaaaaaatcatggtacagaaatttgtaagaaattaaataacttctatgtctcatttcttttaacttctctcttatcaggttcagtgaatttctaacacatctgtttcatgcagatgcttattttttaatagctgaataaaatgggaccacgagaaaagcagaggaagaggtaaaaagcatttggaaactgagcagaatcatttacattcttccgacatgtagaaatgtatctttagttcaaagattgctgaaactaatctgcctcaggctttccaggatgggtgttcagatgttgctttggagtgcataaaatcacatgatcagcagtgtcttgcatctgtcaaaagaaacttctgagctgggcatagtggctcacacctgtaatcccagcactttgcgaggctaaggtaggaggatcacttgagcccaggagtttgagatcagcctggacaacatagcgagaccctatctccacaaaaaatttaaaaaattaatggcaggcacctgtagtcaggagcccaaggcaggaggatcacttaagcgcaagaatttgctgcagtgagccatgatcctgccactgcactccagccttagcgacagagcaagacctggactcatttaaaaaaaaaaaaaaaaaaaagaaagaaaaaagaaaaaaaggaagcttctgcttataaaaagagtggtgtacaaataggaggagtagctgctctgtgctatgttccagcttattgcatttacttagttctcttggggttgaaatagatagtcattattcctttctaaaatttgaatgctgcccaggtaacttcagcttagtaaagtatcatagacaaccacatctgattagattactaataacttgtttgctatagtcatttgaagaaagataatgacctggcttttaattaaagaaggaaaaaggagaaccctcataaagtaggggaaatgattttatgttctaagaactaaatctgtaagattctaaatataaatctatagctatataaagacataattcatgtgaagaatattatcacactagtaggtttctcagactgtccttatatacataatctctgaagcatgcattttccccaggggaattgaatccttcttgtttccatgactaaaagtagcctcatagttataaagaacagtgaaaatgaggtaatgtacgtggaagtccaaactaaaaaacaaaatcagattgtgatctgatttccccaattctacattggggaaaaacttactgatttcaaattcgttaacaaatattgatttccctttatatttagtacaaaatcaaactaacctcgataagaatgcaagtgaatcaaaatgagtttcaaggggttgtggctagtacacgctttctacagctgatcaaactattgtttggaccatgatcccttcaactcagaaaaccctgacatatgcctrtagtgtgtttgccaaatatcatagtttactaacaggaaattcttctgctaattataaaactgcactaacacaaaacaagatcatatttatccaagtgattcagttatgttattactgtacaaaagagttaaaaattgccgctcaagtaactttcaaagtctaaacgtgtatccctaaattcagtgatttcagtgtatttttctttcagggataatttttagtggtacctttgtaggtagcattattgagaactatagaagttttcaaattaatgtttaatcccaccctcgattttaaaaatgtggggaaataaaaagcatcccctactaaagtttacatttcccatttgtaattactttaaaaaatttttttactgcaacatctacataatgtcaatttatggcaaattgtcatgactacaaattcagagatcatcaccctagattttcatgtgttttatttaatgtgttagggtctgagtaaccctcctctactagtaatacaaacgtttggggttgccctcaggaaatagcaatataatgattggctaccaagcaaaatatcagtgttcctgacagtgggcatgctgagagctagcaaataaatccacagtaggaaaacagagctcagaaccataaacctcgaattgttctggtttcccatgtcatttcattgtgagttactgaatcacccttgtggcccaaaaggggtgttacatctccccaagtgctcaataaaat

SEQ ID NO: 86936 - DNA, 578 bp, Homo sapiens
aaaaattagctgggcatggtggcatgctcctgtagtcccagctactcgggaggctgagacaggagaatctcctgaacccaggaggtggaggttgcagtgagccgagactgcrccactgcactccagcctggacgacagagcgagactccgtctctaaataaataaataaataaataaataaataaataagccgggctgtcagcctgtggtcccacctactcaggagacagatggaaggatagcttgagcctaggaggttgaggctgcagtgagctatggttgtaccactgcactccagcctgggagacagagtgagaccttgtctctttaaaaaaaaaaaaaaaaaaaaaaagaaagaaaaaaatggctatgtgaccttatttagtcaggagttttttcctgtctgagactcagttttctcatttgtgagatggggagaattgccttgggacagagtatgattgatgctttaaccttgaaagaggcgtttactttgtggtctcctttcacataacttttattgttgctgtgtagaaaggtgaaaggcaccatctatagcatgaagttggaaagttctg

SEQ ID NO: 86937 - DNA, 849 bp, Homo sapiens
cctagtcttccacatatgttttaaagagaggccttaatttaaggtactgcagtctttgctcacaagagccaagtaagacggtgctacttggaggttgctataggactctgacgctatttatttgaatcctaggtgctcttgtgacttctctgacttcagtccttctggagtcagatcacccagcttctctgatgagtgactggtcatttttaaagcatgcctgcagcagtcttcaagaggtttctgcctgggcatcacratcagcacacatttgctcatacacataccaggtgatgaggactcaaccactgcagacaggcagagccatgcaaataaagccatccagcaaggtcaccttttcctcagatgccccagtttcaggatgatagaatttgcatattaagtgttaataggcctggcaataaccagcttttgcttcccttcctcaatgagggacatgccagaaacagacttgcacacaggctctgctcatatgggaaacaggcctgacacacagggtctgctcatatgggaaaatgatttcagtcacagtccttagctccaaattctgtacttggaacctagattataatctagctcctaatcaaactagattctgctccagttcagtttactaaggcattccctctaagctgcctcagtgaaaccagtgagagccactggattacaattctaagtgcagctgtgcctaagaaggagagagtcccacaggagaggagaccggagggcataaggcaggggatgatacaaaatcctggacagtcatcacatcagtaacacagcttcagaaagtggtgggcttggaggaggggagagaaagaaacaaaa

SEQ ID NO: 86938 - DNA, 679 bp, Homo sapiens
gggatcctcctacctcrgcctcttaaagcactcagattacagacagatatgagccaccgtgcccgaccctacacatgcttttataaacagtaaatcgttgggtcagtatcatcccttgtctccaccctgcatgttccccaggtgaaatgcaggtcctgttagcggtgtcttctttccatcaggaccagcacttgctttgctgcatgaagctgcttctactccttacctccttttggaagagtgggcgctctccatctttgagggtgtttgtgtataggtggcagggggcttgtagaggaggaagtgaggatgacatgagatggtgggttgttggactagcctgacttcttaaaaacatgtctgagggccaggagcagtggctcacgcttgtaatcctggcactttgggaggctgaggtgggcagatcacgaggtcaggagatcgagaccatcctggctaaaatggtgaaaccccgtctctactaaaaatacaaaaaattagccagatgtggtggcacgcgcctgcagttccagctactcggggggctgaggcaggagaatcatttgaacccgggaggtggaggttgcagtgagctgagatcgcgccactgctctccagcctgggtgacagagcaagaatccgtctcaaaaaaaaatatgtgtctgatgtgtctgagata

SEQ ID NO: 86939 - DNA, 1269 bp, Homo sapiens
ttatgatgtagtgctcaacctggacagtgtgaattactgggttaacatacttcttaatgagagtaactgcagatttaaacttaggtttttttattttttatttttattttttaatagagacagggtctcactctgttgcccagactggattgcagtagcctgatcacagctcactgtaaccttgaatgcatggactcaagtgatcctcccatctcaagcttcccagagtagctggtactacaggcatgtgccaccgcgtctggctaatttttttttttttttgtagagatattgttgtgttgcctgggctggtcccgaactcctgagctcaagtgattctccctcttcgacctcccaaagtgctgtgattacaggcgtgcagctgcacgtggccctaggttgtttacatttttaacatggtgattcattaagaccaattgattaaattaaaggaagaattatgtttgctttgttcactaagaatgggaaggcagtggagaagcaggatggaaataatctagaggactccaaggagtgccagagtgaccttattttgttgaatttatttatggtagtaatgaaacctatataatttagcttctctttccttcagagaagaatatactagaagtcggagttactcaagattgagtcttcttttgctaggctacttgataaacagttcttgtctgttgagtaggctaatcttcagggaactgagtatacagtggatataattggatccagtggatataattggatataatttctaaagccgtatttatttctctttttatctatactttctttaactgtaaaaaaatttaggagtgttacgttctcattttgaatgaggaactctgaaattgtatctgattttctcttttgtatttgtacttcagactagtcaaatatgtatgccttttgcatacatatttacttggagatggggagatatttatactagcttcctctggctgccataacaaactactgcagacatcgtgrcttaaaatgacaggcatttatttctcagcgttctggaggccagaattctgaaatcattatcagtcagccaagatcacggtgtcagagggccacaccacctctggaagatctaggggagaatctgctccttgcctcttctagcttctggtggctgatggcattccttgttttatggctacatcattaatctctccctctatggtcacgttatggccttccttctccacttctgtctgcagttagatctttgtcttaggctgg

SEQ ID NO: 86940 - DNA, 1028 bp, Homo sapiens
ttgaaaaaagaaactgtatgcaaaaatacaaagtttataatttccatttacatgatgttctagaacaagtatgattaagtcctagtgaaaaaaatatagaattggcttctagaaggctgattaaaggcatctggaactcgccatctccacaaagaagaaccaaaataacaagtagataataacacctcaaatagatcatctaaaaggaaacacaagaattaagccaaggagtgacaggaaacatctagggaagaatgaagaaggaagcagggcagtctgcttgattagcattgtctgtcagctaagagagcctccgcagtgtaggaaaagggtaagttagagatccccagtggttcacatttcctccacagactcctgtagtcctagccatgggatagcacctagagcactgtgggttttcagactaacataaggaactgcctgaagactgtgcaatggcattgctccagagagggaggtcatgctgcatctcacataacctccccctcaagacctaagcggctacagcatggcatcattgggggagcccagcctatggcaccatttgggaaacagccaccactgctgctagcagctgccaccaggctgaagcatgaaccactggttgctcccrgtagcagcaggtcaccctgaatttgccttctccgggccaaagagcaagaaactggcagcaactttgctgtctacagtagtagggtggcaccatatttgtatgtgccttgagggcactcactccccactcactgccaccactgtcacccccatcataacactctgcaaaggtctgaagataactccatgcctgcccaacaaagccaccacccatatacaacagcagaggacccaaggacaggaccactaggtctggctccgccaccactcccagtgcctgagcactccatccaaggatctggggaatctccttgcagtgtccattactattggtacttagcactcctcctagagcctaagaagcagcccacacagcctgtcactacaaccacagc

SEQ ID NO: 86941 - DNA, 1028 bp, Homo sapiens
ttgaaaaaagaaactgtatgcaaaaatacaaagtttataatttccatttacatgatgttctagaacaagtatgattaagtcctagtgaaaaaaatatagaattggcttctagaaggctgattaaaggcatctggaactcgccatctccacaaagaagaaccaaaataacaagtagataataacacctcaaatagatcatctaaaaggaaacacaagaattaagccaaggagtgacaggaaacatctagggaagaatgaagaaggaagcagggcagtctgcttgattagcattgtctgtcagctaagagagcctccgcagtgtaggaaaagggtaagttagagatccccagtggttcacatttcctccacagactcctgtagtcctagccatgggatagcacctagagcactgtgggttttcagactaacataaggaactgcctgaagactgtgcaatggcattgctccagagagggaggtcatgctgcatctcacataacctccccctcaagacctaagcggctacagcatggcatcattgggggagcccagcctatggcaccatttgggaaacagccaccactgctgctagcagctgccaccaggctgaagcatgaaccactggttgctcccggtagcagcaggtcaccctgaatttgccttctccgggccaaagagcaagaaactggcagcaactttgctgtctacagtagtagggtggcaccatatttgtatgtgccttgagggcactcactccccactcactgccaccactgtcacccccatcataacactctgcaaaggtctgaagataactccatgcctgcccaacaaagccaccacccatatacaacagcagaggacccaaggacaggaccactaggtctggctccgccaccactcccagtgcctgagcactccatccaaggatctggggaatctccttgcagtgtccaytactattggtacttagcactcctcctagagcctaagaagcagcccacacagcctgtcactacaaccacagc

SEQ ID NO: 86942 - DNA, 628 bp, Homo sapiens
acaaaaatttagccatgtgtagaggcatgtgccagctactcgagaggcagaggtgggagaatcacctgagcccaggaactcgaggctycagtaagctgtgattgcaccactgcacttcagactggatgacagaggagaccccatctttaaatatacaaataaaatgaaactttaaaattaaaaaataaaaatactttttcctagtttcttattttctctatcctcaaaccttctattactcatggcagcaaggttgactgaatttcacaggcaactaaacaagagttatctcctttactatcttttcaaggaggatctttaactctttgtgatatttctgaacattcttccttcactattttgtttccttccccaccatatcccaagctctatgaatccaagaatcattaaataccatcatgagcgtgtgtctttcatgaggaaaggtagtatgtgccatcacaacatagctcatttttatctctttatcactaaaactaccaatgagggtgtctctgtactctagagttggaactcagaatggatagagctggccctgctgctaatgaaaggcaatggcccaagtggaagtagctcaggaaaggctaagctttcacaataatctcaa

SEQ ID NO: 86943 - DNA, 614 bp, Homo sapiens
ggcatgatgcctctaccccattacacactgccaatgcacaggctgttccatctttcaaaatgaggtggggcacagtgaacaagatgccctcaatgtctagtctctccttcttgctttattaaatgcccttctgagtttaagctgggcacaggacctcccggctaaagaccgctttctccagcctccttgacagcaaggtgtggcccacggaataagtctgattggtcagatttgaacagcagcaacttctgggccatgttttcaaaagaaaaaggagtgccttccacttccccttcccacttcccgctggcaggaatgtgggcgtgaaggcaggagggggagcagtcaccttagattgagtggtgaaagctggctcttgtgatcagcagagcctgtgtccacggtgccatggtgatgccacataagcccatcatgcttccattcagcctgccgtgtgaggggccagtagactctgatctggtttcatgacagttactttgtcatttttatagcaagcctgtattttacagcaatagtgagcttgtgttctaactggttcrcgtggcttaccattttcatcttacgtagaattcattcatgtcagttacccaact

SEQ ID NO: 86944 - DNA, 629 bp, Homo sapiens
cccaggtctcactcctggctgggggtggaaaacagtggggtggccagggagtgggagggtcctgaggccctctttccctctggagaaggcctttgggggtgcaggggcttcatgctaccagcatccaaatcaccaaaccacacatctttggggcaattccacgcaatataaccacagcgctgagattgtcattgtttttaatggagtatgaggctacctgacagatctctgtggctcctaaagaggaggaaaggggctgcgagcaggtggagacaggkattgaggcagtgtggaggcttccactgcagggagcagaaaactcaaccccaatgtcaccaaggaaaatgtcacatgacaagaactcttgaggaagcgcagcaccaaggttgattaatttagcaattcagtgacatcatggtgggcccaggctccttccatgtttcaagtctgtcccccactcagtgtgttagctttgtcctcggactcacacccctcatggtgtgggtatggctgccagtgttccaagcatcacatacaaatgacaccattgagggagagagagaacacctctccctatgtgtcttttttatcagtgagaaacctttcccaaagcatgcttcccctcacat

SEQ ID NO: 86945 - DNA, 783 bp, Homo sapiens
tttcctaaaaaaataatggggagttgcattgggaaatgccatagaaagactatagtgattgtattaatttcctagggctgttgtaacagcaccacaaactaggtggcaaaacagcagaaatgcatggcttcacaggcctggaggctacaagtctgagatcaaaggtgtcggtagggttgtttccttttgaaggtggtgagggtgaatctgtcccgtgcctctctcctagcttctggtggtttgctggcatttggggcatggctgggctcctagaagcatcaccctgatctctgccttcttcttcatgtgtgtctatttgtctgtgtccaaatttcctgcttttataagggcaccagtcatattggattgggctaaccctaatgaccttatcttgattacrtctgccaaaaaccctatttccaaataaacccctagttcacattctgaggaactaggggttaggacttcactgtatctttctgaggggacacaattccacctatacctacaatggtactgctcccctccgcagcagtagggtagtgcagtggttgagtgccgacactgggggtcacacttcctgggttcaactatggaggtggcataagtacaggagaagttgtggggagacagggttctagccctgcactgataatacgttcaaagatttcttatctgtgcctctgtgaagtgggatgaggtcagtatccacttcctatggaggttatgaaaaataaatgagttaatctgtatgaggtccttggtccagcatctgacacacgg

SEQ ID NO: 86946 - DNA, 783 bp, Homo sapiens
tttcctaaaaaaataatggggagttgcattgggaaatgccatagaaagactatagtgattgtattaatttcctagggctgttgtaacagcaccacaaactaggtggcaaaacagcagaaatgcatggcttcacaggcctggaggctacaagtctgagatcaaaggtgtcggtagggttgtttccttttgaaggtggtgagggtgaatctgtcccgtgcctctctcctagcttctggtggtttgctggcatttggggcatggctgggctcctagaagcatcaccctgatctctgccttcttcttcatgtgtgtctatttgtctgtgtccaaatttcctgcttttataagggcaccagtcatattggattgggctaaccctaatgaccttatcttgattacatctgccaaaaacccyatttccaaataaacccctagttcacattctgaggaactaggggttaggacttcactgtatctttctgaggggacacaattccacctatacctacaatggtactgctcccctccgcagcagtagggtagtgcagtggttgagtgccgacactgggggtcacacttcctgggttcaactatggaggtggcataagtacaggagaagttgtggggagacagggttctagccctgcactgataatacgttcaaagatttcttatctgtgcctctgtgaagtgggatgaggtcagtatccacttcctatggaggttatgaaaaataaatgagttaatctgtatgaggtccttggtccagcatctgacacacgg

SEQ ID NO: 86947 - DNA, 783 bp, Homo sapiens
tttcctaaaaaaataatggggagttgcattgggaaatgccatagaaagactatagtgattgtattaatttcctagggctgttgtaacagcaccacaaactaggtggcaaaacagcagaaatgcatggcttcacaggcctggaggctacaagtctgagatcaaaggtgtcggtagggttgtttccttttgaaggtggtgagggtgaatctgtcccgtgcctctctcctagcttctggtggtttgctggcatttggggcatggctgggctcctagaagcatcaccctgatctctgccttcttcttcatgtgtgtctatttgtctgtgtccaaatttcctgcttttataagggcaccagtcatattggattgggctaaccctaatgaccttatcttgattacatctgccaaaaaccctatttccaaataaacccctagttcacattctgaggaactaggggttaggacttcactgtatctttctgaggggacacaattccacctatacctacaatggtactgctcccctcygcagcagtagggtagtgcagtggttgagtgccgacactgggggtcacacttcctgggttcaactatggaggtggcataagtacaggagaagttgtggggagacagggttctagccctgcactgataatacgttcaaagatttcttatctgtgcctctgtgaagtgggatgaggtcagtatccacttcctatggaggttatgaaaaataaatgagttaatctgtatgaggtccttggtccagcatctgacacacgg

SEQ ID NO: 86948 - DNA, 783 bp, Homo sapiens
tttcctaaaaaaataatggggagttgcattgggaaatgccatagaaagactatagtgattgtattaatttcctagggctgttgtaacagcaccacaaactaggtggcaaaacagcagaaatgcatggcttcacaggcctggaggctacaagtctgagatcaaaggtgtcggtagggttgtttccttttgaaggtggtgagggtgaatctgtcccgtgcctctctcctagcttctggtggtttgctggcatttggggcatggctgggctcctagaagcatcaccctgatctctgccttcttcttcatgtgtgtctatttgtctgtgtccaaatttcctgcttttataagggcaccagtcatattggattgggctaaccctaatgaccttatcttgattacatctgccaaaaaccctatttccaaataaacccctagttcacattctgaggaactaggggttaggacttcactgtatctttctgaggggacacaattccacctatacctacaatggtactgctcccctccgcagcrgtagggtagtgcagtggttgagtgccgacactgggggtcacacttcctgggttcaactatggaggtggcataagtacaggagaagttgtggggagacagggttctagccctgcactgataatacgttcaaagatttcttatctgtgcctctgtgaagtgggatgaggtcagtatccacttcctatggaggttatgaaaaataaatgagttaatctgtatgaggtccttggtccagcatctgacacacgg

SEQ ID NO: 86949 - DNA, 665 bp, Homo sapiens
ttttatattctccccaattacctaccagagagatactataattagtcctacttttaaaaactttttatattgaaataatttcacgcttgaaaaaaatattgcaaaaatggtccaaaaagttcctgccacaccttcccatggcacaaacgcatggcacagtgaccaaaaccaggacactgataacggtatgacactgttgacaatccatagatgagttttcctgtcaatatcctttttctgctccaggatctcatacaggaccactttgcacttgtggtcccgtstccttagagtggagggttctaaggagaaccttgcctctgtccttgtctttcatgacctttgcacttttgaagagtcctgatcagttgttttgtggaaatgtctctcagtgttgatttgtcttatgcttcctcatgttcaaattcagatgatgtatgtatttttgggcaagaaaaccacagaagggaagccatgccctactcagtgcattgcatcaggagctacttgatattgcacgaatcccattttcaagatgaataaactgcagcactgaaaagtcaagaaacagattagaatgcagctaacagctcacatctgtcgagcacttgcccatgcacctggggcatgtattcagccacttctacccctggggcacagcgagt

SEQ ID NO: 86950 - DNA, 1112 bp, Homo sapiens
atagtaggcttagtacctgggtgatgaaataatctgtacaacaagcccccgtgacacaagcttacctatataataaacctgtacatggacccttgaacctaaaagttaaattaaaataaggaatattgtttctaaattataacacaaaatgtgtacatacagaaaacaaaactaaatcatggaggtgaatacaacagaaatgatttttgtgayaatctgcttgattttactcttcaaagtttaaaatgtgattttctcatgagatatctcaagtcttcttttgttgatggtggcagaattaattgaataaaagcccctccaaaactgaaaaataattacataaatatgtgcactcttaaagagccactttacctcatcataaaaattatataaaacttagaatgaatgtaaaactaaaatataattctagagaaattgatcagatttgtagcctcctatatgagattactctaaaatcaaagggattctataggcctattttatcgatttctgtgacctcacaaatttatgtactacccaaaataatttcaaaagtatggacttaagccattgcagagaaacagaagagaaatttatgaatagaatagtgataaaggtatatataaacacataaaaataaacaacttatattccaacatcatagttcaatgttagtataaatttaattataagcttcttaagtaccaaaaataaaagcatgatggcaacgacacatgaagtctaagagataacatcatgataaacagaactgagaagaacttttgtcaggtaatgaaggacatttccaacatatctttttttgttaaaatagggagttttatatgattaatttttaaaactccctttcaatgcaggctgatgacataattgctgaagcccaatttaatttaagagaaactgagaagggctaaaacaacatagactacatctgtcttgagttaggggtaaattagaacatagaagagtgagtggcttgcatatggcctcattaggccatattccatatgagattattaaaatttatttgcaatgtcactttgttttggattggccagctgagatttcagtgtgttatctgcagcaagaaccaa

SEQ ID NO: 86951 - DNA, 1112 bp, Homo sapiens
atagtaggcttagtacctgggtgatgaaataatctgtacaacaagcccccgtgacacaagcttacctatataataaacctgtacatggacccttgaacctaaaagttaaattaaaataaggaatattgtttctaaattataacacaaaatgtgtacatacagaaaacaaaactaaatcatggaggtgaatacaacagaaatgatttttgtgataatctgcttgattttactcttcaaagtttaaaatgtgattttctcatgagatatctcaagtcttcttttgttgatggtggcagaattaattgaataaaagcccctccaaaactgaaaaataattacataaatatgtgcactcttaaagagccactttacctcatcataaaaattatataaaacttagaatgaatgtaaaactaaaatataattctagagaaattgatcagatttgtagcctcctatatgagattactctaaaatcaaagggattctataggcctattttatcgatttctgtgacctcacaaatttatgtactacccaaaataatttcaaaagtatggacttaagccattgcagagaaacagaagagaaatttatgaatagaatagtgataaaggtatatataaacacataaaaataaacaacttatattccaacatcatagttcaatgttagtataaatttaattataagcttcttaagtaccaaaaataaaagcatgatggcaaygacacatgaagtctaagagataacatcatgataaacagaactgagaagaacttttgtcaggtaatgaaggacatttccaacatatctttttttgttaaaatagggagttttatatgattaatttttaaaactccctttcaatgcaggctgatgacataattgctgaagcccaatttaatttaagagaaactgagaagggctaaaacaacatagactacatctgtcttgagttaggggtaaattagaacatagaagagtgagtggcttgcatatggcctcattaggccatattccatatgagattattaaaatttatttgcaatgtcactttgttttggattggccagctgagatttcagtgtgttatctgcagcaagaaccaa

SEQ ID NO: 86952 - DNA, 1112 bp, Homo sapiens
atagtaggcttagtacctgggtgatgaaataatctgtacaacaagcccccgtgacacaagcttacctatataataaacctgtacatggacccttgaacctaaaagttaaattaaaataaggaatattgtttctaaattataacacaaaatgtgtacatacagaaaacaaaactaaatcatggaggtgaatacaacagaaatgatttttgtgataatctgcttgattttactcttcaaagtttaaaatgtgattttctcatgagatatctcaagtcttcttttgttgatggtggcagaattaattgaataaaagcccctccaaaactgaaaaataattacataaatatgtgcactcttaaagagccactttacctcatcataaaaattatataaaacttagaatgaatgtaaaactaaaatataattctagagaaattgatcagatttgtagcctcctatatgagattactctaaaatcaaagggattctataggcctattttatcgatttctgtgacctcacaaatttatgtactacccaaaataatttcaaaagtatggacttaagccattgcagagaaacagaagagaaatttatgaatagaatagtgataaaggtatatataaacacataaaaataaacaacttatattccaacatcatagttcaatgttagtataaatttaattataagcttcttaagtaccaaaaataaaagcatgatggcaacgacacatgaagtctaagagataacatcatgataaacagaactgagaagaacttttgtcaggtaatgaaggacatttccaacatatctttttttgttaaaatagggagttttatatgattaatttttaaaactccctttcaatgcaggctgatgacataattgctgaagcccaatttaatttaagagaaactgmgaagggctaaaacaacatagactacatctgtcttgagttaggggtaaattagaacatagaagagtgagtggcttgcatatggcctcattaggccatattccatatgagattattaaaatttatttgcaatgtcactttgttttggattggccagctgagatttcagtgtgttatctgcagcaagaaccaa

SEQ ID NO: 86953 - DNA, 2783 bp, Homo sapiens
  misc_feature (1)...(2783): n = A,T,C or G
ccgtctcaaaaaaaaaaaaaaaaaaaaaaaaaaaaaaaagaaacctgaatggaaaaacaaatccccctcccactctccatctaataacaagctggcttgattgacagatgactaatctgcacaggtagaaaggtgagtaggagaggagaaagctgttgtcgattacaagggcaacagaaataatcagaaattcctggctttcagtgaaaatattaaggtgagtcaaacaataaattaaatacatgttaccatctactttattattccacatacaaatgacaacctgttaatgacatctgccactcactagaagcacagcatatgcatttcccaatagctgctttaaaactggaaaaatcctaatcccagtaagacaggaaaatgctatcagagttcttgcagcatatactcatgccatatccctgtgtgctaccgcatagatgtgaccagaggttaaatatacacttctggaatttgcataaaatgtanaatcatntaaatgaaaatttatttgcattgctttattcatatacactttgctaaaggttttaaaaataatataaactcaatatctcttatcaactttccccaaaatattttttgtggccaaagttatggtttcaagtcaagtatattttaatatgtattttaataatgttgaaattttgatgtttattcaaaataagaattctatattcttaaaagcatttttagatactctttctctaaacaatttaattaaaaattcctgactagctgaagagctttgggcaagtaattttaacatatttgggtctcaatttacttctctgcaaaagggaaaaaaaatagtgtatctacctcagagagttgaaagcaatatataacatatacacaaggtaacatgatgcactgtgcatggaaaactaccatcttcttttatggcatggcatggccttggcagtgtctatcaggaccttctgcttatccacatgtatgtaagaccaccattcaaaataacttccacgaggaagaaagcaaaagttactgttaacagcttcagaaccccacatataccttgttatcttattcagaatccactttgacttctgattagaaatagtaacttagttatcaaaagataaaatgaaatgacaggaatatatcagggtcccagacaagagaaaaaaaaagaaaaagaaagaaaagaaaaggaaggaaggaaggaaggaaggaaagaaagaaaaggaaggaaggaaagaaagaaggaggaaagaaagaaagaaagaaagaaagaaacaaagagaaagaaagaaaggaaggaaggaagaaagagaaagaaaggaaaggagagagagagaaggaaggaagggagagagagaaggaaggaaggaaggtaggagggagggaggggagaaagaaagagaaagagagaaggaaggaagagagagaaagaaagagggagagaaacagaaagggagatagaaggaaggaaagaaagaaagaaagagagagagaaagaaaaaaagaaagaaagaaagaaagagaaagaaagaaagaaagaaaagaaagaaagaggccttccagaatttagccaatagtgaaatcattcatatacctactggattaagttcagtgacatcccactcaaggtattctgcaacatgcatcatctgactgatgatattttctagctcctggaagagaaagagagataaaaaatatgaatacaagatcttagtgagttttaaatctttcacttgcagaaattgttttgttcaatgtgtagctaaaaaagttaaatgagttctatgggaatatatatatgtacataatcctttttaaaggtctaattaactatataaagaaaaaagaatcctgaatataaatttatcttgtacrttgtctagaaattttcaccaggagagggcacaactttacaaaaaatacattttcttctactaaaagagagtgtctgaagaaagcaggaccaaatacatactgtcacatgtgatttttaagacactgaattccctgaacctttggcttgaaaatagatgtgaaagggtggacaaatcatttgaggacaactgagaagtctatttttatcttgatacactgagaatatacattgactgttttagtcatgtattgaataatttgctcttgaaagaagagtgttcagggccaaggtttgcaggacaagtatatgcagcatttattttgtgagaggatgaaattttagtttgaatttccatattattctgctcaattatcaactctttgaagaattgcaagttaatacagatgacctggctaaattaattaaaacattttcctgcctatttatctaatgttttaatttttctctacctacagaaaagattaaacatggctttgtgaaatgcttgtaatttcacatgaaaacattacataatttgaaaagtggtgttttaccgtatgatttaaaatgtaagaagtataaaagaataaagcttgaaagtgcaatagtcaaagagtattctactcaaatctctaatctaatatatgtagtcgatgttcatggaatagagaagaaatacgataaaacagattctcttttgggaagccgtgtttccctccgaggaactaatgaaagctatactccctctctccagaaaaaaaaaatataattatgaatatgttacttaagtaagacaggctgccccagaagtaatacaaagataaatgtatttattacagattaacaaattttaaaacataaatccctttgaattataggttaaaagtgtgcatgtgtatgc

SEQ ID NO: 86954 - DNA, 2783 bp, Homo sapiens
  misc_feature (1)...(2783): n = A,T,C or G
ccgtctcaaaaaaaaaaaaaaaaaaaaaaaaaaaaaaaagaaacctgaatggaaaaacaaatccccctcccactctccatctaataacaagctggcttgattgacagatgactaatctgcacaggtagaaaggtgagtaggagaggagaaagctgttgtcgattacaagggcaacagaaataatcagaaattcctggctttcagtgaaaatattaaggtgagtcaaacaataaattaaatacatgttaccatctactttattattccacatacaaatgacaacctgttaatgacatctgccactcactagaagcacagcatatgcatttcccaatagctgctttaaaactggaaaaatcctaatcccagtaagacaggaaaatgctatcagagttcttgcagcatatactcatgccatatccctgtgtgctaccgcatagatgtgaccagaggttaaatatacacttctggaatttgcataaaatgtanaatcatntaaatgaaaatttatttgcattgctttattcatatacactttgctaaaggttttaaaaataatataaactcaatatctcttatcaactttccccaaaatattttttgtggccaaagttatggtttcaagtcaagtatattttaatatgtattttaataatgttgaaattttgatgtttattcaaaataagaattctatattcttaaaagcatttttagatactctttctctaaacaatttaattaaaaattcctgactagctgaagagctttgggcaagtaattttaacatatttgggtctcaatttacttctctgcaaaagggaaaaaaaatagtgtatctacctcagagagttgaaagcaatatataacatatacacaaggtaacatgatgcactgtgcatggaaaactaccatcttcttttatggcatggcatggccttggcagtgtctatcaggaccttctgcttatccacatgtatgtaagaccaccattcaaaataacttccacgaggaagaaagcaaaagttactgttaacagcttcagaaccccacatataccttgttatcttattcagaatccactttgacttctgattagaaatagtaacttagttatcaaaagataaaatgaaatgacaggaatatatcagggtcccagacaagagaaaaaaaaagaaaaagaaagaaaagaaaaggaaggaaggaaggaaggaaggaaagaaagaaaaggaaggaaggaaagaaagaaggaggaaagaaagaaagaaagaaagaaagaaacaaagagaaagaaagaaaggaaggaaggaagaaagagaaagaaaggaaaggagagagagagaaggaaggaagggagagagagaaggaaggaaggaaggtaggagggagggaggggagaaagaaagagaaagagagaaggaaggaagagagagaaagaaagagggagagaaacagaaagggagatagaaggaaggaaagaaagaaagaaagagagagagaaagaaaaaaagaaagaaagaaagaaagagaaagaaagaaagaaagaaaagaaagaaagaggccttccagaatttagccaatagtgaaatcattcatatacctactggattaagttcagtgacatcccactcaaggtattctgcaacatgcatcatctgactgatgatattttctagctcctggaagagaaagagagataaaaaatatgaatacaagatcttagtgagttttaaatctttcacttgcagaaattgttttgttcaatgtgtagctaaaaaagttaaatgagttctatgggaatatatatatgtacataatcctttttaaaggtctaattaactatataaagaaaaaagaatcctgaatataaatttatcttgtacattgtctagaaattttcaccaggagagggcacaactttacaaaaaatacattttcttctactaaaagagagtgtctgaagaaagcaggaccaaatacatactgtcacatgtgatttttaagacactgaattccctgaacctttggcttgaaaatagatgtgaaagggtggamaaatcatttgaggacaactgagaagtctatttttatcttgatacactgagaatatacattgactgttttagtcatgtattgaataatttgctcttgaaagaagagtgttcagggccaaggtttgcaggacaagtatatgcagcatttattttgtgagaggatgaaattttagtttgaatttccatattattctgctcaattatcaactctttgaagaattgcaagttaatacagatgacctggctaaattaattaaaacattttcctgcctatttatctaatgttttaatttttctctacctacagaaaagattaaacatggctttgtgaaatgcttgtaatttcacatgaaaacattacataatttgaaaagtggtgttttaccgtatgatttaaaatgtaagaagtataaaagaataaagcttgaaagtgcaatagtcaaagagtattctactcaaatctctaatctaatatatgtagtcgatgttcatggaatagagaagaaatacgataaaacagattctcttttgggaagccgtgtttccctccgaggaactaatgaaagctatactccctctctccagaaaaaaaaaatataattatgaatatgttacttaagtaagacaggctgccccagaagtaatacaaagataaatgtatttattacagattaacaaattttaaaacataaatccctttgaattataggttaaaagtgtgcatgtgtatgc

SEQ ID NO: 86955 - DNA, 844 bp, Homo sapiens
tgcataaaaaggaaattatagcacctttctcggccaagaatcctaatgatgtgactctcctgcttgtgccagagccacagaatgtattttgacatgttkttggcccattctgtagctgtttttgctctcatcattttgctgggtttcttccacgtatggttttatcatattgctggctcaggccatcagttaaggtgagcctctttcctacgccctgcctagagagggcatggtgacatattgcttggcacagcacctaagtaatgttaaccttctgccttgtttttttgccacaaatgggattatgacatataacttgcttcagttcaaaggcatgatgatcaaacttattttgggattcagacaataggagatattttgcctctcaccagtaggtttaggtcaatagataaggtccttcattccgtatttgtacaaagctcacagaagttacaacaataactcatatcataaaaacttcttgggtggtacagaaagtttcataacagggcccagcaaaaagttaagattgttactcttgactacacactccagtgatagtaaaagttgttaccatcctacatttacaaagtccattgttgaagtcctgagtctaacaaatgaatacagcacaaaattggaattgtgactttcataagtgaacctggccacagtcgcgatgctgactcatttctggacccagctcataggcataatagtgatcttatccctgaatccagcctatagagaattgttgaccgtcatacctgggtttaggacaatatgtaagatcatgagtccatataagcatgtaggcctcagagaggtttgcggctcccatgca

SEQ ID NO: 86956 - DNA, 843 bp, Homo sapiens
tgtatgtatacacatttaaatactatttggagccaggcacagtggctcatgcctgtaatcccagcactttgggaggctgaggtgggtggatcgcctgaggtcaggagtttgaaaccagcctggccaacatggcaagaccccatctctactaaaagtacaaaattatccaggcctgtaatcccagctactcaggaggctgaggcaggagaatcacttgaacctgggaggcagaggtcacagtgagctgaggtcacgccactgcactccagcctgagcaacagagccagactctgtctaaraaaaaaaaagaaaagcaatgacaacaagaggggaattaaatgtgaatttgaaactggctgattaaaagtaaaggtaggtggctaggagcagtggctcatgtctgtaatcccagcactttgggaggccaaggcaggtggatgatctgaggtcaggagttcaggaccagcctggccaacatggtgaaacctgtctgtactgaaaatacaaaattaaccgggcatggtgacacatgactataatcccagctactcgggaggctgaggcaggaccagcctggacaacatggtggaactccgggttcaagtgattttgcttgaatgccgggaggtggaggttgcagtgagctgagactgtaccactgcactccagcctgggaaacaagagcaaaactccatctaaataaataaataaataaacaagtaaataaaatttaaacaatattttttaaaaaaagtaaaggtgagataaactattcactccagaggagtaacaatgagaagaggaagaaaaacatatacagtagtttgctgattcaaactaata

SEQ ID NO: 86957 - DNA, 843 bp, Homo sapiens
tgtatgtatacacatttaaatactatttggagccaggcacagtggctcatgcctgtaatcccagcactttgggaggctgaggtgggtggatcgcctgaggtcaggagtttgaaaccagcctggccaacatggcaagaccccatctctactaaaagtacaaaattatccaggcctgtaatcccagctactcaggaggctgaggcaggagaatcacttgaacctgggaggcagaggtcacagtgagctgaggtcacgccactgcactccagcctgagcaacagagccagactctgtctaagaaaaaaaaagaaaagcaatgacaacaagaggggaattaaatgtgaatttgaaactggctgattaaaagtaaaggtaggtggctaggagcagtggctcatgtctgtaatcccagcactttgggaggccaaggcaggtggatgatctgaggtcaggagttcaggaccagcctggccaacatggtgaaacctgtctgtactgaaaatacaaaattaaccgggcatggtgacacatgactataatcccagctactcgggaggctgaggcaggaccagcctggacaacatggtggaactccgggttcaagtgattttgcttgaatgccgggaggtggaggttgcagtgagctgagactgtaccactgcactccagcctgggaaacaagagcaaaactccatctaaataaataaataaataaacaagtaaataaaatttaaacaatwttttttaaaaaaagtaaaggtgagataaactattcactccagaggagtaacaatgagaagaggaagaaaaacatatacagtagtttgctgattcaaactaata

SEQ ID NO: 86958 - DNA, 850 bp, Homo sapiens
aataaaataamatcaaagccttctaatacagagatgttccctcctccagccctccccaagtcagttctcatcccagaggcatccactttgatgtctgttaactgttttcactgttatttagctccacatttctaaataatatgtttacattgctatttctttttttttcctttttgagacagtctcactgtgtcgcccaggctggagtgctgtggcatgatctcagctcaatgcaacctttgcctcctgggttcaagtgattctcctgcctcagccttttgagtagctgggattactagcacctgccaccatgcccagctaatttttgtattttcagtatggatggggtttcatcatgttggccaggctggtctcgaactcctgacctcaggtcatcagtccgtctcggcctcccaaagtgctaggattacaggtgtgagccactgcatccagccctaaatattatcttttgactttctaatattgtaagccagaatgttgcttttttttttttttttttgagatggggtctcactctgtcaatcatgttggagtgcagtggtgcgatctgcgctcattgcaacctccacctcccagtctcaagcaatcttccctcctcagcctctcaagtagctgggaccacaggcgtccaccaccatgcctggctaatttttatatttttagtagagatagggtttcaccatgtttcccaggctggtctcgagctcctgagctctggtgatccacctgtcttggcctccccaaatgctgggattacaggtgtgagttactgtggctggctaaatattgcttctttaaaaaaaaaaagtttactatgtaatagaaaact

SEQ ID NO: 86959 - DNA, 744 bp, Homo sapiens
caggcatggtggctcacgcctgtaatccttgcaccttggggggctgagaagggcagatcacttgaggccaggagttcaagaccagcctggccaacatggtgaaaccccatctctactaaaagtacgataaattgctgggcatagtagtgggtgcctgtagtcccagctacttgggaggctgaggcaggagaatcatttgaacctggaagacaaaggttgcagtgagccaagatcgtgccactgcactccagcctgggcaacaagagtgagatggtgtctcaaaaaaaggaaaaaaaaaaatcataatgggtacartgtacactaattgggtgacaagtgtactaaaatcccagaattcactatatgtaggatggatatggattcactatatatagtggattctgggattttatatattgtataattcatccatgtcaaccaataacctcttgtacctgtgagaaacaaactcatctgtccaaacccaaagaatggactcagagaccaggagaacagcgaaaagtgagactttgaatggcagccttgcaagataaggtgtctggtggacaggcacacccagcacagtcacaacaagccatttatcccctcgtgtgcaggtccctcccccagttgctcattggctgagtactgcaggtttacaatcttcccagacttcgcctattggtagttggattaagatttcaagtatgttctttaggatctttctgctgcattttattgtag

SEQ ID NO: 86960 - DNA, 870 bp, Homo sapiens
atttacagtaaaacaactacatattataggcatgattttatatataccaatattgtgtaggttttgaaacctggttggtggagtatcaaaacaggtgggataattatgggaaaacagggctgttattttctggttttggcttaaaaacaaatagatcatgtaataggaaataaaattatctttcatttaaaaagtctgtggccgggcatggtggcttacacctgtaatcccagcactgggaggctgaggcaggtggatcacctgaggtcgggagttcgagaccagcctaatcaacatggagaaaccccgtctctactaaaaatacaaaaaattagccaggcgtggtggcacacgcctgtaatcccagctacttgggaggttgaggcaggagaatcgcttgaacccgggaggcggaggttgcrgtgagccgagatcgtgccattgcactccagcctagccaacaagagcgaaactccgtctcaaaaaaaaaaaaaaatagtctctgcactaatttttcctttaaaataattctgtatgctggtttgttaatatagtttattgaattaacaaaaaatgtgttaagaaactcattttgctcttgtatatattctgttttcagagcagcggaaagagctcagtgctagaaagcctggtggggagggacctgcttcccagaggtactggaattgtcacccggagacctctcattctgcaactggtccatgtttcacaagaagataaacggaaaacaacaggagaagaaaatggtaaatttcagatttgagataattattttacagctcttcatttttgatctattcttaaaaagatatgaattgattagataattagaaattagtgactgtagca

SEQ ID NO: 86961 - DNA, 574 bp, Homo sapiens
ccatcattgtaatgcctcttacttgggcatctctcctgactcgctccagaaggcactgtttcctgcaggttactttggtcccatgagcctgggttctatcacctggagtcccatctcctgtcccatacagtccacaatctttagcctggcattcaaggcctgccacactccattcccagtctgccttttcagcatgcactcagcccagccaagtgactgccgacctgcttttctgctccttcactactaactgttgagacgtgttccatcagaaacatgggctcccctggccgggcgtggtggctcatgcctgtaatcctagaattttgggaggttgaggtgggtggatcacctgaggtcaggggwttgagaccagcctggccaacatggtgaaacctcatctctactaaaaatacaaaaatttgccgagcgtggtggtgggtgcctggaatcccagctactcaggaggctggggcaggagaatcgcttgaacccgggaggtggaagttgcagtgagctgagattgtgccactgcactccagcctgggtaacagagcaaaactctgtctcaaaa

SEQ ID NO: 86962 - DNA, 574 bp, Homo sapiens
ccatcattgtaatgcctcttacttgggcatctctcctgactcgctccagaaggcactgtttcctgcaggttactttggtcccatgagcctgggttctatcacctggagtcccatctcctgtcccatacagtccacaatctttagcctggcattcaaggcctgccacactccattcccagtctgccttttcagcatgcactcagcccagccaagtgactgccgacctgcttttctgctccttcactactaactgttgagacgtgttccatcagaaacatgggctcccctggccgggcgtggtggctcatgcctgtaatcctagaattttgggaggttgaggtgggtggatcacctgaggtcaggggtttgagaccagcctggccaacatggtgaaacctcatctctactaaaaatacaaaaatttgccgagcgtggtggtgggtgcctggaatcccagctactcaggaggctggggcaggagaatcgcttgaacccgggaggtggaagttgcagtgarctgagattgtgccactgcactccagcctgggtaacagagcaaaactctgtctcaaaa

SEQ ID NO: 86963 - DNA, 603 bp, Homo sapiens
tcatgtcctcatttcttagggaggtaccttcagaaccaatagtgacccctaacttctctggtggtcggttccatgaaaggcaaaggagtgtgagagaggagtggatggtcaacctcccactgccatggtaacatgggtgctggctgatgggagcagaaaataatttagtgaaagtctgtgggggcagtcacaagatgtctgagaaaactggcgagccagctgctgaaaacagggacaaggaagcctccgtggctggagcccaaatcacactgcagacccagacaccgtgaccaccaccatggactccagagagagcagcttatagtactcaatcagctgccactaccaccatccagaacaccagatgttgtagccatggctgcagcaggaatggatgtcccactgtccctgctcctcggtgtgacttgctcccaagttcagggcaggtccatctgattggctgagtctggaatrtctgcctgtgcctcagctgtgagggaggcagggaaagtaagccttttcagcttctgtcgtgggaggtggctctgcctcctaccaagaatcaaagggtggaggatcttcaaacacaggaaaagaacccgg

SEQ ID NO: 86964 - DNA, 1509 bp, Homo sapiens
ctctattcagagctggcaggcagggacgtttaagtctgctgaagctgtgcccacagccaccctttcccccagctgctctgtcccagggaggtgggagttttatttataatcccctgactgggctgctgcctttgtttcagagatgccctgcccggggaggaggaatccagggaggcagtctggctacagtggctttgctgagctgctagctgcagtgggctctaccctgtttgaacttcccagcagctttgtttaccacctattcaagcctcagtaatggcagatgcccctccccrcaccaagctccagcgtcccaagtcaacttccaattatgatgctcataatcaaattatgatggaagcgtgaatctggcaccagctactttggtgtcaagtagccaagtcacgtactaatttatttttaatgtaaagctatacaaccttctttctatacttaaaattttaattaaaatattactaaaaatttcttaatgattttatttcatggtgaaagagactcagtctggaatgtaaagtatgtcttacaagtatttctcattttgcaggacattgtctaggtgtccctctcccatggatgatcattagtgtggtttatctttatgctttgagaaaataagtctgtagtatgttattatattctactatataaagatactcttcaacttatgataagattatgtttcaataaacccatcataagttgatactattctaagttgaagatgctgttttttttaaacaaaatgtagactcttgccatgttgcccaggctggagtgcagtggctattctcacgtgtgctcatagtgcactatagtctcaagctccttgagctcaaacaatcctcctgcctcagcttcctgagcagctgggactataggcacaaaccactatacctggcttgaagatatgtttaataaacctaacctacccaacttcatagcttagcctagcccaccttaaccgtgcttagaacactaacattagcctacagttgggcaaaataatcttacacaaagcctatattatagtaaactgttgaatatttcatgtaatttattgagtactgtactgaaaatgaaaaatataatggtagcatgagtacttgaaatatggttcctactcaatacgtatcactttcccaccatcatacagttgaaaatcttaagtgaaagcattgtaagttggtgactgtctgtatttgtttatttattttactactttccctttttcttgtaatagttgaaaggcatgataaggtaaaatattattgcctaaaaatactctgcctctctggaaaataaaaaagacagaagtttccaagaaatctttcaagagatataaaaatcgtatgaaaatgagataattaaagaataaatctgtaattatgcatgttgtaaaatacaaatgggaggctggaagagagactgtagatgagccgtgaaaatgaaagcagaaataaagtaggaatggaagcattcatataggaa

SEQ ID NO: 86965 - DNA, 1509 bp, Homo sapiens
ctctattcagagctggcaggcagggacgtttaagtctgctgaagctgtgcccacagccaccctttcccccagctgctctgtcccagggaggtgggagttttatttataatcccctgactgggctgctgcctttgtttcagagatgccctgcccggggaggaggaatccagggaggcagtctggctacagtggctttgctgagctgctagctgcagtgggctctaccctgtttgaacttcccagcagctttgtttaccacctattcaagcctcagtaatggcagatgcccctccccacaccaagctccagcgtcccaagtcaacttccaattatgatgctcataatcaaattatgatggaagcgtgaatctggcaccagctactttggtgtcaagtagccaagtcacgtactaatttatttttaatgtaaagctatacaaccttctttctatacttaaaattttaattaaaatattactaaaaatttcttaatgattttatttcatggtgaaagagactcagtctggaatgtaaagtatgtcttacaagtatttctcattttgcaggacattgtctaggtgtccctctcccatggatgatcattagtgtggtttatctttatgctttgagaaaataagtctgtagtatgttattatattctactatataaagatactcttcaacttatgataagattatgtttcaataaacccatcataagttgatactattctaagttgaagatgctgttttttttaaacaaaatgtagactcttgccatgttgcccaggctggagtgcagtggctattctcacgtgtgctcatagtgcactatagtctcaagctccttgagctcaaacaatcctcctgcctcagcttcctgagcagctgggactataggcacaaaccactatacctggcttgaagatatgtttaataaacctaacctacccaacttcatagcttagcctagcccaccttaaccgtgcttagaacactaacattagcctacagttgggcaaaataatcttacacaaagcctatattatagtaaactgttgaatatttcatgtaatttattgagtactgtactgaaaatgaaaaatataatggtagcatgagtacttgaaatatggttcctactcaatacgtatcactttcccaccatcatacagttgaaaatcttaagtgaaascattgtaagttggtgactgtctgtatttgtttatttattttactactttccctttttcttgtaatagttgaaaggcatgataaggtaaaatattattgcctaaaaatactctgcctctctggaaaataaaaaagacagaagtttccaagaaatctttcaagagatataaaaatcgtatgaaaatgagataattaaagaataaatctgtaattatgcatgttgtaaaatacaaatgggaggctggaagagagactgtagatgagccgtgaaaatgaaagcagaaataaagtaggaatggaagcattcatataggaa

SEQ ID NO: 86966 - DNA, 1016 bp, Homo sapiens
taagaggtattgatgagcactctctaggttctatttactagacatggagataaagtggtaagacaagcttttctattcagctttggccacaggagggagtggcagtgagggcccagcctctcttgtgtcttggtgcattttaatcatcctgcttttgatttgtggtggttccaaactgagtggaaaatcacctgtattgcaatggaagcttgttgaagaggggaaccaactctattgtttatcctgagtcagactccctaagaggggaacaaacactcacctgacatggagtgggatcttgggcaccttcttagagaccttgaaccggtctctgtccccataggtgtcagtgaagtacactccggctacacttgtcaccttgttcccagggaacctggagagcaccttgtcagggccgtgctggctggcccagtaccaggcctggcccccgattaacaagccccctccatgtttcacaaactggatcagcgttgcagtcaaggtgtcattgtaggcattgatacagtaaacccctaggggctctcctggttctggcttgacctgtgcctcaagcccagcatcctgtaggatgtttactagaggtgccagggatggacgcactcccacgggagccccaggacagggacagagccagctcactgcattgaggagaaatgaagccaagccagyatgcgacaggtagccctcatgggacacaaccacgaggcggcctcggccgtaggaggaggcagcaatgagcacctggcccttgtcattcaccatcacggggaaggcggcttctccaataagaaggagttcactggggatggggcctctggggacatcccagcatgtcactccatccatgagggcctcaaacgcagcagcagcaatggtcgccatggttctatcagctgctgcagggggaagcaaagactttcatgtatttaagagatactgataagcactgctggtcagaacagatgaaggaacaggtgaaaaaagcaaacaactaa

SEQ ID NO: 86967 - DNA, 768 bp, Homo sapiens
tgtccactgttgagattgtgaattgcatgcatagactcaactcacaggagacgttgactcccatacctccagctgggacatttgcaagattagaaattttatttctggatctttctgcaagtgcgattgtgacatctacctttgcctagcacctgactgcttttacttttttgcctgggcccagccaatagttgaaattgtgacatatacttgggctacataggtgatgtgatgctcctgcctgggccccgccttcaggagaaatttttacatatctctgggccaatcacctagtgatgtgactctccctttctttctaggcycaacttatagaaggcattgtgacagatctctgggttcatcacctaggagatgtgactctacactcccagctgggccaagccccactgaagattgtgacatattaatgagcccataaactatgtgacatgactctgctccctggcctaagccaagattaaaggggacattgagacataatgctttgcctagcacctacatgatgttgactctcttttcctgcctgggctcggcctacagaagaaattgttcatatcactgagccaagatcccagttgatgtaactctcctcctgggccctgctcacaagggaaatattggcatattccttgcctagcactaaggtgatgtgaacttctgcctggtccctgcccatatgtgagattgtgacatacacttaagcccaactcacaggcataatgatgactctcttacctggaccaagac

SEQ ID NO: 86968 - DNA, 504 bp, Homo sapiens
gtctgcctcggcctcccaaagtgctgggattacaggcatgagccactgcacccagccactgatactattttattaataatgtggacacttgcagtaaccaccatttttaaatattagtgaatttaggctgggtgcggtggctcacgcctgtgccactttacttcagcctgcgcgacagagcgagattctgtctcaaaaaaaagaatttaactctggcaacaatttgatgaagtaggcatagatccccattttacaggttaggaaactgacacccagaggttgagtcatttcattaacaccacacaagtttttggagcatttcaaatcttaacctagaaatctttctctaggatatttaagcatayctcatattctactttgtttctcactgccagagtcccgaaggtacagatctcattctcactccattttcttcttgtcgatacaaaactggcaaaaaaatagcctcatggggagggtggaaactagctggagctgggcctt

SEQ ID NO: 86969 - DNA, 624 bp, Homo sapiens
acgtgaatttgcttggctgtttaaaacacatcagccaggatgaaattgtcctcttttacctgggtttcagagcaggcactgaagcgcgggctacagatgtgtgggtctgctcacaacattgctggccacaaaaatgcgcaaatgcctttggcattgtatttccaggaaagaagaagttgattattccaatttgcttcttacttctgaaagcaacacaaacatactcattgtctttttttttttttttttttttttgagaaagagtctcactctggtgcccaggctggaatgctacagcgcgatctcagctcactgcaaactccgcctccagggttcaagcgattctcctgcctcaatctcccragtagctgggattacaggcatgtgccaccacatccaactaatttttttttgtattttcagtagagacgaagtttcaccacgttggccaggctggtctcgaactcctgacttcaagtgatcctaccaccttggcctcccaaagtgctgtcattataggcgtgagccaccgcacctggccctcattgtccttttgataggtaaatgagggaaagaaatgccagtgtggagaatgttatctgtgtaaaatcagagttctattac

SEQ ID NO: 86970 - DNA, 624 bp, Homo sapiens
acgtgaatttgcttggctgtttaaaacacatcagccaggatgaaattgtcctcttttacctgggtttcagagcaggcactgaagcgcgggctacagatgtgtgggtctgctcacaacattgctggccacaaaaatgcgcaaatgcctttggcattgtatttccaggaaagaagaagttgattattccaatttgcttcttacttctgaaagcaacacaaacatactcattgtctttttttttttttttttttttttgagaaagagtctcactctggtgcccaggctggaatgctacagcgcgatctcagctcactgcaaactccgcctccagggttcaagcgattctcctgcctcaatctcccgagtagctgggattacaggcatgtgccaccacatccaactaatttttttttgtattttcagtagagacgaagtttcaccaygttggccaggctggtctcgaactcctgacttcaagtgatcctaccaccttggcctcccaaagtgctgtcattataggcgtgagccaccgcacctggccctcattgtccttttgataggtaaatgagggaaagaaatgccagtgtggagaatgttatctgtgtaaaatcagagttctattac

SEQ ID NO: 86971 - DNA, 705 bp, Homo sapiens
aatgtgatgatattagcaggtagagctttttggggtgattaggtcatcacgatgagtttattagtcattagtcatgaataagtccagtgcccttataaaagggaccccagagagcttccccctcccttccaccatgtgtggacacagcaagaagtcaggagtccacaaccaggaagaagtcttcaccagaatttgaccacgctggctggcaccctgaacttggacttccagcctccaaaactgtgaaaactagatgtgtgttgtttataagcctcccagtctatggcactttgttatagcagccccaactgaccaagagagtgggaaaagaaagaaccctacatggacagctacaaagagatttgatgtcactgggtagaatcagacaattcccaatgtctccgcatattctttcctcttctactctgagtattggtgatgctaggtagaaggcaatagctggggtycaagatgaacatacattctcctaggaagtttttgacaataacaatcccttatatttgagtagcactgttataaaatgtcttcctacagtttcttatctgatccctgaaaggcactgtgaagaatggagcatcgtgggctaaattcaggtatggagatgagctcactgagactctgcatagttaaaccactggaacacaatcccccagccagccggtggatgggaagttgagagtcgga

SEQ ID NO: 86972 - DNA, 685 bp, Homo sapiens
tcctgacagtcatccacatctacttcaagggatatcatgttagaatacttttcagagagggaatgaaacaaaggctcgatcattttgcaaggcccacatcatgtgcctgagaagtcaactactccaggtttatcgcctgcagcctccaaggcttcctgaaaagcaaacttctgctcaatttgcttcaccattttggctgatggggtcttctaagaaacatttctaaaaattatctcgtccgtctcttgttccacactgttccagatcacttcttaaaactcatttttacttccctgtccatacctttctgaagtttcaactgctttcccccaacccccaccccraagttctttattatgtagacttttttttttttttcagttttggtataacttgcaatcaaggagagccagaaaagtgactcagccacaggaatttgtccattttgtgggtgggctggtgggggtggccttgggagaacttgatggaggcagaattatgactagtcattaataatcataacttttttttacatttttagtttttcttatcattacacaaaatatccatgtaacataataactagtttttgttacacaggacatgccttgtagttgtgctttttgccttggcgacatagactgtgtatacctaagaacagcagagtgactgcggtggaattgtt

SEQ ID NO: 86973 - DNA, 1321 bp, Homo sapiens
ccttcagaatccagcttgtatatcacttcctctgtaaagtctccatttgtgacctcagaatgtatcaactgcttcwatatacttttattctatagatatttttctatttatgatacatttgtcactataatgtatattttcttatttcctccaccaaactgtgagctgcctgaggagagattgtctgattctttttcagtgtctccatctccaagaagagatcctaatacaaagtaggtgttcatgatgtatttgttgaaaagaactatttgaaaatacgttatgtccatagttaacatataataatgcaatgtggattaaccagatatggagaattattcttataactgcttcctctctcttacgtaggtttgacagcaataattctcaaacttcagtgtgcaccagacttagcagtgaaactttctaaaattacggaaagaagcttcaggccctatcccacacctgcagagccagaatctctagggctggagcctgggtgcctgcttttttaataaaccatccaaatgaatccaataacttctgctctcaagaattgacagaaatcgctttccattccaggacaagaaccaaagacaaattcctatttgtctcctcttcatgatcttaggcagaagggtctgtcactactgaagacaacaaaggataattcactttagtcagtgctgacttgcttggagaagaaatgtaaaagcactcaaaggcagaaaataaaagcagttccagtcctggaagtcatttggacagttccagttgaagagccaaagcagaaaattaacattctagctcctagaaattttattttcgcctttcttctaggcataatttataagtcaaatagaattgctttggcctgggtgattttgcataatggttcctagcatggtattatggtctgcattcagcattatttttcttacatttctgtagagcaatgacagcactattccccaagcatcccaacaaagctctcagcccacacccagctgctgcccaggccagtgacctgtggaaagacaaagacaagaatgctatgcaataaatcagaaatggcctggaagataaacctggccaaagaactgagtgcctgcagccagactacagctgttttctctttgggcagcaaggaggaagcaagtgtgactcctcagactccctcaagccctgctgatcaagacaatggttcttcttcattactcatctatatgaaatagttcagacattgctgtttacttatttataataaacctaattactcatcttattgccataccttgtcttcccagtcttatttatgcat

SEQ ID NO: 86974 - DNA, 1321 bp, Homo sapiens
ccttcagaatccagcttgtatatcacttcctctgtaaagtctccatttgtgacctcagaatgtatcaactgcttctatatacttttattctatagatatttttctatttatgatacatttgtcactataatgtatattttctyatttcctccaccaaactgtgagctgcctgaggagagattgtctgattctttttcagtgtctccatctccaagaagagatcctaatacaaagtaggtgttcatgatgtatttgttgaaaagaactatttgaaaatacgttatgtccatagttaacatataataatgcaatgtggattaaccagatatggagaattattcttataactgcttcctctctcttacgtaggtttgacagcaataattctcaaacttcagtgtgcaccagacttagcagtgaaactttctaaaattacggaaagaagcttcaggccctatcccacacctgcagagccagaatctctagggctggagcctgggtgcctgcttttttaataaaccatccaaatgaatccaataacttctgctctcaagaattgacagaaatcgctttccattccaggacaagaaccaaagacaaattcctatttgtctcctcttcatgatcttaggcagaagggtctgtcactactgaagacaacaaaggataattcactttagtcagtgctgacttgcttggagaagaaatgtaaaagcactcaaaggcagaaaataaaagcagttccagtcctggaagtcatttggacagttccagttgaagagccaaagcagaaaattaacattctagctcctagaaattttattttcgcctttcttctaggcataatttataagtcaaatagaattgctttggcctgggtgattttgcataatggttcctagcatggtattatggtctgcattcagcattatttttcttacatttctgtagagcaatgacagcactattccccaagcatcccaacaaagctctcagcccacacccagctgctgcccaggccagtgacctgtggaaagacaaagacaagaatgctatgcaataaatcagaaatggcctggaagataaacctggccaaagaactgagtgcctgcagccagactacagctgttttctctttgggcagcaaggaggaagcaagtgtgactcctcagactccctcaagccctgctgatcaagacaatggttcttcttcattactcatctatatgaaatagttcagacattgctgtttacttatttataataaacctaattactcatcttattgccataccttgtcttcccagtcttatttatgcat

SEQ ID NO: 86975 - DNA, 1321 bp, Homo sapiens
ccttcagaatccagcttgtatatcacttcctctgtaaagtctccatttgtgacctcagaatgtatcaactgcttctatatacttttattctatagatatttttctatttatgatacatttgtcactataatgtatattttcttatttcctccaccaaactgtgagctgcctgaggagagattgtctgattctttttcrgtgtctccatctccaagaagagatcctaatacaaagtaggtgttcatgatgtatttgttgaaaagaactatttgaaaatacgttatgtccatagttaacatataataatgcaatgtggattaaccagatatggagaattattcttataactgcttcctctctcttacgtaggtttgacagcaataattctcaaacttcagtgtgcaccagacttagcagtgaaactttctaaaattacggaaagaagcttcaggccctatcccacacctgcagagccagaatctctagggctggagcctgggtgcctgcttttttaataaaccatccaaatgaatccaataacttctgctctcaagaattgacagaaatcgctttccattccaggacaagaaccaaagacaaattcctatttgtctcctcttcatgatcttaggcagaagggtctgtcactactgaagacaacaaaggataattcactttagtcagtgctgacttgcttggagaagaaatgtaaaagcactcaaaggcagaaaataaaagcagttccagtcctggaagtcatttggacagttccagttgaagagccaaagcagaaaattaacattctagctcctagaaattttattttcgcctttcttctaggcataatttataagtcaaatagaattgctttggcctgggtgattttgcataatggttcctagcatggtattatggtctgcattcagcattatttttcttacatttctgtagagcaatgacagcactattccccaagcatcccaacaaagctctcagcccacacccagctgctgcccaggccagtgacctgtggaaagacaaagacaagaatgctatgcaataaatcagaaatggcctggaagataaacctggccaaagaactgagtgcctgcagccagactacagctgttttctctttgggcagcaaggaggaagcaagtgtgactcctcagactccctcaagccctgctgatcaagacaatggttcttcttcattactcatctatatgaaatagttcagacattgctgtttacttatttataataaacctaattactcatcttattgccataccttgtcttcccagtcttatttatgcat

SEQ ID NO: 86976 - DNA, 1321 bp, Homo sapiens
ccttcagaatccagcttgtatatcacttcctctgtaaagtctccatttgtgacctcagaatgtatcaactgcttctatatacttttattctatagatatttttctatttatgatacatttgtcactataatgtatattttcttatttcctccaccaaactgtgagctgcctgaggagagattgtctgattctttttcagtgtctccatctccaagaagagatcctaatacaaagtaggtgttcatgatgtatttgttgaaaagaactatttgaaaatacgttatgtccatagttaacatataataatgcaatgtggattaaccagatatggagaattattcttataactgcttcctctctcttacgtaggtttgacagcaataattctcaaacttcagtgtgcaccagacttagcagtgaaactttytaaaattacggaaagaagcttcaggccctatcccacacctgcagagccagaatctctagggctggagcctgggtgcctgcttttttaataaaccatccaaatgaatccaataacttctgctctcaagaattgacagaaatcgctttccattccaggacaagaaccaaagacaaattcctatttgtctcctcttcatgatcttaggcagaagggtctgtcactactgaagacaacaaaggataattcactttagtcagtgctgacttgcttggagaagaaatgtaaaagcactcaaaggcagaaaataaaagcagttccagtcctggaagtcatttggacagttccagttgaagagccaaagcagaaaattaacattctagctcctagaaattttattttcgcctttcttctaggcataatttataagtcaaatagaattgctttggcctgggtgattttgcataatggttcctagcatggtattatggtctgcattcagcattatttttcttacatttctgtagagcaatgacagcactattccccaagcatcccaacaaagctctcagcccacacccagctgctgcccaggccagtgacctgtggaaagacaaagacaagaatgctatgcaataaatcagaaatggcctggaagataaacctggccaaagaactgagtgcctgcagccagactacagctgttttctctttgggcagcaaggaggaagcaagtgtgactcctcagactccctcaagccctgctgatcaagacaatggttcttcttcattactcatctatatgaaatagttcagacattgctgtttacttatttataataaacctaattactcatcttattgccataccttgtcttcccagtcttatttatgcat

SEQ ID NO: 86977 - DNA, 537 bp, Homo sapiens
atttgcataggaaagtctttaatgatttattatttagaataaatgtgcttgtcagtttcaaatcaataacttttatctctttaagaaagtgatgggagtgacatcagcaagaagactgactagagacacctgacacttgcctcccaaaygagaaccaagacaatggataaacagctaagatttgactgcactgttgaaaagagcattggagcactgggggaggtgaatggagacacatctgtagcgattggaaatctaggtgggcagcatggaggcacatagttctgcaaccccatcttcctggcctgaaccagatcattctagagacaggagagactccccatgcagcgagaaagtaagcagatgatccccatcatcccccattgtggccacaaacacctacagcccttacaatggaagaatcccacagtcctcacaatccctgaggccagttaagagagttgccaggaattcacacagctgtattgccgttgattaagagcacaaagtgtgcactcatccagatcccatccagca

SEQ ID NO: 86978 - DNA, 537 bp, Homo sapiens
atttgcataggaaagtctttaatgatttattatttagaataaatgtgcttgtcagtttcaaatcaataacttttatctctttaagaaagtgatgggagtgacatcagcaagaagactgactagagacacctgacacttgcctcccaaacgagaaccaagacaatggataaacagctaagatttgactgcactgttgaaaagagcattggagcactgggggaggtgaatggagacacatctgtagcgattggaaatctaggtgggcagcatggaggcacatagttctgcaaccccatcttcctggcctgawccagatcattctagagacaggagagactccccatgcagcgagaaagtaagcagatgatccccatcatcccccattgtggccacaaacacctacagcccttacaatggaagaatcccacagtcctcacaatccctgaggccagttaagagagttgccaggaattcacacagctgtattgccgttgattaagagcacaaagtgtgcactcatccagatcccatccagca

SEQ ID NO: 86979 - DNA, 605 bp, Homo sapiens
tgctatgctgtgtccactgtgtaattcagtccctggtcctcaattcaagcccttaggttccatccatggatgcatacttggttyatctgggcatgctcaggttatctgaccttcaacttggcagccacaggaactgaaaaacaacccagaactttgttacataaaagttgaacaggattggtctgatgaggctacacggactcctttttagacctcagacacatttgtgaatggggttaagatatctttcagagacattaccatcaagacatccatactttggccctgtggttcactgacaacacaatcaaatgcgtaccatgatctgttctgagcaccttagtctattaattaacttcatcctcacaatatctccattttacagatgagcaaactgatgcataggggttgagtgactccccacagaagagtcctgctcttcatcatgctgcctggatacagcaggggcttaagaatcagacaaatgtgaatgacagcctggtgttgctacaggtttgctgcaatcatgagcccatttgagtctgcaggtctgcagctgtggacaaggagggccagggaaacacttactctgttgggttgttgtg

SEQ ID NO: 86980 - DNA, 605 bp, Homo sapiens
tgctatgctgtgtccactgtgtaattcagtccctggtcctcaattcaagcccttaggttccatccatggatgcatacttggttcatctgggcatgctcaggttatctgaccttcaacttggcagccacaggractgaaaaacaacccagaactttgttacataaaagttgaacaggattggtctgatgaggctacacggactcctttttagacctcagacacatttgtgaatggggttaagatatctttcagagacattaccatcaagacatccatactttggccctgtggttcactgacaacacaatcaaatgcgtaccatgatctgttctgagcaccttagtctattaattaacttcatcctcacaatatctccattttacagatgagcaaactgatgcataggggttgagtgactccccacagaagagtcctgctcttcatcatgctgcctggatacagcaggggcttaagaatcagacaaatgtgaatgacagcctggtgttgctacaggtttgctgcaatcatgagcccatttgagtctgcaggtctgcagctgtggacaaggagggccagggaaacacttactctgttgggttgttgtg

SEQ ID NO: 86981 - DNA, 605 bp, Homo sapiens
tgctatgctgtgtccactgtgtaattcagtccctggtcctcaattcaagcccttaggttccatccatggatgcatacttggttcatctgggcatgctcaggttatctgaccttcaacttggcagccacaggaactgaaaaacaacccagaactttgttacataaaagttgaacaggattggtctgatgaggctacacggactcctttttagacctcagacacatttgtgaatggggttaagatatctttcagagacattaccatcaagacatccatactttggccctgtggttcactgacaacacaatcaaatgcgtaccatgatctgttctgagcaccttagtctattaattaayttcatcctcacaatatctccattttacagatgagcaaactgatgcataggggttgagtgactccccacagaagagtcctgctcttcatcatgctgcctggatacagcaggggcttaagaatcagacaaatgtgaatgacagcctggtgttgctacaggtttgctgcaatcatgagcccatttgagtctgcaggtctgcagctgtggacaaggagggccagggaaacacttactctgttgggttgttgtg

SEQ ID NO: 86982 - DNA, 1816 bp, Homo sapiens
tgcatatgtctaaatgtgtgcatgtattatggcaagtgctcaaaaattttggggagtaaagatggggtctcactatgtcgcccaggctggtctcaaactcctagcttcaagcgatcctcctaccgtggcctccccaaagcgctggagttacaggcatgagccactgtgcccagcctgctcaaaatgctctgataaagaggcatgcaatcaaaaaagttgggaactgctgccttatgataagacccttttttattatcttctttaccactaaacaaaatttttcttttgttttacttcttaatcctttctctcccctagaatgtaagctccatgcaaacctatgtcacttattcatgcaatgttatttgttattgtgtgactagcatttataataaactgagcacatagcatctgttcaataaatgtttattgatatattaaataaataaatgaatgaatgatcagagtcttccctgggacctagtggaaggacagttcgtgaatcccaacacctttacatgctcaggatagtggcaaataatgacatgatgggatgtctctaggacaagatcactcatagagaaaactggaaagtttctaggctttttgtcaccctttgagatcatttccctgctccacctacagtcagaaagccattgggcaaccaacatcccatagtcagaagaatagcccctgggaagtcatcaacacttagaataaactggtttaatatactgcaactcccaggagtgtttgcctcaaaaaacaccattaagatcaggggccaggggtctcagcttagctacaaactatttctgaggtcctatgactttctccaagttctcaacgctaacctgagagaagttgtgtattagtctgttcccacattgctaataaggacatacccaagactgggtaatttataaagaaaaggaggtttaatggactcacagttccacatggctggagaggcctcacagtcatagcagaaagcaagaggagcaaagtcacgtcttacgtagcggcaggcaagagagagcatgtgtaggggaactcccctttataaaccatcagatctcgtgagacttttcactatcatgagaaaaagcatgggaaagaacctcccccatgattcaattacctcccacggtgtcactcccatgacacgtggaaattatgggagctacaattcaagatgaaatttgggtgaggacacaaccaaatcatatcaaattggatcacagcaggttttcttcttcactttaatatttggaaataacttcaaatttatagaaaagttgtaagaacatgaagaacatgcatatatgtgcctgcactgagatttacctattgtgaagatgtttccacctgttttatgttatcactctgtctcttcatatgtgtgtgtatgtgcatgttacacacacacatttttctgaaccatttgagaataagttccatgcactacactaaatgtttctgtgtgtatttcctaagaataaggagattctcctggaactccagtgcagttatcaacttcrgtaaatttaacattgaaacaatactttgccatctagcaatgcatttttcaaatgctttcagcagcagtcctgcttcttcagttgaaatcttacttggaattccaacatacgtcacagatgaaaatagaaggcttgcttgaggaaggaggcaacggaagagctatttcctacttgatatggtttggctctgtgtccgcatccaaatctcaccttgaattgtagttcccataatccccacgtgtcaagggcaggaccagttggaggtaattggatcc

SEQ ID NO: 86983 - DNA, 643 bp, Homo sapiens
gtaacagcctttttaaattaccctgcaaatgagtttcctctccagcagagcaacggagacctaacgaacctgctaagtggtgccctggctggtgttaaattgattgaaaggctgaggtatgtgactatgtcaggaggggtggggcctggggctgtctggctatagaagtgtgcagagaaaatgccagcaccctgtctctccctgatccctgtcctaggtggaacagaccagggagctggcagctgctatggcgcttacagcctggggagagggagaaccttcccttggagaagagagggtgtggcagctctcttaggcctccagaggtccagtctgccctargttgtagcattttgaagaagtctgtcatagaattggttatttaagcctaggggcgtggcctcagggtggatggcaactaggtcagctctctgtcctcgccatggccaccctcacactgtccattcttaaggttttttttttttatttttttgggacgaagtttcactcttgtcacccaggctggagtgcagtggcgggatctcagctcactgcattctctacctcctgggttcaagcaattcttctgcctcagcctcctgagtacttgggagtataggcatgtgccaccaaacccggccaa

SEQ ID NO: 86984 - DNA, 643 bp, Homo sapiens
gtaacagcctttttaaattaccctgcaaatgagtttcctctccagcagagcaacggagacctaacgaacctgctaagtggtgccctggctggtgttaaattgattgaaaggctgaggtatgtgactatgtcaggaggggtggggcctggggctgtctggctatagaagtgtgcagagaaaatgccagcaccctgtctctccctgatccctgtcctaggtggaacagaccagggagctggcagctgctatggcgcttacagcctggggagagggagaaccttcccttggagaagagagggtgtggcagctctcttaggcctccagaggtccagtctgccctaggttgtagcattttgaagaagtcygtcatagaattggttatttaagcctaggggcgtggcctcagggtggatggcaactaggtcagctctctgtcctcgccatggccaccctcacactgtccattcttaaggttttttttttttatttttttgggacgaagtttcactcttgtcacccaggctggagtgcagtggcgggatctcagctcactgcattctctacctcctgggttcaagcaattcttctgcctcagcctcctgagtacttgggagtataggcatgtgccaccaaacccggccaa

SEQ ID NO: 86985 - DNA, 1240 bp, Homo sapiens
atgtttcttcctttgcacataggcagctctttctgtctcccagtcctcttcttcctggtctcatgtgtttttgctaaagaaaaattggagaagtctaaatgtcccaactactcactttatgttaattgcatagaaacatgacttctggaagtgatcatagctttcatcacaaaagaaaaaaaacggatgtatataattcacattagagacataatgtcccctttaaagcatagtctggatggtctaaaatattatttttattgtactttgtttggaacattgtgtatctgttactaaatgccaggagtttggtctaggtcccgttgctcactgcacagaaagccagtcactaagacaacaagtattgccagggaagaaggctttaactgggtactgcagccaaggagatgggaaatcagtctcaaatccatctccctgataactaaaattatgggattatatagcaaggaagaaatgtaatcatgtgtgggaaaataggaattagggaggggaaagaaataggagttggtccacaggaagcaggtggttgcttaggcaatcatgatggatgaggggtctggtgtctttttgcctagaagcaatgatctggtaagtttccattccttgatactatctggtaggcctaatggttggtttcctgagtaaggaactcaactaagacaaatgcaacttcctcaagtttcaagactaggaaggttgatttctatgtttattcaaaagaagccataagcattagttctgtaaaacaattgggctggtttcatggcactgaagtagcaaaattccaagtactgtgttgtttcattccatgggataaaacataagatgtttatcttccaaagctgtgtatcrgatgaaagaaagtaggacataatacatggaacaaaagacataagagaaggaagacaacaagaatcatataaacatagatctgaaactcgggacaacataaggtaagccaagtgttaaggttgagtagggaagaattttagcataaaagggcaagcctaggctgtggatttagaccctgagatgaatcatgcaattaccattgaccagttctgtgacttggggccagttctttgccctccactagcttgacacactttccagctgtgtatccttgagcaattaactcagtttctttgtcctcagttttcttctttataaaataagaatcaaaataatacttacattgtggggttgtattgagtattag

SEQ ID NO: 86986 - DNA, 1240 bp, Homo sapiens
atgtttcttcctttgcacataggcagctctttctgtctcccagtcctcttcttcctggtctcatgtgtttttgctaaagaaaaattggagaagtctaaatgtcccaactactcactttatgttaattgcatagaaacatgacttctggaagtgatcatagctttcatcacaaaagaaaaaaaacggatgtatataattcacattagagacataatgtcccctttaaagcatagtctggatggtctaaaatattatttttattgtactttgtttggaacattgtgtatctgttactaaatgccaggagtttggtctaggtcccgttgctcactgcacagaaagccagtcactaagacaacaagtattgccagggaagaaggctttaactgggtactgcagccaaggagatgggaaatcagtctcaaatccatctccctgataactaaaattatgggattatatagcaaggaagaaatgtaatcatgtgtgggaaaataggaattagggaggggaaagaaataggagttggtccacaggaagcaggtggttgcttaggcaatcatgatggatgaggggtctggtgtctttttgcctagaagcaatgatctggtaagtttccattccttgatactatctggtaggcctaatggttggtttcctgagtaaggaactcaactaagacaaatgcaacttcctcaagtttcaagactaggaaggttgatttctatgtttattcaaaagaagccataagcattagttctgtaaaacaattgggctggtttcatggcactgaagtagcaaaattccaagtactgtgttgtttcattccatgggataaaacataagatgtttatcttccaaagctgtgtatcggatgaaagaaagtaggacataatacatggaacaaaagacataagagaaggaagacaacaagaatcatataaacatagatctgaaactcgggacaacataaggtaagccaagtgttaaggttgagtagggaagaattttagcataaaakggcaagcctaggctgtggatttagaccctgagatgaatcatgcaattaccattgaccagttctgtgacttggggccagttctttgccctccactagcttgacacactttccagctgtgtatccttgagcaattaactcagtttctttgtcctcagttttcttctttataaaataagaatcaaaataatacttacattgtggggttgtattgagtattag

SEQ ID NO: 86987 - DNA, 1935 bp, Homo sapiens
ccattatttatttattttataaatataatataatatttattttataaatataatataatatttattttataaatatatacattattcatttatcttataaatatataagtatataaacaagttataaatacataaactataaacatataaactggatcaatttataaatatgtaaatatatgcattatttatttacaaatatataactgtataaattataattttataaacaatttgtttattatatataaatatttatttattgtatagctatagaaatatgtgtgtgtgtgtgtatatacacaaacgcataaattctattagttctgtttctttagagaactctgactaatgcacttcctatgcagtgttcttttctctatgatgagttcagctccttagatattgttccaagaccaaattacctttaaggaccaagggcagaaggattttggaggctcacctctgctttgagtggccattgtgtggatcctgcctttaagagggtctttgcaggccaagcracaaaacctggcagatgggaatggtatttcaggacctccaaggattctcagggagaagctatggaatctacatcacagaggactttagtctgtttctacttgacagcagaaaagataaattgaagcaatctgctaagccgatttgccgatcgttggttacacagagggccaatgtggtgtttgccctggaatctgtaggaagagctagtcgtttggatgttagacactctggtttccctggaaggccttgtggatgggtttaactctggatccagatgctgtgtcaccaaccttcccatggacattgtgttgttacttttctgatcttagtctcagtatctttggttctaaaaccaggctcatgagaccaggtcaacggtatcatctctcacccttacagagacccagcaccatggctggcaaaactctcagctcaataaatgggggtcatctgttattatcatgattgttattatgtgggtgaaagggggaagagtcaaagctaccaagtttttagccccagactcaaaaggccaacctggagaagtacagaaggaaatcattctgttatttattcaagaaatatttatcaaaaatctattatgtgctaataacggtgctgaagctacaattagaagtcacacaaacctggctatttcctctcagagcctacggtatgggagaaagagacatgattattcaaacaataagcaaattgtatgcatctgtaggaaatcataagaccaggctgggcatggtggctcatatctgtaattccagctacttgtgggggccaaggcacgaaggttgcttgagcctgggagtttaaggctgcagtgagctacgatcatactactgcactccagcctgggcaacagagcaagactctgtttcttaaaaaaaaagataggacaaaaatagcataggcccatgggagcacaaagaagagaaccttccctgatccaaattatatcttaagttaataagacgttgtctcaacagagaatgaggcccagtgggaccacatacagatttgctttcattcacttatgacttggagacttttccatgtcagattgtttaggatagaaccacgtccttcatttctccttttgcatcaaccccagtgcttagacataatatgttggtcctcagtttgtatttgttaaatgaaatgaatggattacatgtcttacattgaggtgagatttctataacatagaactcatcattttaaagtgcacaattccatggcatttagtaatttcacaatattgtgcaatcatcacctctatctcatccgaagacactttccacaccctgaaaggaaaccccatcctatgagcagtcatgccctagcccctggcaaccactaatctactttgttatctctgtggattcacctatcctg

SEQ ID NO: 86988 - DNA, 658 bp, Homo sapiens
aatgccaggtccccaggccctggagccagcacctccatccctcagggccgcctgattccaccggggacattcctaggaggtgaaacagagtttctcaaccttggcactgttgacactttggactagataattcttctgtacaggggctgtgctgggcacggtaagatgcatccctggcctctacccattagatggcagtagcacctcccagttatgacaacaaaaaataaaaattgccaaataacccctggtggcaaaatgccccatggatgttcacaatgtaaaggatttgaccccattccagtctcagatcttgcttgcaaataactgaaactgatcctggttcacttaaggggagaaaaaagggatgcattggaaatggtattggatgactcataagatccacggggatgccgtagaataagattcagaaaaaaagaggagggaacagagggggccagatcaccaaaatcacaccacaggaaaacttcattcatccttccaacaaatatttwatctaacaacgatggatggagtgcctaccatgtgccaggcccttgggatacgtcagcaaacaaaacagacaaagcgcccacccccatgaagcttgcattccagtggggaaaaccataagcaataaacattttagaaagtaagt

SEQ ID NO: 86989 - DNA, 534 bp, Homo sapiens
tgcagtggcacacacctgtagtyccagctacaggtgaggctgaagtgggaggttgaggccacagtaagctgacattgtgctattgcactccagcctgggcaatggagactctgtctcaaaaaaaaaggtcaggcaaggacacacatgtgtgatggcatttttccaaacctcacccatgaaacaggtgccctgcccctgcctccaagggagaaacaaagaaggggtggaggaaaagacagaatccatcacccagggttctcagggtgcaagttcccagtgcagggagatgaaagggatggttccattgcagaaatatatgaagaattagtttcgctaaaactcttcagaagtcagtggaaagttggtgctagagggatcttaagaccccagggaagctgattgacttgttcatggtcataaaagaaagctcctctgaaatcccagacctcctggtgccccggcgtgtgctctgtactgaaaccgcacaggcttattcatgtatttttcagctaacaactactaagcacttaccat

SEQ ID NO: 86990 - DNA, 534 bp, Homo sapiens
tgcagtggcacacacctgtagtcccagctacwggtgaggctgaagtgggaggttgaggccacagtaagctgacattgtgctattgcactccagcctgggcaatggagactctgtctcaaaaaaaaaggtcaggcaaggacacacatgtgtgatggcatttttccaaacctcacccatgaaacaggtgccctgcccctgcctccaagggagaaacaaagaaggggtggaggaaaagacagaatccatcacccagggttctcagggtgcaagttcccagtgcagggagatgaaagggatggttccattgcagaaatatatgaagaattagtttcgctaaaactcttcagaagtcagtggaaagttggtgctagagggatcttaagaccccagggaagctgattgacttgttcatggtcataaaagaaagctcctctgaaatcccagacctcctggtgccccggcgtgtgctctgtactgaaaccgcacaggcttattcatgtatttttcagctaacaactactaagcacttaccat

SEQ ID NO: 86991 - DNA, 585 bp, Homo sapiens
tgccagggttgttatggatgatagaatttccctagacttcctctttgtgtgccaagacagaatctctgcaatcactaatacatttgcccatagctagattaatgtcttaggccaaatggaaagattaatacagaaacttaaggagagagtaaattacttttgtaaggtctatgccgamggtctctgggatttgttcagttggttgggtctgggaccctgggggacatggttaatgtcaatcctgcaggttggcctcttcctgatgcttggagtcctattgatagtatccttaattaaatgctatctgggacaaattgactgggtttggtcccaggctcagttgttcatattaatcagagtggtggaaggaaaggcatattcattggaaaattcaccagaaaccaagacagtatagaaacaaggggtagattttgttggagacaattctccatgggtctctcatgtttctgcatgtctgtcagcaggggcattggccacctattcaaggatgtgaagatagcgaagggcctttgaagagacagtgtctccatccagggcaaggggcaggttttctgcactctaata

SEQ ID NO: 86992 - DNA, 591 bp, Homo sapiens
tttttygctttttgaaaacctatttttttctttttaaaaaaatcccatggcagcatattaatttttttttctacctggcagcagatcagattcttttgccatggctgaaattcaggatttaaccgggatatgcctatgtattagtctctttttattaatgttgtctggaacttagagggccctttcaatatgatgtctttgaatattctgttgctctcacctgctgtctttcaaaactgtcaaatatttctatattgctatctattgtctgtgttcccttgtcattattttctttctggttacttttaagtgtcttttctgctacctttgagaaatgttcctcaagctttcccttcacattatgaatttagttttctataatctgctcattattccatctcatttcatctttatagcaaggcttttattttgcattctttccctagctttgccagctcttttcacatctctgttccttgtcatcttatcacctcagcttcccagcttgtgtcatagacttatgtgatggttaaatggcatgtagtacctgggcttcaatatcaaagatctggtatggagtggaagacactg

SEQ ID NO: 86993 - DNA, 754 bp, Homo sapiens
catctacctatcatctgtctatttttctgtctatcatctatctaccatctatgtatctacctatcatctagccatctgtcatctatcatctatcacctatcatctatctgtctcacctatcatttatctatgtatttgtgtatcatcatcacccagctatgaactatctatcatgtatgatgtatctatcatctatgtatctacctatctgttattttggtcaaatatacataatataaaactcaccattttaaccatttttaagtgcacggttcagtggcattaagtggattcacactgttatgcaaccatcaccaccacctatctccagaacttttttaatatcctcagtgagattctgtccccattaaacactaactcctcatgttcccttcccccagtgcccagtgcccaccattgtctctatgcattggatgactctagagacttcacatgaatggactcatagagtattagtctttttgagcctggcttattttacttagcataatgtcctcaaggttgatctacgttgcagcacgtgtcagaatttccttcttygttagggctgaacaatgtctcattgtatggatggaccacacttcgtttatccattcctctgctgatagacacttgggttgcttccacctcttggctacagtgaaaaacagtgttacggacataggtttacaagtatctctttgagaccctgctttcaattcttttgagtatatacccagaagtggaattgctg

SEQ ID NO: 86994 - DNA, 853 bp, Homo sapiens
tgcatataactttacttacaatgaaatcttttgtatataaattaaatgaaaaatttgagggaagtggagagattaactttaacttttaaaatttgtattttagatggaccaatcttacaaaccagatgaaaatgaagttcgaactctctttggtcttcatttaagccagaagagaaataatggtgtcgtcgacaagtcattatttagcaatgttgttaccaaaaataaagatgtaagttgggaagtatctgaactgactgctagtaacttccattggtctgttttcaatacttaatgagctttacatttattaaggtctggatttggaactggtctgtatgcacacggctagctagcttatctttgagttgtcacataagctttggagtttaagaaatgaatcaaaggccatgttagaagcttctgtgcatatgtacacactagagataagtagctttaattgtgtataaatgggatcatgtcttccataatctgrctcctgtaacttggcttttttccatgtgctaggctacaaatgtgtttttatatcaatacatatagatgctgggtgcagtagctgacatttgtaatcccaacactttggtaggccaaggggcagctctcttgaggtcaggagtttaagaccagcctgaccatgtagtgaaaccttgtctctagaaaaagtacaaaaattagcctggcgtggtagctgcgcctgtaggtccagctactcgagaggctgaggtgagaggattgcatgagtctgggagatcaaggctgcagtgagccgtgtttgtgccactgcactcctctctgggtgacagaacaagatcctatctcgaaaataaatgca

SEQ ID NO: 86995 - DNA, 559 bp, Homo sapiens
tgcctggcctgttgttactttatagatgtggaaaataagacatcatggttaagtaacttgcccaaggtcacacaggtagagctatcaatagcagactggaaccaatagaggccctcacagaatgattcttgggagatttcagttttcatctgaactttctcagggggatgtaataatgtaaatggactcttggcccctccatcctggaagcttggccaagtggcctaaaccaggggtccccatttagtttctccagcccccttttttcttgctgagttgttttaaaagttraaaagtgcttagtgaccttggacaacattagcaccttctaagtcctggaatccaccaagaaggaggaagggagatggtgctgaattcccctaaggcagggctcaggaagcaagagaaccctgtggtctaacctttcccatctgctctcttgttcccaggctacgtgcaggcctgccgcgccctgatgattgctgcctcggtcctgggtctgccggccattttactgctgctgactgttcttccctgcatccggatgggccaggagccc

SEQ ID NO: 86996 - DNA, 2000 bp, Homo sapiens
ccaactatcatggtaggcactgaagattatagaaatgcttcatttatcaacaagggtaggtacctaaaagataattttaaaaataaaattatgagaaaaaaaaactttctttctccatgtatttctactttcagactcatgcccaatatctaatattgtgtgttgaggatataattaaattgtatttcagagtaatctccttggtctttttttttttttttttgagatggggtctcactctgtcgcccaggctggagtgcagtggtgcaatctcggctcactgcaagctccacctcccgggttcacgccattctcctgcctcggcctcccgagtagctgagactacaggcacctgtgaacacgcccggctaattttttgtgttttcagtagagacagggtttcaccatgttagccagaatggtctcgatttcctgacctcgtgatccgcctgcctcggcctcccaaagtgctgggattacaggtgtgagccaccgcgcccggctatatgttggcaactgctggaggtgtggacaggggctttttttttttttttgagacagagtttcactctgtcgcccaggctggagtgcagtggcacaatctcggttcactgcaagctccgcctcccgggttcacgccattctcctgcctccttggtcttaaacttgatcttttgctagctgataaagaccagtgaaggacagtggattcagactttgagcagctctcacaagtaccacattgtcctttatatctgctgaaggcagagggccaaaacccaaaaagtcaaatgttttctcaagataagtgtatcttcgggtgcctgagatacagttaatctttccaccatctttcagattcctggggcaaatatcccaggaaatctgaaaaattttccaggggttcatgactctggagtcacaygggtgctgttctgaatccttgaccttaggcgagttatttaaactttccgtatgtcagtttcttcaactgtaaaaggagaattaatagtacttacctcacagggttgttaagaggattaacttagttaatatatgtaaactgcttagaatagtgcctgctactgtttagtgtttgccactaataaaatattattcagcttggtacccccaaatactgccaaggtcccactgtctcgatttcaaagtctgggactctccatgtagtttttaacaggatcaagaatccttatattaataagatcacgtcaaaatgcattagtgtactgtaatgcaattggtaccacattttaccacccatctagcaatagctaaaataataccaccaatttatttattaccataatcttctcctcttaaaatttcaggagcaatgtaattaggagtaccacagaaagtgctggttgtatctcctggccgtaatccttccttttattaaaaagaacagaaagaaagaatgagataaaaagttctgttttaaattcaccctttctatttcacctatcatataagttcagcatctgcagtgatacattaagctcacttaacatcactagaacaattgcctttattattattattatttttgacagggtcttgctctgtcgcccaggctggcatgcagtggcacgatctcagctcactacaacctccacctcctgggttcaagcaattcttgtgtctcagcctcctgagtagctggaattacaggcatgcaccaacacacccagctaatttttgtatttttagtagagacagggtttcaccatgttggccaggctggtctcgatctcctggcctcaagtgatccacctgcctcggcctcccaaagtgctgggattacaggcatgagccatcatgcctggcaactgcctttattattaaaatcacagatcaccactaaatagcttgaagaaaacctgtcctcattagatgttgctagagttgattcaattaaggtacgacttgaatttaaaataatttacatacaagttaaaatttaataacaaaattttaat

SEQ ID NO: 86997 - DNA, 2000 bp, Homo sapiens
ccaactatcatggtaggcactgaagattatagaaatgcttcatttatcaacaagggtaggtacctaaaagataattttaaaaataaaattatgagaaaaaaaaactttctttctccatgtatttctactttcagactcatgcccaatatctaatattgtgtgttgaggatataattaaattgtatttcagagtaatctccttggtctttttttttttttttttgagatggggtctcactctgtcgcccaggctggagtgcagtggtgcaatctcggctcactgcaagctccacctcccgggttcacgccattctcctgcctcggcctcccgagtagctgagactacaggcacctgtgaacacgcccggctaattttttgtgttttcagtagagacagggtttcaccatgttagccagaatggtctcgatttcctgacctcgtgatccgcctgcctcggcctcccaaagtgctgggattacaggtgtgagccaccgcgcccggctatatgttggcaactgctggaggtgtggacaggggctttttttttttttttgagacagagtttcactctgtcgcccaggctggagtgcagtggcacaatctcggttcactgcaagctccgcctcccgggttcacgccattctcctgcctccttggtcttaaacttgatcttttgctagctgataaagaccagtgaaggacagtggattcagactttgagcagctctcacaagtaccacattgtcctttatatctgctgaaggcagagggccaaaacccaaaaagtcaaatgttttctcaagataagtgtatcttcgggtgcctgagatacagttaatctttccaccatctttcagattcctggggcaaatatcccaggaaatctgaaaaattttccaggggttcatgactctggagtcacatgggtgctgttctgaatccttgaccttaggcgagttatttaaactttccgtatgtcagtttcttcaactgtaaaaggagaattaatagtacttacctcacagggttgttaagaggattaacttagttaatatatgtaaactgcttagaatagtgcctgctactgtttagtgtttgycactaataaaatattattcagcttggtacccccaaatactgccaaggtcccactgtctcgatttcaaagtctgggactctccatgtagtttttaacaggatcaagaatccttatattaataagatcacgtcaaaatgcattagtgtactgtaatgcaattggtaccacattttaccacccatctagcaatagctaaaataataccaccaatttatttattaccataatcttctcctcttaaaatttcaggagcaatgtaattaggagtaccacagaaagtgctggttgtatctcctggccgtaatccttccttttattaaaaagaacagaaagaaagaatgagataaaaagttctgttttaaattcaccctttctatttcacctatcatataagttcagcatctgcagtgatacattaagctcacttaacatcactagaacaattgcctttattattattattatttttgacagggtcttgctctgtcgcccaggctggcatgcagtggcacgatctcagctcactacaacctccacctcctgggttcaagcaattcttgtgtctcagcctcctgagtagctggaattacaggcatgcaccaacacacccagctaatttttgtatttttagtagagacagggtttcaccatgttggccaggctggtctcgatctcctggcctcaagtgatccacctgcctcggcctcccaaagtgctgggattacaggcatgagccatcatgcctggcaactgcctttattattaaaatcacagatcaccactaaatagcttgaagaaaacctgtcctcattagatgttgctagagttgattcaattaaggtacgacttgaatttaaaataatttacatacaagttaaaatttaataacaaaattttaat

SEQ ID NO: 86998 - DNA, 593 bp, Homo sapiens
aaccaaagcactctgaagcaatgtgtgacactcatgtgaccagcataactcccggatcaacacaaatgccttgttagagaaagccccagagtggctccctcctagtctttgtttcagatccatgtaagaaagctttccctaataacacccacactggtcttgtcccaattatttgttacaccacactcattttakcatggcaatttgtgaacacctgactcatacgtgccagttttgcataacaggcacaacacctgaaggacaggggagctactgctttttactggttttgtgtctcttgcagctccaagcccagccaaagctgagcaaagaggtgctgcatggttatcaatccgaatgaccacgatctgacctgaatggtcaggaagtgcaaggattctgcattctatggcaagctcaggctcggaagacatattgagggtcaggtgctcgaaagtaccagcctgaaggatctccctgactcacctgccatctcagaaccagggtttttctgttgctgcttctctcaggggagtcacattatatacaaataaaacataaccagcaaaggctaataaacatcatctgcaaat

SEQ ID NO: 86999 - DNA, 593 bp, Homo sapiens
aaccaaagcactctgaagcaatgtgtgacactcatgtgaccagcataactcccggatcaacacaaatgccttgttagagaaagccccagagtggctccctcctagtctttgtttcagatccatgtaagaaagctttccctaataacacccacactggtcttgtcccaattatttgttacaccacactcattttagcatggcaatttgtgaacacctgactcatacgtgccagttttgcataacaggcacaacacctgaaggacaggggagctacygctttttactggttttgtgtctcttgcagctccaagcccagccaaagctgagcaaagaggtgctgcatggttatcaatccgaatgaccacgatctgacctgaatggtcaggaagtgcaaggattctgcattctatggcaagctcaggctcggaagacatattgagggtcaggtgctcgaaagtaccagcctgaaggatctccctgactcacctgccatctcagaaccagggtttttctgttgctgcttctctcaggggagtcacattatatacaaataaaacataaccagcaaaggctaataaacatcatctgcaaat

SEQ ID NO: 87000 - DNA, 593 bp, Homo sapiens
aaccaaagcactctgaagcaatgtgtgacactcatgtgaccagcataactcccggatcaacacaaatgccttgttagagaaagccccagagtggctccctcctagtctttgtttcagatccatgtaagaaagctttccctaataacacccacactggtcttgtcccaattatttgttacaccacactcattttagcatggcaatttgtgaacacctgactcatacgtgccagttttgcataacaggcacaacacctgaaggacaggggagctactgctttytactggttttgtgtctcttgcagctccaagcccagccaaagctgagcaaagaggtgctgcatggttatcaatccgaatgaccacgatctgacctgaatggtcaggaagtgcaaggattctgcattctatggcaagctcaggctcggaagacatattgagggtcaggtgctcgaaagtaccagcctgaaggatctccctgactcacctgccatctcagaaccagggtttttctgttgctgcttctctcaggggagtcacattatatacaaataaaacataaccagcaaaggctaataaacatcatctgcaaat

SEQ ID NO: 87001 - DNA, 593 bp, Homo sapiens
aaccaaagcactctgaagcaatgtgtgacactcatgtgaccagcataactcccggatcaacacaaatgccttgttagagaaagccccagagtggctccctcctagtctttgtttcagatccatgtaagaaagctttccctaataacacccacactggtcttgtcccaattatttgttacaccacactcattttagcatggcaatttgtgaacacctgactcatacgtgccagttttgcataacaggcacaacacctgaaggacaggggagctactgctttttactggttttgtgtctcttgcagctccaagcccagccaaagctgagcaaagaggtgctgcatggttatcaatccgaatgaccaygatctgacctgaatggtcaggaagtgcaaggattctgcattctatggcaagctcaggctcggaagacatattgagggtcaggtgctcgaaagtaccagcctgaaggatctccctgactcacctgccatctcagaaccagggtttttctgttgctgcttctctcaggggagtcacattatatacaaataaaacataaccagcaaaggctaataaacatcatctgcaaat

SEQ ID NO: 87002 - DNA, 748 bp, Homo sapiens
tcaaagccacaggggcctggttgtggccctgctcccctctcctcggaaatttctacaaattcagcaaagggcagtcctgagataagaggctgcttacacattagaaaatagagcgtgcacacttattatttagtttctttaagcctcacatgaggtttgtgttagctgatcattcaccagcttcttatacatttctaaagaggcaaagagcaaaaaggaatagagaggccacctgagttagaggaagaaaggtagcagctgyacactgatggagtgaagatgctagctagctatgcagtgaacacatagatggtgctttttttttttttttttgagacagattctcgctctgttgcccaggcctcagactcccgagtagctgggattacaggccagggtgatgctagggcccgaggttacatcttcatcttatttctaaagctctgttattttctttctttcttttttttaagacagagtctcgctctgtcgcccaggctggagtgcagaggcacagtcttggctcattgcaacctctgcctcctgggttcaagctattcttgtgcctcagcctactgagtcactgggattacaggcacacaccaccatgcccggctgacttttgtatttttagtagagacggggtttcaccacgttggccaggctggtcttgaactcctggtctcaagtgatctacctgccttggcctttaaaagtgctaggattacaggcgtgagccaccgcactc

SEQ ID NO: 87003 - DNA, 748 bp, Homo sapiens
tcaaagccacaggggcctggttgtggccctgctcccctctcctcggaaatttctacaaattcagcaaagggcagtcctgagataagaggctgcttacacattagaaaatagagcgtgcacacttattatttagtttctttaagcctcacatgaggtttgtgttagctgatcattcaccagcttcttatacatttctaaagaggcaaagagcaaaaaggaatagagaggccacctgagttagaggaagaaaggtagcagctgtacactgatggagtgaagatgctagctagctatgcagtgaacacatagatggtgctttttttttttttttttgagacagattctcrctctgttgcccaggcctcagactcccgagtagctgggattacaggccagggtgatgctagggcccgaggttacatcttcatcttatttctaaagctctgttattttctttctttcttttttttaagacagagtctcgctctgtcgcccaggctggagtgcagaggcacagtcttggctcattgcaacctctgcctcctgggttcaagctattcttgtgcctcagcctactgagtcactgggattacaggcacacaccaccatgcccggctgacttttgtatttttagtagagacggggtttcaccacgttggccaggctggtcttgaactcctggtctcaagtgatctacctgccttggcctttaaaagtgctaggattacaggcgtgagccaccgcactc

SEQ ID NO: 87004 - DNA, 748 bp, Homo sapiens
tcaaagccacaggggcctggttgtggccctgctcccctctcctcggaaatttctacaaattcagcaaagggcagtcctgagataagaggctgcttacacattagaaaatagagcgtgcacacttattatttagtttctttaagcctcacatgaggtttgtgttagctgatcattcaccagcttcttatacatttctaaagaggcaaagagcaaaaaggaatagagaggccacctgagttagaggaagaaaggtagcagctgtacactgatggagtgaagatgctagctagctatgcagtgaacacatagatggtgctttttttttttttttttgagacagattctcgctctgttgcccaggcctcagactcccgagtagctgggattacaggccagggtgatgctagggcccgaggttayatcttcatcttatttctaaagctctgttattttctttctttcttttttttaagacagagtctcgctctgtcgcccaggctggagtgcagaggcacagtcttggctcattgcaacctctgcctcctgggttcaagctattcttgtgcctcagcctactgagtcactgggattacaggcacacaccaccatgcccggctgacttttgtatttttagtagagacggggtttcaccacgttggccaggctggtcttgaactcctggtctcaagtgatctacctgccttggcctttaaaagtgctaggattacaggcgtgagccaccgcactc

SEQ ID NO: 87005 - DNA, 994 bp, Homo sapiens
ctaaatctgggaatgaagctctgaggcaaacttcagaactctgtgggtcttggggcctgtgtagattcactgacccataagagttagggtagctctatcttgcataagtggtcatgggaggaagacctgctagtctccttagaccccaaggatttacacagtagagaaacagttggctttaacccatctttactctgagacatgcagaccactgatttgcagctgaagaaagagaaaagaggcttcttcctggtttcagagaatgacgatttatgagctgtcagtttgccagcttccagaggcagagagtaggaagtcaaacaaggagaaaaaggaaaggaagcagattaagaagttttgttatttttgtctccttagcttgcagataagaggaatactaaatatacccaatatctacaaggtaaagcattgcagcagcttgacctcagggtgactggaaccatgtgtatacaaagaaaaaaaagcccacagaagagttggcttttgttaaaatggaaaatatggaggagaaatgaggaactttaacagaaaataattggacacataaaggcataagatggcataaaagactaccttagataagactaccttagattctgaaatacttatgtgtgacaggatataaggtctgrgatgttttggaagataatccaattggcttagaaggtagtaggttgacacaaaaatgacatcaaattggccatttgctggtagttgctgaagacaggtaatgaatggtacatggaaaagggtgtgttattaggattcttttaatttatgtacaactttggaattttccatgacaatacatttataaattatcttgaaagatgaggatagaataattactattcaggatcagtataatggcctgtaagatctaacggaagaaacagccaagatttcagagcaaaaatacaaagtcactgaaattataaagaaaaagattagagacttaagcaagtgttagata

SEQ ID NO: 87006 - DNA, 733 bp, Homo sapiens
agaccaagttagacttagaaaatggcagcttcaaataattataaggtgttaaacaatttttaaaaatatatctttaatggtccawatcctgagtggcttaatttgtatttcttaagcattatgagcccaagtacttactgaatccataaccgttgatttgtgcaatggcgggaccttatcacatgggctgctaatcatcccccagttctggcattttaaaatatttcattgagttctggcttgcagtttctgattggaaatcctttctggctctttcattttgctctaatatatatatattttaaaattttctctagctgtcttcaatattttcactttattcttggttttagaaacttgactatagtatctctaggtgactttttttgtttgtttttattcctattggatttctattggcctattgaatatgtggtttgttttcttttaagaattttggggaattttgagcctttacctcttcaaatatttttttctgccgtgtgctgctgtatcttatatttctaggagttaaattacacatctgctagaacacacaacactgagatttctccatggcacctcttttttttttttttttttactatttttttttattactctgtgttttgtcttggatactctctagtgacctatcttaaagttcactgattctttcttcagcccctagtctgctcacaaacttacaagaggaatttttcttgtttaatat

SEQ ID NO: 87007 - DNA, 733 bp, Homo sapiens
agaccaagttagacttagaaaatggcagcttcaaataattataaggtgttaaacaatttttaaaaatatatctttaatggtccatatcctgagtggcttaatttgtatttcttaagcattatgagcccaagtacttactgaatccataaccgttgatttgtgcaatggcgggaccttatcacatgggctgctaatcatcccccagttctggcattttaaaatatttcattgagttctggcttgcagtttctgattggaaatcctttctggctctttcattttgctctaatatatatatattttaaaattttctctagctgtcttcaatattttcactttattcttggttttagaaacttgactatagtatctctaggtgactttttttgtttgtttttattcctattggatttctattggcctaytgaatatgtggtttgttttcttttaagaattttggggaattttgagcctttacctcttcaaatatttttttctgccgtgtgctgctgtatcttatatttctaggagttaaattacacatctgctagaacacacaacactgagatttctccatggcacctcttttttttttttttttttactatttttttttattactctgtgttttgtcttggatactctctagtgacctatcttaaagttcactgattctttcttcagcccctagtctgctcacaaacttacaagaggaatttttcttgtttaatat

SEQ ID NO: 87008 - DNA, 762 bp, Homo sapiens
gtgtgatcacgactcactgcatcctcctcctcctgcactcaagtgatcttccctcctcagcccctcaagtggctaggaacacaggtgtgtgccaccatgctcagctaattttttttttttttttgkattttttgtagtgacagcctttcaccatgttgccccagctggttgcaaactcctgggctcaagtgatccacttgcctgagccccacaaagtgctgggattacagtccccaacggtgatttttataattttacgtaaagtatgggcccaagagtacaaaatttgacctctattataattagatgcaagtttggcagaacattatgtcctctagatgtatccttttaattttagactataccaccttattttgtgataataaaatcaatgacagcaataatagtgaacatttaatgagtacttactctgtatcaagattgctcacgttatgttcattgtcccatacaatccactcaacagctccccgaggtcagcattattattagctccattttatagattggaaattgagactcagacaggtgaagtcttttctcaaagttacatagctagtaagtgataccacttgtcaagaactgtgaaagcactgagattttattatgtttgtaaactaaaacattagcctgctacacgttcatggatgctggcaggagacatgaaacttcagagacaaagtacagtttattactaagatcaataacaatagccagagtatctgtaattttgtttcaggatcc

SEQ ID NO: 87009 - DNA, 848 bp, Homo sapiens
ataaataatcccaaatatcaactaaaaagaaaataaatggtttgaaaggcagtcattaaaaattatgtttacaaagatatttggttacatgataagatgcttatgctcatattaagtaaaaatgacagaatttggggtctaaattccaaatgttctacttactaattatgtgaacttgcaaagtaattagcttaaaagtctaaattgtaaattgtaaaatgagatggtgatacggtttggctgtgtccccacccaaatcttgaattgtaactcccacaattcccacatgtcataggaggaatccagtgggaggtaactgaattatggggacaagtctttctcatgttgttctcatgataatgaataagactcatgagatctgattattttaaaaacagggatttccctgcacaagctctcttctcttgcctgccaccatccatgtaagatgtgacttgctcctccctgccttccatcatgcttgtgaggcctcctgaactatgtaagcccattaaacctctttcttttgtaaattgccagtcttgggtatgtctttatcagmagtgtaaaaatggactaatgcagatagtaatagtaccttccttacacagtttttgtaaagactaatacaaatcacaaactgtattacaaaatgccacatccataccagtgtaagcattcactcaatcttacctacaattattatcactggtagtaaaaataaatgccaatgatatatcattataagaaactctattaagatttcttagcggtttatttctgaatagtggcattgtaagtggattttttctgtttaaggtattttctcatatgtcttaaatcttaaa

SEQ ID NO: 87010 - DNA, 520 bp, Homo sapiens
ctatacatatttaattattttggcaagtcgcctatatagcattttgatttgaaactacccagaagattataaaattcagatgaagcaaaagagaaatatcaaattttatctaatcattggccttcttgtttcattttaaaggtaaaatattgacttaaaaagtttaaagattaggtagatcattaatataatagaatatccatctgaggtaactaagtaatactcttcaattctgatataagttttagtgcatttttatttcctctctctctctctttatatatatatgtatgtrtgtgtgtgtgtgtgtgtgtgtgtgtgtgtgatatgtatatatgccattatatatagctcctccagaaaaatcatgatttttacacactccatggtctgatggtctcagcacttaaaattgtattttaagctaatgtaaatcatattttattgacaaaatatctgttgctgtataacagtagcatttgtgaagttcctagtatttaccagacatttcatatcaatt

SEQ ID NO: 87011 - DNA, 691 bp, Homo sapiens
gaaaaaagacaaaatctgacatcataatcagattaatgataagaatatttttgatttcccataacataagccttacgtaacctaaaayatggtgacacaaattatcatctactacaccaaaaagattcctcactatttcttgtaccattactgtttttggcttggaaacaggtccctcatagccttcctctctgggctgctcatgtgttcatgctttcttggccctgctatttatttcctaatagatggctgtctccctgaacctagcagtctttcacagggactcccacaagcttgtatcccaatattggatccaaactctaccattcttccctggattttaactgaaaccaggcagtcattcctaaggaatcagtgataaaggttgggatgtaattgaaaggaagaacaatgtatagaatgttttcctcagattcccttgtaagttctgctccctcttctagctagggttaggaggttttctctttatcacatagaaaatgttggttacctccttgcccaagaatcctggccaaatcaaactcctgctcctgaatagaaaaagactttctacttagtcctgcctaaagcatgcttctcgagtacatcaatctgattttttccaaggtatttgactctgggaatatctattcccttcaggggaaacctcatactggactctgggtatatg

SEQ ID NO: 87012 - DNA, 994 bp, Homo sapiens
cactattcctgccctttggtagctcactttctggagtgatggaggcattaatcaaataatataagaataaacatgtaatttataactgggttaagtgcaataacaaagaacttagttgtgctatgacaggatataattggaaatttgacctaattaggggcatgatgactgaactaagagaagaatatgtagatgttcactaggcaaaggagggggatgggggaatgaaaatactctaggtagaggcatcagaaagggcaaaatccctttgaggagtgcatgtgtacaaatcacttctgcttcaagctctctgagagctggagccagaggttatggtggcattctttccctttacatcccaccattttcccacacatggcaccaactcaccagcttggtcaatgaatctatgccataagactgaggrgcaagatgaaaaaagcaatgcaaaacaaaacaaacaacaaacagaataagccaagttattcgagaagtaactatgataaataaaatgtgcaatttcgtcgcttctttaggtaaagatctttaacaatttaagcacttataatgtgatgctgattatttctaatgatttggcaataaatcaattagatggtgtactctaaaagatttttaaatttctgaagcaaagatctatttaacctatatggaatttagatattattgataatatgatgattagcataaatatttttggatacttaatattgctttgacattttcacacatcaatttctctgcataaacaagtttttatatagataacataaaaaataaagaaaaaaggctagaaaagtcttatggccacagtagttaattttctgacaaactagttttctttatctgtcaaatgctttttttcttttttggagtattatgctccaaataaatggtagaacttgatagtgattatttcctcatgccagacctggaatgctctctatcacagttacaggtgagacagtccagagtc

SEQ ID NO: 87013 - DNA, 809 bp, Homo sapiens
ccccaaaatcatgctccttcctgctccaggaagcaccaggaacccccttcttcatttgtgctgacaacataaccttagagatgaggagtcttaccagaagccatctgagtccagccatcccagaagcctcctgagccaaggccaaaggatagtacccaggctgctggagggctcagatgtagccgggacctggctccatgaagatgaagagccccacagcccctctcataggaatgaaggcagaagataaacaatgtaccacatcagcaaggaagcagcccttctgtcaccccacaggtgcacaagagcccaggagaaaactggggacaaaaggccctggctctaagaaccccaaaggccagagcagccaccaccaactgtgaacagaaatattggagcaaagatttgagacctagtggagactgccaaggtacagtggagtgggttgcctcttggggatgcgggagtgcgtttgacaggggagacccatcaggaggggatatggcttcacaagartcctcctccttatgattgccagaccatgtgtgtgtgtatgcctgtttgggcgtgtgtgcatgtatgtgcttgcatgtatccatcggaacctacatgagagcatgggtgcgtcgatggcagctttgcatcagaacacaggtttctcactgtgtggccttggcaatatccgtttctttggacctcaacttacagacccacaaagtggagctaaggctactccatcccaaaaccgagtgtgggtctcctgggggcaggtaaccacctgcacagtgctgttctggtgtgaaggatcc

SEQ ID NO: 87014 - DNA, 1324 bp, Homo sapiens
tatttatgaataaaatatttttgccttttaattattcagtcttttactaaaacccatgttacacataagaggagaagtttaaaataatgtttccagaagtgtaaaatcctgaatcaaaacaacatgttttagaaaatattaggaatacagaacactaaaaatagaatactcatagtgtcctcatgcattttaactcattgctttcattgatcttaattctttttaaaatttgaagtagaaatatttctgattgactaagtataaagtgctgaaaccatcaattacttcaaaatagtttattttataaccttaaatttttcactcaaattcccataaaatacatcctgtttgtaaatctggaagaagcgttctgtaccatcaaatttttaaaagttgatttgatgccaaatgtaactagacaattaaattcagtagttgccgtaacagatgaagtaataacttagatgctttgttaacatctgtataaaactgttttccaactgtagctgtttgcttcacttttcatgagtgtagtgaatcactgtacttttaacaatctttgctcatgtaaactattaactcaggtccttaaagacttagtgtattgatgggaactgcattatactaattttatgactttcagataggctagtgccagagaggtcagctcaagagtaatgaatgccattttaaaataccaagaagcatgattattttcatactgatactgccgtggaaaaacaccaaagaggttgtgagattataccacaaagtacagaaactgttccaggaagtaagtgcataaactcggctgtgcaagtgtacagaaaaacccattaaaacccattaaaaagacccaaactgtagacagaagwtaaaaaaggattgatcagctgcatccatgaaggcgatagattgtccatttattaattaaaagtatattttatatattgtgatgtgataaatagtttgactgtataggttaattccctcagatctgtgccgagggctattagcattgataaattatgcactatgacatttaacatttctgatagacggtcttaaggagtgctgtacctgcagatctgcatctggtatttacacagcaatttagtctagctatagttatctgtgaagcattttgaatacaagtgggactataccttaaataagcatttgctcttgtggttgggtgattttaattctagaaccagaattaagtctcttgaaccataactgtcttgatcaccacaaaacacagagtacttctaccttacataaacattattgagtcccattggaataatgaatttaaatatcc

SEQ ID NO: 87015 - DNA, 1243 bp, Homo sapiens
ggtggataattcgaaacccaagattattaccacatcaactacctcctcagcacatctggtatcaacaacttatgggccctctacaccaggtattccacatttgtccttccagagccactctctacccttctccacccttcttgtgctcagagatgctgacgttcatgaactgtatcatcaggctgccctgtacactgacttccagttggatttggccaatagaaatacccacaggagactaggcgaggtaggatggaagagagcagagtgaggtcagagtaatcatttccccggttcatatcctatcagatcatggcttagcagtggccatgtttctttaccaaagccatggatggctcttatcagatggctctctcctggagttactgctttttctgggttccattaattaccccattcctgctcctttggacctgcaggtggtaacgactctaaatcctcaggctgttaatagaagcaaggtgcttcctcatctcttgttggttttccttcatcttgcccacacctttgtaataatcytttcactaagccctcctgaaataccctcatttgagtggccatctgttttgtattgggaaactgattgctacagcttgggaaatggaacctaagaacttggtaggcaaagttatttccttcttttgttaatttaaaacaaaattaacgtatgtggcacagaccaatcctaaatggatcccttcagatgctcagtgcaaaatatctctttaactgtgttcttttttatctctctgtgaagattctcttccagcattgtcaggaggacaaagttattttattcattcaaggtactttcacttaagtttgatatttctttatctaaaacttcatctaaaagtttgaaaagttcaataaactctgagaccagacattaacatcttaatattaaactttaatataatcctttttgatattactaatgatgcctgattgctctaagttttagaatacaataagcatcattttgactttattttagaatgagagaacacgttgaaatcacatattattatttcaaaaaaggctaccagaaaaagagacacagatacaagttagtaagatggaatctattatcactcgtctccctagtcaatcctctaaaaatttgtctgctcagaaagccaattaaagcctcctacagtctccttcattggccagaataataatggtttaaaaaagcagttcagttgggaaaaggaaatgc

SEQ ID NO: 87016 - DNA, 716 bp, Homo sapiens
tagagtgaaatgtttcccattaagttttaaaaaagctttacatatttcattaacaaaatcccctgcacaccacaaaagtcttgcgagagaacaaacataattctacaattttagttgttactactgctttgtgtaaaataattgctaatatggtaaattcatatttttacattaaaaacaatcttacagattatttttatggggtcatgaaattacccaggagcttccctttaatagtaatttcaaaatccatactccagaactatttatagctgaatcgatgttatgagattctttcagcacttctgataacaaacctctattggagagaatccaaaacataaaattccttgccttagaaaagcagtttactcatactacagtttgacacttctgtgtaaaaacaaaacgaatcaacctctagatgtcttcctatgtttttcagtgggttaactacacccaataactcaagagtttttatctccactgcttacctagtctcataagaatagctatgataattgggaacctgaggattgaaatgaccaaaagtaagagatcagaaaaggcaattgggttgaaaaaagtctaagctactgtgcagaaaaataaggatgaaaacagaaaaaaaaaaaacaaaaccataaaaccagtcaaacccattctattaytctatgtcttaatctttctagataaccacattcaaaattcaatgg

SEQ ID NO: 87017 - DNA, 835 bp, Homo sapiens
atatataaaatgacaaaaatagtattcataaatgtgcctataaatgtctttgacaactcagcttcattttccttcctcgagtctatcccatttaatgaagaggttgcaagactgaaaactacatttgtcagaaaacttgctagcagaggacttgctagcagattataccaaagcactagtttgcaaagttaaaaggaggggaaaatagtggaaggtatattattgtttagctggcactggcagatagtagagtcagtgggttttaagactcatgaaatgttgtgtggcttccaggcattttgctgtaagtgttcaccttggtgttgaaaacgctgtcagaartttcctatgatccttgcattatcctgggaccctgaacactagaggcaacacaggggttaaaggcatgtgttgttccttcttctgggaatgttctgcattcagacacacacatggttcacagattcctttcattcatgcttctgctcaaatatcactttctgatcactctttataaaagtgcactctttcatttcacttgatcccccacaccctttcctattcttcattgtacatattcactttttattttttcatatgtggtttatttactcattgatcttctattggaatatcagctccaaaaagcatgaactttgttttgttcactgtggtattcttggaagagtgcctacaacattaagggtacacagtaaatgctggttgaatgaatgaatgttgaatacatgcacatataatgaagtatagttatgtgttacttaacaatggagatacatgctgaaaaatgcttcattaggcaattttgtcattgtgc

SEQ ID NO: 87018 - DNA, 769 bp, Homo sapiens
tgagctgctgcaccaagccttgcctgaagctcgtcctacttctttcacttataaaaaccaataaattcccttgattatttaatccagcttgaaggattttgttgttgttacttgcaactgaaagcatcttaaccaaccaggtagatactatttagtaactgtgtgatctaaagcaagtcattgaacctctctctacttctgttccctcatttgtagagygaggataataatacaacttagctctggatttgttgtggagattaaaaaataatgtaggtaaaagcaccaagcatagtacccaacacataggaagacattagtacatatggtctaatactacattaagaaactttacaatgaaaggaagaatggaggaccgtaattgctttaggtgagacatctgaccatatttactcccatggcaacttttagatgcctctgttaccatgcatatgtattttgatattttgtttagctgtcaacctcctgtgagcttctagaatctagaaggtaagaccatgtcttaatgttctttgcatttgtcccagtgtccagcattgtgtaaagcatatggcaggtatttcattgaagtttcttgaactaaagaattaacttgtgagaaaagagcctgagaaggagaagaataaagagttaagtgctggaaaaagcataactaatggactaagtttcaggggcaggcagaaggagaggtgaccagaggccaggtggagagattagcctcagaaaggaggaaggttaataataagtg

SEQ ID NO: 87019 - DNA, 617 bp, Homo sapiens
ctaacaaagtgaacatcctaactcagcctcacctaccttacacatgctcagaacacttatactaatctacaattgggaaaaaatcacttaacacagagactattctataataaagttattatttaaaaatttgaattgtctgggcacggtggctcatacctgtaatcccagcacttcgggaggataaggcaggtgaattacatgaggtcagcagttcgagactagtctggccaacatggtgaaacctcttctgtactaaaaatacaaaaattagccagttgtggtgtcccatgcctgtagtcccagctactggggaggctgaggcatgaaaattgcttgaacccacaagggagaggttgcggtgagctgagatcrtgccactgcactccagcctgggtgacacagcaagactccatatccaaaacaaaacaaaataaaacaaaacaaaaactttgaatcaaaatacaaagcataatttctcaaaatgaatgctattttcacagcattataaatcaaaaaatcacaggtcatactataagttggggactatcttattcaaattgcatttgaaatttagtttgggtctaaattctaaatttgtgcctctctttagatct

SEQ ID NO: 87020 - DNA, 689 bp, Homo sapiens
gggacagttcttctcaaaaattgaagctattagattagtttgctaaagagatgtggaaatagcaccccatgctgaagattctggggggtttaagagatgtcagggattgctggattagcaaaagaaaggctgtgagatatggctggagagccgtgttcaggatttttggctttatccaaagggaaatggctagatacgtaaagaatgatgctggttaatgtacactttaatgaactattacttttctataaaaatataatttggctctagtgggtcaaagtgtttgtgtgtgtgtgtgtgtgtggtctcgtctctgtgtgtgtatgtgtgtagtgggggagggtagaaaagagtggatatatgagtccaatcagagatctgttactaaaatccaggcagcaatagatggyaacttgcaccaataaggaggctgtaggttggagagaagtgaagggactatggataaatatctagaaagaaaaattctaaatagttggtcatttgatggaggttagggaggaatgtacaaaaagaaagaatgccccaaaatcatcgttccctggtcctatttaaatggtgatgaatactaaaactgaaaaaggtatcagggaatatctggtacaaatttctctttaattataaagaaaatgatatatctcagattagtaaagggagctcttcttctgcat

SEQ ID NO: 87021 - DNA, 689 bp, Homo sapiens
gggacagttcttctcaaaaattgaagctattagattagtttgctaaagagatgtggaaatagcaccccatgctgaagattctggggggtttaagagatgtcagggattgctggattagcaaaagaaaggctgtgagatatggctggagagccgtgttcaggatttttggctttatccaaagggaaatggctagatacgtaaagaatgatgctggttaatgtacactttaatgaactattacttttctataaaaatataatttggctctagtgggtcaaagtgtttgtgtgtgtgtgtgtgtgtggtctcgtctctgtgtgtgtatgtgtgtagtgggggagggtagaaaagagtggatatatgagtccaatcagagatctgttactaaaatccaggcagcaatagatggcaacttgcaccaataaggaggctgtaggttggagagaagtgaagggactrtggataaatatctagaaagaaaaattctaaatagttggtcatttgatggaggttagggaggaatgtacaaaaagaaagaatgccccaaaatcatcgttccctggtcctatttaaatggtgatgaatactaaaactgaaaaaggtatcagggaatatctggtacaaatttctctttaattataaagaaaatgatatatctcagattagtaaagggagctcttcttctgcat

SEQ ID NO: 87022 - DNA, 689 bp, Homo sapiens
gggacagttcttctcaaaaattgaagctattagattagtttgctaaagagatgtggaaatagcaccccatgctgaagattctggggggtttaagagatgtcagggattgctggattagcaaaagaaaggctgtgagatatggctggagagccgtgttcaggatttttggctttatccaaagggaaatggctagatacgtaaagaatgatgctggttaatgtacactttaatgaactattacttttctataaaaatataatttggctctagtgggtcaaagtgtttgtgtgtgtgtgtgtgtgtggtctcgtctctgtgtgtgtatgtgtgtagtgggggagggtagaaaagagtggatatatgagtccaatcagagatctgttactaaaatccaggcagcaatagatggcaacttgcaccaataaggaggctgtaggttggagagaagtgaagggactakggataaatatctagaaagaaaaattctaaatagttggtcatttgatggaggttagggaggaatgtacaaaaagaaagaatgccccaaaatcatcgttccctggtcctatttaaatggtgatgaatactaaaactgaaaaaggtatcagggaatatctggtacaaatttctctttaattataaagaaaatgatatatctcagattagtaaagggagctcttcttctgcat

SEQ ID NO: 87023 - DNA, 689 bp, Homo sapiens
gggacagttcttctcaaaaattgaagctattagattagtttgctaaagagatgtggaaatagcaccccatgctgaagattctggggggtttaagagatgtcagggattgctggattagcaaaagaaaggctgtgagatatggctggagagccgtgttcaggatttttggctttatccaaagggaaatggctagatacgtaaagaatgatgctggttaatgtacactttaatgaactattacttttctataaaaatataatttggctctagtgggtcaaagtgtttgtgtgtgtgtgtgtgtgtggtctcgtctctgtgtgtgtatgtgtgtagtgggggagggtagaaaagagtggatatatgagtccaatcagagatctgttactaaaatccaggcagcaatagatggcaacttgcaccaataaggaggctgtaggttggagagaagtgaagggactatggataaatatctagaaagaaaaattctaaatagttggtcatttgatggaggttagggaggaatgtacaaaaagaaagaatgccccaaaatcatcsttccctggtcctatttaaatggtgatgaatactaaaactgaaaaaggtatcagggaatatctggtacaaatttctctttaattataaagaaaatgatatatctcagattagtaaagggagctcttcttctgcat

SEQ ID NO: 87024 - DNA, 689 bp, Homo sapiens
gggacagttcttctcaaaaattgaagctattagattagtttgctaaagagatgtggaaatagcaccccatgctgaagattctggggggtttaagagatgtcagggattgctggattagcaaaagaaaggctgtgagatatggctggagagccgtgttcaggatttttggctttatccaaagggaaatggctagatacgtaaagaatgatgctggttaatgtacactttaatgaactattacttttctataaaaatataatttggctctagtgggtcaaagtgtttgtgtgtgtgtgtgtgtgtggtctcgtctctgtgtgtgtatgtgtgtagtgggggagggtagaaaagagtggatatatgagtccaatcagagatctgttactaaaatccaggcagcaatagatggcaacttgcaccaataaggaggctgtaggttggagagaagtgaagggactatggataaatatctagaaagaaaaattctaaatagttggtcatttgatggaggttagggaggaatgtacaaaaagaaagaatgccccaaaatcatcgttccctggtcytatttaaatggtgatgaatactaaaactgaaaaaggtatcagggaatatctggtacaaatttctctttaattataaagaaaatgatatatctcagattagtaaagggagctcttcttctgcat

SEQ ID NO: 87025 - DNA, 688 bp, Homo sapiens
cctttcctagtcatttttatcccctcagtgactctttgatttgaagattatagtccttaactaatgcgttcatttcagctaccttctttccttaacatcagatctgtaaattttatataattgcatattkgtcaatgatttgcagaatactgaaaatgtactgcacatttttacatgatttggaaaacactttacaaatacagatttttaataaaaatagtgaaatgtatacatatttaatatgtattataaaatgatgcatttcaaataatgaaaattaatgtcttaaacaaataagatgcagtttttagattttattgggaaccagttaatctaatcataaatgaaagtagcaacataacgaaagaataagcaatgaaattcattttaggagaaaagaacaaatctagaataccgtaactgaatcagacttgaaaatgatcatctgtacaagattttatgcgtatctacgatgtgttcagttcatagttataagggaaaaattgtctaaattattcatgttctttgtgtaatacacttttatcaagtaatgtttacatatgctaaaaagcataaatcttgagagtgcagcttggtgagttttgatgaatatatgtactcatacaaccaacacagcaatcaagaaacgggacagttccattactcagaaatgtttctctggtccttt

SEQ ID NO: 87026 - DNA, 688 bp, Homo sapiens
cctttcctagtcatttttatcccctcagtgactctttgatttgaagattatagtccttaactaatgcgttcatttcagctaccttctttccttaacatcagatctgtaaattttatataattgcatattggtcaatgatttgcagaatactgaaaatgtactgcacatttttacatgatttggaaaacactttacaaatacagatttttaataaaaatagtgaaatgtatacatatttaatatgtattataaaatgatgcatttcaaataatgaaaattaatgtcttaaacaaataagatgcagtttttagattttattgggaaccagttaatctaatcataaatgaaagtagcaacataacgaaagaataagcaatgaaattcattttaggagaaaagaacaaatctagaataccgtaactgaatcagacttgaaaatgatcatctgtacaagattttatgcgtatctacgatgtgttmagttcatagttataagggaaaaattgtctaaattattcatgttctttgtgtaatacacttttatcaagtaatgtttacatatgctaaaaagcataaatcttgagagtgcagcttggtgagttttgatgaatatatgtactcatacaaccaacacagcaatcaagaaacgggacagttccattactcagaaatgtttctctggtccttt

SEQ ID NO: 87027 - DNA, 688 bp, Homo sapiens
cctttcctagtcatttttatcccctcagtgactctttgatttgaagattatagtccttaactaatgcgttcatttcagctaccttctttccttaacatcagatctgtaaattttatataattgcatattggtcaatgatttgcagaatactgaaaatgtactgcacatttttacatgatttggaaaacactttacaaatacagatttttaataaaaatagtgaaatgtatacatatttaatatgtattataaaatgatgcatttcaaataatgaaaattaatgtcttaaacaaataagatgcagtttttagattttattgggaaccagttaatctaatcataaatgaaagtagcaacataacgaaagaataagcaatgaaattcattttaggagaaaagaacaaatctagaataccgtaactgaatcagacttgaaaatgatcatctgtacaagattttatgcgtatctacgatgtgttcagttcatagttataagggaaaaattgtctaaattattcatgttctttgtgtaatacacttttatcaagtaatrtttacatatgctaaaaagcataaatcttgagagtgcagcttggtgagttttgatgaatatatgtactcatacaaccaacacagcaatcaagaaacgggacagttccattactcagaaatgtttctctggtccttt

SEQ ID NO: 87028 - DNA, 999 bp, Homo sapiens
tgcatcaccacactcagctaattttttaattttttgtagagacaggttcttgccatgttgcccagactggtcttgaactcctgcattcaagcaatcctcccrcctcagcctcccaaagtgctgggattacaggcataagccgctgtgcctagcctttcttgatttgagtgcatggtgatggcatgtactgagagaagcatttatggggctgggtactttgggaggccaaggcgggcagatcacctgaggtcaggagttcaagaccagcctggcgaacatggtgaaaccctgtctctactaaaaatacagaaaaattagccaggcgtggtggcaggaacctgtaatctcagttacctgggaggctgaggcaggagaatcgcttgaacccgggaggcggaggttgcagtgagctgataccatgccattgcactccagcctggacaacaagaatgaaactctgtctcaaaaaaaaaaaaaagatttatgggaaaagcaacagttttagcagatggagaaatgttgcaatcatcttgagatgagtggagtttgagacacctggacttctaaggggagctggactgttcaggtgtgaatcccagttagagagagatacagggtggaatggggctaagaggaaagatccagaagagaaggggatcctgacccctctccaggtctgctccccccatggtaaaatgaggggtttggagtttccatttaattcagcacatagttcttggttcctggtatgcacttggccctgctggtgacacaaacaaatcagagtccttgtctacaagcagctcacatttgggctgcaagaaaggccaggagaaaggatagcaacaagaggcacaagcaagatccacagaattcagggaaaaaaaaaattcttcctgagaccaggagagcttcctggagtggagtgggtgaccgttgagctaggctttgaagggttggcagaaatctaatgggagagaggggagggcagggaatgca

SEQ ID NO: 87029 - DNA, 999 bp, Homo sapiens
tgcatcaccacactcagctaattttttaattttttgtagagacaggttcttgccatgttgcccagactggtcttgaactcctgcattcaagcaatcctcccgcctcagcctcccaaagtgctgggattacaggcataagccgctgtgcctagcctttcttgatttgagtgcatggtgatggcatgtactgagagaagcatttatggggctgggtactttgggaggccaaggcgggcagatcacctgaggtcaggagttcaagaccagcctggcgaacatggtgaaaccytgtctctactaaaaatacagaaaaattagccaggcgtggtggcaggaacctgtaatctcagttacctgggaggctgaggcaggagaatcgcttgaacccgggaggcggaggttgcagtgagctgataccatgccattgcactccagcctggacaacaagaatgaaactctgtctcaaaaaaaaaaaaaagatttatgggaaaagcaacagttttagcagatggagaaatgttgcaatcatcttgagatgagtggagtttgagacacctggacttctaaggggagctggactgttcaggtgtgaatcccagttagagagagatacagggtggaatggggctaagaggaaagatccagaagagaaggggatcctgacccctctccaggtctgctccccccatggtaaaatgaggggtttggagtttccatttaattcagcacatagttcttggttcctggtatgcacttggccctgctggtgacacaaacaaatcagagtccttgtctacaagcagctcacatttgggctgcaagaaaggccaggagaaaggatagcaacaagaggcacaagcaagatccacagaattcagggaaaaaaaaaattcttcctgagaccaggagagcttcctggagtggagtgggtgaccgttgagctaggctttgaagggttggcagaaatctaatgggagagaggggagggcagggaatgca

SEQ ID NO: 87030 - DNA, 999 bp, Homo sapiens
tgcatcaccacactcagctaattttttaattttttgtagagacaggttcttgccatgttgcccagactggtcttgaactcctgcattcaagcaatcctcccgcctcagcctcccaaagtgctgggattacaggcataagccgctgtgcctagcctttcttgatttgagtgcatggtgatggcatgtactgagagaagcatttatggggctgggtactttgggaggccaaggcgggcagatcacctgaggtcaggagttcaagaccagcctggcgaacatggtgaaaccctgtctctactaaaaatacagaaaaattagccaggcgtggtggcaggaacctgtaatctcagttacctgggaggctgaggcaggagaatcgcttgaacccgggaggcggaggttgcagtgagctgataccatgccattgcactccagcctggacaacaagaatgaaactctgtctcaaaaaaaaaaaaaagatttatgggaaaagcaacagttttagcagatggagaaatgttgcaatcatcttgagatgagtggagtttgagacacctggacttctaaggggagctggactgttcaggtgtgaatcccagttagagagagatacagggtggaatggggctaagaggaaagatccagaagagaaggggatcctgasccctctccaggtctgctccccccatggtaaaatgaggggtttggagtttccatttaattcagcacatagttcttggttcctggtatgcacttggccctgctggtgacacaaacaaatcagagtccttgtctacaagcagctcacatttgggctgcaagaaaggccaggagaaaggatagcaacaagaggcacaagcaagatccacagaattcagggaaaaaaaaaattcttcctgagaccaggagagcttcctggagtggagtgggtgaccgttgagctaggctttgaagggttggcagaaatctaatgggagagaggggagggcagggaatgca

SEQ ID NO: 87031 - DNA, 1010 bp, Homo sapiens
ggaaaactctgactaaattagatgaacgtcaacttgataataaacaaatgcctgccgggcgcggtggctcacgcctataatcccagcactttgggaggcgggcggatcacaagttcaggagatcaagaccatcctggctaacacggtgaaaccctgtctctactaaaaatacaaaaaaaaaaaaaaaaaaaaaaattagccgggcgtgttggcaggcgcctgtagtcccagctacgcgggaggctgaggcaggagaatggcgtgaacccaggaggtggagcttgcagtgagccgagatcgcgccactgcactccagcctgggctacagagcgagactgtctcaaaaacaaaacaaaacaaaacaaaaaaacaaaaaacaaaaaaagccaattatgagtatcttcaattaaatataaaaaaaggatttaatggctgggcacagaggcagatcacctgaggtcaggagttcaagaccagcctagccaacatggtgaaactccgtctctactaaaaatacaaaaattagccakgcgtggtggcacacgcctgtaatcccagctactcagtaggctcaagcagaagaactgcttgaacctgggaggcagaggttgcagtgagctgcgatcacgccactgtactccggcctggatgacagagcaagactccgtctccaaaaaataaataaataaataaataaataaataaaggatttaaggatttaattaacataagcaaatataattggaatgaatgaaagttaagagaccaaaagattaaccagtaggtacatgaatcagagaaatatgtgtttaaagaaagcaacagggccagatgcagtggctcacgcctgcaatcccagcactttgggaggctgaggcgggtggatcacttggagtgtaggagtttgagaccagcctgggcaacatagcaagactccatcttttttttttttttttttttttaaagaagaaagaaaagaaagcgacaggctgggcgctgtggcttatgca

SEQ ID NO: 87032 - DNA, 553 bp, Homo sapiens
gcccacctcagcctcccaaagtgttgggattacaggtgtgagccacygcacccggccttttttttttttttttttttttttgagacagcgtttcgctttgtcacccaggctggagtgcagtggcccgacctcagctcactgcaagctccgcctcccgggttcacgccattcttctgcctcagcctctggagtagctggggctacgggcgcccgccaccacacctggctaattttttgtatttttagtagagacggggtttcaccgtgttagctaggatggtctcgatctcctgacctcgtgatctgcccaccttggcctcccaaagtgctgggattacaggcttgagcaaccgcgcctggccgctcagctaatttttttatttttagtagagatggggtcttgctttgcagcccaggctagtctcgaactcctggcttcaagcagtcctcccaccttggcctcccaaagttctgggattacagatatgagccaccactcctggatgaaacctagattattagttgtacccctcctaagatcccactgcctttt

SEQ ID NO: 87033 - DNA, 553 bp, Homo sapiens
gcccacctcagcctcccaaagtgttgggattacaggtgtgagccactgcacccggccttttttttttttttttttttttttgagacagcgtttcgctttgtcacccaggctggagtgcagtggcccgacctcagctcactgcaagctccgcctcccgggttcacgccattcttctgcctcagcctctggagtagctggggctacgggcgcccgccaccacacctggctaattttttgtatttttagtagagacggggtttcaccgtgttagctaggatggtctcgatctcctgacctcgtgatctgcccaccttggcctcccaaagtgctgggattacaggcttgagcaaccrcgcctggccgctcagctaatttttttatttttagtagagatggggtcttgctttgcagcccaggctagtctcgaactcctggcttcaagcagtcctcccaccttggcctcccaaagttctgggattacagatatgagccaccactcctggatgaaacctagattattagttgtacccctcctaagatcccactgcctttt

SEQ ID NO: 87034 - DNA, 1397 bp, Homo sapiens
ttctgacatctgcaaaaccatcctgaacacttcccactcaccccacaaggggcacctctgctcctaggtgtggctccttccacacttccatgcagactctggctacaagctgtccaggcctcttggaatgtgagctctcattaggagaggccacacgtcttaatcacccaagggcctcacacagcacatgccacatggatgatgagtaagtgcttgccaatgcaaagatttgaaagwgcagacttaactctccctgcatctgagaaccatcggagaagtcaatctagttaacaagcaaacaaacaggaaaaaataattgaaaatgagtggcataaaggttagatagcagatacatgaactgctttctcccttcctcttggttcgtgagctagcctgctgaaataaactgcaggcttccagaaacctctgcatgtctcccttcctaggtgctcaggggcatggcttagggttcattccttttgtgtccctccacagacgaggtgtcttagtttcagttagttcctttagcatcttgtgcttgagaggacaagatgtcatccatggctaaatagcaagtaagttttggttcttagaaaggtaccagcacaactgaagatatctcaagcttcaagaatcccatgcaaataagattttaccggctaaatttgaagtcaatacatccatccagccaaggttccagagccctgctgcagaactggagccagggcccgccccacaggaactaacgtccctgcctcaacaacttcctgttctaggtggcaggcgggaaaatgaaaatgaaacaatttaaaaaagtatctaaaaattccactgggatgaattgaaggaagaaaatggaagcggggtggggctgccatgtgaaatgtggttatcagggaagtcactgtgggaaccatatatttgatcaggacctaagtggggaggagctctctgggcagaggggagcctctgtgcagatcctcgtatgggagtgacccagccgatgtgaggggggatagaaagggtgcatggcctatctatctatctgtctatcaatcatctatctatctatctatgtatctgtttatctatctatctatctatctatctatctatctatcatctatcatgggggcttctgaggccactgtaggaagtctggcctttacttggagagaaatagaagccactagatgtctgggagcagcgggtacgtggcctgatgtcatttaaagggttactctggctgctgtgtggggtcagcagtgggtggggcaggagggggcagtgctggtgggccaggccagggaggagtggggaacggcggggggttgcaggctgatgccaggcacctgccaaggagggtccccagcacagagggacgtaaaggaggccgg

SEQ ID NO: 87035 - DNA, 1397 bp, Homo sapiens
ttctgacatctgcaaaaccatcctgaacacttcccactcaccccacaaggggcacctctgctcctaggtgtggctccttccacacttccatgcagactctggctacaagctgtccaggcctcttggaatgtgagctctcattaggagaggccacacgtcttaatcacccaagggcctcacacagcacatgccacatggatgatgagtaagtgcttgccaatgcaaagatttgaaagagcagacttaactctccctgcatctgagaaccatcggagaagtcaatctagttaacaagcaaacaaacaggaaaaaataattgaaaatgagtggcataaaggttagatagcagatacatgaactgctttctcccttcctcttggttcgtgagctagcctgctgaaataaactgcaggcttccagaaacctctgcatgtctcccttcctaggtgctcaggggcatggcttagggttcattccttttgtgtccctccacagacgaggtgtcttagtttcagttagttcctttagcatcttgtgcttgagaggacaagatgtcatccatggctaaatagcaagtaagttttggttcttagaaaggtaccagcacaactgaagatatctcaagcttcaagaatcccatgcaaataagattttaccggctaaatttgaagtcaatacatccatccagccaaggttccagagccctgctgcagaactggagccagggcccgccccacaggaactaacgtccctgcctcaacaacttcctgttctaggtggcaggcgggaaaatgaaaatgaaacaatttaaaaaagtatctaaaaattccactgggatgaattgaaggaagaaaatggaagcggggtggggctgccatgtgaaatgtggttatcagggaagtcactgtgggaaccatatatttgatcaggacctaagtggggaggagctctctgggcagaggggagcctctgtgcagatcctcgtatgggagtgacccagccgatgtgaggggggatagaaagggtgcatggcctatctatctatctgtctatcaatcatctatctatctatctatgtatctgtttatctatctatctatctatctatctatctatctatcatctatcatgggggcttctgaggccactgtaggaagtctggcctttacttggagagaaatagaagccactagatgtctgggagcagcgggtacgtggcctgatgtcatttaaagggttactctggctgctgtgtggggtcagcagtgggtggggcaggagggggcagtgctggtgggccaggccagggaggagtggggarcggcggggggttgcaggctgatgccaggcacctgccaaggagggtccccagcacagagggacgtaaaggaggccgg

SEQ ID NO: 87036 - DNA, 1061 bp, Homo sapiens
agtggctttgatgagatcttcaatcaccggttgaccacacaggccacagtgctgtggtagagaccctccctactccaggggccactgatgtagggttacctagaatttaggcagagctgggtagaaatttaaaaaggggaaaaaaaactctttattgcaaaagttttagaaagggaggctgctgaaaggatgttgattcttcttaagaaaactttctgcacatcatctttgcatttttgtgctaatttctactgcaatttattttctcatcccagcaagtagcaatttcaggtgacgtgacagtttatgaatgttacaaacattatttctttttaaaaaaaatctcttgaaatcagacttggcaatccagatacattttcccattcagtatgagtgggagcattttattagccataatcaagttttccttttcatgacaagaaagcttacagagacctgggaaccactcatataccacggggtttctytgcaattcatgtaactgaggaatcaaacccacatctgcgcctcctctggccttacttattgtcagaaagttcctctcttgtcctgtcagttagagcaccagtaggaactgagctgtgtatagtcagctgctagcttgagattctgacaaatctttacaaaaatacataggcttctatggccctctccttcatcacaagttaaacccacatgaaataatgtattatgagactttgcaaagaagaatgcaattcatcttactgagaaagcaaaaccctgccaggttgatttctttctcagtagcttcgtgacaatttcaaggaagccactgtaccagcacttcatttccctaaaacaggttatgactcttctttccctcatgcgttcggctcagttcctgagtggctgccgtatgccaggcaacgaactgggtgcttgagatcgatgcttttgaggggcttgtgttggagggagagagaggtactcaggaggactgtccttcactgtgacaatgctgggacagagacatgctctggggcctggaggaccaaggaattccacatccatgtgccagg

SEQ ID NO: 87037 - DNA, 664 bp, Homo sapiens
ctgggtgtggtggtttttcactcagttcatgagcacacctgactcatttccagagaagaccttgtcagaaacgtgtgcgctcctggtttttccctccttttggtggtcgcttctttttgtttctgtagaatgtctgaaaatgtgttcatgtaaataaatggagagagaggagtcttgttatagcagtgccattttcactgaackcctgagctatatgccaaaacattgtggcccatccattctctgtcattaaggattattttcaatgatctattgatttttagctcagtgagattccccttccattttgttaaaatcaaaggatgacaagccgaccatgttactgggggctcttacccattactgggggagttctcttactgaactcagccttggtggtccctcatccttcatgtggagcccacctgtgtacaagatgccccagggacagatgagggggctccaaggccttccttgccctcgtgacgcctgtgtcaggccatgatgaaagaggcacaggaaaggagcagttccttggagcgaatcaggcatgtccattctcagcacatttgccagcaggctcctatggatgcagagagcctgggaaccagtctcctgaatcccacgtgtctgcactcgaaatcttctggacccacagggttgc

SEQ ID NO: 87038 - DNA, 565 bp, Homo sapiens
ccaggcccatgctgagcgtgtggcacgcactttctcccggggggaggttacagagtcgggtggctgacccggctcttctgtgtgtttacgtgtctccttgaacttgtggccacttccgatcccactctgggaatcaacacagagctaccttatggctgtgcatcgggggccggtaagccgatcagtgaggatttctagttcatgtcctttgtagggacatggatgmagctggaaaccatcattctgagcaaaatattgcaaggacagaaaaccaaacaccgcatgttctcactcataggtgggaactgaacaatgagaacacgtgggcaaagggtggggaacatcacacaccggggcctgtcgtggggtggggggctggggaaaggagagcattaggagatatacctaacgtaaatgacaagttaatgggtgcagcacaccaacatggcacatgtatacctatgtaacaaacctgcacgttgtgcacatgtaccctagaacttaaagtataataattaaaaataaaataaaaaaagttggaaaaaaaaaagagaatttctagaaa

SEQ ID NO: 87039 - DNA, 565 bp, Homo sapiens
ccaggcccatgctgagcgtgtggcacgcactttctcccggggggaggttacagagtcgggtggctgacccggctcttctgtgtgtttacgtgtctccttgaacttgtggccacttccgatcccactctgggaatcaacacagagctaccttatggctgtgcatcgggggccggtaagccgatcagtgaggatttctagttcatgtcctttgtagggacatggatgcagctggaaaccatcattctgagcaaaatattgcaaggacagaaaaccaaacaccgcatgttctcactcataggtgggaaytgaacaatgagaacacgtgggcaaagggtggggaacatcacacaccggggcctgtcgtggggtggggggctggggaaaggagagcattaggagatatacctaacgtaaatgacaagttaatgggtgcagcacaccaacatggcacatgtatacctatgtaacaaacctgcacgttgtgcacatgtaccctagaacttaaagtataataattaaaaataaaataaaaaaagttggaaaaaaaaaagagaatttctagaaa

SEQ ID NO: 87040 - DNA, 526 bp, Homo sapiens
catgccactgcactccagcctggtgacagagtgagactccatctcaaaaaaaaaaagaaaaagaaaaaaaaaagatgagtttggtggcccggctcctaccaaaagatgatcaatgccataagttgggaggagacaggcgtcaacaccattccccactcacatacccacagcccgtcctccagcctcagcctttcccaccatgtcctcaaatgcccatctctccctttggcctcaaaaggatagacaggctgtgggcttcaggacttctggggcatagaagggagcagtgataattttgcttagtaactaccctactgtgtccagatagcttgttggtgtttaaaaaaaaaagtttgtttggccactctaacaagtccccgccagaaactgcaggaggtyggtagcaggagccaggttgtaaaagagagatgaaacccccaactggaaaaagatgatcacaggcaagcggctgcggctgcgaacgaaaagctttgtctccagtgccgtggtgtttgggatgagcaga

SEQ ID NO: 87041 - DNA, 526 bp, Homo sapiens
catgccactgcactccagcctggtgacagagtgagactccatctcaaaaaaaaaaagaaaaagaaaaaaaaaagatgagtttggtggcccggctcctaccaaaagatgatcaatgccataagttgggaggagacaggcgtcaacaccattccccactcacatacccacagcccgtcctccagcctcagcctttcccaccatgtcctcaaatgcccatctctccctttggcctcaaaaggatagacaggctgtgggcttcaggacttctggggcatagaagggagcagtgataattttgcttagtaactaccctactgtgtccagatagcttgttggtgtttaaaaaaaaaagtttgtttggccactctaacaagtccccgccagaaactgcaggaggtcggtagcaggagccaggttgtaaaagagagatgaaacccccaactggaaaaagatgatcacaggcaagcggctgcrgctgcgaacgaaaagctttgtctccagtgccgtggtgtttgggatgagcaga

SEQ ID NO: 87042 - DNA, 697 bp, Homo sapiens
cttgggaggctgtagtggaggatcgtttgatcccatgaggccgaggctgcaatgagctgtgctgaggctgcaatgagctgtgatcatgccactgcacaacctggattgcacagcctgggcaagaagagcaaaatcctgtctcaaaaacaaataaattaaacaaataaataaatacaatatttctatactcaagggaaattctgacgaatgatttccttccttttttataggtcagaatgtaaagtgtgtggtagatgaaagagagtgtgataggagggacacataggggcttgcatgggaggaaagactacccagatctggaaataaaaagtgaagatttcagagggttgaaaacaggaagtggaaccattattttaactacaggtgggagaagcatatctaaacactagaaagccaatattatgggaaaaattatccttgaatagttcaattctggatataaggaggaaacaaaatttagatgtatgggtgtcagcaaggctgtgaaaggaatgaaaaatgagagcttgcaaaaccttatgagataaaattatgaaaatctagaaatataatcctgtgtctgattacatttttttwaaattacttttctctctatctctatatgtatgtatataatcaaagaaaatatgtgtaaaatctgttatgaaagagtatacagcccattttgtaccacaaa

SEQ ID NO: 87043 - DNA, 1280 bp, Homo sapiens
atttagggtggattgtctcaaaagagtttaaaatgtggatcaacaagatgtggggcagtgatagactaatgaaaacaggcttccagagttttagggaaatttatggatacgaaataataattcacagaaaggrcattttttggacttttctatggcttgtaattacttcaacttaacaatcacaatattacattctcctcctagtggtttttatattacagctttacgattggctaaccaccttccctaaattagatctgtggttatctgtttcagcacttgtttaccaacttattctgctagaacaatgaaatttaacaaggagaagacatggcaaatgatttatatctgtcacctgcaataatattctactcaatagaaagtaaccaagaacaggaaaaaaaattctagtaatctttacacctgtttaaatccgtaactacctgtgtggcacttctttttctaagtgagtaaaacatttatctgttatagtaagacttcagtaactaggtatcacaaggaaccacttaatatcattcaaactgattactactgacagcaactcttttaatattaccacacaaaacaagtttagcactaatgaaaacaattagtgaagggcactttctgaaatgttaaatatatatttagatttaacaactaagtggaagagtaaccacactttgaaaaattgttttggctaatgtattttgaaatgatatttggaaaacgtttgtgtggaggctgctataacaagataccataaactggatgaattaaacaacagaaatttatttctcataaatctgaaggttgggatgtccaagatcaaggtgccagcaggttctgagtttgatgagggcctgttttctggttatgttctcctatgctggtgagggacagagggagagaaagcaaggtctatggcatgtgtcttggaagggtactaatctaattatgagtcacaccctcatgacctaactacctcccaaacccccatgttagtatcccactgggcggttagtgttttaacatatgaattgtggtacattcaagcaattcattatggtcctactcagttggggatgctataacaaggtaccataaactgggttgcttatacataacagcaatttatttctcagagttctggtggctggaaatctaagatcagggtgctagcctgcttgatatttggtgacaactcccttccaggttgcagactgcctccttcttgttgtatcttcacataccagaaacgggcgagagagctctgtagg

SEQ ID NO: 87044 - DNA, 744 bp, Homo sapiens
taggttgtaaaggtggccaggcatctccaggtgggacaaggttccatagggactttgggttttaaattgcctgttatttcttgaggcmgattgctggtggatgagagtttcatagcaggcagaatttgggttgtaaattgactgtggtctcttgaggcagtctcctggtgggagagagctccattctggagcttctaagcacatagttagacgaacttaccccatagggattatctggtgaaggggaggtgaaagattctaattgcatttctaaagggctaagtaggaggtggggaatggaggaaaccgagaaaataggagaaaaaaaaatgatgcagacaatagtaactcattctctatctcttagaaaaatggagtacttaattatactaaagttatttcaattttacctagtttggagcaagggaaacaaatactgttttcagcaatcacattggcctcactgagagaaggatatgccgcaactgttcatgaaaaaccaatatttttatttggtgaaaatattactcattagaagactaaaaacaagggtatggcacataaaattttttcctagttctttgagaaaatttctaatgttaatgcctccataatggtaaaaaagaagacagtctaataattattgagtatgaggctttaacaaggaggtgtatgttatattgttcatttaaccctccaactctttgacttgggtatttgttattaaaagctccacattaagaa

SEQ ID NO: 87045 - DNA, 1075 bp, Homo sapiens
tgtcctttgacaatagaaaatatagaagttgggattgaatagagaaatcatgctgctttatggtttgcacctgatggtttctagcctttcaactaatttttcagttaataaataatatgtactgtgctatagaaacagagaagttaaggcctttagaaatttgtaatccgtttttaaaaaaacagacataaaacaacaataaaaataatacacaaccatatgaaatacatatgcacataagaagtaactggattgaggcagtcttggcatcaagaagggacttcagaaraaatttagcaatgtttattcttgaggaatatattttagttatttcagaaaaagtacataccaggtgagggaatggaaaacatagacataaatgccagtattatatatgtatgaggaactacaaatggtttagtgaggcataaaataaaaattggttaatggattacaaacatgacatgaagatttagctgcagccaaaggggcatatataccctctaaatatatttgtactttattctgcacaaaaagagaaatttaaatagaagcagtgtaggtctgtaaacatattatagaaagatatccttgcaagtaatttagatgaagaaattggaaagatgacattatggaggactgaagacaaatctagtagtaatttacaaaatatacctgagaaatatggaattcctgaattaaggtaagaatctgtatgaagagagagaagttatttatttcaatagaagatatttgggaaaatggtttgattgggaaaaaaagtttggactttgaaatcagactgcttgatttgaattcaaattcactatttataccagtaagattctgggaagctgactaagcatttaactctcattttctcacgtgtataatgtgtctaacaatattgtagacacttatggttgttcctaataatcattcacatcctttctatttgtatgtctttctatatttctcaatatgaaaaaaatagttatgagaagaggtaattgaagcattgatactaggcaaatttgtttctataatttttaaaaaaattaaatcaaattaatat

SEQ ID NO: 87046 - DNA, 556 bp, Homo sapiens
caacatacatacaaaaatttaatttcattagaataaaacacatctaataaatatgtcatcattttttcactaattaaattggcaaagtttagaaataattgtaataatttaattctatagatttacaggttctcatatctcagatactaatgtaagtagcatattctttctggacatctatttggaaatttacattaaaagtatcaaaatatttacattatttgaacaagccattttgcttttggaattttatcctaaggggaaaaatatcagaagactacaaaatcatttatttatgagaacattcattgtagcatacttaaaatttaaaaaaattacaggaaacattacgtctgtgatacacttcaaaaattgtttttgtgcaacyagaaatgatgaagtaaatgttaccattgaccccacagaaattaaaaaaagaatcagaaactactacaagcacctgtatgcacataaactagaagaaagagacggacaaattcctggacacatacaccctcttgagactaagccaggaagaaactgattccctgaagag

SEQ ID NO: 87047 - DNA, 522 bp, Homo sapiens
ggaaaggcagagtggggacaaagcctagccattgctttggagtgtggcaacagcctagaagccttcaaaggtggtgcttacctgcatacaatcccaaatgcctatactccttatttctataaatttccatcattccatcactgataaaagaaaggaaaaagaacatcagaagttgaagtcatgatggcaacacccagatagatgccaccaggtctatctcctgcttagaggaggacatttatgcatttctgtgaattgggggtttccagagtcctatacctctttgtttagtctcccattgygaggctcctgtgatgtctaatgaagtgagcataggaattgccctaagctagaatgctacagttagtcatttgttgactttggtacttgctcactatgtgggtagggctaggcctgcagtggaggtgggtgagagagcttctacatcagtgtcagcagaggtgaatgaggatagaccactcaatggctgccttctaactatcatgttagggaaagccttcc

SEQ ID NO: 87048 - DNA, 1007 bp, Homo sapiens
gtataacagctatttacatagcatttacattgtattaggtattacaaatactctagagaagatttaaagtgtacaggaagatgtgcataggttatatgtaaatactacaccattttcataacagacttgaacatctgtggattttggtatcctaagggagttctggaaccaatccaccacagataccaaggggcgactatacttatatatgttttcagtatttctaaaataattgaatatggctgggtgcactagctctcaactttaatcgcagaactttgggaggccgaggcaggaagatagcttggggccaggagttggagaccagcctgggcaacgtagggagactctgtctctacaaaaaataaaaaattagccaggcatagtggcgcatgcctgtggtcccagctacttgagagaccgaggcgggtggattacttgagcctgggaggcaatcataccacttcactccagcctgggcaacagagttagacctagcctcaaaaataaaattaaattaaataactgagtatgatttrtttacagaattgtaggttctctgttgaactgttacatcatattttaaacacaggaaagcagagatccccggaaacttcactggctttttgaactgctgctggaatcaccattgagtggtgaaggaggatcctttgtagatgcatggtaaatttttttaaaaaacctatgaggttaacacgaaaggttttgtgttaacttatgtataaatggaaatgaatggtctatacttgtaaagtctagatgaagtaattactttcttctggaaggtgatgtgatctggttccatataacatgtgatacttaataagagttatttattagttggacaagtaagtgagatgtaggcaacctgagcaatttaaacacaaattagagtcagcattctttgctgtcaaatattttatcagaattgtcttttgtacttttgtgtcttcatcacatcttatttttcactttttcctgttaaa

SEQ ID NO: 87049 - DNA, 858 bp, Homo sapiens
gccacccatccttccaggatggcattcatcaaatgccacttgctccaggaagccttcagatgaagctccctccagatgaagcaagtctccctgtgggtcctcctgcagctcaagagctgcacctcacatgttcctccatgcagtagtaatttgcacatggtctcatctggctgacacaagcaggacacgcaggcactccctgtttcgcttttgtttctctcttccgttctccggctggtgtaggccatgttagtggaaaactggtgcccagcaaagacattttattttttatttttattttttaattttattattattatactttaagttttagggtacatgtgcacaacgtgcaggttacacatgtgtacatgtgccatgttggtgtgctgcacccattaacttgtcatttagcattaggtatatctcttaatgctatccctcccccctccccctgacattttatttttttatttttatttttattttttgagacagagttttgctctctcgcccaggctggagtrcagtggcatgatctcagctcattgcaacctctgcctcccaggttcaagtgattctcttgccttagcctcccgagtagctgggattacaggcacacaccaccacacccagctaatttttgtatttttagaagagacggggtttcaccatgttggctaggatggtcttgaacttctaacctcaggtgatccgcctgcctcgcctcccaaagtgctgggattacaggcatgacccgccgcacccagccccagcaaagacatttttaatggaaaagaaatacggacaaacacaaatggagataagtcatcttagtactgggaatagaagtgaggg

SEQ ID NO: 87050 - DNA, 858 bp, Homo sapiens
gccacccatccttccaggatggcattcatcaaatgccacttgctccaggaagccttcagatgaagctccctccagatgaagcaagtctccctgtgggtcctcctgcagctcaagagctgcacctcacatgttcctccatgcagtagtaatttgcacatggtctcatctggctgacacaagcaggacacgcaggcactccctgtttcgcttttgtttctctcttccgttctccggctggtgtaggccatgttagtggaaaactggtgcccagcaaagacattttattttttatttttattttttaattttattattattatactttaagttttagggtacatgtgcacaacgtgcaggttacacatgtgtacatgtgccatgttggtgtgctgcacccattaacttgtcatttagcattaggtatatctcttaatgctatccctcccccctccccctgacattttatttttttatttttatttttattttttgagacagagttttgctctctcgcccaggctggagtgcagtggcatgatctcagctcattgcaacctctgcctcccaggttcaagtgattctcttgccttagcctcccgagtagctgggattacaggcacacaccaccacacccagctaatttttgtatttttagaagagacggggtttcaccatgttggctaggatggtcttgaacttctracctcaggtgatccgcctgcctcgcctcccaaagtgctgggattacaggcatgacccgccgcacccagccccagcaaagacatttttaatggaaaagaaatacggacaaacacaaatggagataagtcatcttagtactgggaatagaagtgaggg

SEQ ID NO: 87051 - DNA, 1333 bp, Homo sapiens
gcggctgcatgttgtgagtggtgcatacatcgggcagtaattttcacagggatggagaagaggcacatgtagaggatttccaggctgtccatttcagtgggctttttatcaagtagcgatcatggcgcacatggttctttgctgtttttgccttcagcagatgatgactcatgacagaattcagcagcagcacagtgcgtgtctcttgccttgcagtaactacaatttcacatgctagaattgcttcaaaagcatcagacaggtttcagctgatagaaagtcagatctaaatcagtagaaaataacttagatgatgacctttattaagagtcgcttcctaatctcaagttgtaaactgaaattttaggaagctaggcaggcaggtcagcagattctctcttaaaccacaagttctgttaaatcaataaacttattttatatggtctagatttgaattgcacagttccaagaaagagaagagtctaggagatacgcagttatagatggagataacagtgtagtttgactcatagcagtgaccgactactatgtgcaaagtactggacttgaaacatctactgcagatgttatttctgaaaccttgtgttgtccatttaaaattctggttggaagtcagattcttaaaaggctttttaatatattattattcatgaattgaatttgaaatttgaggtctttctggcacaaatagtctaagatgattcttttccccttttcaatggagaggcttttctcctcccaacctcacaactactcttgggctctttgaactgtgtgtagtagtctcttgacagcagaggacctgtaactggttagaatgtgaccaatgactggccgggtgcggtggctcacgcctgtaatcccagcactttgggaggccgaggtgggccaatcctgacacagtgaaaccccagctctactaaaaatacaaaaaattagctgggcatggtggcacacgcctgtagtcccagatactcgggaggctgaggcaggagaatcgcttgaacccaggaggcagaggttgcagtgagccgagattgtgccactgcactccagcctgggcaacagagcgagactccgtctcaaaaaaaaaataatatatatatatatatatatatagaatctgtctaatgactaacgaaatggggttgtgtagaagacctgggtaaccaaataaaatgcatactgtgcagtcaaatgctgccacccagtctcattcttggggaatttygaaattggccacatagcagtgtatttttgaaagggactatctttttccttgcctcatgggcatatgaagtgcttcatctgg

SEQ ID NO: 87052 - DNA, 676 bp, Homo sapiens
tcccacctcagcctcctgagtagctgggactacaggcgtgcaccatcatacccagccaaaaacattttatacacacacacacacatcagttggtgatagaaatacaaagaaaaataaagcacaataagaaaaatagaaaggaatgggtggggagggatgctgtttcacagaggttaggcagggagggtatctctgagaaggcgatatatcgggagagagctgaaggaagtgaaggattgagccatgtggccggctgaaggaagtttccacacacagaacagcaggtcctgagatgaaagcatrcttagtatgttcaaagaacagcaaaaagtgaggaagatatcaagtgtaaatgagaccagaaggttaccagatcatgtaggtcatggcagggactgagggtttctggcagaaaagaaatacactctaatttaatgttctaagcaaatcacttttgctcttaggagaataaactccacgttggaaaaggtaccagagagagaccaacttggaggctgttgcaatggctttaggaaaagaaggtggtcattttgtcaagggagccaacagggacgggctgaggattgttttcctcctacctctctgcggctcctgtgccatcttcttaactcgtttatcttgctcttctgatgttttaacattcattcattttttg

SEQ ID NO: 87053 - DNA, 654 bp, Homo sapiens
ccatttagctacccattctcttacccaacgccggcacagacaagccttcttatcacaggtaggatgtaaaaacaacttattcaaaaatctgttatttttcttcattccccagatcatccagctttgctctgccacacccatccctcatgaccctagtgtgaactgctacacacaccaccacttgccaaaacagggaaacattttcattttcatccagatcatttaaaaatatatgaaattaacaaataattgtatatatttgatatggtttggctctgtgtcccaaatctcatctcaaattgtaatccccatgtgttgaggaaggagagtaatcagattatgagggcggttcccccatgctgttctcatgacagtgagtgagttctcatgagaactgatggttttataagtgtttggatggttgtaagtttcctgaggyctacctagccatgggaaaatgtgagtcaattaaacctcttttgtttacgaattatccagtctcaggtatttctttatagcagtgtgaaaacgaactaatatgatgttcaagatgtacagtgggattatttgatatatttatacattgtgtactgattgccacagtcaaatttattaacatatctatcactacccacagttaccaattgtgtgtgt

SEQ ID NO: 87054 - DNA, 760 bp, Homo sapiens
ttaacacaaatgggtaaattaaaatactttccaaaaaacccactggtttggttttcaataggattctcttaaaagcatacctaataaaaatattgttttattattatactttaagttctagcgtacatgtgcacaatgtgcaggtttgttacatctgcatacatgtaccatgttggtgtsctgcacccattaactcgtcatttacgttaggtatatctcctaatgctatccctcccccctgcccccaacccaaaaatattttttgtatctaaagttgaagaagaaaatgaaaaagtacaaaaattgatttggaagctggcatgttctttctcaggattttaggtaaccggcaatctttcactctcatacaacactctagagtttaaaaaatatttttctacctatcttttctctgatctttacatcctgtgaggctctgcaaaataggggcttgtgtcccattttgcaatttaaaaagccgaggctcagacaaatgtcacacagaaagtttgggacagaactgggactagaacccatgacttgcaaagtagtgctcttctcatccctaaagcagtcatagggctaggaatacattaagacaacaaaagatagagcactgcttaatacattcaaccaaggtgagacctgacgcaccccaaaatgctaagcagctccagggccctgtggcagagatttcaaagtggagggtgatgcttacatctgcatatctgagctccaatacaaacgctgccactcagct

SEQ ID NO: 87055 - DNA, 760 bp, Homo sapiens
ttaacacaaatgggtaaattaaaatactttccaaaaaacccactggtttggttttcaataggattctcttaaaagcatacctaataaaaatattgttttattattatactttaagttctagcgtacatgtgcacaatgtgcaggtttgttacatctgcatacatgtaccatgttggtgtgctgcacccattaactcgtcatttacgttaggtatatctcctaatgctatccctcccccctgcccccaacccaaaaatattttttgtatctaaagttgaagaagaaaatgaaaaagtacaaaaattgatttggaagctggcatgttctttctcaggattttaggtaaccggcaatctttcactctcatacaacactctagagtttaaaaaatatttttctacctatcttttctctgatctttacatcctgtgaggctctgcaaaatagggrcttgtgtcccattttgcaatttaaaaagccgaggctcagacaaatgtcacacagaaagtttgggacagaactgggactagaacccatgacttgcaaagtagtgctcttctcatccctaaagcagtcatagggctaggaatacattaagacaacaaaagatagagcactgcttaatacattcaaccaaggtgagacctgacgcaccccaaaatgctaagcagctccagggccctgtggcagagatttcaaagtggagggtgatgcttacatctgcatatctgagctccaatacaaacgctgccactcagct

SEQ ID NO: 87056 - DNA, 760 bp, Homo sapiens
ttaacacaaatgggtaaattaaaatactttccaaaaaacccactggtttggttttcaataggattctcttaaaagcatacctaataaaaatattgttttattattatactttaagttctagcgtacatgtgcacaatgtgcaggtttgttacatctgcatacatgtaccatgttggtgtgctgcacccattaactcgtcatttacgttaggtatatctcctaatgctatccctcccccctgcccccaacccaaaaatattttttgtatctaaagttgaagaagaaaatgaaaaagtacaaaaattgatttggaagctggcatgttctttctcaggattttaggtaaccggcaatctttcactctcatacaacactctagagtttaaaaaatatttttctacctatcttttctctgatctttacatcctgtgaggctctgcaaaataggggcttgtgtcccattttgcaatttaaaaagycgaggctcagacaaatgtcacacagaaagtttgggacagaactgggactagaacccatgacttgcaaagtagtgctcttctcatccctaaagcagtcatagggctaggaatacattaagacaacaaaagatagagcactgcttaatacattcaaccaaggtgagacctgacgcaccccaaaatgctaagcagctccagggccctgtggcagagatttcaaagtggagggtgatgcttacatctgcatatctgagctccaatacaaacgctgccactcagct

SEQ ID NO: 87057 - DNA, 524 bp, Homo sapiens
atactataggaatcatgtagccctttgatggaatagagaaaacaagagtttccatgttggtggaaataactggaatccaccgttccaacagtatcgcagctgcccagtcattaaaacgtgacagtgctcagaaggaatgagtcatgcaatggatttcaatgaaggccatcctctgtgacctggaaatgtttactgtggaagattttgagccagaccatggaaaccctaggcccaggagaagcatagaagtcaggaaaagggaagtccagagtggaagttaaagttcaggaaacatcagtcatccatcccactgccatgtggctccgggaatgaaagtccaaaggaagagccggccagagaggccacagtttgggctccagtggttccccaaatgttggattcctccttgcttggaatccggctacggtgtgcaaagcttctgcaatgaagggaatgcrggactagagttggaagcaccttctgtgacatttgtctgcacctctcctgaaggggaaggttcggga

SEQ ID NO: 87058 - DNA, 2509 bp, Homo sapiens
agacatactgaaaataaacatttcagatgtaaagaatgtgacaaatcactttgcatgctttcacgcctaactcaacataaaaaaattcatactagagagaatttctacaaatgtgaagagtgtggaaaaacctttaactggtccacaaacctttctaaacctaagaaaattcatactggagaaaaaccctacaaatgtgaagtatgtggaaaagcctttcaccaatcctcaatccttactaaacataagataattcgtactggagaaaaaccctataaatgtgcacactgtggcaaagcctttaaacagtcctcacaccttactagacataagataattcatactgaagagaaaccctacaaatgtgaacaatgtggcaaggtctttaagcagtccccaacccttactaaacatcagataatttatactggagaggaaccatacaaatgtgaggaatgtggcaaagcttttaacctatcttaacaacttactgaacataagaaaatttacactagagagaaagcctacaaatgtgaagaatgtggcaaagcctttaaccagttttcaacccttattacacataagataattcatagcggagagaaaccccacaaatgtgaagaatgtggcagagcttttaaccagtccgcaaagctcactgaacataagttaattcatactggagaaaaaccctacaaatgtaaagaatgtggaaaagcttttcaccgatactcaatccttagtacacataagaaaattcatactggggagaaaccccacaaatgtggagaatgcggaaaagcctttaactggtcctcaactcttattacacataagataattcacagtggagaaaaaccctacaaatrtgaagaatgtggcaaagcttttaaccagtcctcacaccttatgagacataagaaaattcatagtaaagagaaaccctacaaatgtgaacagtgtggcaaggtctttaagaagtcctcaactcttactgcacataagatcattcatactggagagaaaccttacaaatgtgaggaatgtggcaaaggttttagccaactctcaaaccttactaaacacaagaagattcatactagagagaaaccctacaaatgtgaagaatgtggcatatcttttaaccagttctcacaacttgctatacataagatgattcacacttgaatgaaaccctacaaatgtgaacgatgtggcagttgttttaactagttctcgaactttactatgcataagaaaattcaaactggagagaaactctacaaatgtgaagaatgtggcaaagcttttaaccaagtctcaacacttactatacataagataatttatactggagcaaaaccttggaaattcaaagaatgtggtaaaacttacaatcctcaaaacttcttacacctaaaattcatgcaggagagaaacaccacaaatgtgaaaaatttggtaaattctttaacaagtcttcaaccctttctgcacataatataattcatactggagagaaaccccacaaatatgaagaatgtggtaatgcttttaaccaattctcaaatcttactaaacaaaattaatactgaaaatgttacaaaccagaaaaatgtgaaaatgattttaacaaaaccttcaaatttttctaaacataaaggaaatcatactggtaagaaattataaaaatgtgaagaatgtgacaaagcctttaaatggttgtcacacttgattgtaggtaagataattcatactggcagaaactcccagaagtgtgaagaatatggcaaaactttaattcctataccttattgcacaggaaagcatttatacttcagaaaatgttgtactgatataaagaatgtagaaaagccattaatatgtgcttacatcttattcaacattagagagttagtacttaataaaagcattataaatgcaattactgtcaaaactcagcataaggttttgttttagtgtgtggtttgtttgtttgtttgttttgttttgttttttttaaatgagactacgtaatactctctcccaggctggagtgcactggtgcaatcttggtttaccgtaacctctgccttccaggttcaagcaattctcctgcctgggcctccagaatagctgggactacaggcatgtaccatcacgcccggctaagttttgtattttttagtagagacaggattttactgtgttggccaggctcatctcgaactcctgacttgaaatgatccatacacctctgcctcccaaagtgctggaataacaggtgtgagcactgttcccagccaatataagcctttaaagtaaaaagagagtttttattttgaagacaacattagctacataaagagggttgtagtgcctgccttactgtatcacagatcttattgtcctcattttgtaatccgatgcagttgctcaaacttcgcttcaacatcagggaatttatatcggagaaaacctacaatggtaatacatttcaaaaattttt

SEQ ID NO: 87059 - DNA, 2509 bp, Homo sapiens
agacatactgaaaataaacatttcagatgtaaagaatgtgacaaatcactttgcatgctttcacgcctaactcaacataaaaaaattcatactagagagaatttctacaaatgtgaagagtgtggaaaaacctttaactggtccacaaacctttctaaacctaagaaaattcatactggagaaaaaccctacaaatgtgaagtatgtggaaaagcctttcaccaatcctcaatccttactaaacataagataattcgtactggagaaaaaccctataaatgtgcacactgtggcaaagcctttaaacagtcctcacaccttactagacataagataattcatactgaagagaaaccctacaaatgtgaacaatgtggcaaggtctttaagcagtccccaacccttactaaacatcagataatttatactggagaggaaccatacaaatgtgaggaatgtggcaaagcttttaacctatcttaacaacttactgaacataagaaaatttacactagagagaaagcctacaaatgtgaagaatgtggcaaagcctttaaccagttttcaacccttattacacataagataattcatagcggagagaaaccccacaaatgtgaagaatgtggcagagcttttaaccagtccgcaaagctcactgaacataagttaattcatactggagaaaaaccctacaaatgtaaagaatgtggaaaagcttttcaccgatactcaatccttagtacacataagaaaattcatactggggagaaaccccacaaatgtggagaatgcggaaaagcctttaactggtcctcaactcttattacacataagataattcacagtggagaaaaaccctacaaatgtgaagaatgtggcaaagcttttaaccagtcctcacaccttatgagacataagaaaattcatagtaaagagaaaccytacaaatgtgaacagtgtggcaaggtctttaagaagtcctcaactcttactgcacataagatcattcatactggagagaaaccttacaaatgtgaggaatgtggcaaaggttttagccaactctcaaaccttactaaacacaagaagattcatactagagagaaaccctacaaatgtgaagaatgtggcatatcttttaaccagttctcacaacttgctatacataagatgattcacacttgaatgaaaccctacaaatgtgaacgatgtggcagttgttttaactagttctcgaactttactatgcataagaaaattcaaactggagagaaactctacaaatgtgaagaatgtggcaaagcttttaaccaagtctcaacacttactatacataagataatttatactggagcaaaaccttggaaattcaaagaatgtggtaaaacttacaatcctcaaaacttcttacacctaaaattcatgcaggagagaaacaccacaaatgtgaaaaatttggtaaattctttaacaagtcttcaaccctttctgcacataatataattcatactggagagaaaccccacaaatatgaagaatgtggtaatgcttttaaccaattctcaaatcttactaaacaaaattaatactgaaaatgttacaaaccagaaaaatgtgaaaatgattttaacaaaaccttcaaatttttctaaacataaaggaaatcatactggtaagaaattataaaaatgtgaagaatgtgacaaagcctttaaatggttgtcacacttgattgtaggtaagataattcatactggcagaaactcccagaagtgtgaagaatatggcaaaactttaattcctataccttattgcacaggaaagcatttatacttcagaaaatgttgtactgatataaagaatgtagaaaagccattaatatgtgcttacatcttattcaacattagagagttagtacttaataaaagcattataaatgcaattactgtcaaaactcagcataaggttttgttttagtgtgtggtttgtttgtttgtttgttttgttttgttttttttaaatgagactacgtaatactctctcccaggctggagtgcactggtgcaatcttggtttaccgtaacctctgccttccaggttcaagcaattctcctgcctgggcctccagaatagctgggactacaggcatgtaccatcacgcccggctaagttttgtattttttagtagagacaggattttactgtgttggccaggctcatctcgaactcctgacttgaaatgatccatacacctctgcctcccaaagtgctggaataacaggtgtgagcactgttcccagccaatataagcctttaaagtaaaaagagagtttttattttgaagacaacattagctacataaagagggttgtagtgcctgccttactgtatcacagatcttattgtcctcattttgtaatccgatgcagttgctcaaacttcgcttcaacatcagggaatttatatcggagaaaacctacaatggtaatacatttcaaaaattttt

SEQ ID NO: 87060 - DNA, 718 bp, Homo sapiens
  misc_feature (1)...(718): n = A,T,C or G
taacaggcaaattttaaattccataacttgtttctcatttgggtaacggaagactcatttgtaatgttccttttgccacctgataactcaaaaaactcccctctcctttggctactgctcgcactgttgctgctcttccatctgagccctcccacatttcctacttccccaatcccttacggcttaccttcttttagaacaagggaaatgctcccctcctctgtagtctgcttattttattntatttttgatacagtcttagcttggtcacccaggctggagggcagtggcaagacctcgggctcactgcaacctctgcctctaaagttcaagtgattcttgtgcctcagcctcctgagtagctgggattacagggcatgtgccacaagcctgggctaatttttgtatttttagtaaagatggtgtttcaccatgttggccaggatggtctcaaacttctggccccaagtgatctgcctgcctcagcctcccaaagtgctgggattacaggtgtgagccaccragcccagccctgtaggctgtagtctgctctttttgaaggttctccgatcaatacagtctaagccagaggtgtccaatcttttggcttccctgggccacattggaagaataattgtcttggcccacacataacactaactgtagctgatgagctaaaaacaaaaaacaaaaagaaaagaaaaagaaaaaagtccat

SEQ ID NO: 87061 - DNA, 799 bp, Homo sapiens
gctcctagaaaattaagcagatgccatttgcccaagaaaaagccttcaactcattagcagattccacctatcttttcttctccccttttcactcttctttctcttcttgccttgctgcaacttgcctcaccatgcttgcaaacgctcctttatctctcctctccagccctgcactggctccctcataagggacactttatgctgatgtttacttagaaatgtcagggctacaaaatctggcrtggttgtagaggcctccaagcgaggaagagagactaaagcctcctacttgagggagatttggggaggctcagaccctggtggcaccagcaaaaggaagccaactaaggtaaacttttctctttccagttggtaaatcctccttgtgaaactggtataatagatgctgtataaaaactctgccgaattcttccctctggaatcttcggggcgcctgacataaccctcaccctccgcgcagtggagagcagagaggcctccctctgtgtgctccatcacaactttccactgaatctgggtttgggcggcttgatttgaatggaggattgttcagctgcagccagtgccggcagagctgccagttacaacacttaaaaaatacagtactgcttttaaagtagagtagaagggcgttgaagcgaggatgcaggggttccttgtcaaatacactgcccatctgtcctggctttccttggaggggagggccaaggcttccccaaggcagggaaacagtccccaagctccgcctacaaaccagcatttttggggaggaagcctg

SEQ ID NO: 87062 - DNA, 775 bp, Homo sapiens
gttttaaatataatatttaagaagatttaagtaaatttagaagagttgatgaaatgctttatttcttttttactcttttcttcaaattttaaattcaggggaaagtggcctgtctccaactccagggttaaatcttaattggactaagccaattataaaacccccaagttacgtttcaaatgactgatttaaataagggtatctgacacaattttggccaataaaacatgggaggagttctactaggaacttctgagggaagttccttactgatataaaggcagatgtacatgctgacactggcatatctgcatctaaggcctggaaccacaacacccgtattgtgatcacaaaggggaccaggtgaggaaaaacccaatacactgaggaaacaaaagatgaagacggaagrtctctttgccttgatgacatttttaattaactagctctgggaccgctcaccttacaacattctgttatgtgagactgtaaatattaattactgtttaggctattccagttggaattttttttcatatttagctgaaaaccacaaccacctaactggaaagaaaacaaaaaaaaattataaatttgatcttcaatgggagaaagagaatcatgaattcaggagggattgaaaagctttttaaaactacttatccaaatctgtttagtagcactttagttttgtcaaaagagcactgaatatgttttaaaaatattttacaccgaaatttctcatactcagaagccatcaatgtaaaaagaggct

SEQ ID NO: 87063 - DNA, 751 bp, Homo sapiens
tgtgattagactgagcccatccaaacaatctgggataagatttaggtctttgttttagtctatttgggttgctataacaaaatgccccagacttggtaattacaaataatacaagtttatttctcacatatctggaggcttgaaagttcaagatcaaggtgctggcagatttagtgtgtgccgaagcattgttctcagggtgcttggatccaggatgcttccaagatggcacctcgttgctgcatcctccggagaagaagacaaacgatgtgtcctcacactgtggaagaacagaaaagcaaaaagggacaaatgctgtrtcctcacatggaaaaagaaacggaagtcccaggcagctttcaaaggtctcctttataaaggaactaatcccattggtgaaggcagatccctcatgacctagtcacctcccaaaagccccacctcttaatactatcttcttggggttgaagttctaacatataaattttggagggacatttacattcaaaccacagtagtccttaactttaatcacactcacagagatccttttgccttgtaagtttacttattaataggttttgagattcagggtgtgaatatttttttgtgttggggagggggcattatactgcctactacctcataggaaattacagcataaagggagagaggttaacaggacctatatggttataagatttttatcatttacttgaaattgtaaatattaattttaatagactaataa

SEQ ID NO: 87064 - DNA, 1953 bp, Homo sapiens
gcattcctatacagcattacctttgcattgagaaataaagagtattctgacccttaggttctggctccaatctgccaatctgcccataaatacaagggtttctattagactattatctggaaagtgacttatataaggcgaaaaattaaatgatattgatttgaaatgaaaaaagctcatttatgtgcattttaggaacctaagtgaatcagctaaatatatgcactgagaaaaataagttaccctctaggtagtatcttgtaataagctggaaacataaaacccattaatagtattagaaattagatgcctaatgaattgtgcccattatggaaattttctgtgataacaattccttgaaaaaagctagagactgcccgtatctctgtgacataagagaaaagatacaagtgaaagcatatttcacatgattaaagaaacataggccaagttctggtacttactatgtaaggactatggccactgcatcattcaacacactctctccaaacaagagtgtgtacaggtcagggtcgacgtgcagttcatggaaaatggccagcactgtcactaggaagacacacacaaacatgcaggttagcttggatgcaggcatggagttttccttggctatggtcaccactcaaaaacattaatgaaatgctcatcttctcaaatccaatgactatactaacaccagacctttattcaaaaaatatctgatgcttaagaggcttctcttggctccctactgcttaaagataaaatttgagctccaaagtacaagtaccctacaatctgcaccttgcttaccttctagcctcatctccctctgccccctttgctgcctttctcaagtcacactgaacttgccataatttcccaaacacactgtgtagtttcttaactacctttgcattttgattccttctactatggcagcaattccttcctcgtccacttgctaccatccttgtattccttaaatacacacacacacacacacacacacacacacayacttcttgctaccaaggactcatttttttcattctttaagaacctttcaactgtccccctcccaacccttcaactgcctcagcagaggcctggctcactcctttctggatcccagcatttggatcaaatcactgaacttaccacagaaaggactgggagctccctggaaatggggttcatctttggacacatggtgttagaccatactcagtaactgcttgatgcatgaatgactaaatgaatgagtgaatgaataaatgaataaatgttgttgcaatggcctactcctgtgaagggagacacggttccacctgagtctcattctgtcctgagatcacactcacccgtgaagatggactcaatgatcttaagaacaggacatgaggatttgtttctggttgcctgctgcatggcctgctactatatgccatgttcttgtattgagcctctgtgagtacattagggcagtcaatactcacacactgattatctgtgttcatcaaaactattcaatatcttgatatttaaaacagttaagcagagtgtgaacagcaatcattaggaaaatgatccattgaattaattgccaagggggaaagagggaggttgaaaatgatattgatggcaaatgtctaaggcagaatgggtatttttaattctgtttttcctttcctatttcatgggtggtgaggttagtaactgtgttgtacaaaacagtgctacgaggaaataaaagcaagacagacaagttgaatgtgaaggttttataagtaggattaagaagtttggagcttgttctttcataatagagagtcatgaagggttttaataagagagatgacacaatctgaactttggaaataaagctcaggcagaagagcagagggcagaatggacacatggctggaggctttcccaataatttcaggaaga

SEQ ID NO: 87065 - DNA, 683 bp, Homo sapiens
tctcttgttttgtatactattgctgattatgtcggccagctttgaaaaaattttgtctaatattggaagtttacttctaaattccgaagtgctacagaaagaatggactattgtgaaacatgagctttagctaattaccatatagcaacgtactgttaagtgagaaagcagaaaagaaagctgtatacataccacaatagcaacaaagtaaaccatacctatgaaacaaagtctagaaggaaataaatacaaactataaaagcaatgatggggcactggcatcataagtgagtggtttttcttctgttttccaaagctttcttctaagaagaatatagctggaccytctctttatatccagtgtgagtctcccttttaaataagtgtgtttagatcatttgcatttaatgtgattattgatttccttatgtttaaatctatcagcctgtaatttgtttttatatctctcatctgctctttattctcttttctctttttctgccctttgaattaactgatcatattcaataattctattctctctcctttattgggttattagttataacttttgtgttattttagtgcttgctttcagatacataatttacatcttttacttgtatgtaacagcctatctccaagggatataataccatttcagatccaatataacaaactaa

SEQ ID NO: 87066 - DNA, 683 bp, Homo sapiens
tctcttgttttgtatactattgctgattatgtcggccagctttgaaaaaattttgtctaatattggaagtttacttctaaattccgaagtgctacagaaagaatggactattgtgaaacatgagctttagctaattaccatatagcaacgtactgttaagtgagaaagcagaaaagaaagctgtatacataccacaatagcaacaaagtaaaccatacctatgaaacaaagtctagaaggaaataaatacaaactataaaagcaatgatggggcactggcatcataagtgagtggtttttcttctgttttccaaagctttcttctaagaagaatatagctggaccttctctttatatccagtgtgagtctcccttttaaataagtgtgtttagatcatttgcatttaatgtgattattgatttccttatgtttaaatctatcagcctgtaatttgtttttatatctctcatctgctctttrttctcttttctctttttctgccctttgaattaactgatcatattcaataattctattctctctcctttattgggttattagttataacttttgtgttattttagtgcttgctttcagatacataatttacatcttttacttgtatgtaacagcctatctccaagggatataataccatttcagatccaatataacaaactaa

SEQ ID NO: 87067 - DNA, 655 bp, Homo sapiens
atctgggtgattccaaagcttgcaactctaccagtactcttgatgccttccttcatagaatgttgaatgttatcatcaagaggtgcaatgggacaaaagagaagcctcactttgtgtaatgatctttggcttctaaagcttggctaaaactaaaaaccataaataactcctcatatgcaaaccatatctgagacaacacattagattttctaaaagtaaaagaaaaaaacacattatgaaagccaactgcatcctgaagcaaaaagtatygtgaggattttgccatacaattttgccagactttttttaaccttgttattttgactaatgtatttcctccttgcttctattaccagaattaccgacattgtgctctaaaatttgttttttttttctaacataggaaaataataatatcttaactacttgagaggcttagaattaaactactattatattgcttcattaagtacaggaaaagttcaggggaaaatggaaagtaagaaattttgatggtaataaaaattcacctgcttggaactagacagttttaagaaattctgttttaaaaatacataaacaagagaatttttgaggattgcttaatgagtgttaactcttctgaacctctaagtggagacttcattcacctgaa

SEQ ID NO: 87068 - DNA, 652 bp, Homo sapiens
aactcttgatggtatcatgtcacaacactataacttgtatacctggaaagaccacttatctaatattctagagttgtagggaagagaagcttggattataaagtaggttccagaaagtgatggggaaaagggtcaatctaattttcacttcttgttttgtagacttagcatgttttcttttattttgatttttatgttttctgagatggagtctccctttatcacccaggctagagtacaatggcatgatcttggctcactgcaacctccgcctcccgggttcaagtgattctcctgcctcagcctcccgagaagctgggattacaggtgtacaccaccacgcctggctaatttttgtatttttagttgagatggggtttcaccatgttggccagrctggtctagaactcttgagctgaagatatctgcctgcttcagcctcccaaagtgctgggattacaggcgtgagccactgtgcccagccagcgtagtttacctattaaagcaaaagtttcatcttgtttaagaatatctcaaacctgtagttaatgacccttttcctacaccttagctaagcctttaccaggccatgccaaggttctatcaatctatctttttccagatgatgtaatatatgtttgattgtaacaat

SEQ ID NO: 87069 - DNA, 652 bp, Homo sapiens
aactcttgatggtatcatgtcacaacactataacttgtatacctggaaagaccacttatctaatattctagagttgtagggaagagaagcttggattataaagtaggttccagaaagtgatggggaaaagggtcaatctaattttcacttcttgttttgtagacttagcatgttttcttttattttgatttttatgttttctgagatggagtctccctttatcacccaggctagagtacaatggcatgatcttggctcactgcaacctccgcctcccgggttcaagtgattctcctgcctcagcctcccgagaagctgggattacaggtgtacaccaccacgcctggctaatttttgtatttttagttgagatggggtttcaccatgttggccagactggtctagaactcttgagctgaagatatctgcctgcttcagcctcccaaagtgctgggattacaggcgtgagccactgtgcccagccagcrtagtttacctattaaagcaaaagtttcatcttgtttaagaatatctcaaacctgtagttaatgacccttttcctacaccttagctaagcctttaccaggccatgccaaggttctatcaatctatctttttccagatgatgtaatatatgtttgattgtaacaat

SEQ ID NO: 87070 - DNA, 652 bp, Homo sapiens
aactcttgatggtatcatgtcacaacactataacttgtatacctggaaagaccacttatctaatattctagagttgtagggaagagaagcttggattataaagtaggttccagaaagtgatggggaaaagggtcaatctaattttcacttcttgttttgtagacttagcatgttttcttttattttgatttttatgttttctgagatggagtctccctttatcacccaggctagagtacaatggcatgatcttggctcactgcaacctccgcctcccgggttcaagtgattctcctgcctcagcctcccgagaagctgggattacaggtgtacaccaccacgcctggctaatttttgtatttttagttgagatggggtttcaccatgttggccagactggtctagaactcttgagctgaagatatctgcctgcttcagcctcccaaagtgctgggattacaggcgtgagccactgtgcccagccagcgtagtttacctattaaagcaaaagtttcatcttgtttaagaatatctcaaacctgtagttaatgacccttttcctacaccttagctaagcctttaccaggccatgccaaggttctatcaatctrtctttttccagatgatgtaatatatgtttgattgtaacaat

SEQ ID NO: 87071 - DNA, 602 bp, Homo sapiens
attctgctctcaaaggagcttatacagcaagaaagctaaacagtacaaaaattaagacattcaaagtgggatctacttaagttctgagtatgggattagcattatgaagcagagaagatattttgaagattggagccttaaactcgtagtttcctggcagtaagtcttactgatttggggycagcagaatactggccattgtgacctgttcttaactgtataacagattcacgtgttataacatgtaaagtatggtatatgcgataattatattatacctttttaatattaaatattaccgcaagcaagtggagttgagtgagaattgagaaactgactactgtaggtcctttaaaaaaatttcctggtctttcctttctatgcaggagagaattttgataataagataaaaagtagatactctgtttagacagacctgtgaggaactataagcttggtagcacttgcttaatcaaataaaccatggactatcccaagtttttagttatatgtagagcaggagaatagtaatttcatggaatggagaggtcatcaggaggagacagcaaaagtaaagcgctcggtgcccaacaggggaagta

SEQ ID NO: 87072 - DNA, 574 bp, Homo sapiens
ctggccacagggcccctgacaggggctgtgattgtcgggccaagcaacttcctgctgggagcaggggggtcagatattgcactttcactgcaacagttacatgaaaacttggtccataaaataatcgttgctttatacataatgcctgaaacaacaaaaagctacatcttaaatatgaataaaccctgaaggttccatccctccagacttttttctctgcacaaaataaatagctttcactctgtatagacccacttttgcagaacatttacaygaccctttggctgtacatatctacacacgggaaaaagttaacatcactctgtgcacctccccagcccggtccatgcgtcccaacaccagacccaggtcggccgtagcttctcggggacagagcctggtcgctggacaaaggccgaggccaggcaggctctcccacttccgggaaagccgaggagcagcagaggggccgccggagctggccgttgagcgccacagccaaggtcacgcttggtgctggggagagagggcagacggtcagacccagcgtgcaggacagcatggtccttgttca

SEQ ID NO: 87073 - DNA, 637 bp, Homo sapiens
gtttttttctaattcctgaagaatatatccacgagtgcattgtgtaaaaccaagagcgattctttggagaactatagttcactgtctgagtctcctcactacacagcttgttgatttccacagatcattcagtggtaaaactggaattcccaaagtctctttccctatgctactattaaggccatgcatgagataaaaggccaaagcactggtctagttycaaccttcccataaagaacctaccacaggccgggagcggtggctcatgcctataatcccagcaatttgggaggccgaggccggtacatgacttgagttcaggagtttgagaccagcctggccaacaagatgaaatctcatttctactgaaactacaaaaattatccaggtgtggtggtgggtacctgtaatcccagctacccggaaggctgaggcaggagaatcacttgaacctgggaggtggaggttgcaatgagccaagatcacatcactgcactccaacctgggcaaaagagcgagaatctgtctcaaagaaaaaaaaaaatcctaccacagagctttggaagtttacagacagtaaagagtaaagataatcagccagtataattttttttctttttcatgaaatgtaaaaaca

SEQ ID NO: 87074 - DNA, 637 bp, Homo sapiens
gtttttttctaattcctgaagaatatatccacgagtgcattgtgtaaaaccaagagcgattctttggagaactatagttcactgtctgagtctcctcactacacagcttgttgatttccacagatcattcagtggtaaaactggaattcccaaagtctctttccctatgctactattaaggccatgcatgagataaaaggccaaagcactggtctagttccaaccttcccataaagaacctaccacaggccgggagcggtggctcatgcctataatcccagcaatttgggaggccgaggccggtacatgacttgagttcaggagtttgagaccagcctggccaacaagatgaaatctcatttctactgaaactacaaaaattatccaggtgtggtggtgggtacctgtaatcccagctacccrgaaggctgaggcaggagaatcacttgaacctgggaggtggaggttgcaatgagccaagatcacatcactgcactccaacctgggcaaaagagcgagaatctgtctcaaagaaaaaaaaaaatcctaccacagagctttggaagtttacagacagtaaagagtaaagataatcagccagtataattttttttctttttcatgaaatgtaaaaaca

SEQ ID NO: 87075 - DNA, 784 bp, Homo sapiens
tccagagtggaacagtttcatcccaaaaccatcccccaacccacattcatgggaaaatttgtcttccatgaaaccagtccatgatgccaaaaagtttggggaccactgagttagagcactaaaactatctgctatatgaacaattgatctttttccaaaatggaattgtactatatattttttcaattaaaaatatataccagattcaattaagtctcacaatatttaattatatgaatatacaacattagctattttgtgcatttgaaaagtaaccccatttcaaaatattcatttccattgtccagaacatttatataaatatatatatctttaaatactgatgcttttattttttaattaaaatatattttttcaattaaaaatatataccagacttcaattaagtctcacaatatttaattatatgaatatacaacattagctattttgtgcattagaaaaatattcccttttcaaaatattcgtttccattgtttagaatatatatatatatatatatatatctttaaatactgatgcttttatttgtttgccatgagatatatttgtaggagtaaaaatgttggsttaaaagacatgtaattttgaaaacaacaaagatattaccagattatttctctgaaatgctgtaatatttctgttttgtcaagaatatttaaaactacttttttcctctgcactcctaccaggaaaataagttttcactctttgttttgccaactggatgggtgagcaaattgttactttagttatattttaa

SEQ ID NO: 87076 - DNA, 655 bp, Homo sapiens
acgaatggagtgtgctaattcttgtccccagacattcacttcctagccccgaagcttggattcctacgtgacccaaacccccctgcaatgtgagaattcagcctccagctaactccccggcaagggtctctagttcacgatgatcgttattcttaggccttctattcccatctctctgagcaacaggagctactgtgaagttattcacmtcaactaaagcccacgctacagcaacaggccctttgcctcttgtaagaaactttgtaggtttacttctgttattgcatcactccccttattccagcacccagtggacatcttaaacattaacatctaaggacattattacttcttactgacatctactacacacttaatccagatccgacctgtcctggggtagtcttttttaaaaactttgctcctcaaagtgtggtttgggcaccagcactccctgggagctggctagaaatatggaatctctggccccacctccggcctgctgaatcagaatttacattttaataagattcccagctgattcttggaaagcactagaacacactgtttcttaaatttgatgcaccttggaatcatctggggagcttaaaaaaagagggggacaggcacaatctcggatcaagtcaatcagact

SEQ ID NO: 87077 - DNA, 1159 bp, Homo sapiens
taatcgatctggagggtacaaaatgtgtagtttaaactctgattgaacaaagagaactctcaaagtggacaaaccccttgttggcctcccatgtaagggctgacacttttcatcttcaaccacttaatatatgtggggttcgcaatgattcatctcagaaaatattttctgaggctgggcacagtggctcatgcctgtactcccagcactctgggaggctgaggcgggcggattacttgaggccaggagttcacaacgagcctggccaacatggcgaaaccccgtctctactaaagatacgaaaattagccgggcgtggtggtgggtgcttgtagtcccggctactcaggaggctgaggccggagaattgcttgaacctgggaggcggaggttgcagagagccaagatcgcaccattgcactccagcctgggtgacagagagagactcggtctcargaaagaaaatattttctgagagcctactatgtgccaagcactgagcttcccatacaaagaaaatacactcctgttggtaaacacttatggaatattatgggatccagttacagcagtaaagaacatcagctagggaattaaggaagaaaggagaaaaattgttctggcaggagtcgaagggggaacatctgaaaaagttgcttgaagcaattggtatttgggccctaagcacaataccctttttgtagttagttggttcccttgtttattgtctgcactcccaccccacatcatgcattctcttgtatccctgactcctagcacagtgcctgtatacagcaggcactcagtggacatttgctgtttgaatgaatgatattaactgatttggcaacccggtgagtaggtattgctgtgatttccattttgcacagaagaactccaagcctcagagaggtgaagtagttggcccaaggtcacacagctggcaagaagcaaaactaaattagacccagatgtgcagagatcaaagccttgctcttgatgccaagcttttagaaggcaactctgatggctgaggcagagaaagtcatgtgggtaaccccagtcagaaaaggagaagaaagtggtcgttttcccaagtcttgtcttcagcccctgagtgggagagatctggccctctgagacagggagcagaggtgaa

SEQ ID NO: 87078 - DNA, 1159 bp, Homo sapiens
taatcgatctggagggtacaaaatgtgtagtttaaactctgattgaacaaagagaactctcaaagtggacaaaccccttgttggcctcccatgtaagggctgacacttttcatcttcaaccacttaatatatgtggggttcgcaatgattcatctcagaaaatattttctgaggctgggcacagtggctcatgcctgtactcccagcactctgggaggctgaggcgggcggattacttgaggccaggagttcacaacgagcctggccaacatggcgaaaccccgtctctactaaagatacgaaaattagccgggcgtggtggtgggtgcttgtagtcccggctactcaggaggctgaggccggagaattgcttgaacctgggaggcggaggttgcagagagccaagatcgcaccattgcactccagcctgggtgacagagagagactcggtctcaggaaagaaaatattttctgagagcctactatgtgccaagcactgagcttcccatacaaagaaaatacactcctgttggtaaacacttatggaatattatgggatccagttacagcagtaaagaacatcagctagggaattaaggaagaaaggagaaaaattgttctggcaggagtcgaagggggaacatctgaaaaagttgcttgaagcaattggtatttgggccctaagcacaataccctttttgtagttagttggttcccttgtttattgtctgcactcccaccccacatcatgcattctcttgtatccctgactcctagcacagtgcctgtatacagcaggcactcagtggacatttgctgtttgaatgaatgatattaactgatttggcaacccggtgagtaggtattgctgtgatttccattttgcacagaagaactccaagcctcagagaggtgaagtagttggcccaaggtcacacagctggcaagaagcaaaactaaattagacccagatgtgcagagatcaaagccttgctcttgatgccaagcttttagaaggcaactctgatggctgaggcagagaaagtcatgtgggtaaccccagtcagaaaaggagaagaaagtggtcrttttcccaagtcttgtcttcagcccctgagtgggagagatctggccctctgagacagggagcagaggtgaa

SEQ ID NO: 87079 - DNA, 595 bp, Homo sapiens
agaggggggaggaaagtgcagctcgcgcgaccagcctcctcttccaacgtcacattgtgcgagagacaaaacccgggcgcgccggagctcacacgcgcacgcacacacatccgaccccgtcgcctcttctctcctggtgctgcccagaaagccagccctcccttcccttcttggggcgcagaggctcagccagctcagagcgcagcctggagccgacccagaagggcgaagaaagcccagcggacgagcctcctttctctgctgcctgcccgggctggggcgtcccatcccccgccctgaactccgatctctcccaccccacccctctctgggtttcacccggacagagccsggagctgggtgtcgcccccgtttggaatccacgtttcagcactttggacagcgccccggacgccccggcccctttgggttggcgatggcgagcgttcagcaaggcgagaagcagctttttgagaagttctggcgaggaaccttcaaagcggtggccaccccccgtcccgagagcatcattgtcgccagtatcacggcccgcaagccgctgccaaggtaatgatctccttcttagaagggggga

SEQ ID NO: 87080 - DNA, 595 bp, Homo sapiens
agaggggggaggaaagtgcagctcgcgcgaccagcctcctcttccaacgtcacattgtgcgagagacaaaacccgggcgcgccggagctcacacgcgcacgcacacacatccgaccccgtcgcctcttctctcctggtgctgcccagaaagccagccctcccttcccttcttggggcgcagaggctcagccagctcagagcgcagcctggagccgacccagaagggcgaagaaagcccagcggacgagcctcctttctctgctgcctgcccgggctggggcgtcccatcccccgccctgaactccgatctctcccaccccacccctctctgggtttcacccggacagagccgggagctgggtgtcgcccccgtttggaatycacgtttcagcactttggacagcgccccggacgccccggcccctttgggttggcgatggcgagcgttcagcaaggcgagaagcagctttttgagaagttctggcgaggaaccttcaaagcggtggccaccccccgtcccgagagcatcattgtcgccagtatcacggcccgcaagccgctgccaaggtaatgatctccttcttagaagggggga

SEQ ID NO: 87081 - DNA, 582 bp, Homo sapiens
tttctaatatctaacacttgttcatttgattttatttgttaagcaaaagtaattcatgctcattgagttttttaaatctctcttgtcaaggtaaaatgtttctatttctccctttatttccataccctaaaggaattgttataaacctataagtggaaatgcgaagttaagttatattttcttttttaaaacaactttttaayatgtttctctttaacccaattcttgatgaaagctcaattagtaatacttagttattaacattaatgtacttgtatggtcttttctgacatatcattttattttgtcttgttatgtgaaccgagattttcagaaacgattacttattttgatgttttctttccaagaaatatggccatttagcccctagagtggatcagctccacccattagttttcttaatctcttccaggaattcctgtgagatagcttctagtaaatagcagttactaggacatgcactgcttcaactgagttacgtaatgcagaactcagggaaatttttattcacatcactgtttagtggcatattttcacttgaagagataagaagaagacaaa

SEQ ID NO: 87082 - DNA, 582 bp, Homo sapiens
tttctaatatctaacacttgttcatttgattttatttgttaagcaaaagtaattcatgctcattgagttttttaaatctctcttgtcaaggtaaaatgtttctatttctccctttatttccataccctaaaggaattgttataaacctataagtggaaatgcgaagttaagttatattttcttttttaaaacaactttttaatatgyttctctttaacccaattcttgatgaaagctcaattagtaatacttagttattaacattaatgtacttgtatggtcttttctgacatatcattttattttgtcttgttatgtgaaccgagattttcagaaacgattacttattttgatgttttctttccaagaaatatggccatttagcccctagagtggatcagctccacccattagttttcttaatctcttccaggaattcctgtgagatagcttctagtaaatagcagttactaggacatgcactgcttcaactgagttacgtaatgcagaactcagggaaatttttattcacatcactgtttagtggcatattttcacttgaagagataagaagaagacaaa

SEQ ID NO: 87083 - DNA, 830 bp, Homo sapiens
  misc_feature (1)...(830): n = A,T,C or G
annnnnnnnnnnnnnnnnnnnnnnnnnnnnnnnnnnnnnnnnnnnnnnnnnnnnnnnnnnnnnnnnnnnnnnnnnnnnnnnnnnnnnnnnnnnnnnnnnnntgggagtccttctggccacttctgcagcccccaggctaagtctgggaatttcagactattacctttactgattactggtccgaggataaatatatccacaattgtgtctctcggagtttaaccccaagacaaaatcattccctgctgcttgcttcctaatccagatcagcttcttataacatgctgtcacatatgtgatctggtcttctgacattcgcatctggatgctgggtatgtccatcttggctccagtcacctaagatctaacacctttggtactggcagccatagtctcaaatgtcatatgcctgcagggtcaactttcatttacctgtttgctggtttatttttgtttrcatggtcattgtagaactctgttaatttacacgagtccagttgtttcttacaagtatgtgataactgggtttggttatgtccacaagtatgcttgtatcatacatatttttttctttttctcagtgtcctttcctggttttggtatcaagattataaaataaattagtagtgatttttttaaataataaaaaagattggaagagtgctctttaaatatttagcaaaaattttctgctagttactatgtacaactgattacatgtctttatgttcatatgtttttcagattttctgtttcttcttgaatcgcatttatgttttctccacgaatttatctctttcccataagacttcaagtatattggtattaag

SEQ ID NO: 87084 - DNA, 1215 bp, Homo sapiens
gcagtacatcagttgaaataatttacatttattatgattactgatcataataagtagatttcttcaagtatgaatttaatgactccaaagacttagayttacttattgctttttgttcattgaatggtttagtcaacgtcgtactagaaaaaaattcaaacaaaatatatacagtgttatacagaactaggtttaaatgtcaggctttcattcacaaaatgggccgagttttatgttattcatcagtaaaatattgaacacacttattttgtttgcaattattttggttatacaattataaataattttagcatttattcatctgtgtacagaatcctggccttccaaatgcactgctgtttatgtaataaatgcaaaagtaggatattaataaatgtttgcttttatttcaatcaatcctcagactcttttgcttcccctgttgcttacctccttgattttatatcctcactggttctctgaaacgtttatactctacagtggcaacaagagaccggaaaagtaattcaatgacatactgagagctgggttcctaggaatggcaaaaggagggctcagagacagaacaaacttgttcagtttagaagattcaattataacgtattctttcagcggattaaaatggggtgttcctgacttttaaagtaaatctaaactatcaaatttagttactcaacagcttgagtatgctcaatgtgtatgaaacaggaaaataaattttatttaatatctcaacattggtttgttttacaaaagtaaaattatatttttaaaatattttaaatttattttcaacaccaaatactagagataaaaacaaatccatttgattctaccaatattaagtaatcttaaactcatttgaatccagattctttagattcgttttaaactaacaataaattggcacaagcttaaactggcaataaataagtacaagcaggtgacctaggaaatattctgatattatctccagtaatccttgaattataaacatattatctactgattgataaataatgggttatatccttcatgtaatagttgtctccatccacttcctccctatgtcttcagaagaatttagaattagaccaagtgcagattttttttttcagctgtagctcacaggaggagtttctgttccttccctgaattctaagataatggagtaaattaaccagcaatgtgatg

SEQ ID NO: 87085 - DNA, 1215 bp, Homo sapiens
gcagtacatcagttgaaataatttacatttattatgattactgatcataataagtagatttcttcaagtatgaatttaatgactccaaagacttagacttacttattgctttttgttcattgaatggtttagtcaacgtcgtactagaaaaaaattcaaacaaaatatatacagtgttatacagaactaggtttaaatgtcaggctttcattcacaaaatgggccgagttttatgttattcatcagtaaaatattgaacacacttattttgtttgcaattattttggttatacaattataaataattttagcatttattcatctgtgtacagaatcctggccttccaaatgcactgctgtttatgtaataaatgcaaaagtaggatattaataaatgtttgcttttatttcaatcaatcctcagactcttttgcttcccctgttgcttacctccttgattttatatcctcactggttctctgaaacgtttatactctacagtrgcaacaagagaccggaaaagtaattcaatgacatactgagagctgggttcctaggaatggcaaaaggagggctcagagacagaacaaacttgttcagtttagaagattcaattataacgtattctttcagcggattaaaatggggtgttcctgacttttaaagtaaatctaaactatcaaatttagttactcaacagcttgagtatgctcaatgtgtatgaaacaggaaaataaattttatttaatatctcaacattggtttgttttacaaaagtaaaattatatttttaaaatattttaaatttattttcaacaccaaatactagagataaaaacaaatccatttgattctaccaatattaagtaatcttaaactcatttgaatccagattctttagattcgttttaaactaacaataaattggcacaagcttaaactggcaataaataagtacaagcaggtgacctaggaaatattctgatattatctccagtaatccttgaattataaacatattatctactgattgataaataatgggttatatccttcatgtaatagttgtctccatccacttcctccctatgtcttcagaagaatttagaattagaccaagtgcagattttttttttcagctgtagctcacaggaggagtttctgttccttccctgaattctaagataatggagtaaattaaccagcaatgtgatg

SEQ ID NO: 87086 - DNA, 1215 bp, Homo sapiens
gcagtacatcagttgaaataatttacatttattatgattactgatcataataagtagatttcttcaagtatgaatttaatgactccaaagacttagacttacttattgctttttgttcattgaatggtttagtcaacgtcgtactagaaaaaaattcaaacaaaatatatacagtgttatacagaactaggtttaaatgtcaggctttcattcacaaaatgggccgagttttatgttattcatcagtaaaatattgaacacacttattttgtttgcaattattttggttatacaattataaataattttagcatttattcatctgtgtacagaatcctggccttccaaatgcactgctgtttatgtaataaatgcaaaagtaggatattaataaatgtttgcttttatttcaatcaatcctcagactcttttgcttcccctgttgcttacctccttgattttatatcctcactggttctctgaaacgtttatactctacagtggcaacaagagaccggaaaagtaattcaatgacatactgagagctgggttcctaggaatggcaaaaggagggctcagagacagaacaaacttgttcagtttagaagattcaattataacgtattctttcagcggattaaaatggggtgttcctgacttttaaagtaaatctaaactatcaaatttagttactcaacagcttgagtatgctcaatgtgtatgaaacaggaaaataaattttatttaatatctcaacattggtttgttttacaaaagtaaaattatatttttaaaatattttaaatttattttcaacaccaaatactagagataaaaacaaatccatttgattctaccaatattaagtaatcttaaactcatttgaatccagattctttagattsgttttaaactaacaataaattggcacaagcttaaactggcaataaataagtacaagcaggtgacctaggaaatattctgatattatctccagtaatccttgaattataaacatattatctactgattgataaataatgggttatatccttcatgtaatagttgtctccatccacttcctccctatgtcttcagaagaatttagaattagaccaagtgcagattttttttttcagctgtagctcacaggaggagtttctgttccttccctgaattctaagataatggagtaaattaaccagcaatgtgatg

SEQ ID NO: 87087 - DNA, 1279 bp, Homo sapiens
cacacccgaccaatcaggtagtaaagagagctcactaaaatgctaattaggcaaaaacaggaggcaaagaaatagccaatcatctattgcctgagagcacagtgggaaggataatgactgggatataaacccaggcaytcaagccagcaatggctaccctctttgggtcccctccctttgtatgggagctctgttttcactccattaaatcttgcaactgccaaaaaaaaaaaaaaaaaaagaaatctgggctacagagataaatctgctgatcatggtaaaggaaactttaagaaactcaacacaaattatacagataattttatatggggaggtggttaacgatggaagccaggagtaatgtaagaagtggcatgcagagaggtagaaggaggtctaagtggtctcgtgtaagggaagaaaataaaagagttcaagaatgacaaaagggccaacagtgctgcctagaggtcactcagtctgaaaagggtccatataagtgactactacagtcatgtgactttggcaagaaccaaaactcgctgaagatcactctgataaaaavtcttttccaacctgagggctttgcatctgtgagtccctctgcctgatcttgcctcctctggaccttgctcagttgacttcttatcttttaagtgttagcctaaattcttgtttcttctgcaaagccttctttggccccccaaactaaattatccactttttgatctctcttatattattctgttcatttgctctgtagcactttccatactttgtcattatatagcaagtaacttacttttcaaactcctgttaaactcccagttctgagctcagtggctggtacataatagcagctcaatgaaactgtctcataaagtctcataaactggcactcatgtttatgacaagccgaggctgaatgggatgcagaatgatggtgtaggtattacaggcaagggagtaacttggaagggcattaaggaaaaccagaattttgactttcagcttttgttttgagctggctaaaaggacvtgattcattcaagttcctcctgctagaatgaactctgcttccagggcacaggcaatcagcaggggcatttagatgtgggctcttcctgccttagattgtatcctggctctatcactgtcaagttttcttcatctataagatggagatcataatggcacctaccccctacacttgtggtgagtattaaatgagttactgtgtataaagtgcttaaagagggcctggcacatagaaagctct

SEQ ID NO: 87088 - DNA, 609 bp, Homo sapiens
atcctgaaggtcaagtgtttccagagaaaaagaggaatagagattaggaaacaccttctaatgtgggagctcgggcagggagagagtctacaactgtggtagctctatttaatatgataatgcatttctttttctttgtgccctttgcgcctttgctgtttattaactgcaccaactaccaggaaaagagaagagggtgtgggggaccaagatttaaaccattcaaacttcatattgaaagtttggttacagttgtattagaagaagggataattaacttgaggggtctgaggtctttctctttttctkgaaacagggtttcactttgttgccgaggctggagtgcagtggcatgagcagggatcactggagcctccacctcccaggctcaggcgatcctcctgtctcagtccccccaagtagccaggactacaggcacgtaccaccatacccaagctaatttttgtatttttagtagagacagggttttgccatgtgtccaggctggtcttgaactcctgagctcaagggatctgcccacctcagccgcccaaagtgtcgggactacaggtgtgagccaccacacccaactgaagtctttctcttcta

SEQ ID NO: 87089 - DNA, 609 bp, Homo sapiens
atcctgaaggtcaagtgtttccagagaaaaagaggaatagagattaggaaacaccttctaatgtgggagctcgggcagggagagagtctacaactgtggtagctctatttaatatgataatgcatttctttttctttgtgccctttgcgcctttgctgtttattaactgcaccaactaccaggaaaagagaagagggtgtgggggaccaagatttaaaccattcaaacttcatattgaaagtttggttacagttgtattagaagaagggataattaacttgaggggtctgaggtctttctctttttctggaaacagggtttcactttgttgccgwggctggagtgcagtggcatgagcagggatcactggagcctccacctcccaggctcaggcgatcctcctgtctcagtccccccaagtagccaggactacaggcacgtaccaccatacccaagctaatttttgtatttttagtagagacagggttttgccatgtgtccaggctggtcttgaactcctgagctcaagggatctgcccacctcagccgcccaaagtgtcgggactacaggtgtgagccaccacacccaactgaagtctttctcttcta

SEQ ID NO: 87090 - DNA, 1335 bp, Homo sapiens
gatcactcccagctaatttttgtatttttagtagagaaggggtttcgttatgttggccaggctggtctggaactcctggcctcaagtgatccacccacctcagtctcccaaagtggtggggttacaggcatgagcattgtaccyggccacaagtgagatttaagaggacaccagctgtgaggatcagctgtgaggtaaccaggaaagattttgtctctgataaaatgaaacttcagggaggggcagcctctttctccttccataggacattgactccatgtgctgcccggaactctggcggccaccttgtaaccatgaggaaaactgaatgcaacaagccaccatggcagaaaacaaacctgctatttgatggcatttctgggtcatcctaaaagtaccctatctcaagattttttatcagtgaaattagaaattttccttttcttttaagccatttgaagctgaattttgtgatacctgcagccaaaagcatcctaatacaatttgctacacaagtttgtagaaggcagccctcccctcaggcctccccactgttgccagttcatctgttaaatagacaagctggattcccaagggccatgcacagagtctccttgctatttttcctcagctctattcatgaaaataaaattaattttctagtccatgaattaaacattgctgctgccggctgaaagattttaataacagccttttgttgacaagagaagcaggatcccgacatgttctaaaataagctacaaggagtcagaagggtaggaggggaagcaaaggggaggaggccatcaaaaggaaaaactgcaaaatcccactcaagtccagcttctctaaatggtcagcctgtggttgaacttgtgtgcagatgaatcacctggagatgtcgttaaaatgcagatagtgattccgtggggtcggtgaggtctgagatttgttttctctaacaagctcccaggtgatgctgatgctggcggtctgaggaccacactttgagtagcaaggcccttaaggctcaggcaactgcagctgtaagactgtctgcatgtttgttctaaagctctggaatgtctccagagagaaacctgcagcctgccaggacccacagagccctccaacctttctagtaagcagcaggccctgcagtagccccaacacctgcaaaaatgggcagcgagatatgaaggagggcagatccatcttccctggaatgtgggctcgtgggaatcagctgctaaagaaagaatgagggggaatgggaacaacgcccctctccacgacatgtaccttttagaagcagtggaaagagtacaggtcaaa

SEQ ID NO: 87091 - DNA, 1335 bp, Homo sapiens
gatcactcccagctaatttttgtatttttagtagagaaggggtttcgttatgttggccaggctggtctggaactcctggcctcaagtgatccacccacctcagtctcccaaagtggtggggttacaggcatgagcattgtacctggccacaagtgagatttaagaggacaccagctgtgaggatcagctgtgaggtaaccaggaaagattttgtctctgataaaatgaaacttcagggaggggcagcctctttctccttccataggacattgactccatgtgctgcccggaactctggcggccaccttgtaaccatgaggaaaactgaatgcaacaagccaccatggcagaaaacaaacctgctatttgatggcatttctgggtcatcctaaaagtrccctatctcaagattttttatcagtgaaattagaaattttccttttcttttaagccatttgaagctgaattttgtgatacctgcagccaaaagcatcctaatacaatttgctacacaagtttgtagaaggcagccctcccctcaggcctccccactgttgccagttcatctgttaaatagacaagctggattcccaagggccatgcacagagtctccttgctatttttcctcagctctattcatgaaaataaaattaattttctagtccatgaattaaacattgctgctgccggctgaaagattttaataacagccttttgttgacaagagaagcaggatcccgacatgttctaaaataagctacaaggagtcagaagggtaggaggggaagcaaaggggaggaggccatcaaaaggaaaaactgcaaaatcccactcaagtccagcttctctaaatggtcagcctgtggttgaacttgtgtgcagatgaatcacctggagatgtcgttaaaatgcagatagtgattccgtggggtcggtgaggtctgagatttgttttctctaacaagctcccaggtgatgctgatgctggcggtctgaggaccacactttgagtagcaaggcccttaaggctcaggcaactgcagctgtaagactgtctgcatgtttgttctaaagctctggaatgtctccagagagaaacctgcagcctgccaggacccacagagccctccaacctttctagtaagcagcaggccctgcagtagccccaacacctgcaaaaatgggcagcgagatatgaaggagggcagatccatcttccctggaatgtgggctcgtgggaatcagctgctaaagaaagaatgagggggaatgggaacaacgcccctctccacgacatgtaccttttagaagcagtggaaagagtacaggtcaaa

SEQ ID NO: 87092 - DNA, 1335 bp, Homo sapiens
gatcactcccagctaatttttgtatttttagtagagaaggggtttcgttatgttggccaggctggtctggaactcctggcctcaagtgatccacccacctcagtctcccaaagtggtggggttacaggcatgagcattgtacctggccacaagtgagatttaagaggacaccagctgtgaggatcagctgtgaggtaaccaggaaagattttgtctctgataaaatgaaacttcagggaggggcagcctctttctccttccataggacattgactccatgtgctgcccggaactctggcggccaccttgtaaccatgaggaaaactgaatgcaacaagccaccatggcagaaaacaaacctgctatttgatggcatttctgggtcatcctaaaagtaccctatctcaagattttttatcagtgaaattagaaattttccttttcttttaagccatttgaagctgaattttgtgatacctgcagccaaaagcaycctaatacaatttgctacacaagtttgtagaaggcagccctcccctcaggcctccccactgttgccagttcatctgttaaatagacaagctggattcccaagggccatgcacagagtctccttgctatttttcctcagctctattcatgaaaataaaattaattttctagtccatgaattaaacattgctgctgccggctgaaagattttaataacagccttttgttgacaagagaagcaggatcccgacatgttctaaaataagctacaaggagtcagaagggtaggaggggaagcaaaggggaggaggccatcaaaaggaaaaactgcaaaatcccactcaagtccagcttctctaaatggtcagcctgtggttgaacttgtgtgcagatgaatcacctggagatgtcgttaaaatgcagatagtgattccgtggggtcggtgaggtctgagatttgttttctctaacaagctcccaggtgatgctgatgctggcggtctgaggaccacactttgagtagcaaggcccttaaggctcaggcaactgcagctgtaagactgtctgcatgtttgttctaaagctctggaatgtctccagagagaaacctgcagcctgccaggacccacagagccctccaacctttctagtaagcagcaggccctgcagtagccccaacacctgcaaaaatgggcagcgagatatgaaggagggcagatccatcttccctggaatgtgggctcgtgggaatcagctgctaaagaaagaatgagggggaatgggaacaacgcccctctccacgacatgtaccttttagaagcagtggaaagagtacaggtcaaa

SEQ ID NO: 87093 - DNA, 1335 bp, Homo sapiens
gatcactcccagctaatttttgtatttttagtagagaaggggtttcgttatgttggccaggctggtctggaactcctggcctcaagtgatccacccacctcagtctcccaaagtggtggggttacaggcatgagcattgtacctggccacaagtgagatttaagaggacaccagctgtgaggatcagctgtgaggtaaccaggaaagattttgtctctgataaaatgaaacttcagggaggggcagcctctttctccttccataggacattgactccatgtgctgcccggaactctggcggccaccttgtaaccatgaggaaaactgaatgcaacaagccaccatggcagaaaacaaacctgctatttgatggcatttctgggtcatcctaaaagtaccctatctcaagattttttatcagtgaaattagaaattttccttttcttttaagccatttgaagctgaattttgtgatacctgcagccaaaagcatcctaatacaatttgctacacaagtttgtagaaggcagccctcccctcaggcctccccactgttgccagttcatctgttaaatagacaagctggattcccaagggccatgcacagagtctccttgctatttttcctcagctctattcatgaaaataaaattaattttctagtccatgaattaaacattgctgctgccggctgaaagattttaayaacagccttttgttgacaagagaagcaggatcccgacatgttctaaaataagctacaaggagtcagaagggtaggaggggaagcaaaggggaggaggccatcaaaaggaaaaactgcaaaatcccactcaagtccagcttctctaaatggtcagcctgtggttgaacttgtgtgcagatgaatcacctggagatgtcgttaaaatgcagatagtgattccgtggggtcggtgaggtctgagatttgttttctctaacaagctcccaggtgatgctgatgctggcggtctgaggaccacactttgagtagcaaggcccttaaggctcaggcaactgcagctgtaagactgtctgcatgtttgttctaaagctctggaatgtctccagagagaaacctgcagcctgccaggacccacagagccctccaacctttctagtaagcagcaggccctgcagtagccccaacacctgcaaaaatgggcagcgagatatgaaggagggcagatccatcttccctggaatgtgggctcgtgggaatcagctgctaaagaaagaatgagggggaatgggaacaacgcccctctccacgacatgtaccttttagaagcagtggaaagagtacaggtcaaa

SEQ ID NO: 87094 - DNA, 756 bp, Homo sapiens
acaggactgtgctgcctggctgagaccgagaccaggaaaatgagcacatttgagtgagatcagacatttcccctccctcatctcaatccaaaacgactctgtagtaacacatctgatgggcagtcagagaaaggggtcagatttccagcagttgacagttgatagcagagctgctgtcctcctggrggcagtagtgagaagagctggtctcttttctgctgcaaaagacagcttgaatgtctcaaacagtaggagctcctccccagcctgtgccagcagtatgattcttggaattgttctagaggctttgactggagcctgttctttaaggcttttcaacaatttgtaaggaatttaatatcttctagttaatcactttatgcttcatggatctgacatttgcaacagggaatatacgcagtccgcagtgacatcattcacagcctccttttttcttgctaaatatataatgctttccaggtggacctgccagaggaagacaatgtgaacaacaatccatgtcaccaaaaatgcaagacaaataagctcgggaaagccactgggttctcacctagttgcactgtccccctgagtcttttttttttttttttttggtcaccttagtcaaaatcatgaacaaagttgccaactttgaatggagccctttgcaacggtagccttggaatctattcaactatacatgtccaaggcatttatttaagacctttagagcctgcttgctcgatggaaatccag

SEQ ID NO: 87095 - DNA, 705 bp, Homo sapiens
cccagctgctcgggaggctgaggcaggagaattgcttgaacccaggagacagaggttgcagtgggccgacatgatgccattgcactccagcctcggcgacagagtgagactccgtcacaaaaaaaaaaaaaaaagtcatgtgtcaaatgtctgatcagtcagacacagcacgatgaagtagatgtaggagagatttcacactcagtatgagtaccctgatatttgaggaaactaaagatgccagaacaccctagcagaaacctstctccagtgagtcatggcattgtgtgatctacctccacagagaacaggcagaacttaggcttgcttctaacccatatggtatggcagaggttatgagatgtctttccaatgattgtattgtattctgtaagcctctgtcatagcagactggaaagagacactctctgaaaccttctgctggccttgaacaaacaaccagccatgtgggcattgcctgtgtgagcatcacatggcagggaattgtccacagcctctgggacctgagagcagccttgagccaagagccagtaagaagctgaagccctgagtcacagaggtgctaaggcatgggctctgcaactacctgaaagagctctaaaatatctctcttctcagggagtctcaggtgagaatgaagaacagtctacactgtggcacagtcttgtgaaatccaatgggcag

SEQ ID NO: 87096 - DNA, 765 bp, Homo sapiens
tgcatttctattcgcatctattctctccaggttgcctacatttcccaattacctcttccctagaaaggaaacataaacacctggatcycattgagttatctgggtaatcaccttgctatgatatcctgctgcactttaagtgaattttgtttgccttttctcttattaatcttccttttgtcagtttattttcagcaaacatttagaggacaaatggagctttcttcctttcttccaatataagcaatttcccttaaaattcaggcagcttataaagcagcaggaaggtttgtgcagaggctacagcactgtgatttggctctcctagtcaggcatcagtaaaattttatggagtcctaggctgcagcccactgatgctgatgtagttggatccacttcccctcccacggaaccaggccgggacatttttgggcacattagagatatgagatataacgagtgcaaatccctgtccagtttcatctggaaccaactgatttctccatgtacatgggcagttgcttgataaaagattgagtgcctctttccaaaagatgttaacagggatcttggtgtctgggtcaggatgatgtccctgataaaaagtaaaagaagaaagtgtcacctatggtgcgtggcagggacatgctccatgcgatgatcaccctcactaagagagatgaatgttgggaaataatacttaatggcagaaaagaaggtagactatgaaggtgcccaaaacaggaataaggtgcagcccattta

SEQ ID NO: 87097 - DNA, 765 bp, Homo sapiens
tgcatttctattcgcatctattctctccaggttgcctacatttcccaattacctcttccctagaaaggaaacataaacacctggatcccattgagttatctgggtaatcaccttgctatgatatcctgctgcactttaagtgaattttgtttgccttttctcttattaatcttccttttgtcagtttattttcagcaaacatttagaggacaaatggagctttcttcctttcttccaatataagcaatttcccttaaaattcaggcagcttataaagcagcaggaaggtttgtgcagaggctacagcactgtgatttggctctcctagtcaggcatcagtaaaattttatggagtcctaggctgcagcccactgatgctgatgtagttggatccacttcccctcccacggaaccaggccgggacatttttgggcacattagagatatgagatataacgagtgcaaatccctgtccagtttcatctggaaccaactgatttctccatgtacmtgggcagttgcttgataaaagattgagtgcctctttccaaaagatgttaacagggatcttggtgtctgggtcaggatgatgtccctgataaaaagtaaaagaagaaagtgtcacctatggtgcgtggcagggacatgctccatgcgatgatcaccctcactaagagagatgaatgttgggaaataatacttaatggcagaaaagaaggtagactatgaaggtgcccaaaacaggaataaggtgcagcccattta

SEQ ID NO: 87098 - DNA, 746 bp, Homo sapiens
tgggctacataactgcctcagttgggyctgatcatcctgcctctggtagtagttttcattggcccagtgaaatctattctggctctggctcaatgatgttgctttgacattgtgttcgtcaaggggcttcatcagtcaaacaagacacacctctgccaccagttcagggttattagtaggcatataaaatggaatggctttctaatgggggtgtctgggttgggggtgactccagtacagtcctctaatggttctcgactcagttagttctccccactctctttcttacacttctcaagaacaactgtaggatgtgctggaaatgtaacattctgaaatagggagagactggtcagaagagcctgcccctgttccagcttctcctagtactgtcctccagtactttagtcctccagtactttagctccatgtgtcctgtgacaccaggattaaaaacccagagcatcttctttctggggttgctgagttatggtccaagtggggtacacacggtcaaggttccatcagacccacatgcctgtgcctaaggggacagacccacaatacatcctaggcttctgcagtcccttgctggccacctataaatactacaccagattcttgtaacttgttgtgtatgattgttctgtctccctggactctgataagttggtaaccagggcacagtgaacctgcttcagagtagtcactgtcatagagacagaacttgaatgaaggttgccagg

SEQ ID NO: 87099 - DNA, 774 bp, Homo sapiens
ataacatacataatcagtcacaaagcacattaatctttgggtctaaagttaatgccaagaacacagcatttaccacagcggatgtattcaataactaagtggacagaatgcatcaacttaagaaygtcagctagcttctgtccttagccccttcagtgaaggaacatgggctcataatggagtaactatggcatcagggttagagaatatacataaacccaacaagatgggccgcctttcacccaggcttatctacctactgccactgatgaaagtctaacctgccatcagtaaagaccaatggtcacccttgcatatggctatattcttgaaaaataccagctacccacttgatgtcaggtgaattacatcagatcctttatactctggaagcaacagcaatttcatcttaccacaattaaacctacctctccttccttgctcacaattccttttccagcaccattttttcataagatatataacatagtatttgcagaaaaataaatctgaaagaatatatgataaaatatttgcaatgattattactatgagcttgaactttcttctatatcactgatggatttatagtttgtataagaaacaaacattacttttgtaagcagaaaaaataataaaagtttttattcattgaaaaaaaaaagatagcagaatatctgatccataggcatgatatcctgaacaatattggttttgatcaagagacccatcttatgacaacagaaatatgttaaagagcacatgaccaaggat

SEQ ID NO: 87100 - DNA, 774 bp, Homo sapiens
ataacatacataatcagtcacaaagcacattaatctttgggtctaaagttaatgccaagaacacagcatttaccacagcggatgtattcaataactaagtggacagaatgcatcaacttaagaacgtcagctagcttctgtccttagccccttcagtgaaggaacatgggctcataatggagtaactatggcatcagggttagagaatatacataaacccaacaagatgggccgcctttcacccaggcttatctacctactgccactgatgaaagtctaacctgccatcagtaaagaccaatggtcacccttgcatatggctataytcttgaaaaataccagctacccacttgatgtcaggtgaattacatcagatcctttatactctggaagcaacagcaatttcatcttaccacaattaaacctacctctccttccttgctcacaattccttttccagcaccattttttcataagatatataacatagtatttgcagaaaaataaatctgaaagaatatatgataaaatatttgcaatgattattactatgagcttgaactttcttctatatcactgatggatttatagtttgtataagaaacaaacattacttttgtaagcagaaaaaataataaaagtttttattcattgaaaaaaaaaagatagcagaatatctgatccataggcatgatatcctgaacaatattggttttgatcaagagacccatcttatgacaacagaaatatgttaaagagcacatgaccaaggat

SEQ ID NO: 87101 - DNA, 615 bp, Homo sapiens
tggatgactggttggacatttcaagtcttatctattacatattacaaagagtggtttttttttttaaaaaaaccctccattacagggttttaattgtartcaactcaatgttctcccagcgttagcctaaatttccctaaaagcaaggccagagacaaagaatttcaggcaatttgtttatttagaaagagatcccagagactagaaatacagattgaggagtaaattagagaaaaagggaaagcacatacaaaaaaatcatgttttggctactgatacatataactttgtgcttgtttttgagggatcatataaaaacttctaagaaatgcatttcaaaggaagaaaagaagcacttattcttcaacttccatcccctttcagtcaggggtgacttcattggcattaattttactacatttctaggttttatacatgtgactccaagctggtctctgtgagtttttcatgccaccatgtcagtgaactctgagacagggagtgatatgtatgcagcatagggctgaggtaaagtggaccagattgcacctgtgaaaaactagtcaaaagctgtgcagaacggtttgctgtagctggagttgttgtaagagatgg

SEQ ID NO: 87102 - DNA, 615 bp, Homo sapiens
tggatgactggttggacatttcaagtcttatctattacatattacaaagagtggtttttttttttaaaaaaaccctccattacagggttttaattgtaatcaactcaatgttctcccagcgttagcctaaatttccctaaaagcaaggccagagacaaagaatttcaggcaatttgtttatttagaaagagatcccagagactagaaatacagattgaggagtaaattagagaaaaagggaaagcacatacaaaaaaatcatgttttggctactgatacatataactttgtgcttgtttttgagggatcatataaraacttctaagaaatgcatttcaaaggaagaaaagaagcacttattcttcaacttccatcccctttcagtcaggggtgacttcattggcattaattttactacatttctaggttttatacatgtgactccaagctggtctctgtgagtttttcatgccaccatgtcagtgaactctgagacagggagtgatatgtatgcagcatagggctgaggtaaagtggaccagattgcacctgtgaaaaactagtcaaaagctgtgcagaacggtttgctgtagctggagttgttgtaagagatgg

SEQ ID NO: 87103 - DNA, 615 bp, Homo sapiens
tggatgactggttggacatttcaagtcttatctattacatattacaaagagtggtttttttttttaaaaaaaccctccattacagggttttaattgtaatcaactcaatgttctcccagcgttagcctaaatttccctaaaagcaaggccagagacaaagaatttcaggcaatttgtttatttagaaagagatcccagagactagaaatacagattgaggagtaaattagagaaaaagggaaagcacatacaaaaaaatcatgttttggctactgatacatataactttgtgcttgtttttgagggatcatataaaaacttctaagaaatgcatttcaaaggaagaaaagaagcacttattcttcaacttccatcccctttcagtcargggtgacttcattggcattaattttactacatttctaggttttatacatgtgactccaagctggtctctgtgagtttttcatgccaccatgtcagtgaactctgagacagggagtgatatgtatgcagcatagggctgaggtaaagtggaccagattgcacctgtgaaaaactagtcaaaagctgtgcagaacggtttgctgtagctggagttgttgtaagagatgg

SEQ ID NO: 87104 - DNA, 852 bp, Homo sapiens
tgaggcctccccagccattctgaactgtgagtcaattaaaactctttcctttgtaaattacccagtcttgggtatggccttattagcagtgtaaaaatggactaatacayagtgttagattattttagttttatttgattacttataaagttttaaatgttttcatgaatttattggtagaagatggaatttattggtagaagaattccaatacaagttctttgagcctttttctaatgtaaaccaactttaatataagccagcattttaaaaattgtaaaatatttatttttgttttaaccaagttgtagcaatagtttatctgaaataaagatgtgcataaatctgaataaacatggtttttaatttaagaaaatatcaagaaacaacttaaaatgtcaaagatttgtgaaaattgtggctctctaaagtatcagagtaatagagaaaatttttcaaaattataaaaactaatggttataatttcatttaacatttctccttgaagaaaattaaaaatatttgaaaactaaaatagaacaattttaacttaacattatgaagtatgtttctgttttcacaagttcttaatgtatgagtgaataaaccgtatattatttactttaaaaattaaaagctttttaaaaatacttttgattattttatactttttattagggactttgaagctaaggagttaattcaattagataagaattaaaatattacagaaatttgtaaaattcttccaattatcttgctaactagacagtctaatattagatacatcaaaacaataatcctatggtgattctgtacaaaatacataaaaccatataagtatcatttgcc

SEQ ID NO: 87105 - DNA, 770 bp, Homo sapiens
tctggcaaattggctatagataagaaatgtaaatcacataagatgctacacgttggtttacatgagcctctatatcttcctaagcacacatatccactggcaaccacaagaatgcgatgtaggcacaatactagtcgatttaatgtgattctatgattctcgtttatagaactggaggtttcgcatttcccattcctacctaattcaataactcagattgcttgatttacttttagagcaatgattccctcctgggagcaattttgcttcctagcaaaatttggcaatgtctggagacatttttgtttgtcacaagagggggttgtgtgctactggcatcttgtgggtcaaggccrtggatactaccaaatatcctataatgtacaagacagtcacccacaactaagaaatatcctgcaaaatgtcagtggcaccagaggagatgaatgcaaacatgctaaccacattcctagagactagtacgtgaaccagaatgccatttattaatttgcaatgatagctagaactgtcaaggggaccaagacaatcatatttactgatgaatatatttactccctctggaaaacctatacaaaaagccaaattagaaccagacatttatttgctaaacataaagtcaattctaagaagatagatactcctcatagaacttatcacaatgaaaactgatcatttgtgtgattatatatgtattcctcctctttaagtctaaaaactctattgggatatggaacctatctcaatatgca

SEQ ID NO: 87106 - DNA, 1035 bp, Homo sapiens
gcatgggtatttggtgtaggtacttggaattaaaataaatattctgtctggagtatgtcctcagatmtaaatttttaagataaaagtcagtaattatcttattcagtaatctttccatcaggcatttttatttatgtaatgtatcataccgagagaggtgttaaaattgtttctctcaacttgtttggcaattgctgacaattattgcgtaatagatgtgtcagtgcatacagccagatttttgttaaggattgtaatcactgtcagtaaaacaaaccctctcaatcccatatcataaaatgtgtgctaaattctactctgcatattactgatattgcattcatgtttgcctatttccattttcttaattttattcagtggtgtttactgaatgcccccaataaagaatagggaattgtggctcatttttatcttacctttaccttcattcccccaaacagcagcaacaaaagcaacagaaggaaaaatgattttgtttttctgtcttctttcatgctgtacatatctttcttactgtacactttccctcaagaattatacgctttaaatttgatttgatatatgcttattcaattatacatgttacttgataactaacttttatcatagttattgaagtctacattcaataggtatgaatcataaactattcaattgaatctgtactttcttccagtttcatatcataattaaaaataacttaatcacttttatagtgtcttgcatttccttggtgtattatgtatttcaaatagactttctgttgcctttatatatgaatgacaatttggatatgaaatccttggtcacattcttttttctgcccaaatgctgtaatcttctggtatctaatattatggaagacaaatctgaaataacttgatttatttttgtattgtggatggcatgtcccttctacctggaagtttatggcatcctttatttttggaaccaataatcctttcacagaatgttttcatgtggttcattttcattaattttatgctatttaca

SEQ ID NO: 87107 - DNA, 1035 bp, Homo sapiens
gcatgggtatttggtgtaggtacttggaattaaaataaatattctgtctggagtatgtcctcagatataaatttttaarataaaagtcagtaattatcttattcagtaatctttccatcaggcatttttatttatgtaatgtatcataccgagagaggtgttaaaattgtttctctcaacttgtttggcaattgctgacaattattgcgtaatagatgtgtcagtgcatacagccagatttttgttaaggattgtaatcactgtcagtaaaacaaaccctctcaatcccatatcataaaatgtgtgctaaattctactctgcatattactgatattgcattcatgtttgcctatttccattttcttaattttattcagtggtgtttactgaatgcccccaataaagaatagggaattgtggctcatttttatcttacctttaccttcattcccccaaacagcagcaacaaaagcaacagaaggaaaaatgattttgtttttctgtcttctttcatgctgtacatatctttcttactgtacactttccctcaagaattatacgctttaaatttgatttgatatatgcttattcaattatacatgttacttgataactaacttttatcatagttattgaagtctacattcaataggtatgaatcataaactattcaattgaatctgtactttcttccagtttcatatcataattaaaaataacttaatcacttttatagtgtcttgcatttccttggtgtattatgtatttcaaatagactttctgttgcctttatatatgaatgacaatttggatatgaaatccttggtcacattcttttttctgcccaaatgctgtaatcttctggtatctaatattatggaagacaaatctgaaataacttgatttatttttgtattgtggatggcatgtcccttctacctggaagtttatggcatcctttatttttggaaccaataatcctttcacagaatgttttcatgtggttcattttcattaattttatgctatttaca

SEQ ID NO: 87108 - DNA, 525 bp, Homo sapiens
aggtttactctttcattactatgtaattaaccccacattgagaattctattgtgaattcttttgcagcagcaaattaaacatttgaattgcatactattatgtttctgtgaaagtgactatcgtgtcattttgaaacagacgagcaatgttatgagtaatgaagagttttcagtaaagttttcaatgatgctagacgacttgctctaagagaaaatactctatatatttcaaagaccccaccataatttctggcacaaaatccatcaaaatctaataaagtagcttaattagcatgatcatcgtcttattaataatttactggttggcaaaggctctaatgggattataatgcatcattttaaaaataaaagaacatcattgtgatgctcatcaaggtgagcactatagaagtaaaatctgcactaaacaaatttggtatctttaaaatayaactagataacctgccatttcctgataaagcacagtcctataagagagcatattttctttctaggaattctgca

SEQ ID NO: 87109 - DNA, 982 bp, Homo sapiens
tatttaagtatagtttcaagagtttaagggaagaacttctaccagaaactcagttgaatactttcaggggccagttaatattgttacaccatcagaaagggctcagaatgcaaggatccccagtaatggatttaaatttaatctaaagcacaaatgactaatatctgcagcagtaatctcccctcttgtgctgtggaatagttgccctaccagggcatttccccatcagggaaagtatacgttctcttgagcctaatcaaacgtttctcacataaacttgcagtcatagccttcaatcccaatgactaggtttagcacctggaatgaagatgctgaagatgaaaacctagttatgaccaaggggctcaggtcattcattcatatgtcaggtctgacatacaccatggtttacaagcactctataattatttttgtcatccctcacagccaccttgtgagaaaagccagactgaaagggacagtgtggtctccagaatctagagaaaataataacacttttgttcacaataactctgagactcagggtactgattgccagagcagacaaatcactgttataaaaataaaatacatttatcttggaaaggtgactcactatgaatgctagggaattatctaattaaagtgtttcacaaatagaataagaccatttctcgaatattcaatggaagttggatagctgcttgctgatagcacagagcagagcatctcaacgakggctgaagattagaatcacttgggggatcttttaaaagtctgattccctggggtcatcccagaccaattaatcagagtcactgaggtgggtcttcaggtgatttcaaagtgcagctgaggcacaaagtttctcaatttcagtgtgcattatccttgggcggcttgcctccacctgtccaccaccccaaagaaatttggtttcgtaggtgtgggattttctcacagatctacattcacacatgca

SEQ ID NO: 87110 - DNA, 505 bp, Homo sapiens
aatgtttcttgatataaacgtccctattagctttgtgaatgccaccaattcacctagtaaaggtgtcaaagcaatagaatggtgattttgattgtttcctccgtctttcctgattccagttcagggtttgggggggtggggtggggaaagagtggtttttgttttgtttttttttaatcaaccatcattcctgrtcattgcattttgataaaacatgcagcattccctttgtagcaatgttctaatcttacagccactttttcctttttctttagagaagggctgttatgtgaggaattttctttttctcgtcagtctgggaatggtaaataaaaatgcaggagtccaaaatgcttctctttcaccatgtaatgtcttaaactcattaaacaagtaaaaacgctgccaagtttgtgcagattcttctggttgggggaaaatctgtttttaaaaaaagtcattttgatggatactcccaaagagaagagactcagagcctggatcc

SEQ ID NO: 87111 - DNA, 1541 bp, Homo sapiens
aaaaaaaaaaaaaaaaagagggccgggcgcggtggctcacgcctgtaatcccagcactttgaaaggccgaggagggcgaatcatgaggtcaggagatcgagagcatcctggctaacacagtgaaaccgtgtctctactaaaaacacaaaaaattagccgggcgtggtggcgggcgcctgtagtcagtcccagctactcgggaggctgaggcaggaggatggcgtgaacccgggaggcggagcttgcagtgagccgagattgtgccactgcactccagcctgggagacagattccgtctcaaaaaaaaaaaagaaaccccacacccacgagcagtccttccctgctctcttttaccaccccccgcccctgggaaccactaatcgactgtccatatctaygaatttgcctgtcctgggcatttcctctaaatggctccttccctgtcttcatcaaggactgcagaagtttaaggtcagcagcggtagtaacagcacctagtcttatggggtagatttttacatttgaagcactgtaatctcaacagtttcagttggttatcaaaccatcactgagcatgagatagaacagggatcactgtgtcctttttgtagatgaaaagggtagaccggaacccagagaggctaaatgattcatccactgagttggtgcggagttgaaggcaggatcccagtcttcagattctttgtcttctctctttcctggtgcctgagcctcctcttgcagcagggggcgccatcagaagaaaaggccctgtttgttgcatgctgggcttctgtgtagaggctatgtccttgtcttttatgcacagtgagtcctcacttaatgtcattgatagggtctcggaaactgtggctttaaagtgacatataacacaaccaatttttctttctcatcaatgttataactaaacatcatagaaggaaatgatgttatttgaggatctgctatgtgtcatttcacttgaactcactgtttccaagaacctgctgacgacagtgagactggctgtataaggaggttctgcactatctgtccaacaatagagcttagttgtgcctttttgcccatccccgcttctcacaaatcatatatatacacgtgtgtgtgcatctggcctcaacctggccagctctttctgactggggtgactaacaaggactaatgactcccacagagaggtccaacttgtggcccagtcctgattaggacccagccagttacacagctctaggttgtttctgaattctctcttcagtgtcatcacccctcattttgctgcttgcctagccctttttcttgaatgttggcttcctctctgctcctgagaccttctgctcctcagggtcccccatggttccaataggaacccgagacccctgtcttctcccctggcaagtgctgtcagccatgcttctgagcccagaatgtcctggtgaccagcatgcagaaaaaaagacacaaagcaatgtcattctctgttcccaggagcagagctcctggtgcctgcagaaaaaaagaca

SEQ ID NO: 87112 - DNA, 1096 bp, Homo sapiens
tgtgttattgttatagttatttagaaataaatatttggggccgggcgcggtggctcaagcctgtaatcccagcactttgggaggccaaggtgggcggatcatgaggtcaggagatcgagaccatcctggctaacacggtgaaaccccatctctactaaaaacaaaaaaatttaaaaaaaacttagctgggcgtggtggcaggcgcctgtagtcccagctactcgggaggctgaggcagcggggagaatggcttgaacctgggaggcggagcttgcagtgagccatcgtgccactgcactccagcctgggtgacagagcgagactctgtctcaaaaaaagaaaaaaagaaaggaaaaatatttggggcaaaatatagtgttcagcaaaccaacwtgattatcttaccttcttattcaagttcatgaaggccatttttttttcctcccacaaattagagcctggtatttcaacatcagatattctgtcttggattaaacaagaagaagagcctcaggttggggccccaccggagtccaaggagagtgacgtgtacaaaagcacttatgctggtgagtatgaaattaaagaggtgttcatgtccatatccagctcatgccaggactgactgaagaaacagcaggtgaaatttgtagaggcaaatatgtgggagaagaatgagggaaagaaaaagccatgctcaacattatgaatgaaaccaaacagtcactaagataaatttgaagtgagtgagaaaatacactcttacatgcaaagacaaatgagaattgtcagaagaagaaaaacaagtgcatacagacgaaccaaaattatggggatggggaaagacagaagacgatttgaaaatcatgtagaaagggtagaaaacgtgggagtggggtggggagacaagccctggagacagaaatggccatggagaggtgtaaatgggaatgttaattaagagccctccctcagtgaaaggaaaatcaatgatgggagaagaaatataagtatcttccttctaagatacttttgccatttgtattgtagaagagaatctcaagatcagaagggtcccagtcatttatacagctta

SEQ ID NO: 87113 - DNA, 1096 bp, Homo sapiens
tgtgttattgttatagttatttagaaataaatatttggggccgggcgcggtggctcaagcctgtaatcccagcactttgggaggccaaggtgggcggatcatgaggtcaggagatcgagaccatcctggctaacacggtgaaaccccatctctactaaaaacaaaaaaatttaaaaaaaacttagctgggcgtggtggcaggcgcctgtagtcccagctactcgggaggctgaggcagcggggagaatggcttgaacctgggaggcggagcttgcagtgagccatcgtgccactgcactccagcctgggtgacagagcgagactctgtctcaaaaaaagaaaaaaagaaaggaaaaatatttggggcaaaatatagtgttcagcaaaccaacttgattatcttaccttcttattcaagttcatgaaggccatttttttttcctcccacaaattagagcctggtatttcaacatcagatattctgtcttggattaaacaagaagaagagcctcaggttggggccccaccggagtccaaggagagtgacgtgtacaaaagcacttatgctggtgagtatgaaattaaagaggtgttcatgtccatatccagctcatgccaggactgactgaagaaacagcaggtgaaatttgtagaggcaaatatgtgggagaagaatgagggaaagaaaaagccatgctcaacattatgaatgaaaccaaacagtcactaagataaatttgaagtgagtgagaaaatacactcttacatgcaaagacaaatgagaattgtcagaagaagaaaaacaagtgcatacagacgaaccaaaattatggggatggggaaagacagaagacgatttgaaaatcatgtagaaagggtagaaaacgtgggagtggggtggggagacaagccctggagacagaaatggccatggagaggtgtaaatgggaatgttaattaagagccctccctcagtgaaaggaaaatcaatgatgggagaagaaatakaagtatcttccttctaagatacttttgccatttgtattgtagaagagaatctcaagatcagaagggtcccagtcatttatacagctta

SEQ ID NO: 87114 - DNA, 727 bp, Homo sapiens
ccccagaatcctgactgccttcacctttgggaggatgagaatgaagtaatacagtttaaagatatttatttgtttgtaagcagtagagatgggaaacagcttggccatcaacacagaatttggtgaatcagatatagactgatcttcaggagaatatcaggcaaagtgaagaataagcacaggctattgctagtgttgtcattaaacggacacaaagcctgataactaacttccatagaaataaaaattcttggttccatgataattattaaaggtgaaaaatgccagtgaagtggaagctgcccaagcctggagtctacataaacttgtacgggctggaagtgcacaggctctgcacatatgtrgggctatttacatgtgcagagcaatggggaagggcactggtgggacctttaggcaggtcaaggtctttcccagggagccctacagagagaacaaaatccattgcaatccactttctgactgtaggcatcaaatcagttattggaaagcaagttgtccgtggtttggtgaggctctcagatgggtgaaagtggccaatatggaacattttatcaaaactcagcaaagttgcccagagtagaagtaattacattttacaagtggccttgtttgatataacctcctataaaatagcagttctctaagacagcagtatcagtagaactgtgaatgtactttttctgtgagactagataatatccaa

SEQ ID NO: 87115 - DNA, 659 bp, Homo sapiens
gtccaagttctatatgtgttgaaatagtatttaaaaaagaaaaaaccagccaggcgtggtggctcacacctgtaatcccagccctttgggaggcagaggcaggaggatcgcttgaacccaggagttcaagaccagcctgggcagcatgtgagaccccatctctacaacamaatttaaaaatcagccaggcgtggtggcgtgcacatgtggtcccagctgttcaggaggttgaagtgggagaattgcttgagcctgggagttccaggctgcagtaagccatgattgtgccactgcactccagcctgggtgacagagtgaaaactgtctcatgaaaaaataaaaaggaaaaaaccaaattaggaaaaactgtaaccctgcagcagcgtaaaacaggtgacaatgacacttctattacatcacctgtgacagaccccttatccttcatggattttggttcatgccagtgtgttgtagagttttgcatctgactccctctcagtaatcagctggggattttccttggtgtattagttagtataagccaggctgttgtcacaaaccacctaacaaaaactcagaagatagaagttgaattctctttcctctaatcaggtggatatttcaagtcagtgggtgacttcactcacacagaagaacag

SEQ ID NO: 87116 - DNA, 595 bp, Homo sapiens
ccagcagtctctgtagctttsaaaactatgtcaacccaaaagtttgtatttttcctctgccagtcccttcttgtgacaatgtctttttagcagcatttctccactatttaccatctctccctcactcttctttcccctccttctttctttccctcaacacacccctcactctcactgttttacctcttccctcactgagtacagaatccctaggataaacaggatggagtttccaagttccatgggtcaggacacaccagactgggttatggataaggacaatggtatacattcctgccttctttgcctacactagcccatgagcacttcacccatgctaagccatcttcggcccaaatggcccttgagcatgcatttgaaaaacaggtggaagataaaacaagaagcatgcattggttttgcaggtggaagacctagatttcatgtcctgccagttactaattgtgtggtcctgagtaggtctcctcacttctgctctgagtatctcttcattgaaaaaatggagcaaatgcaatttcacctgcaaaccccagagtttttatgaggctgaagcaggataatgtttggcaagagc

SEQ ID NO: 87117 - DNA, 731 bp, Homo sapiens
ggattcagcattttaaatatttttccagatgatgctgatgtagcctatccaagaggtgctgtctggggtcttgaaccagggcaagccacttatgggcaggtagggaaactgagtcccatagaaaagaagtgattcaccaaggtcacccagagaactagaaaagagctggcagagtgtcacccacagtcaagcctgtgctgcaggatggctgaacacagaccaaaggccccacagaagtgcccaggattgatgggctggcatttcagaagagtaggaggcagcctgggtggtgttggggtgactgagggacccccyaacttcaaaaccttaaggggagaagaaagaggagttcacatttcttgagcatctactatgtgccacatatacattgctaaacaatggtgctgtgttgctttgcacccagcgttcacataatccttaccacaggtaggcatcattcatacccactgtgcagacaagggaactcaggctgcaaagtcctaaagtcagtgaagctcagagcaggtcgccaaccctgaggggtgtggctctgatcccagtcttttcactgctttccccaaggcctcagtccactctctgccactcacttaaggcagtaggcacgagacggtgctataggttgaatgtttgttctctccaaatctcatattgaaatgcaatccccagtgttggaggtggggcctgctgagaggtgtttgggtcatgggagt

SEQ ID NO: 87118 - DNA, 731 bp, Homo sapiens
ggattcagcattttaaatatttttccagatgatgctgatgtagcctatccaagaggtgctgtctggggtcttgaaccagggcaagccacttatgggcaggtagggaaactgagtcccatagaaaagaagtgattcaccaaggtcacccagagaactagaaaagagctggcagagtgtcacccacagtcaagcctgtgctgcaggatggctgaacacagaccaaaggccccacagaagtgcccaggattgatgggctggcatttcagaagagtaggaggcagcctgggtggtgttggggtgactgagggaccccccaacttcaaaaccttaaggggagaagaaagaggagttcacatttcttgagcatctactatgtgccacatatacattgctraacaatggtgctgtgttgctttgcacccagcgttcacataatccttaccacaggtaggcatcattcatacccactgtgcagacaagggaactcaggctgcaaagtcctaaagtcagtgaagctcagagcaggtcgccaaccctgaggggtgtggctctgatcccagtcttttcactgctttccccaaggcctcagtccactctctgccactcacttaaggcagtaggcacgagacggtgctataggttgaatgtttgttctctccaaatctcatattgaaatgcaatccccagtgttggaggtggggcctgctgagaggtgtttgggtcatgggagt

SEQ ID NO: 87119 - DNA, 731 bp, Homo sapiens
ggattcagcattttaaatatttttccagatgatgctgatgtagcctatccaagaggtgctgtctggggtcttgaaccagggcaagccacttatgggcaggtagggaaactgagtcccatagaaaagaagtgattcaccaaggtcacccagagaactagaaaagagctggcagagtgtcacccacagtcaagcctgtgctgcaggatggctgaacacagaccaaaggccccacagaagtgcccaggattgatgggctggcatttcagaagagtaggaggcagcctgggtggtgttggggtgactgagggaccccccaacttcaaaaccttaaggggagaagaaagaggagttcacatttcttgagcatctactatgtgccacatatacattgctamacaatggtgctgtgttgctttgcacccagcgttcacataatccttaccacaggtaggcatcattcatacccactgtgcagacaagggaactcaggctgcaaagtcctaaagtcagtgaagctcagagcaggtcgccaaccctgaggggtgtggctctgatcccagtcttttcactgctttccccaaggcctcagtccactctctgccactcacttaaggcagtaggcacgagacggtgctataggttgaatgtttgttctctccaaatctcatattgaaatgcaatccccagtgttggaggtggggcctgctgagaggtgtttgggtcatgggagt

SEQ ID NO: 87120 - DNA, 3051 bp, Homo sapiens
attctttgaagattttccatttcaagtattttggatgtgttgcttttcaataaattatgtatgtgatacaactatatccttcccataaatagatatggaattgggaaaatttatgtttaacattgatagtgataaacaaaatgcactttagtttattctggtcatggtaaaactaatatgtattaataattggctaacaaaagttattctcatagaaggaactagtcaaactttctgaatccagaaggtagctcttttcactgttaatcaaaagtagaagttaaatagatttgtcccgctttggtattacatacacttttattgtactgttaataatgagaggaaaaagtaaagtgaaagaaacaacacagtctacatacacatatctatgtgttgtgtacatttactcctgcaacatacttactagttgaacaaagcatagctcctcaacatccctgaccggccctttagtctggaaccttcacagaaaccaggaaagccactgtggcagctgacaaagcccattgctgagccggtttgtcaggagccaggaagctgagcgagggactttcctgtcttccccagagttcttggcctggcccttttatactctgcgacccattatcttgccttcccagagtattttaaatccatgcaccctggaccaaattctgaaatcatacgtaactcaaccctttcaggtgcaataaatactccttgtgtccttttccattgagtccatcttttctttctatcaataagacataaacaaccacaattttaaacctagtaagttgctaagagcatgagtcttccactcagaggctgtgtgaattttggcaaagtccttggaattctctggcctcagtttctcatctgtaaagggagacaatggcagtgcctacctaatagagtcaatgagagttaagggagtaaatagatgtaaagcccttagacagtatttgatattaccattaaacttttccttcacttcagttaagtgaaattccaaaaattcagttaatctatgtttttaagaggctctgtgttcccagaagtactcaattaccccatgaaattaatgttctcagccaaagcttatggtgtcctttagtccataaaccaaacaccgcacactcgccagcagttaaccgcccatgtcgcagctacattttccacttagtaaaatgcatatccatttgcttcacaaatcctggcaaagacagaatatttagaatattctgtttagaatattgcagatcatggagggaaacctaagcaaaaatttaaaagtgtattcattctcagatggatttgaaaattatataactcaagataacatttagaaagaacaaaatacagatatggcataaatgttgtttttgacattggtgagaaacaaaacttgtatgcctaagattaataatgttttcctttttcgtctttgtttcttttcatttttcagctttgacacaatcatgaaaatttatagaaacttttaacatgaaacaaaacaactttaaaactgtcacatacactctttcaaagactgcatattctttatttttgcaaaggaaatatgcaatttccttagcaagagaaaggaatgtgacattttcttgtcctagtcaccaagtttaaattatatttcaaggaaatagttaatatttgcagttttatgtctcgttatacatctttgtggcattttagaagtgttttctgtaaaacccagggaaacgaaatgatttcacacttttatgaaggtatcagcaaaatgtaatttaaatttgttttccctccttcagagaattgaacctaaagctttgtgtatggaacttctgttaggtctagtaattacttaacatttgtaatatttgctatatcatttttaggaaaagaaagtgtaaaaaacacgagtctccttcactgaaacagcaggtcacttagagagtaaaaacaaagttggcaatagagtaataattttacatacttagagcacatgaaatgaactctagaatttgtttttaaacaaatttcttgaactctagactttgtttttctggaatcttgaactctagaatttgtttttctaagaaaggagcttacaatgacataataattttgtttagtaagagcacctcaatatccttaaactgtcttgagaaaacattttcttctccattacaattttgctttttccaaaagattacttttgatgcttagaaaagttttcagacagtggttaggggaggatataatttctaagccatcagaaatatggcaaataatatccagctacttggggtgggggcgctcaggcagaaggattgcttgagtccagcttgggcaccatagtgagatcctatcctatctcttaaaaagaaaaaagtaagaaatatggcaaataaaaactagggaataaaaaattattttcttatgtttgaaaaaaagaaagaaaagtatactattttaagaaaacactggccaggaaaggtggcccatgccaataatcccagcatttttagaggctaaggcaggaggattgcctaagctcaggagcttgagaccaacctgggcaacatggtgaaaccctgtctctatttataaaaaagagaagrgagagagagagaaagagaaaaagaagacaaaaatgctttgtttcccatagaacattgtccatccattcaggttggcaaaataggtgatggccttagcacataaacttggtgtgacgtttttcctacacattatcttttacattttgatcaccttgattgctaatctgaatacttatttttgtaatggtctttcagttcttctgactgtattaggagaaaggactgcttatgcagtggcatggcattagactccaatcttgccccttctggcatcacaacctatgaagggctacagaacatccctttgtgaaaagtaggaggtagtgtggtacagagaaaagggcgtggtctctgcatctgagagagaatgctatgtgtcctcatttgggccaatcacttaactttctaaggttccagtgtacaatatagagac

SEQ ID NO: 87121 - DNA, 556 bp, Homo sapiens
attggcctgtaattatttgattattcagacgagttaactaagtgtgggagatgaaggggtataccaattccaagactgaatctgataaagccaatgaattaagtgaggggtcctcgacaaactgttgggaccccactatgattacccaaaaaccaacgaagttatccccattgcttgtggtccatgggtaaagtccctccagaaacctaacrtcttggtataatgcacagacgtgtagaaattgtcctgtataaaagcagcctgtacttttatcttactagatttgcctttgcgaggactatctggtttctctagcctgaggaaaatcctcagaattcatctctctacaaatttggaaccaattctggggtatttcatattttactttgtttttgttttttatcaagatagacccacagaaacctaaatcttgtcttagcaagagtttcatacatgaacaaaagaaagaacaatgtgtctaaatgaaactgcaatttccaggtactattacaaaatacttacacctacaaagccattctagctgttgagttgggcc

SEQ ID NO: 87122 - DNA, 509 bp, Homo sapiens
tgtcagkcaaaggagtttgggttctaattcataaacaaagagggatttgtttcaaaatttttttagcaaaagtttaacagatttttaaagctggccattaggtaaccatgaataagacgaaataaagaagacagaaattagaacaggggatcaattaagagtattcactaacagtacaaatgaaaaattgtgagaatccaagctaatgacgttatactaaggatagagaggacaaggatgcaaaagatattgagaacatagatgtgtaaaatgtctacttggaattgatccaagtagggcattgaggttttttaaaaatggctgcagatttttttacatccctcccactgggcaatggggtttacgttccctcttcttgaacatagcaggctgtggctgcttcaatcaatagaatgaggtggaagagacactaggtgacttccaaggcttggtcatagaagtcatgcagcttccaccaggccagccacctcattagagggtcatctaat

SEQ ID NO: 87123 - DNA, 509 bp, Homo sapiens
tgtcagtcaaaggagtttgggttctaattcataaacaaagagggatttgtttcaaaatttttttagcaaaagtttaacagatttttaaagctggccattaggtaaccatgaataagacgaaataaagaagacagaaaytagaacaggggatcaattaagagtattcactaacagtacaaatgaaaaattgtgagaatccaagctaatgacgttatactaaggatagagaggacaaggatgcaaaagatattgagaacatagatgtgtaaaatgtctacttggaattgatccaagtagggcattgaggttttttaaaaatggctgcagatttttttacatccctcccactgggcaatggggtttacgttccctcttcttgaacatagcaggctgtggctgcttcaatcaatagaatgaggtggaagagacactaggtgacttccaaggcttggtcatagaagtcatgcagcttccaccaggccagccacctcattagagggtcatctaat

SEQ ID NO: 87124 - DNA, 1269 bp, Homo sapiens
ccctgttattatatgcagcaacaatttgttctttctcattgctgtgtaagattccattgtatggatatagcatgcaacttttgatagagattttgggtaacaactcttggactattatgaatgatgctgctataaacattttttatgtcttttgatccatcagctgacaattcaataagaccttttgaaacaaagttttagaaatcactggctcattggatttatttacttaatcaatttctgggaagaatactttttaaattttaccactttagcaagtgattattaatttacctgctactctttcacttagaaccacctttttaaacccagtatactcagaaggggagaggagaatggtgatagtgttatctgaatacacctttgtgaattatattgtcgcaagttaactattttatttatttgtttattgagacaggatctcattctgtcacccaggctggaaagttgtagtgcaatcatggctcactgcaacctcaggtaattctcctgcctcagcctctcaagtagctaggactgcaggaacgtgccaccacatccggctagtttctttcgtaaacatagggtctccctaggttgcccaggctggtctcgaactcctgggctcaagggatcctttcacattggcctcccaaagtgttgggattagaagtgtgagccactgtgcctggccccaagttaatgattcatagagcctactttcactctcaagaatgcccttgttcgattgtaggttttatggtcacctgagtttctacactccaggcaacacaccatagtgagaaccaggctgggtgagagacgtgcctttcttttgtaaagtgtaagaaacatgataatgacagtggaggtggtttacctgtgtgttctcagttgaataaattttagaaaagagtrtatgtggaaactgaagatctgaatgttgatttcctttaagtgtttttgtctgtgaatcacctgaaaaatctttgtctatccccagaaatacttatgccccagtttgaagacagcactggcttattttacctaaagtggaactcctaacaagaatagacaattgaatttactaattaaaaaaaaattaaaccaactgattattcaggaactttaattcattatggtaaaggagtcctaacacaagagcttttgttcaattgtgatagtttccaaaaattcactcattaatttattcaacaaatatttctggagctccaaatatggaccaagcatggttttatgccctgagaa

SEQ ID NO: 87125 - DNA, 876 bp, Homo sapiens
aatattctgacagttactgagttcttattaggttctgtcaacggcatctatgccagattaaaaggcatgagagaaagaatccattctgctcctggtgatgccaccaccaacagcagacagcagtcgcccctgtgagctcctacagagggacatatggcagataaacaggggctctagtagcagctacacgacaagggaggcagacgatggtggactctgaacagtactcatccttgcagggtcaaaggctttctgtaatccttacctctggaaacaccatcttcctcccttttgttcctctattccttctaataatttgtaaccttattccctaaaaatcatattccttcctttttaaaaacatgcaaagtggtttctgctcctgtctcccaacaggacactgataaaagcaggtaaaataagcgatttatccacagtcatgttcaaaaatgcaaaatagaacacaatttgatgtgactccacgtttctggacctcaagggaattcctaaacatttacttaagctagaaygaaaacaaaggggagataagccaatagttatttatttgtttattttttccaaaaagaatcacagaaagattaaatcataaactaatcaagctttgggttaaataggttaggatgtaagggataaaggacaggaatgactattactaaacaaagaaaattggtatatacatacacatatactgataacaagtcaatattgtaattttaatatctttatcatgtggagttaaaaaagaaaagaatactataacagtaccatatttttagtttaagtgttctatggtcctgtataatttagaaaagggtttataatcttaatttttacatcttgtttagttaagaatgc

SEQ ID NO: 87126 - DNA, 688 bp, Homo sapiens
tccactcaccacagggtgaccttgggcatgtcactgaactcatgtgtccagtgccttagtttactaattggtaaagtgacactaagaggagcaactgtttcgtgtggttgttgtaagaatgaaatgagatactactggtgaagatctttgaatgcttggcacatagcaaatacttgagaaatattagttcaaagaataattggctaataatatttagaacaattctgtcttgtttataactttgttttctggcttagcaccaggactggcacagaataaactttaaaatatgcctttaaataaatgaataggctgggtgcggtggcttatgcctgtaatcccagcactttgggaggcygtggtgggtggttcatttgaggtcaggagtttgagaccaccctagccagcatggtgaaaccccatctctactaaaaatacaaaaactagccgggtgtggtggcgggcgcctgtaatctcagctactcaggaggctgaggcaggagaattacttgaacccaggtgggggaggttgcagtgagccgaggtcacaccactgcactccagcctgggtgacagagcaagactccatctaaataaataaatagtaaaataaaataaatgaataatgattattatcttttttaatttggttcctcaaacatgcactctgtcatctgggagcctgtgc

SEQ ID NO: 87127 - DNA, 688 bp, Homo sapiens
tccactcaccacagggtgaccttgggcatgtcactgaactcatgtgtccagtgccttagtttactaattggtaaagtgacactaagaggagcaactgtttcgtgtggttgttgtaagaatgaaatgagatactactggtgaagatctttgaatgcttggcacatagcaaatacttgagaaatattagttcaaagaataattggctaataatatttagaacaattctgtcttgtttataactttgttttctggcttagcaccaggactggcacagaataaactttaaaatatgcctttaaataaatgaataggctgggtgcggtggcttatgcctgtaatcccagcactttgggaggctktggtgggtggttcatttgaggtcaggagtttgagaccaccctagccagcatggtgaaaccccatctctactaaaaatacaaaaactagccgggtgtggtggcgggcgcctgtaatctcagctactcaggaggctgaggcaggagaattacttgaacccaggtgggggaggttgcagtgagccgaggtcacaccactgcactccagcctgggtgacagagcaagactccatctaaataaataaatagtaaaataaaataaatgaataatgattattatcttttttaatttggttcctcaaacatgcactctgtcatctgggagcctgtgc

SEQ ID NO: 87128 - DNA, 688 bp, Homo sapiens
tccactcaccacagggtgaccttgggcatgtcactgaactcatgtgtccagtgccttagtttactaattggtaaagtgacactaagaggagcaactgtttcgtgtggttgttgtaagaatgaaatgagatactactggtgaagatctttgaatgcttggcacatagcaaatacttgagaaatattagttcaaagaataattggctaataatatttagaacaattctgtcttgtttataactttgttttctggcttagcaccaggactggcacagaataaactttaaaatatgcctttaaataaatgaataggctgggtgcggtggcttatgcctgtaatcccagcactttgggaggctgwggtgggtggttcatttgaggtcaggagtttgagaccaccctagccagcatggtgaaaccccatctctactaaaaatacaaaaactagccgggtgtggtggcgggcgcctgtaatctcagctactcaggaggctgaggcaggagaattacttgaacccaggtgggggaggttgcagtgagccgaggtcacaccactgcactccagcctgggtgacagagcaagactccatctaaataaataaatagtaaaataaaataaatgaataatgattattatcttttttaatttggttcctcaaacatgcactctgtcatctgggagcctgtgc

SEQ ID NO: 87129 - DNA, 575 bp, Homo sapiens
ggacaaacagctgatatgtaagactttgtatcctttttatttttatcttatttatttatttatttatttatttgagagggagtcttgctgtcgcccaggctggagcgcagtggagcaaactcagctcactgcaagctccgcctcccgagttcacgccattctcctgcctcagcctccccagtacctgggattacaggcgcccgccaccacgcctggctaattttttttttattttttatttttttatttttagtagagacggggtttcaccgtgttagccaggatggtctggatctcctgacctcgtgatccgcccgcctctgcctcccaaagtgctgggattacaggcgtgagccacygcacccggccatatcctttttatttcttaaaggtaccgtttaagttaagcttcaccaagattatgatttaaccaaggacgtatgaggtgtctccagagaggcggaaagcagtattcacaagatccaaacccaccctgtcttttgacagttcaaagaaatgaaaactttgctagctacaaatggagtataatccacattcttatttcccaaattctc

SEQ ID NO: 87130 - DNA, 542 bp, Homo sapiens
tttttaggggttagctatgctgcaggcattgtttctatatgaggaattagctatgctgcaggcattgtttctttatgaggggttagctatgctrcaggcattgtttcttgaccttgctgctggaatgccttggtatgctgtagtgaaacatcagtccttatggcagttttgcttcaagatggcattactcttgccatgcaacaggctgttttcctacaataattttggaatatagtgtttattcttttactatctgaatgtcagtttaagttactaagtggagttttctatctttcattctaccatttttgggactggcttttgggcagtaattttaatttctgagtgtaatcagaggacgagctcagataaattttccatcccttataaaatgaatattgaggaagattttggggagtaagtttaggttcaagtgagttccatgtcagatgaacaggtgcctgacttgtgaaacaatctgattagcaaaagtacctaagaaagtggtatcctcaatctgggatccgtttgaatctcccttt

SEQ ID NO: 87131 - DNA, 984 bp, Homo sapiens
ctatatacttatattgcagataagtaaggcacagagtagctaaatatgtcaggcctctgagcccaagctaagccattgcatcccctgtgacctgaacatataggcccagatggcctgaagtaactgaagaatcacaaaagaagtgaaaatggcctgttcctgccttaactgatgacattccaccacaaaagaagtgaaaatggccggttccttgccttaactgatgacattaccttgtgaagttccttctcctggctcatcctgctcaaaaagctcccccactgagcaccttgtgactcccactcctgcccgccagagaacaactcccctttgactgtaattttcctttacctaaccaaatcttataaaatggtcccacctctatctcccttcgctgactcttttcggactcagcccgcctgcccctaggtgaaataaatagccttgttgctcaaagtctgtttggtggtctcttcacacggacgcgagtgaaaaaatatctcatcaaagcatcaaaggtcacagaattcaaatctgtccttcctgatctaaaattatagccagtataattcacttacataaaatattatttagtagacgatgatgattattattttgagacaggatctccctctcttgcccaggctgaagtgcagtggtgtgatcttggctcactgaagcctcaaacacctggggtcaagcaatcttcctacctcaacctctcaaatacctggtactacagacgtaagacaacatgccttgctagttgtttttttkgtttgtttgtttgtttgtttttgagacagggtctccctatattgccccgtcttgaactactgggctcaagcgatcctcttgtgctggattagaggagtgagccactgtgcccagccagagcagattattaacaagctcaaagatagtgttctatttcacagttgctctgtatcagggtaataaaatacaactttagccaattcatgc

SEQ ID NO: 87132 - DNA, 984 bp, Homo sapiens
ctatatacttatattgcagataagtaaggcacagagtagctaaatatgtcaggcctctgagcccaagctaagccattgcatcccctgtgacctgaacatataggcccagatggcctgaagtaactgaagaatcacaaaagaagtgaaaatggcctgttcctgccttaactgatgacattccaccacaaaagaagtgaaaatggccggttccttgccttaactgatgacattaccttgtgaagttccttctcctggctcatcctgctcaaaaagctcccccactgagcaccttgtgactcccactcctgcccgccagagaacaactcccctttgactgtaattttcctttacctaaccaaatcttataaaatggtcccacctctatctcccttcgctgactcttttcggactcagcccgcctgcccctaggtgaaataaatagccttgttgctcaaagtctgtttggtggtctcttcacacggacgcgagtgaaaaaatatctcatcaaagcatcaaaggtcacagaattcaaatctgtccttcctgatctaaaattatagccagtataattcacttacataaaatattatttagtagacgatgatgattattattttgagacaggatctccctctcttgcccaggctgaagtgcagtggtgtgatcttggctcactgaagcctcaaacacctggggtcaagcaatcttcctacctcaacctctcaaatacctggtactacagacgtaagacaacatgccttgctagttgttttttttktttgtttgtttgtttgtttttgagacagggtctccctatattgccccgtcttgaactactgggctcaagcgatcctcttgtgctggattagaggagtgagccactgtgcccagccagagcagattattaacaagctcaaagatagtgttctatttcacagttgctctgtatcagggtaataaaatacaactttagccaattcatgc

SEQ ID NO: 87133 - DNA, 737 bp, Homo sapiens
tgttgttagtgttataaaagtaaacagtaaatagctgaaaatctggacatattattttgcattatcaaaggacaccagaatgatggcaagatttaagttagaaaagaagtatttgaataatgagaagccatgcaattgacagatgaaaatgataatacgagaacgatctcatttattagattgagcttaatttcaaaggaggttttatctagtgttgttggagcaccagtgatctggaagttgcactgagtattcaggggcatgctaagaccacttcaagccccaaattaatggagtatagaagaataagtgaagtccaatgtagagggtggataggaaagtaatccctcagaaaaaaaagctagaattcgtttatgagaagaagaaacagtatatgcataaactagtggtcgacacaatgtatttttgaagatagttrtatcagaggacaaagaagaaaggttgggaaggaggcagacagtggaaatctggcttagatacaagaaatcacaggccatatatagatgaatgcatggggagatggacatgtcagcggtcaggggaattactttaggaaaatggccaaggatggtgttgacatgaggtttgctgtagtgatctggctttacaagtaagtacttcttcatcattctctaaagaaataggataaattttacctttgttgagaaaatgtccctcaccctggtagcagcaataatggggctaattattttaca

SEQ ID NO: 87134 - DNA, 468 bp, Homo sapiens
ctaattcaataggactggtgtccttgaagaagaggaagagacacaagggagctagtgctctctctccttcctccttgctctctttctcttgctttttctctttgtgtacatacagaggaaagatcatatgaggacacagccagaaaacagctatctacaacccaaacaaaaggccttstcaaaaactgattctgcaggcaacttgatcttgaactttcagcctctggaactgacaaattatacttctgttgtttaagtcactcagtgtgtggtattttgtcacacagccagagtagactaatatgacaatccttggcctagatcatttatttattcaagaacattatgcacagtaattttacagagcattagaattactaatatgtgaaaaccacggtttctaccctatcaaagctcatagcctagtagagggagacagatgtgtatttggctgacagtctacatggg

SEQ ID NO: 87135 - DNA, 730 bp, Homo sapiens
aaaaaatctacataatgaaaatctgaaattccatttgcaagttcatctggacaaaagatcatttctttttcttctttacctttaaaaacatatgactaaaagcatcaagtttcaagagaatatatattcattgctactgtattggtcatctaatagttatatttttataaataaatgcaaaatgtagtgttttgtcaactgctagaaaaaaatggctgtttcaatttggttatggacacactcctgccacctggtgtcatattatctaaattacagaatcacatctggaaatgcaaaaacattttaaaaattcaattatttaaagaaaaatatttctatgtatcctgtgtatattaaaattaattttgaagcaaaatgtagacattattacaaaaccaagctgtgatgaataaaattatttagaaatgcagaaaactattcaatattataatcattaaaaataaaatttgaatgcactttttggtttgtatctttataatgaaagactaaatcaaacktaaaaaaaaaccttcatcttatgctatgagtgaaggtaacctctgtattgctattatttaacgcaaaaaaacctgatgttgtcatccatttaaataagtatgataactagaatctttagtaaaagaaacttttggaaatactataaactactttggttttgtctgttcatctaatttcacatgcaaaacaaacagtgaaatacaacaattat

SEQ ID NO: 87136 - DNA, 1077 bp, Homo sapiens
tttaggagcccgccagggattttgcatactttttccatagaacttaggactccctatgtgtaactccyatttttctgggagttttcccttactttccagcagttatggttgtccaaaatgagaaagattgtaggcttttattagagatttagtcagcacatatggcagagtctaaaaaccctcaagctagcaactgcaaaattgagcaattgccccatgtcttccctttatccaaaggttgacttctctccataatttttctcaccttcctgtgccttcaatagtttttctttgttttactttgctttttggcttatgtagggatacatttctatcattttaaccttgtattacttgcatcagttctatggcatattaacattattcttgggttacaagtaaatacaactcagcttatcttaaaacagagaaatgaatggcttacaatactgaaatattccaagagtaacctcaagagcagccggatcatggtgttcaaagagtatcaccaggaatttgtctttcttacatatattataacctggctgtgattcttcatgggctttgttctgaaggactctcctctatggttctcaaaggtccaggcttatgtgctaccagattaagtacatcagcaggaagaggcttgcaccagatggttccaacaaaagtttagaaccaacttttattttttggccgatggattgacctattcctaaactaatccttatgactgtactcaatcaaaggtagatctgtttgatctctggaactgagtggtgagttcagccccatgtaagccacatagactgggattgtccctaaagaaaaaagaaggtggccatactaaatggaagaaaggctggtagagtcaagtagaatctctctgatgacacagacaaggagagaaaagcatgtcaggttgaaagagatagaatgaccaataacagatggtgacaaaagtgagcccttgttcattgtcagctttctccttagtcctcttaagagctgagcccaaggcctcctcttgagtacatttccattctctgactcttttcattagtattctcatctctc

SEQ ID NO: 87137 - DNA, 1077 bp, Homo sapiens
tttaggagcccgccagggattttgcatactttttccatagaacttaggactccctatgtgtaactcctatttttctgggagttttcccttactttccagcagttrtggttgtccaaaatgagaaagattgtaggcttttattagagatttagtcagcacatatggcagagtctaaaaaccctcaagctagcaactgcaaaattgagcaattgccccatgtcttccctttatccaaaggttgacttctctccataatttttctcaccttcctgtgccttcaatagtttttctttgttttactttgctttttggcttatgtagggatacatttctatcattttaaccttgtattacttgcatcagttctatggcatattaacattattcttgggttacaagtaaatacaactcagcttatcttaaaacagagaaatgaatggcttacaatactgaaatattccaagagtaacctcaagagcagccggatcatggtgttcaaagagtatcaccaggaatttgtctttcttacatatattataacctggctgtgattcttcatgggctttgttctgaaggactctcctctatggttctcaaaggtccaggcttatgtgctaccagattaagtacatcagcaggaagaggcttgcaccagatggttccaacaaaagtttagaaccaacttttattttttggccgatggattgacctattcctaaactaatccttatgactgtactcaatcaaaggtagatctgtttgatctctggaactgagtggtgagttcagccccatgtaagccacatagactgggattgtccctaaagaaaaaagaaggtggccatactaaatggaagaaaggctggtagagtcaagtagaatctctctgatgacacagacaaggagagaaaagcatgtcaggttgaaagagatagaatgaccaataacagatggtgacaaaagtgagcccttgttcattgtcagctttctccttagtcctcttaagagctgagcccaaggcctcctcttgagtacatttccattctctgactcttttcattagtattctcatctctc

SEQ ID NO: 87138 - DNA, 1077 bp, Homo sapiens
tttaggagcccgccagggattttgcatactttttccatagaacttaggactccctatgtgtaactcctatttttctgggagttttcccttactttccagcagttatggttgtccaaaatgagaaagattgtaggcttttattagagatttagtcagcacatatggcagagtctaaaaaccctcaagctagcaactgcaaaattgagcaattgccccatgtcttccctttatccaaaggttgacttctctccmtaatttttctcaccttcctgtgccttcaatagtttttctttgttttactttgctttttggcttatgtagggatacatttctatcattttaaccttgtattacttgcatcagttctatggcatattaacattattcttgggttacaagtaaatacaactcagcttatcttaaaacagagaaatgaatggcttacaatactgaaatattccaagagtaacctcaagagcagccggatcatggtgttcaaagagtatcaccaggaatttgtctttcttacatatattataacctggctgtgattcttcatgggctttgttctgaaggactctcctctatggttctcaaaggtccaggcttatgtgctaccagattaagtacatcagcaggaagaggcttgcaccagatggttccaacaaaagtttagaaccaacttttattttttggccgatggattgacctattcctaaactaatccttatgactgtactcaatcaaaggtagatctgtttgatctctggaactgagtggtgagttcagccccatgtaagccacatagactgggattgtccctaaagaaaaaagaaggtggccatactaaatggaagaaaggctggtagagtcaagtagaatctctctgatgacacagacaaggagagaaaagcatgtcaggttgaaagagatagaatgaccaataacagatggtgacaaaagtgagcccttgttcattgtcagctttctccttagtcctcttaagagctgagcccaaggcctcctcttgagtacatttccattctctgactcttttcattagtattctcatctctc

SEQ ID NO: 87139 - DNA, 1077 bp, Homo sapiens
tttaggagcccgccagggattttgcatactttttccatagaacttaggactccctatgtgtaactcctatttttctgggagttttcccttactttccagcagttatggttgtccaaaatgagaaagattgtaggcttttattagagatttagtcagcacatatggcagagtctaaaaaccctcaagctagcaactgcaaaattgagcaattgccccatgtcttccctttatccaaaggttgacttctctccataatttttctcaccttcctgtgccttcaatagtttttctttgttttactttgctttttggcttatgtagggatacatttctatcattttaaccttgtattacttgcatcagttctatggcatattaacattattcttgggttacaagtaaatacaactcagcttatcttaaaacagagaaatgaatggcttacaatactgaaatattccaagagtaacctcaagarcagccggatcatggtgttcaaagagtatcaccaggaatttgtctttcttacatatattataacctggctgtgattcttcatgggctttgttctgaaggactctcctctatggttctcaaaggtccaggcttatgtgctaccagattaagtacatcagcaggaagaggcttgcaccagatggttccaacaaaagtttagaaccaacttttattttttggccgatggattgacctattcctaaactaatccttatgactgtactcaatcaaaggtagatctgtttgatctctggaactgagtggtgagttcagccccatgtaagccacatagactgggattgtccctaaagaaaaaagaaggtggccatactaaatggaagaaaggctggtagagtcaagtagaatctctctgatgacacagacaaggagagaaaagcatgtcaggttgaaagagatagaatgaccaataacagatggtgacaaaagtgagcccttgttcattgtcagctttctccttagtcctcttaagagctgagcccaaggcctcctcttgagtacatttccattctctgactcttttcattagtattctcatctctc

SEQ ID NO: 87140 - DNA, 1077 bp, Homo sapiens
tttaggagcccgccagggattttgcatactttttccatagaacttaggactccctatgtgtaactcctatttttctgggagttttcccttactttccagcagttatggttgtccaaaatgagaaagattgtaggcttttattagagatttagtcagcacatatggcagagtctaaaaaccctcaagctagcaactgcaaaattgagcaattgccccatgtcttccctttatccaaaggttgacttctctccataatttttctcaccttcctgtgccttcaatagtttttctttgttttactttgctttttggcttatgtagggatacatttctatcattttaaccttgtattacttgcatcagttctatggcatattaacattattcttgggttacaagtaaatacaactcagcttatcttaaaacagagaaatgaatggcttacaatactgaaatattccaagagtaacctcaagagcagccggatcatggtgttcaaagagtatcaccaggaatttgtctttcttacatatattataacctggctgtgattcttcatgggctttgttctgaaggactctcctctatggttctcaaaggtccaggcttatgtgctaccagattaagtacatcagcaggaagaggcttgcaccagatggttccaacaaaagtttagaaccaacttttattttttggccgatggattgacctattcctaaactaatccttatgactgtactcaatcaaaggtagatctgtttgatctctggaactgagtggtgwgttcagccccatgtaagccacatagactgggattgtccctaaagaaaaaagaaggtggccatactaaatggaagaaaggctggtagagtcaagtagaatctctctgatgacacagacaaggagagaaaagcatgtcaggttgaaagagatagaatgaccaataacagatggtgacaaaagtgagcccttgttcattgtcagctttctccttagtcctcttaagagctgagcccaaggcctcctcttgagtacatttccattctctgactcttttcattagtattctcatctctc

SEQ ID NO: 87141 - DNA, 1077 bp, Homo sapiens
tttaggagcccgccagggattttgcatactttttccatagaacttaggactccctatgtgtaactcctatttttctgggagttttcccttactttccagcagttatggttgtccaaaatgagaaagattgtaggcttttattagagatttagtcagcacatatggcagagtctaaaaaccctcaagctagcaactgcaaaattgagcaattgccccatgtcttccctttatccaaaggttgacttctctccataatttttctcaccttcctgtgccttcaatagtttttctttgttttactttgctttttggcttatgtagggatacatttctatcattttaaccttgtattacttgcatcagttctatggcatattaacattattcttgggttacaagtaaatacaactcagcttatcttaaaacagagaaatgaatggcttacaatactgaaatattccaagagtaacctcaagagcagccggatcatggtgttcaaagagtatcaccaggaatttgtctttcttacatatattataacctggctgtgattcttcatgggctttgttctgaaggactctcctctatggttctcaaaggtccaggcttatgtgctaccagattaagtacatcagcaggaagaggcttgcaccagatggttccaacaaaagtttagaaccaacttttattttttggccgatggattgacctattcctaaactaatccttatgactgtactcaatcaaaggtagatctgtttgatctctggaactgagtggtgagttcagccccatgtaagccacatagactgggattgtccctaaagaaaaaagaaggtggccatactaaatggaagaaaggctggtagagtcaagtagaatctctctgatgacacagacaaggagagaaaagcatgtcagkttgaaagagatagaatgaccaataacagatggtgacaaaagtgagcccttgttcattgtcagctttctccttagtcctcttaagagctgagcccaaggcctcctcttgagtacatttccattctctgactcttttcattagtattctcatctctc

SEQ ID NO: 87142 - DNA, 1077 bp, Homo sapiens
tttaggagcccgccagggattttgcatactttttccatagaacttaggactccctatgtgtaactcctatttttctgggagttttcccttactttccagcagttatggttgtccaaaatgagaaagattgtaggcttttattagagatttagtcagcacatatggcagagtctaaaaaccctcaagctagcaactgcaaaattgagcaattgccccatgtcttccctttatccaaaggttgacttctctccataatttttctcaccttcctgtgccttcaatagtttttctttgttttactttgctttttggcttatgtagggatacatttctatcattttaaccttgtattacttgcatcagttctatggcatattaacattattcttgggttacaagtaaatacaactcagcttatcttaaaacagagaaatgaatggcttacaatactgaaatattccaagagtaacctcaagagcagccggatcatggtgttcaaagagtatcaccaggaatttgtctttcttacatatattataacctggctgtgattcttcatgggctttgttctgaaggactctcctctatggttctcaaaggtccaggcttatgtgctaccagattaagtacatcagcaggaagaggcttgcaccagatggttccaacaaaagtttagaaccaacttttattttttggccgatggattgacctattcctaaactaatccttatgactgtactcaatcaaaggtagatctgtttgatctctggaactgagtggtgagttcagccccatgtaagccacatagactgggattgtccctaaagaaaaaagaaggtggccatactaaatggaagaaaggctggtagagtcaagtagaatctctctgatgacacagacaaggagagaaaagcatgtcaggttgaaagagatagaatgaccaataacagatggtgacaaaagtgagcccttgttcattgtcagctttctccttagtcctcttaagagctgagcccaaggcctcctcttgagtacatttccattctctgactcttttcattagtattctcatytctc

SEQ ID NO: 87143 - DNA, 986 bp, Homo sapiens
agtgctacaaggaaaggcatccctaattcttttttaagatgaatttattagtagtttgaccaagctagcacttggaataatacattctctttcttcttggattctgtgtccacatcatacacttcctgcaaggcgtgaaatgactagctgcatgtttttaaataattgggatggagtgagttttcttcactcatgtacacatgattattgctccattgctcttggyattgctttgaatatttttcttccttacattaaatgcaaatacaatagacaatttggagatattttccagctagtgaatagcacaagacttacaattcttgaaaagaaatgcttctaatccaaacacacttctgcatttttatgtctgattctattttctgttttaaaatggcatcttgaatgatcttcatacagaagcaatctttatccctattcaaagctgctgattttgcaggaaaggagaagaaaggctattctttaaattatacctttcatcaacctgaaataaacacaagtagtaagtctggaagtctttgaaaagagagacagagacacagaacaagagaaagagagaaattttatttccttgcagtttgcagatgttaattaccctgaatattgtaaaggaagctgaagcagctggcatggatttttgacaaccacatttaaattgtttataagaaactctgtctggtaaacttgggtgttttagatgcaaggagagattgcggcatctgaaatctgagaaagaaaaccaaaagcattgggtatgctcagagattatgcagtaggatgcaaggtcatttataaacagaatgaaaatcagacaggtcaaggctaggcctcttgaacaaacattgaatagttataccatgttcaatgtgtgcaaatcttgaatgaaactcattatagagatctatagagagaaaggccaaggcatatcatcctaaaaagaaaatattaatataaatttctgaaat

SEQ ID NO: 87144 - DNA, 632 bp, Homo sapiens
ttggcaaattctgaatgaaagcataattgccaaattagaattattttattcactcaatctaaaaatcagaagcatgtttgtaatatattcatctaccatgggcctttgttgagaaggatactagagaatatgctctttcaaaatagtaattaaacctaagagagagtaagacagaggaaaatagaatcaagagatcaataaatagaaatgagaggaattcccagagtggtggtggcggtaaatcccagggtaacaactcggtgcagacttagaggcaagtcagtcgagattgaagaaggttaataggtttagcaaagacttctacagcaagttgcaagggaaacatctttccacgtatctgcacatcttagrtgaaaatttatgcaattgttttagagtttttacttaaattaataagtactaagaaaagcaaacataccaaaaataaatgaagtaaggggtgctaggaaggatgcttataagtggatggtgtggaaaagaaaaagtctgtattctcatcagatgagaggatcagtaataaagcttaagatataacattatcaagaagtaacaatatttttaagtagcaatttaagcatataaccatgagacataaattaagtaccaaaata

SEQ ID NO: 87145 - DNA, 677 bp, Homo sapiens
gatccttacttaattctctctttagtctcttttctacacacacacaaacatacaatagaaaattcaatcagctgtgacttgaaattatccacactcaaatcactgagacccactcagcctgagtgtctttgtctctcaaagaaaggaatagaaaaaaaaaaggagggggagtgagtagaatatatgccagtgaaacaaatgcaaaggctcccaaataatctccctacatgcttgtttccctgctctcctatgtctaattggaagctgtgaatatccaccaccccactgtttctcagaagtctcattagaagccaacgtggttctgaattagaataagtgcaacatctgccaatgacgtctgttttgcaggtgccactgccaagtgccaatgctatacaatatttgttcaccactgcccacrtgggaccaaacccacacttaataagacagagactgcattgtcatgacatatgcgcaataatattccctgcatttaagccccagaagcatggttatttagctaacgtagacttctgctataatcatagcagtttttcttccagcagtaaaagtctcaccaactacagttcggcattttctgctttccaattactcgctgatgctatgccaagtacagagtaatattttcatatatcactaaacaaatgcagttgtgc

SEQ ID NO: 87146 - DNA, 594 bp, Homo sapiens
  misc_feature (1)...(594): n = A,T,C or G
tgcatatttggcctttttaaaggaactagaaagcaggtgagcttctgagtcatcgccttgagttgctcaatttgggaatgaccttgacatggagaagctaaaccactctgcttcctttgaagctagctgttagcaccagaggtgtcctgacaaagggaaaatgagatttaagactggccaagatggtggaagaaaagggaaaaggttttgtgaacttcttaaaacttcatgttatgttgtctttttctggcctggaagttcagccggaaaacaagaataattaatgacttcgagacattgttgaaaagtgcaaaatttatgaatcatccagtcatgctaatgtgactaacttttacaatattgaccattcccccccattctctgtattaacctaattatgtgttggtattagctrgatgtaaccttaggatattaagtatccttagctgaattttttttatttttcagaatttcttaaaagcatttaaattcannnnnnnnnnnnnnnnnnnnnnnnnnnnnnnnnnnnnnnnnnnnnnnnnnnnnnnnnnnnnnnnnnnnnnnnnnnnnnnnnnnnnnnnnnnnnnnnnnnnc

SEQ ID NO: 87147 - DNA, 676 bp, Homo sapiens
ttagctgggcgtggtgccatgcacctgtaatcctagctactcaggaggctgaggcaggagaacagcttaaacccggggggacggaggttgcagtgagccgagatcacgccattgcaccccagcctgggcaacaagagtgaaactccatttcaaaaaaataataaataaatgagagtctttgcaaatgtaatccagtgaagatgaggtcatactgggttaaagtgttctctaatgcaaagatggtgtccttataagaaaagataaatttggacacagactcagagatacagagacacagagggaagcacccgtgtgaacacggaggcagaatctcagggatgccgccacagccctgaacgccgaggggccaccagaagctggcagagaagcctggggcgctccctccctcagagcgccccgcctcaatctcagccttctggcctccagaaccgtgagacaatgcatgtctgtgtttgaagccactcagtttgtggagctttgtcacggcaaatccagamacaaacacaccggctttctcagagcttcctggtggccagcgccctgtgcctctgatggtatgggatgaaaaggtactgatgactgagtaatatttgcagtgtgtttgggccatgaaatctattcctaaggggcctgtggaggaagaatttggtaaaag

SEQ ID NO: 87148 - DNA, 547 bp, Homo sapiens
ctggaaactgtcttttaccrtatgatgtgataagttctctgaaagctcacccagaaagacagcatcattctttgtggcaagcagattgaaaattcagtatgtctgaggttgacatatatggacttcctttcaccccatctaaaagtaaactgctttttcactcagggctattttctcgtttcagtccttgtaaattttcttcactctgaatgcctaaaggattggcaaacatatatctagattaacatatttacttgcagctgtgaataaagcaaaactcaaaaaatatagttcaatgtttatattatgtttatattaacatcatgtgatataaatgaacactttcctagatttctattgactattaatttgcagtcattctacaatgaaagagctttcagatggtctggagaaaaagtcagaacctgaaatagaagtgaactgcagttataaaaataaatctctagaaagaagagaagagaaaagagaggaatgttctaatcttaccttcatcataatcttattagcatttctcagtgagtagttc

SEQ ID NO: 87149 - DNA, 547 bp, Homo sapiens
ctggaaactgtcttttaccgtawgatgtgataagttctctgaaagctcacccagaaagacagcatcattctttgtggcaagcagattgaaaattcagtatgtctgaggttgacatatatggacttcctttcaccccatctaaaagtaaactgctttttcactcagggctattttctcgtttcagtccttgtaaattttcttcactctgaatgcctaaaggattggcaaacatatatctagattaacatatttacttgcagctgtgaataaagcaaaactcaaaaaatatagttcaatgtttatattatgtttatattaacatcatgtgatataaatgaacactttcctagatttctattgactattaatttgcagtcattctacaatgaaagagctttcagatggtctggagaaaaagtcagaacctgaaatagaagtgaactgcagttataaaaataaatctctagaaagaagagaagagaaaagagaggaatgttctaatcttaccttcatcataatcttattagcatttctcagtgagtagttc

SEQ ID NO: 87150 - DNA, 547 bp, Homo sapiens
ctggaaactgtcttttaccgtatgatgtgataagttctctgaaagctcacccagaaagacagcatcattctttgtggcaagcagattgaaaattcagtatgtctgaggttgacatatatggacttcctttcaccccatctaaaagtwaactgctttttcactcagggctattttctcgtttcagtccttgtaaattttcttcactctgaatgcctaaaggattggcaaacatatatctagattaacatatttacttgcagctgtgaataaagcaaaactcaaaaaatatagttcaatgtttatattatgtttatattaacatcatgtgatataaatgaacactttcctagatttctattgactattaatttgcagtcattctacaatgaaagagctttcagatggtctggagaaaaagtcagaacctgaaatagaagtgaactgcagttataaaaataaatctctagaaagaagagaagagaaaagagaggaatgttctaatcttaccttcatcataatcttattagcatttctcagtgagtagttc

SEQ ID NO: 87151 - DNA, 951 bp, Homo sapiens
agttggcattgactgatttatctgcatgtttctctgttcacatcctctatatgaagaatcgaagtgggaatagcccaccaagtaatctgatagtaccaaagcactattctagttttgtataatttttaagtctcttctttaaatttttttttttttgcagactccatcccagacacagcataccagagtctccaaagggctaagctcagcaatctrttctcaagctcccaacaggagtcttatatagtcaggcaggcaatgatcatatatggggaccattagaaataatctaatgcataccctctgaacttcaaatttttagtattctcattttctgctcaagctcaatttcaacacagttcacagtttctcatatccaccatggcattctgccaaggaactacaactcgtgttctctaaacccatctgttctaagaatgctgggctggttatcaatttctaatgtacctgcttaaactttcctctctcaatgtgtccctgactgaactgcagaagacagaacaactgtactagccatctctttctgcatatcccatgtccccacagaggccactatgtcttcataaagctaactgccacgattttcacaagtgatatttttccttcatgattttccattttctacttgagcattaaaataccagggagaaaaggaagataatcgtttagcagctgggaaaacaagatatgtgccccagcacagtacatgctaagtattcagaatgtatagttatagtagataactataaattagataactattaaaatagttatattagataagtaatatttttctcatcttcaagacttaaaaagttaactgttttaagtggtattcaaaaaaggaaggtactcactcacatcaacccaattaaaaccacatttctatagctggatgtaacaatcttaatccaaatcattcaccaaagt

SEQ ID NO: 87152 - DNA, 951 bp, Homo sapiens
agttggcattgactgatttatctgcatgtttctctgttcacatcctctatatgaagaatcgaagtgggaatagcccaccaagtaatctgatagtaccaaagcactattctagttttgtataatttttaagtctcttctttaaatttttttttttttgcagactccatcccagacacagcataccagagtctccaaagggctaagctcagcaatctattctcaagctcccaacaggagtcttatatagtcaggcaggcaatgatcatatatggggaccattagaaataatctaatgcataccctctgaacttcaaatttktagtattctcattttctgctcaagctcaatttcaacacagttcacagtttctcatatccaccatggcattctgccaaggaactacaactcgtgttctctaaacccatctgttctaagaatgctgggctggttatcaatttctaatgtacctgcttaaactttcctctctcaatgtgtccctgactgaactgcagaagacagaacaactgtactagccatctctttctgcatatcccatgtccccacagaggccactatgtcttcataaagctaactgccacgattttcacaagtgatatttttccttcatgattttccattttctacttgagcattaaaataccagggagaaaaggaagataatcgtttagcagctgggaaaacaagatatgtgccccagcacagtacatgctaagtattcagaatgtatagttatagtagataactataaattagataactattaaaatagttatattagataagtaatatttttctcatcttcaagacttaaaaagttaactgttttaagtggtattcaaaaaaggaaggtactcactcacatcaacccaattaaaaccacatttctatagctggatgtaacaatcttaatccaaatcattcaccaaagt

SEQ ID NO: 87153 - DNA, 951 bp, Homo sapiens
agttggcattgactgatttatctgcatgtttctctgttcacatcctctatatgaagaatcgaagtgggaatagcccaccaagtaatctgatagtaccaaagcactattctagttttgtataatttttaagtctcttctttaaatttttttttttttgcagactccatcccagacacagcataccagagtctccaaagggctaagctcagcaatctattctcaagctcccaacaggagtcttatatagtcaggcaggcaatgatcatatatggggaccattagaaataatctaatgcataccctctgaacttcaaatttttagtattctcattttctgctcaagctcaatttcaacacagttcacagtttctcatatccaccatggcattctgccaaggaactacaactcgtgttctctaaacccatctgttctaagaatgctgggctggttatcaatttctaatgtacctgcttaaactttcctctctcaatrtgtccctgactgaactgcagaagacagaacaactgtactagccatctctttctgcatatcccatgtccccacagaggccactatgtcttcataaagctaactgccacgattttcacaagtgatatttttccttcatgattttccattttctacttgagcattaaaataccagggagaaaaggaagataatcgtttagcagctgggaaaacaagatatgtgccccagcacagtacatgctaagtattcagaatgtatagttatagtagataactataaattagataactattaaaatagttatattagataagtaatatttttctcatcttcaagacttaaaaagttaactgttttaagtggtattcaaaaaaggaaggtactcactcacatcaacccaattaaaaccacatttctatagctggatgtaacaatcttaatccaaatcattcaccaaagt

SEQ ID NO: 87154 - DNA, 1365 bp, Homo sapiens
  misc_feature (1)...(1365): n = A,T,C or G
tgcatttttggtataataaataaattctttttgtgatacagcataacattttaaatagtgacatactttactttctcaaaatactttaccaattcaagaccttctccagaagtatcttgcctcttctaacaatgcctgcttactcctatgtgaacaggggggtataaattgcattataaatttcaggttagtattaagaaattttagatatgcagatttcgattaaacttgaactttttcattcctcaatatactgtggcagatactgatatagctcaagaaatgttgatgtcatccttcacaatatggttcatttgggttatatgactggattctggcccaagggatgttcctggcagtaacgtacaccttttytaggcttagccatttgaaccactccacagggccctctattcctttcaactcctgaagcaattatattaaattccaagagctacagatattaaagatggaggagaactacttttacccattatatcttgtgtgatcagaaacaaacttgtacgaaattgagcacagtctgaactataccggggtgtgtgatacagtttggctgtgtcccccgcccaaatctcatcttgtaactgtagttctcataatccccacgtgtcatgagagggacccagtgggaggtaatttaatcttgggggctgttacctccatgctgttctcgtgatagtaaatgagttctcgtgagatctgatggttttataaagggctttcccccgtccttcactctgcatttctctggctgccaccatgtgaagaaggatgtgtttgcttcccctttcaccatgattgtaagtttcctgaggcctctcccgtcatgttgaactgtgagccaattaaacctctttccttcataaattatgccgtcctgggtatgtctttattagcagcatgagaatagactaatacagtgtgtgtgtgtgtgtgtgtgtgtgtgtgtgtgtgtgtgtgtgtgtgtgtgtgtgtgtgcatgcgtgtatttatcttataaagcatctaccagttttagagtaacttctgctattccaacaaagaaacatagaaaacattctttgaactaatgaggtctctattgcattcttttatttcaaactagtgtagtagataattgtgaaataatgtagtagataactgctagaaaatcacgttgaataatattgaataataatgtctaataagaacttctatttatnnnnnnnnnnnnnnnnnnnnnnnnnnnnnnnnnnnnnnnnnnnnnnnnnnnnnnnnnnnnnnnnnnnnnnnnnnnnnnnnnnnnnnnnnnnnnnnnnnnntatcctttgactcaacaatactttgaatgatttaagcattaca

SEQ ID NO: 87155 - DNA, 509 bp, Homo sapiens
actcaatcaaaatattattacaagagctcctgagaaatgtctcagtagctcaatctatacaaaatggaaagtaaaaatacgtgtgtcatagggttaaggtraagattaattgacaaaatacatatgattcataatgactgttgcctggcacagagcacacactttaaaatttaaaacacagagcataaaatttaaaaatacacatgtcatagggttaatgtgaggactgattgataaaatacatataattcactatgaacattgcctagcacatagcacatacttttaaacacttttataattaatttatactattattttattaacacatttagaggtttaaatgctgcaagattattacatcacttactacaagtgccttgaaaacatcgttttcctgcaaacattttttgactgtgaccttcattaacaaatagttttaaaattgtgacccaatgtacagacacatatttaacttaaattttcaacgaaataaaagcattattgta

SEQ ID NO: 87156 - DNA, 862 bp, Homo sapiens
tccttactatatttcttccaaaaatatgatgaaaatgtcagctgccttttttaaaaacagtgagcaattgctttaaaattctgtgactataccacctcaacatttttctttgaatttaccattaacacctatgtactttggtgaacattttaacatttagaaaatatcacttcgaagaaaactaaaaattgttgaaggaagcatgatccaaatatcctaccacttgaacacaatcatattattagcataaataaatgtttaattttagtctatataaaaagattcttgtacagaaattgactcagttttctcaaggaggaaattcgagraagtatgggttgttttgagagtggcataattgcctttatggtgctaatctcgctcgcaaagggctcaaggtgaattgagatagcttccctggagcaagagtcctccacaacgcaagtctgtctcaagcttacagcgcttccgaaataccgagacgactttcttcactagaagagctgaggaggaaaacacacacagcagcctcagcacaggtttcaagacaggagataaaataccagagaaccagtggaataaattgtcactaccattcagacttaggtttcaggaaatagagcttgagaaaaagagagataactgagcagactttgtcaaattgagaacctactttatgccttaatcctaatttatacttatattaatgtttgtgttatacttcccctgtaatatcaatctaccatacaaatttaattttgagaaaaacacttcgaaaatacatgactacctgacaccctcttgaaccaaggtgaatatgtcctttgcttctgtatatttaccaagtctggttactttttgg

SEQ ID NO: 87157 - DNA, 493 bp, Homo sapiens
tcacagccctccagaagggaggtctctgttcccgccacatcctcagtgccagagcagggcctggcacagagtgaatgaatgagtrgtgggggtctcggaggcaagcctcggcccacccaaccttcccacccacacgccatccgtcacctttgcccacgaagtaatcctggtagtagcgggcgcccaggtccacatgctcgatgctgtactgccggggccgactctgcgtccgctgctgctccttgggaacttccaacaccgagatgctggcgttggtgcggtaggcgctcagggcgggctctgcaggtggccctcgccgctgctcggggagcccacggaagcccgggagaagctcacgttgcgctcacactcgcccccgatctcattgcggaagtgcgggcagctgagcagcaggtcgttgctgttgtcatcgccgaggtcctgctccaagttctccttgcagtttaggtcctctgtgctggtgaaggccggg

SEQ ID NO: 87158 - DNA, 740 bp, Homo sapiens
tccctggatcgctgtggtcaggttggcagagccagagagagtcactgtcgtcaggacgtcctcrtggtgaaggctgctcaccccacgttgctctccccggggcccgtgcctcagagccccacacacaggagctcatttcactcccacagcaaaatccagagggggttctcccaattccacagacagaatgaagcaatgaagttaggcgaggttaagtgatcttgaattctcctcacacggccagccagtaagtagtagagttagaattagaacccaactctgctgaactccaaagcaagtggggtttgattcagtcccaataacctcttgccaccgcctgcccttcagaacgccctttctaagtgcaagtacatcccaccctccagcagatcagcgcctcacaaagcaacacgcaccagggctgggaagaccccggggagaagtcagcctaggacgccatcagctccaatgacaaaggacaacccagagtgccccccaggggaccttcctctaaaacttccagccacctgctctttggcatcgccctgcatcaccccaaaatatgagcatgaatgctgacgtggggatcaggtcgcctcactcgtgccagccccctccagagcaatcatgataggattttttattcacgttccagccctctgcagggcaggtttagtgtgaatacattgacagagtgaacctcggacacatccagggtctatttctgcaactacaaaccc

SEQ ID NO: 87159 - DNA, 740 bp, Homo sapiens
tccctggatcgctgtggtcaggttggcagagccagagagagtcactgtcgtcaggacgtcctcgtggtgaaggctgctcaccccacgttgctctccccggggcccgtgcctcagagccccacacacaggagctcatttcactcccacagcaaaatccagagggggttctcccaattccacagacagaatgaagcaatgaagttaggmgaggttaagtgatcttgaattctcctcacacggccagccagtaagtagtagagttagaattagaacccaactctgctgaactccaaagcaagtggggtttgattcagtcccaataacctcttgccaccgcctgcccttcagaacgccctttctaagtgcaagtacatcccaccctccagcagatcagcgcctcacaaagcaacacgcaccagggctgggaagaccccggggagaagtcagcctaggacgccatcagctccaatgacaaaggacaacccagagtgccccccaggggaccttcctctaaaacttccagccacctgctctttggcatcgccctgcatcaccccaaaatatgagcatgaatgctgacgtggggatcaggtcgcctcactcgtgccagccccctccagagcaatcatgataggattttttattcacgttccagccctctgcagggcaggtttagtgtgaatacattgacagagtgaacctcggacacatccagggtctatttctgcaactacaaaccc

SEQ ID NO: 87160 - DNA, 740 bp, Homo sapiens
tccctggatcgctgtggtcaggttggcagagccagagagagtcactgtcgtcaggacgtcctcgtggtgaaggctgctcaccccacgttgctctccccggggcccgtgcctcagagccccacacacaggagctcatttcactcccacagcaaaatccagagggggttctcccaattccacagacagaatgaagcaatgaagttaggcgaggttaagtgatctygaattctcctcacacggccagccagtaagtagtagagttagaattagaacccaactctgctgaactccaaagcaagtggggtttgattcagtcccaataacctcttgccaccgcctgcccttcagaacgccctttctaagtgcaagtacatcccaccctccagcagatcagcgcctcacaaagcaacacgcaccagggctgggaagaccccggggagaagtcagcctaggacgccatcagctccaatgacaaaggacaacccagagtgccccccaggggaccttcctctaaaacttccagccacctgctctttggcatcgccctgcatcaccccaaaatatgagcatgaatgctgacgtggggatcaggtcgcctcactcgtgccagccccctccagagcaatcatgataggattttttattcacgttccagccctctgcagggcaggtttagtgtgaatacattgacagagtgaacctcggacacatccagggtctatttctgcaactacaaaccc

SEQ ID NO: 87161 - DNA, 604 bp, Homo sapiens
tcctgccttcaatgtctaatcaactccacttgcttctctttctacctctttctagtttctcccctccagtgagtatatttaaaaggataccattttctttttggggagagggaagaatgatgaatgcaagactggagtcagggtggtcaattaagaaatgaytgtggttacaataacccaggtaagaagtgatgagaacctcaatgaggacagggtcagtaggaatgaggagggagcagtcttgagaaataccaatgaagcagaaggtctaaactaagtgactaggagaaatccagcaaggtttttatcttctgacttgaaggattaaggatttgtggtagcatcatcaacctgcagaggacagcaggcttggggaaagattgtgaagtctgttaagaaaacatgatttgagcggcctgaggcctctttaagttgtgatgtcaaagaaatagtcgaatacgtaggtctgttgcttaacagaaatttgcaatactatgagcttgataatatttctatttttaaagccaggagagtgagtcaaagaggtcatttacttaggaaagtaaatttacagtagatggcagattgggcactaaaagtcata

SEQ ID NO: 87162 - DNA, 604 bp, Homo sapiens
tcctgccttcaatgtctaatcaactccacttgcttctctttctacctctttctagtttctcccctccagtgagtatatttaaaaggataccattttctttttggggagagggaagaatgatgaatgcaagactggagtcagggtggtcaattaagaaatgactgtggttacaataacccaggtaagaagtgatgagaacctcaatgaggacagggtcagtaggaatgaggagggagcagtcttgagaaataccaatgaagcagaaggtctaaactaagtgactaggagaaatccagcaaggtttttatcttctgacttgaaggattaaggatttgtggtagcatcatcaacctgcagaggacagcaggcttggggaaagattgtgaagtctgttaagaaaacatgatttgagcggcctgaggcctctttaagttgtgatgtcaaagaaatagtcgaatacgtaggtctgttgcttaacagaaatttgcaatactatragcttgataatatttctatttttaaagccaggagagtgagtcaaagaggtcatttacttaggaaagtaaatttacagtagatggcagattgggcactaaaagtcata

SEQ ID NO: 87163 - DNA, 717 bp, Homo sapiens
ccagggttcaattagagctagaagatgaggaacacactgagagatgagatttaagatagacataggaatttttctgatgacctactgtgaatcctggagatcagagagtaagaatttcaggtcctggggcaggacgggagatgagagcacaatgcagagccattgggaattagagtctggcctaaatgggaataacagcataatgagrttagacttggtgggcataccaaggggtagcaatggctaggagagggacattgcaattttgaacacactggccttcttttgacccctacaggagaaagttaggaggccttgacaggcgtgttcttagtgcatgggactcactcagcacttccgcttgctcttgacctttgctgaaagggaaacccaaatgactaagtgtgtggtaaaaaaaggttcagattcactttacactttggagaaattaaaacatgagaataaattcttctctatcccattagacttacaaaaattagaagttagataatattcgatatttaagaaaatgggaagaaataggacatttcgtgtcctcatggtcagaaggcaaactgttggagacattctgaagagcaacctggctgtaattagacaaattaatatgcttataccctaccctaccaatccaattccagggcatatctgtcagaggaaaagtttggctgatctatgagtttagctggcctgtgaaaa

SEQ ID NO: 87164 - DNA, 543 bp, Homo sapiens
taacttaatagatttaaataaagaacaaaaatttaaaagttagctggttgaaactaagcatttcttgttaccgttctacttccacctaaattatttttgcattaagtgtttatatcaacatcataaaagtgtaagcaatgagcttctgtaaaacagtgagcaattcaagaatgaggaccatgttaaccatcagtggatctttaatgctaatgaaggtacgtccataataagttttgctgatcaaaattaattttacacatagaggaaataagaggcaaagcaatctttattaaatggcagagaattaaatcctttgaatgatgttacagaggctgccaaggtagcatgagcaatcactaagttgtatgattattggtttcttgggcaagaggagtgtgtcccatggagttcctatctgtagttaatactgcaatcttataccgactgtaaaacttgagtagggtctgtttagtaatttacrtagtagtagattacataggcaaacgtgtatcatagtggtttgctgcacagaccatcctatca

SEQ ID NO: 87165 - DNA, 558 bp, Homo sapiens
tgaaagcagattattgctgatttcctcaaatcccatcccttggccttttatctctccaactgaaatgggaatctcagaaaaattgacctttaaatratttggcttctgtctgaaacatgggtttaaagatgttaataaaagcagaaatgtcttatgacctataagaaataaactcttttgaacttaaggtgacgcttgttttattgttattttatttaaacgaagatgttaggttagaaaagtattttaaaatctatagtccaaaagagtaaaatttagacaaatatcattttgcaatatactaaaattaaagaatatttttaaagtatcaagtaaaagatttaaaatctaatcagtgtaataaaaagtggagttaattaatttatattgctgaacatctgtttctagttataataaagttggagtggttgcagagtgtattttcgcttttagatcatctaaaatcagatgctttgaaaaatttcaagtatagtgaatttgatgatggatacaacagtctcaagaaaaaatagcattttgtattatttgtactgttca

SEQ ID NO: 87166 - DNA, 2411 bp, Homo sapiens
aaggaaaatgaaccttagtaatccactggcattttataatcttaagcaaaagattcttcctgtggggtcagggatatttgccttatttgtaaaagcttttcagatataaagttgattctaggtcttccttctccaaaatctctatggcagagtacattcttcatgccccctttttttatgcctcactacagacagctacaatatctgtgaatttatgatccctggcaaggcaaaaatcacccgtctgtagccatactgttctactaaatatgacgaaagaactatatttttagttttctcagaaacaatcaacactaaaygtgatttttgtccacagtgtaccctcagcaaggcttctatgacagaaggacatttttataagggaatctatgaatatgacagcagcaataaacagctgaaaataatctatgaggcgtttgcaaattacccctcatgagctgtagtggttgtgaaagataatttgtggttctcacagaataccctgcaaattgggtctttcatctgcaatgttttttacagttaaaacatttcatttctcatattaacaaatgataactctgcatttgttaatgtaaacaatttgatttatatttttttctgtgctgagaagctgttgacatttcagggtaagtaattattttcattgccaactgctgtttgtggtgactgtaggcaaaagatagaaatctgaatataagtatgcatcattttaatcattttccttaaagactgcccataaagcaggaagtctgtttgcctgagttatcatctgtacttagaaatctaaaaggatataagtgttgacaagcaaggattctagtcacgttcagggttttctgtggtggatcagaaactccctcatgtaatctctgtgggtagggggactgggttgactccactgtcaccaaacctctggcagggccagtgcacttgctgactgaaatcactgcattaaaacgaagcatgcgttattgactcagtagctctcagctaatgtaatatccgttcaagtggctcatggggtggtgtcagattacacaagaacgccttgcactgtgtctggtacacggtacacggtgtgagctctggaaacatttggtgaaactgtgacaaggtataaaaacgtataattcctttctcacactgccttcttggccaagcatcctcagtccagggccatggaaagaaaggttttttcacttggaaagtagtcactacgtccataaagaaggatattgagccatgtccactgagtggcccatggagaggaggtgccagggcctgggacagagctgatgggtcagcaggctttccttggggtctttctttgatctacaatttaaggtatttcagtttctttcgatattcagaaaaaaattaccatcgaaatttaaactttgtcccctagaaaaatcatctagcaaaattgctgctccagaaaggtggtccatctttagcctctgggtgtgtggggcccacactagctatgaagcaccatggcaggtgtagattgtctctgtgattattagaggtgcatccgtgtgagacctgcacagtaggaagtgataggttcacccgtttccctgcatctatcccatacacatgtgaaccttccattcacatttcagttagagaatggactactgatttaggatccaaaccaatcattacatggcctgaaggagtgaatgtagagccagtaccctgagtagcaaatgtgttttatcctttgaaccaactccagttgattagttctggttgcctacagtgctgtcttaaggcatctgtggtgctgagctaggaagagtgctgagattgattagcaatgtctgtcatggcctctggagggacagctggccctatatttgccattctctgcttttaacatgtccataacttctctgtcctctcttcttgtgtaaaatgattttaatactaacaggtgactgtgagcatcatgagagagaacaggtagattccactttaagaaaacctagcatgagaaaatgcaaaatttacaaaatgcataaatctggagccaattatttctattacagaaagattccatgaaaggttcctttaaatagccagctcccctactgcattaaaatgatgattcaatttacaaaaattcactttgcatgcaactcttcaagaccatgtctgtggagtaaagccagccacacctgattttttaaaaccatggcctaaataacattgaggatagctgccgccacctatcttgagtctcttggtaattcccactctctgcagtcttccttcttactcctatcccagtgtggggagtagacaatctgggtggtggacaacagctgctggcttccaccctgacacggctgcatttcattagtgggtaaactgattgctca

SEQ ID NO: 87167 - DNA, 538 bp, Homo sapiens
cccgggattcatcagtatcgycaaggctcttttgttattgtcctgaagtttacacgagctccccaaattaaagatgaaggtcatttatttattgttgttagcctgtctcccattgtacatgagcagttgggtgttttattcttcagaagctctgttttcgaggtgtaagttcaatatggaggctccactgcacgctgaggatgcaagatgtccagattacatgataacccagggaagaactaacacacttttcttttatcattttagttgagaaatgctatggtgaatcgaaagacggggaagttttccatggaggtgaagaagacagtggacaaaggggtacatttttctcaaacatttttgctgcttaatttaaaacaaaccactgtgaaaaattagctttgaaagctatatctggaataaatatctttcgctgagatcatttttctcttgtctttacttatctcaaacaagattcatgtagtactgttaacctgatcatagtgtgtccatttatttttatttatttctgaagacg

SEQ ID NO: 87168 - DNA, 512 bp, Homo sapiens
gttacatgcctgtagtcccagctattcgggaggctgaggcaggagaattgcttgaactggggaggtggagattgcagtcagctgagattttgcctctgcactcaggcctgagtgacagagcgagacaccatctcaaacaagacaaaacaaaacaaaacaaaacaaaacaaaacaaaacaaagagtattcatttaaaaaaawttaaacatacagatggcttttctttaaagacttttaaattttacaagttctacatgtttacttcagaaaaatgagaaaatgcatgtaaacatgcagcaggaaataaagatcactcataatttcactatcccaaaatagtcactgttaacatttggatgtatattggttttgcttctttttttttaaaaaaaaaaaacaaaacaagtaagtacagtgatacagtttgggcctgtgtccctacccaaatctcatggtgaaatgtaatccctgatgctggaggtggggcctggtaggaggtgattggatcattg

SEQ ID NO: 87169 - DNA, 512 bp, Homo sapiens
gttacatgcctgtagtcccagctattcgggaggctgaggcaggagaattgcttgaactggggaggtggagattgcagtcagctgagattttgcctctgcactcaggcctgagtgacagagcgagacaccatctcaaacaagacaaaacaaaacaaaacaaaacaaaacaaaacaaaacaaagagtattcatttaaaaaaaattaaacatacagatggcttttctttaaagacttttaaattttacaagttctacaygtttacttcagaaaaatgagaaaatgcatgtaaacatgcagcaggaaataaagatcactcataatttcactatcccaaaatagtcactgttaacatttggatgtatattggttttgcttctttttttttaaaaaaaaaaaacaaaacaagtaagtacagtgatacagtttgggcctgtgtccctacccaaatctcatggtgaaatgtaatccctgatgctggaggtggggcctggtaggaggtgattggatcattg

SEQ ID NO: 87170 - DNA, 2830 bp, Homo sapiens
cagaagagtcagtaactcactctccctagagaagttggagactgtcagattgttggtcttaaaggaaatataggtactttgccaagagaaggaagataaatgtttatcctgctgaggaaagagaatgtgaaaagtgattatggcatgaaaaacatgccatgctggagacctggccagaagaattccacaagacctaatagtcacacattgtaggtgactctgtatgagaccaggcctgagaatgtgaatagctcttgcaggcaagcaattatattttttttaaagaaacactgtggaccccttgctcatcatcagtttacagaagtaccgccccagtgagaacagttgaacatgtttttatgatattcaaggataagagtcaactgcattcctggttggtgaattccagtatctcacaaaccttactctgaagtgctgcggggacttgaaaaggggcacacagatgtaaaaattagacaagcagtaggcattgacccatggcagaaatagaaacctgccctcccagtctgacatattatagatgctatctgccgttaattttgtctcatttgtttcccagtatttattacttgggttccactaattttagttttttttttccaaacactgtgttttcacttcaatgctcccagaattctccattcagaatttaagtgttgagaagtttgataaaagttttaattaccaacacatttagttggcacctggggaaatgggagggatccgtgccatggtaagttgtattttactctgaatttggaaaagtgtcagtttcagagatcagagttccagttattatcctggttcctctgcctcctcctcttcttcctctttttcttctttttcttattctaatctggtgtccgatttagcctggcctcctctagaaagagacaaagtcatcttagaaaaacaaatgcactgctcactttcttactatagtttcatgttgcttttcaggttatccrgtggggacatttctgaaagctaccaatttgcagttgcaaaggggtactacgtgtaatgtgccctgcattatttctatgtggccagcaccactcatatccctttgatcagtttagttaccatcataggcatgggctgcaacatatttatgctctagggttgctgttgctgccagacaggatgttgcctgccccaccactattacagggacaaatttaaatgtgcaaactcaggaaatgataggtgtaaatgcaagaattaagacagttccagtagagtgacatctatttttaagacatgcaacaagtgggtgatgaagaaattccaagaagaatcaaggactaaaacaagcactagggagaatagaagatagtaaagtatgggcatacagcagtgtggtccaacagcactgagatcatgatttagagcaaagaccatgaattgttatagaccaggtcaggatgtaaaaattgagaaggctgccaaagctatctctctctctctctgttttttttttaagtgaaagatcataggtattaaggatgtttgtaagagtttggattgaattgatggagcagataatctaagactaagaagaaaggaagtgaattctgaaatttattaacaattggggaaagtaaatgggtcaatgttccccaaatgtcaaagcaccaatgaataagaaataattgaacaagttatccagttagggagtagggcgcttgcatctaacatatcaaaggtaaagcttctctggacgacaaaatatgctgtatatgctcatgacaggatgtggctttggtggtttaaacagagacaaactctttggagtagaggtcaagaaacacaggtgtaatcaggtagccattaaagtcaccgaaataatgttagaccttgcatggtaaggaagaaaaagagccagagagcaaagaaagcgtgaacaatagggtgatttgcagtttgagaatatagaagaaaaatgtaaaggttactctaaaatgcctctttttactctgtagaaaatgaattatatttagataaatataaagtgcctcatcttcccatgacacacccagcaggatccctttatggtgtcaaatgtcatggcaagttctgagctcatactggcaaattcttaatgggagttcttggaaaggggatagtatgaagcagatttaaagaagctaaatgttactttgaagtcacctcacccttttcactaaagttgagagtcgtctaactatactctttattagtccaatagtttagtgttgtcattagctccaagaaataaaggttatccctgcttggaatcctccatctattcttttcaaacataatcaagatggcaattagaagaaatcacttagtttttggagttcaatttgatttcaagtattttacaaaacataatgttcaacgaactctattagtattcagaaaacaaatgtatccgtttttttttttttttctcagcatacatctattccctcaaagtgaagtgaatggtaattgggctaaaaaattaatttaaaagcatatatttgtttcctactgtgaaggatgcacaaaagctagagatataaccactgtggtcccaatcttggtagctagagaagctgtcaatgtttacatatctagtggaaaaagagaacaaatgaatgaaattagatttcaggcactgcgctaagtccgaactgtaagatacttgagatggttagcctttcccataaaatgaagacataaaacagtgttctttgcagaaatctttttcattctcattcataggaaggtggcaagagaatcaatgtgacatttgggagtggggtggcatttgggccca

SEQ ID NO: 87171 - DNA, 2830 bp, Homo sapiens
cagaagagtcagtaactcactctccctagagaagttggagactgtcagattgttggtcttaaaggaaatataggtactttgccaagagaaggaagataaatgtttatcctgctgaggaaagagaatgtgaaaagtgattatggcatgaaaaacatgccatgctggagacctggccagaagaattccacaagacctaatagtcacacattgtaggtgactctgtatgagaccaggcctgagaatgtgaatagctcttgcaggcaagcaattatattttttttaaagaaacactgtggaccccttgctcatcatcagtttacagaagtaccgccccagtgagaacagttgaacatgtttttatgatattcaaggataagagtcaactgcattcctggttggtgaattccagtatctcacaaaccttactctgaagtgctgcggggacttgaaaaggggcacacagatgtaaaaattagacaagcagtaggcattgacccatggcagaaatagaaacctgccctcccagtctgacatattatagatgctatctgccgttaattttgtctcatttgtttcccagtatttattacttgggttccactaattttagttttttttttccaaacactgtgttttcacttcaatgctcccagaattctccattcagaatttaagtgttgagaagtttgataaaagttttaattaccaacacatttagttggcacctggggaaatgggagggatccgtgccatggtaagttgtattttactctgaatttggaaaagtgtcagtttcagagatcagagttccagttattatcctggttcctctgcctcctcctcttcttcctctttttcttctttttcttattctaatctggtgtccgatttagcctggcctcctctagaaagagacaaagtcatcttagaaaaacaaatgcactgctcactttcttactatagtttcatgttgcttttcaggttatccggtggggacatttctgaaagctaccaatttgcagttgcaaaggggtactacgtgtaatgtgccctgcattatttctatgtggccagcaccactcatatccctttgatcagtttagttaccatcataggcatgggctgcaacatatttatgctctagggttgctgttgctgccagacaggatgttgcctgccccaccactattacagggacaaatttaaatgtgcaaactcaggaaatgataggtgtaaatgcaagaattaagacagttccagtagagtgacatctatttttaagacatgcaacaagtgggtgatgaagaaattccaagaagaatcaaggactaaaacaagcactagggagaatagaagatagtaaagtatgggcatacagcagtgtggtccaacagcactgagatcatgatttagagcaaagaccatgaattgttatagaccaggtcaggatgtaaaaattgagaaggctgccaaagctatctctctctctctctgttttttttttaagtgaaagatcataggtattaaggatgtttgtaagagtttggattgaattgatggagcagataatctaagactaagaagaaaggaagtgaattctgaaatttattaacaattggggaaagtaaatgggtcaatgttccccaaatgtcaaagcaccaatgaataagaaataattgaacaagttatccagttagggagtagggcgcttgcatctaacatatcaaaggtaaagcttctctggacgacaaaatatgctgtatatgctcatgacaggatgtggctttggtggtttaaacagagacaaactctttggagtagaggtcaagaaacacaggtgtaatcaggtagccattaaagtcaccgaaataatgttagaccttgcayggtaaggaagaaaaagagccagagagcaaagaaagcgtgaacaatagggtgatttgcagtttgagaatatagaagaaaaatgtaaaggttactctaaaatgcctctttttactctgtagaaaatgaattatatttagataaatataaagtgcctcatcttcccatgacacacccagcaggatccctttatggtgtcaaatgtcatggcaagttctgagctcatactggcaaattcttaatgggagttcttggaaaggggatagtatgaagcagatttaaagaagctaaatgttactttgaagtcacctcacccttttcactaaagttgagagtcgtctaactatactctttattagtccaatagtttagtgttgtcattagctccaagaaataaaggttatccctgcttggaatcctccatctattcttttcaaacataatcaagatggcaattagaagaaatcacttagtttttggagttcaatttgatttcaagtattttacaaaacataatgttcaacgaactctattagtattcagaaaacaaatgtatccgtttttttttttttttctcagcatacatctattccctcaaagtgaagtgaatggtaattgggctaaaaaattaatttaaaagcatatatttgtttcctactgtgaaggatgcacaaaagctagagatataaccactgtggtcccaatcttggtagctagagaagctgtcaatgtttacatatctagtggaaaaagagaacaaatgaatgaaattagatttcaggcactgcgctaagtccgaactgtaagatacttgagatggttagcctttcccataaaatgaagacataaaacagtgttctttgcagaaatctttttcattctcattcataggaaggtggcaagagaatcaatgtgacatttgggagtggggtggcatttgggccca

SEQ ID NO: 87172 - DNA, 859 bp, Homo sapiens
tcaactctcatttacaggtatagcagttttagaattgataacccattcccacctaagaaacaattttaccaactagagtacagtatgtatgtgcagatatgtgcagatccttttgtctttagtcttacggtttccagtcaaagccattttccaaagttactcaagttagcactcattttcccaaacccttcagtaatatgtgtggtgttaaagtgccaagtttgtggtcatttgttacacagtgatagaaaactaatatcctgtgatgcagcaatgatgttttggttgactagttctgagatctcataggttctggactattccataattattcaaatttcctgcagtttccttgttctctccacacattggagcttgtgaaggccacctcctacttcagctattgctctaaccagtctgcaggacgtctcattgacactatggtaaatttgtgatctgccaaatcgtggtgacttgtctctactcagtggtatttttcctcctacctttgctgttaaagttttgtgggttttgattttttttttctatcttacttgtttctatgggctcttaaagaggtacaaaaactatactgtcacatgcactacctttccacattttagttttttttttttttcaaaagtattcatttttgactattgagcttgcaagggacttttgtcatcatctayaagatgagaagaagtaactgaggtcttaaatacaaggtatcacagttaattatggagaaagaattagagccagggattccagaataataagacaaatacatttagcatactcttctgcttctcttatatcattcagaaatgtcttcccatttttggtgagaggcagg

SEQ ID NO: 87173 - DNA, 976 bp, Homo sapiens
tgcatattaattatttatatgcaaattaaggatcatgggacccagcactgttggaatatataactcttgctgctgtttctaaagtagtgctttattgtatcctgtgttactcttttgttagatcacattttcccattcacccaaacaaatgtcggataatattaagatcttcacttttgcattagctaaaagcaattatgaatgtgagaagatggaagttgttaatataaaacgattacactttatggctcatctttttcagtccccagtagcagaaatacatgccttttggctgctttttcttcctgagccatatattttaaagatttcaccttgaagtctatttttctcatacttgagcattttctgtttatacccattgattttccsctggagcagtatttaaagaaatgtaatttcaaactaaagatgaaataagtttcacttgattttgacctccagcccaacaaccctcattgccacagtgtgactctttcactgatgaagataaagggaattaagataaaggcagaggggtaatcattaattaaaagcagtgatctcaagatatattatattctaactatcaaaagaattatctaaaatagatttagaggtgaagctctacttgaactttggaattgacacaatgtctcattcttaacgggtcacccatgatcgctaatccccgagacagtggggatgttatcaggaggtactttagcccagtagctcctggaatgcttacatgactattatcaaattgaagtcaagagtgataagaaaaaaaatgataaaaataatagttgtgaattttctgtttcaagatatgtccttataaaaatgctaccaatcatcctaggctaatagctgggtttgtattttacctctgactgaacctatatggaattgcaaattgaagaaagttggtctttggcagaaatattgctgtcattttagttaatgtagtgttttt

SEQ ID NO: 87174 - DNA, 636 bp, Homo sapiens
actcttccaaagggaaaaagaccttcaggtgaaggtgaaagaaataaaataagtaaaaattaagagatggaaagtggtttgggtttagtcagtttggcaaagtgactgaagaatgacaccaatgggtgggagacaaaagctaaggaatagaagggaatgtggtaatttccacttaacttggaaggttgaatatgtgtctttacctatattgtttctcaaaacccactacactgaaactagataaattaaaaaattctaaactcacaaaaacaaaataaatggaggaagagagagcaattgagaacttttgaaaaatgcagagtagatggataaataaaatcagaattggcagagtgcaartcttagggaaaaagaaacaagctaactaatgctatggagagaattggaggcactaagtaccttgaagagagcaacttaacactagagtcctggattaaattttataagaagcggtaagacaccccagataccctcacaaaaccctctctttcctgaggtggaggggaccctggggattttacctcctggagctatccaagaaaggatgctccacattcacgaatgccagacaatagagggaacaagcgcacagttaataaggggattgtctaaaga

SEQ ID NO: 87175 - DNA, 990 bp, Homo sapiens
ttgctctgttcatggaatatagcctcaggggcaagttgtactatttcccagagtcaaactctgcccttcaacaaaagtcaacaggtacctacaaactcctcaggatacactttagcagctaaatttttttctaccaccttataggtagctgtaattccagtttgcaagccatgcttttttatataaaagtgctattagaaaagaacagaatttaggaaataaagttagtaaacagttttttcratgacccaagacagggccaaggtggtaaatttgagggttgccagaagaaatcccccagggggggaaaaaatattttccccagacaaaagaaaatgtctgaaagcatttgattacagaattgaaataaccattaccaaggctcattaaggcccctttctttcatgggagggttgttaggtaagaaaaaagatgcccagttaaatttaaatttcagataaacaatggacaatttttagtgtaggtgacttattgttgtttatatgaaattcaaattcagcttgatgatctgcgtatgttttgctaaatctgacaatcttaccctagatataagaatgatacactctccagccccagaaaacaataggtcaggtgacaaatactggctagaaaaatgtcaacagaagtagtatgtcaactccagactgaggttgtgaaaagcccctagaaaatcttccagccctttcttcctcttccatggcaaacacaaaggtttcatatcgtatcttatgataaaaaaagtatatttattaactgttatcctctctttgcgtgccttaaatatatatacatcttaaaataaatgaaaaatgctcaacttatctaatttttaccttctatttgtctgacttatctttattaccttgaattttcttctctgaattcccacttgtaggcactgacccactggcttaatgttgatccagcagtatagatcattacagatttcctatctcaaagccagggaaa

SEQ ID NO: 87176 - DNA, 990 bp, Homo sapiens
ttgctctgttcatggaatatagcctcaggggcaagttgtactatttcccagagtcaaactctgcccttcaacaaaagtcaacaggtacctacaaactcctcaggatacactttagcagctaaatttttttctaccaccttataggtagctgtaattccagtttgcaagccatgcttttttatataaaagtgctattagaaaagaacagaatttaggaaataaagttagtaaacagttttttcaatgacccaagacagggccaaggtggtaaatttgagggttgccagaagaaatcccccagggggggaaaaaatattttccccagacaaaakaaaatgtctgaaagcatttgattacagaattgaaataaccattaccaaggctcattaaggcccctttctttcatgggagggttgttaggtaagaaaaaagatgcccagttaaatttaaatttcagataaacaatggacaatttttagtgtaggtgacttattgttgtttatatgaaattcaaattcagcttgatgatctgcgtatgttttgctaaatctgacaatcttaccctagatataagaatgatacactctccagccccagaaaacaataggtcaggtgacaaatactggctagaaaaatgtcaacagaagtagtatgtcaactccagactgaggttgtgaaaagcccctagaaaatcttccagccctttcttcctcttccatggcaaacacaaaggtttcatatcgtatcttatgataaaaaaagtatatttattaactgttatcctctctttgcgtgccttaaatatatatacatcttaaaataaatgaaaaatgctcaacttatctaatttttaccttctatttgtctgacttatctttattaccttgaattttcttctctgaattcccacttgtaggcactgacccactggcttaatgttgatccagcagtatagatcattacagatttcctatctcaaagccagggaaa

SEQ ID NO: 87177 - DNA, 990 bp, Homo sapiens
ttgctctgttcatggaatatagcctcaggggcaagttgtactatttcccagagtcaaactctgcccttcaacaaaagtcaacaggtacctacaaactcctcaggatacactttagcagctaaatttttttctaccaccttataggtagctgtaattccagtttgcaagccatgcttttttatataaaagtgctattagaaaagaacagaatttaggaaataaagttagtaaacagttttttcaatgacccaagacagggccaaggtggtaaatttgagggttgccagaagaaatcccccagggggggaaaaaatattttccccagacaaaagaaaatgtctgaaagcatttgattacagaattgaaataaccattacyaaggctcattaaggcccctttctttcatgggagggttgttaggtaagaaaaaagatgcccagttaaatttaaatttcagataaacaatggacaatttttagtgtaggtgacttattgttgtttatatgaaattcaaattcagcttgatgatctgcgtatgttttgctaaatctgacaatcttaccctagatataagaatgatacactctccagccccagaaaacaataggtcaggtgacaaatactggctagaaaaatgtcaacagaagtagtatgtcaactccagactgaggttgtgaaaagcccctagaaaatcttccagccctttcttcctcttccatggcaaacacaaaggtttcatatcgtatcttatgataaaaaaagtatatttattaactgttatcctctctttgcgtgccttaaatatatatacatcttaaaataaatgaaaaatgctcaacttatctaatttttaccttctatttgtctgacttatctttattaccttgaattttcttctctgaattcccacttgtaggcactgacccactggcttaatgttgatccagcagtatagatcattacagatttcctatctcaaagccagggaaa

SEQ ID NO: 87178 - DNA, 990 bp, Homo sapiens
ttgctctgttcatggaatatagcctcaggggcaagttgtactatttcccagagtcaaactctgcccttcaacaaaagtcaacaggtacctacaaactcctcaggatacactttagcagctaaatttttttctaccaccttataggtagctgtaattccagtttgcaagccatgcttttttatataaaagtgctattagaaaagaacagaatttaggaaataaagttagtaaacagttttttcaatgacccaagacagggccaaggtggtaaatttgagggttgccagaagaaatcccccagggggggaaaaaatattttccccagacaaaagaaaatgtctgaaagcatttgattacagaattgaaataaccattaccaaggctcattaaggcccctttctttcatgggagggttgttaggtaagaaaaaagatgcccagttaaatttaaatttcagataaacaatggacaatttttagtgtaggtgacttattgttgtttatatgaaattcaaattcagcttgatgatctgcgtatgttttgctaaatctgacaatcttaccctagatataagaatgatacactctccagccccagaaaacaataggtcaggtgacaaatactggctagaaaaatgtcaacagaagtagtatgtcaactccagactgaggttgtgaaaagcccctagaaaatcttccagccctttcttcctcttccatggcaaacacaaaggtttcatatygtatcttatgataaaaaaagtatatttattaactgttatcctctctttgcgtgccttaaatatatatacatcttaaaataaatgaaaaatgctcaacttatctaatttttaccttctatttgtctgacttatctttattaccttgaattttcttctctgaattcccacttgtaggcactgacccactggcttaatgttgatccagcagtatagatcattacagatttcctatctcaaagccagggaaa

SEQ ID NO: 87179 - DNA, 553 bp, Homo sapiens
ggcatctctgcccactaacgccttggcctgtgattgtcattctcctactcacactcttctccatattctcagctccaggctgatctactcccttttttctaccaagtcagacttgctcacgctggtaccaataagttctgcctctcaatccagatttatggatgggacaggatacattttctaagaatagatcaatatatacagtttaccttccagaggactgattaagaattctttggctttctcagcttcatttgttatttcaatctttcattaaattaaccaggcatttattcattcaatcattcagtaaacatttattgagggtacatgatgcacccagacactggtttagcactggagatacagtggtgaacaagacagasaaatgtcctgaatatagctgtttacgttgtagtggggaaagacagatcatacacaaagggaaaagtaaattgaattatttccaatagtagcaattgttatttgaaaataaggtggagtaatgagatacataatactgggggaagtgatcaatttaaacacattgatc

SEQ ID NO: 87180 - DNA, 956 bp, Homo sapiens
ttctctccataataaccaggattgaaataattatatttgtcaattctgttaaatctatggctttaaaatgatactaagaaaatattagttctccagtcctttccagagtacaaaataagtttattttcttgttccagaaaaatcaaccatgttataaaacggccactgccatactatttaattctaaataataccaaaagggattcacctataagcagaggtttggatttttctctcctgctttctgaaatatagcaatattacctttagttatatataggattatgtaacagatctaatgaaatagcacatttaaatcttagcagaggactagatcaaggacctagccaggatgagaccaagatataggaatatccagtatatgctaatcagtgtcccttcaaataatattctttaaacataggtttaaaatttatttagaagagatgtyacatgttgcattgagacaacagtagagaagaaaagctctgctggccataccatcctcttacaagaaagtctggcctgagactcactctagaactgggtttatcaacattagcaccattgacatttggaagctgcataattttttgttggggtggggagtgggcatatcccgtccagtattgaatgcacagcaaaatccctggcctctactcacaagaggccagtagcctccccataccagctgtgacaaccagatatgtctcagacactgccaacagtttcctgggggcaaatcggcccctgagaaagaatcacttctctagagaggcagggatggtatttagctgaccagcaccaacgggaccatgctggtgtccgttgcctgcatctgtactgttggggctgcatccataccatgctacttgtgaaatatctataatatcagccctgtggaggaatgggatgaacaagccccttggaatatcactactctatcatgggcaagg

SEQ ID NO: 87181 - DNA, 727 bp, Homo sapiens
atcctgaatcctctagatatgaaacatgatttacgttctagattctcctaaacagagagtaatacaaaagtagcttgcayctgtagagtgtgagggagggagaaagaaacatgaacagcaagagcttgcaacttctaagtaatctcaatagaccatgacctagaagcttctgagagtgtgtctcacctggtattttaactcatccacttgaccagatggaatttggtacagacatgctctaggcagagcctgaatccagtgcccatgtcatatcttgctgttagagacataagccaacagaagaataccatctatgagaactctggttctctctggccctgggtttgtccattactaaggaagcaacagccacagagaatggattttggacagatccatgatgccaagggtatatggcctatggtcatctcactaaataaaagtcatttaatgactttaaacacagcttttccagaaaatacatgaatgcaatcttctccccaaaaggtggacttcatatataaagaatatttttctccaacttgacaaacttctgaaagttgactaaaatatggccttggaaatctggaaattgctctgcatatggtcttggaaaccattattagcccttgtatacaaagatagtggtaagttaggtgaagagaaacgtactaccatgacctagtaattgcatggccagtaaagttgtttgcaaatttgtaaggca

SEQ ID NO: 87182 - DNA, 727 bp, Homo sapiens
atcctgaatcctctagatatgaaacatgatttacgttctagattctcctaaacagagagtaatacaaaagtagcttgcacctgtagagtgtgagggagggagaaagaaacatgaacagcaagagcttgcaacttctaagtaatctcaatagaccatgacctagaagcttctgagagtgtgtctcacctggtattttaacycatccacttgaccagatggaatttggtacagacatgctctaggcagagcctgaatccagtgcccatgtcatatcttgctgttagagacataagccaacagaagaataccatctatgagaactctggttctctctggccctgggtttgtccattactaaggaagcaacagccacagagaatggattttggacagatccatgatgccaagggtatatggcctatggtcatctcactaaataaaagtcatttaatgactttaaacacagcttttccagaaaatacatgaatgcaatcttctccccaaaaggtggacttcatatataaagaatatttttctccaacttgacaaacttctgaaagttgactaaaatatggccttggaaatctggaaattgctctgcatatggtcttggaaaccattattagcccttgtatacaaagatagtggtaagttaggtgaagagaaacgtactaccatgacctagtaattgcatggccagtaaagttgtttgcaaatttgtaaggca

SEQ ID NO: 87183 - DNA, 663 bp, Homo sapiens
gggtggcccttaagggaggaacacatattggctcaggttgaggttggaccaaaggccagagagctggggaaaggagagaatattaaccaaagtgtggtttatgagtgttttgtactgattgatcagagggactagtggttcaactaatcatttgtgagacaaataatgggaatttagaggagctatatttggctttgtcaatagataaataagggagatatctgtgaatctgttgttttatttttattttaaacaatttattgtggacaatttaaaaatataccacacacaaagatagtgatatattcatcactcagcttcaattatcaacttttgctaattttgttttatatacagtagtccccgccttatcccccttttatccactgttttgctctctttggtttcagttacctgctgtcaacccctgtccaaaaatattaaatggaaagttccagaacaatttataaactttaagttgtatgccattctgaatagtgtgatgaagtctcttcctgtcctgctgacacgaatygtccttttgtccagtgtaggtgtgctttgtacgctccctgtctgtgatttacttcacagccatctggattaccagatcaaaaaaaagcagtacagttgaccctcgaacaccatgggtttaaactgtgt

SEQ ID NO: 87184 - DNA, 682 bp, Homo sapiens
gaacacaaagggtgagaggatttcgtatcctttgctgcttgatcacaggatcacaggatcacagggataaggtaacattcaccattgacaccttccattcactcttccacccattctgatctggattttgcactgaacctcctttttaaaatatatatgtatatgtcaccaatgacctcttccttgccargttcaatggactcttcttagtcctagtagtccctagctccccggagcatttggggcagctagccattttctcctttcttagactaattgcctttggctccatgaagccacagcctcctgtgttttttctttctcctctagcagtgattgttctttctcctttgtctgtttttctctctcccaatgcctaatgttgggacagagaagccctattttgtagggctcacattgtgggcctcttccaaagcttcatgctttcttaaattcatgtcattcatttccatacattcaaatattatgtctttgtctatcgccttccagtttttatctccatgccacatctctttccagaactcctgactcatgtatctaacatttgaaatctgtatcttatctatctaaaagaaatttcagacataaaatatcccaaatgaaattttattccctatgtatgtttccaaacttctcccatccacttagctgcataatctat

SEQ ID NO: 87185 - DNA, 830 bp, Homo sapiens
gtcctgacctcttttttctattatttgtaaaatattttctctcaaagccacaagtcttccctcttctgctggttttgacccatctcttttttaaaaaacctttctcttccttcatggtgtcctcctgaataaatgtactgagcctttgttaaatcctgttttgctctacaaggagattttatgtaaggtgggtgcccctttgtattttgcagggggtgtgcttaccaagcaacagcactgagctcctgacaagacagtctcacccaaagtggatggcacagagctgactcactgatagacaaagacattgactattcttaaatgtcctctattaattaatcccactctagaaatctgtgcttctctcccttatttgcataaaacacctgaaaacgagcattgctgaagacagtgtcaagtctggataaatgtaagctcaaccacatgctagctaaatgaccttgtacacattttctgaattttgcctgatgtgcatttttcaaatgcatttgataatatctttctgtctaatgatacaagcatttaccagtttttagaatgtatgaaaataaatgtatttagcaggtttaattagtttgtatatttaggtatgtgcattcaaaatcatttggaaatgcattttaagtatttcacagtgtcttttaaatacatttacctgtacatacacatccactgcagttgaggagatagraagctaaaacatttataaatgtgagctctgatttcaagagttttgagagggaatagtagagcacagcagaaagagcactggatttagaggcaaagaaaaagaaatgcattacaagcct

SEQ ID NO: 87186 - DNA, 696 bp, Homo sapiens
tcactgggattcatttctctcattaatatcactgacaagaatgttcccattataaatgttggcctacagaactatacaattaaaatatatagaactatcactttagttcttttcaaaagtacagagatcagggaatatatcacgactacaaatcggggtcatatttatacacttcaacaattaagtttattttttattaattcrtgtcattaagttcagcttgttttgtttttacactgctctatttaaaatgaaatggttttattgtctgtcttcctcccctataatggaagctgcataaaggtagtggccttatcattgttgttcactatggtattcctagctcctaaaataattatattaggagatagtaataataatagtagataatctataaatatctgttgaatgaataaaaagattctctatttctttgaataatggaaagttgatgatactgcttcaaagaaacagattaattggctggaattttggcttacatttggggatgtatttattaataaagtgcttttaagcacactcatttgtctagattagaacgaagttaatcattggaggtaggagtcaatgccagggtcttagacatcagaatcaaaatatgcaaaaatactaagtgcaagcctcaaaaaagaccaattttgactcattagaagaacaacatattttactaatgca

SEQ ID NO: 87187 - DNA, 746 bp, Homo sapiens
ctttcagaagaagaatcccagcaggaatcccgagtcttggcgaacaccctccagcaccacgaaatctttgaaragacccaactttgaagagtgccttcctaccattattgtgtgcatgcatacataattaggaagaaaaccatgccactctgatttctaaaacccatctgaactttcccctagttctctcctttgatagaaactgcccaaacccctttggaaatttttcggaggcagtgaggagccactggaggaagcatattttcatcaggctgttattataggaatgctgccaatggggaaaataatgggcaaagaatgaaaattctgattgcccaatcaagaaacttgaaccctctgagacttaaggccaagagatggaagggaaattaaatgacaaaataaatcaaagacatttttacctctcaatatatttgaagggggagaatgtagcctgcttgtgctatcccaaggttttcctcaagtaatatatttagagttgatttttagctcattattgcaattttccttcaagtggtttaacacagccacaattcaactcaacctcttttttttttttttttggccagtagtaaatcaagcattctgtatgggttctgtctatggttttcagatatcttgggggcttctcccttgactaagataaaaaggatgacttcaaaagattttaggatccaagaaatgtcacctttcatatagagaaggaggagaagttcaaagagggg

SEQ ID NO: 87188 - DNA, 955 bp, Homo sapiens
cattgggtctcccctgcgccaggcacgtgagcttggatgttgttgtttgaactaaccgaggctcacaggcacagtggctttactaagggacgaggctggagtgaaacgtttccatccatatacacacacctggttccactggagctgagaacggccccattgacagtgatctgaaatccgtcctggagacccccttggatagtcccagaaaaggggacggcctgcagggagaagacatggggcctcagtcaggtggccggcctcctgtttgctccccttcggggctagtcagtggctggcctgggtgtgaccgcaccatgcgaggggctagggtgcagctgtgaccaggacagaaggagtctcagccccacgggtcttagggtcctgtgtggaggcagacacaaatccaattagttactcagacagtctaagcttgtgataaggagaatcctggccctgagaggacgcgacagggagctgagcttgtgtgagagtctgagaggcagcggaggccacaccaggaacgctccaggcggaaggccttccttccaggcagggaagtagcaggcagacgccctgggctggtaaggaactaggtagcaatggggctgctggaccccatgccaagctcccagcaaagtgcccagcgccctggctggggactcaggaggcccaagggaacaaagggacccatcaagggtctgcaggttccaccgagagggtcaccagagagtgtcaagaagaaggcatgcacctctccccaccaccaccatataacaatggccaccgtgacctttgccctcctgaccaccttcagcagagcctcttcccagatgccctccgcagccccgagccccagcgtagtttccccacccatcccaggccccrtgggcaagcactttgtcaaattctctcttccgcgcctctttaaaggagctatgggccatggtgaggc

SEQ ID NO: 87189 - DNA, 548 bp, Homo sapiens
cagaaatctgggacttaacatagatcgtaccttctttctctctctctttacagccaagaaattctcaagtccgctgattcagtcttttaaatatcttccaattcatcctcttctctattagtacggccctatgtgagatccttgtctctcacttaygcttttgatacactgaactccttacagatattcttgcttctgatctcattgctccctagtctttcttctacattgctggcccaatgatctttcttccttgtacttgggccctaacaatgctgagcaacctgtagcaattcagatgtgtcatgttctcatgtgtcttttagaatatttactccccaccatccacaaagtttcaggagcaccttcctctatggccccattatttgctttttatatgtacctttgaaatgggactttcatattttaattatttgttgcatgtctactaaactgtaaggtccttcagttcagggactgaatcttaacttcccagagcctagcacagggcttggcatatgatagaactttaaatgtttgaattaacc

SEQ ID NO: 87190 - DNA, 1217 bp, Homo sapiens
attgtaaacatcctaaggggaaagcctcatatcttctattactcatcattttgtcatcgccccctagcacaggatctgacatatatgtaatggaaacaaaattattcattyggctaatgaataaaagttgtatttatctgatgctgtatttaccaattacataagagtatttttttggatgatcagttcttggagattcttactattttgtcaatatagaagtgcacattttgactgcttttacattgaacaagtatttactgtattataaaaaaaaatggcaaacatttatttttataggacttgcctggagactggaggctccctgaatgtgagactatttctgactttcccaggagtagagtgtctgccagagaggtgcagcttgaattaatgaaactgacactttgtgtcatcgctgaacatcctgaaatataatatttcagtcacaggatcaggaattttatactcactctagcaattatagcacaagcagtagcagcttcattgttaatatctataattatagcagtccttatggtaagattaaaattataagatcataatataatcacagtttatttcttaattcaatattcttctatttaattccttgattcactgtcattctatgtgtgcatatagtattaatttttctgtttctcatgtagagcaactaaaattcactttttatctttctgaatgtgccttataaagttatattttggggagatttgtcaaagtaaatattaggaattatggcttagggcaatttaaaattattggcatggttctgatttgcagatctgtctttgtaagtgttcacacagaatctcagtggctccacgtagttctccttaaattggctatttgcaacaaataaacactggaaattgagagaggaacgcttatgttttgtagatatacccctaggaggtttgcagtctcacagtgatgactgagcaaaagagatgtcagtgcacagagttcacaattactgaagcactgaaactaattttaaagcatttatgcttgcaagaaggtcatcattgtagtcatcttaaagcatttatccttgaataagtttaaattactaaaatctcattagccattaggggaagtaaaaaggtggttgagtcctggtttgaattatttttcagtagcttaaatctgcctgacttatattaattcctgacttatactgataaaatgtttaa

SEQ ID NO: 87191 - DNA, 1217 bp, Homo sapiens
attgtaaacatcctaaggggaaagcctcatatcttctattactcatcattttgtcatcgccccctagcacaggatctgacatatatgtaatggaaacaaaattattcatttggctaaygaataaaagttgtatttatctgatgctgtatttaccaattacataagagtatttttttggatgatcagttcttggagattcttactattttgtcaatatagaagtgcacattttgactgcttttacattgaacaagtatttactgtattataaaaaaaaatggcaaacatttatttttataggacttgcctggagactggaggctccctgaatgtgagactatttctgactttcccaggagtagagtgtctgccagagaggtgcagcttgaattaatgaaactgacactttgtgtcatcgctgaacatcctgaaatataatatttcagtcacaggatcaggaattttatactcactctagcaattatagcacaagcagtagcagcttcattgttaatatctataattatagcagtccttatggtaagattaaaattataagatcataatataatcacagtttatttcttaattcaatattcttctatttaattccttgattcactgtcattctatgtgtgcatatagtattaatttttctgtttctcatgtagagcaactaaaattcactttttatctttctgaatgtgccttataaagttatattttggggagatttgtcaaagtaaatattaggaattatggcttagggcaatttaaaattattggcatggttctgatttgcagatctgtctttgtaagtgttcacacagaatctcagtggctccacgtagttctccttaaattggctatttgcaacaaataaacactggaaattgagagaggaacgcttatgttttgtagatatacccctaggaggtttgcagtctcacagtgatgactgagcaaaagagatgtcagtgcacagagttcacaattactgaagcactgaaactaattttaaagcatttatgcttgcaagaaggtcatcattgtagtcatcttaaagcatttatccttgaataagtttaaattactaaaatctcattagccattaggggaagtaaaaaggtggttgagtcctggtttgaattatttttcagtagcttaaatctgcctgacttatattaattcctgacttatactgataaaatgtttaa

SEQ ID NO: 87192 - DNA, 1217 bp, Homo sapiens
attgtaaacatcctaaggggaaagcctcatatcttctattactcatcattttgtcatcgccccctagcacaggatctgacatatatgtaatggaaacaaaattattcatttggctaatgaataaaagttgtatttatctgatgctgtatttaccaattacataagagtatttttttggatgatcagttcttggagattcttactattttgtcaatatagaagtgcacattttgactgcttttacattgaacaagtatttactgtattataaaaaaaaatggcaaacatttatttttataggacttgcctggagactggaggctccctgaatgtgagactatttctgactttcccaggagtagagtgtctgccagagaggtgcagcttgaattaatgaaactgacactttgtgtcatcgctgaacatcctgaaatataatatttcagtcacaggatcaggaattttatactcactctagcaattatagcacaagcagtagcagcttcattgttaatatctataattatagcagtccttatggtaagattaaaattataagatcataatataatcacagtttatttcttaattcaatattcttctatttaattccttgattcactgtcattctatgtgtgcatatagtattaatttttctgtttctcatgtagagcaactaaaattcactttttatctttctgaatgtgccttataaagttatattttggggagatttgkcaaagtaaatattaggaattatggcttagggcaatttaaaattattggcatggttctgatttgcagatctgtctttgtaagtgttcacacagaatctcagtggctccacgtagttctccttaaattggctatttgcaacaaataaacactggaaattgagagaggaacgcttatgttttgtagatatacccctaggaggtttgcagtctcacagtgatgactgagcaaaagagatgtcagtgcacagagttcacaattactgaagcactgaaactaattttaaagcatttatgcttgcaagaaggtcatcattgtagtcatcttaaagcatttatccttgaataagtttaaattactaaaatctcattagccattaggggaagtaaaaaggtggttgagtcctggtttgaattatttttcagtagcttaaatctgcctgacttatattaattcctgacttatactgataaaatgtttaa

SEQ ID NO: 87193 - DNA, 1217 bp, Homo sapiens
attgtaaacatcctaaggggaaagcctcatatcttctattactcatcattttgtcatcgccccctagcacaggatctgacatatatgtaatggaaacaaaattattcatttggctaatgaataaaagttgtatttatctgatgctgtatttaccaattacataagagtatttttttggatgatcagttcttggagattcttactattttgtcaatatagaagtgcacattttgactgcttttacattgaacaagtatttactgtattataaaaaaaaatggcaaacatttatttttataggacttgcctggagactggaggctccctgaatgtgagactatttctgactttcccaggagtagagtgtctgccagagaggtgcagcttgaattaatgaaactgacactttgtgtcatcgctgaacatcctgaaatataatatttcagtcacaggatcaggaattttatactcactctagcaattatagcacaagcagtagcagcttcattgttaatatctataattatagcagtccttatggtaagattaaaattataagatcataatataatcacagtttatttcttaattcaatattcttctatttaattccttgattcactgtcattctatgtgtgcatatagtattaatttttctgtttctcatgtagagcaactaaaattcactttttatctttctgaatgtgccttataaagttatattttggggagatttgtcaaagtaaatattaggaattatggcttagggcaatttaaaattattggcatggttctgatttgcagatctgtctttgtaagtgttcacacagaatctcagtggctccacgtagttctccttaaattggctatttgcaacaaataaacactggaaattgagagaggaacgcttatgttttgtagatatacccctaggaggtttgcagtctcacagtgatgactgagcaaaagagatgtcagtgcacagagttcacaattactgaagcactgaaactaattttaaagcatttatgcttgcaagaaggtcatcattgtagtcatcttaaagcatttatccttgaataagtttaaattactaaaatctcattagccattaggggaagtaaaaaggtggttragtcctggtttgaattatttttcagtagcttaaatctgcctgacttatattaattcctgacttatactgataaaatgtttaa

SEQ ID NO: 87194 - DNA, 711 bp, Homo sapiens
atccactttttggtgatctttttagtaatagaacccttgaagattctgcctggcccatacatttcctacctaagattgcatttcccagtgtgccrtgaggctaggaggagtggtgtcactaaatttagccaaactgtatgggagaacattgtgactgacatttgaggtcatggactttaaaacagaaatgtctttgcctctatatcttctctttctcccttctctgtaggctaaaacattggaatatagacttggtgatccctgttttgatcaagaaatgagagaaggagtttaagaaataatgaagcaacaaggtagaaggaacatgggtctcagatgaatctgtgattaagagctgactagacatctgaaacacctgactgtgtctggattattatgagaaataaaaataaacttctgttatgtttgagctacttgtcacttgtcacaagacaaaggaaaaggagtttaggtttttaggagaagcaaacgtgaaaaggtaaatatatggggaaaacaaagagattaagattttggggggcaggtccatcatgatgccgactttccatcttcttcgtggctgtgaaacttgccctgagagagcatagatggaagtcctcacttctctgaagtgtcttcttttaggcagagaagggaagctctgggaaagcttatttctgcctttgtcgaatttcaattgccttcagcaaa

SEQ ID NO: 87195 - DNA, 636 bp, Homo sapiens
aaatttgtgtgtatttaaaaatatataggtttattatacacacacacatacactaggcttatggtaggtagctgacaaatatttgttaaataaaggaaaaatctcatagaaaattctgtatctcatgtactatttcatatataggactaatatcatatttgtttggttgcttttttacctttgaaaatatttgaaacttgcaactacaatttcaaggatacaaaagtaaagagaatagtatagtgaactctcatacaccctttactcaacctcgacaactaccaactcactcatgactattctatttgatctctaaatacctgaacaactacctcatcctcactggattattttaaagtaaatcccagatgtgtttgattgcctttaaagaaggactgaaaataatttttactaagcaaaattctaacaaaatgaaatgataggattcaatctcttctcatgtgctttttcaatgcagctgggcttcggtcrgattactcgtcaaccataggatctggtaaattctttcatgtggttccccctccccccatgttaatattgtttttggctgtaattttcattttctaattgatggtatttgttagtgctcttttaattgcaagtgacagaaatgca

SEQ ID NO: 87196 - DNA, 748 bp, Homo sapiens
gtacatacatatacatacatatatacatatatataaaatcatttctcagcattttggctgatttttagtgtagtatatgttaccagttttataaatatacatctataatcttagaggaactcctgtacctgtgacagatcaaagaattacagacatgactgtatgctaccctacatagaaattgccagttttgtaggtagcccaagagagtaatattagctcagatgtaggaaatggtgttttgtgtactatactagagatagatcttcaacakgttcttaaattttaactttcatggaaaaatcaaaggaaaaagacaaaattattattacattgaaaaaaatcaaagggagaacagccatcaggtaagccattcagtctccagaggacttgcacttgtcagtggagcctcagcgtgagtccacttaggaacaaagtatttctcaacagtttgtttgcatcttcaaaatatccagtagttattttcatgttacccaggagaaagactctgatggaagtggcttacgctgactaaattcacaagagccttattgaaaaatcaaacctccaattaactaatttggaatggaaaaaaaaaaagagtgctattaaagagtctgaaatatccatattgtcaggtcagaagtttctctcacttgtggaaaagtctgcctaggaagtcaatttacttttgaaaagttccttgttaaaaaccgagtgagcctaaagggagctggatcagaataat

SEQ ID NO: 87197 - DNA, 1109 bp, Homo sapiens
aatatgaaagaagaataatttaagtttaacaccctagggctgtttctttgctttcttccaatttcagtggcccagttcaccatgatttagaawagaaattgttaacttaatctcaaaatgaacatgtgactgatatgtcatcaatatgaaatgaagaaaaattatgaattatttgttacaattacatatatcatatgttacatgatttaaaatctaccttattagaggctaggtgtaacttgggactgcaaattttaaaaagcatatggaaggattggagggagtctatggaaagctaagcaaatgataagagggaaagaaaataaagtatgagtttcaatttaaggaagatggtaagtttatttagcctggagaagagaagacagtaatgatgtgagaatttcctcaaacatgtgaaggcgaagcagggatatattcaattcatctttattgtcttgaaataatatgcagcagaacatgggtttgaatgataacataaactcaacctttcattcgcaccgcaaagctatgtgcggagatattcttgaatttgcttaagtagaagttgtataaatgtatctgtagaagcagaatgtgtgatactatagtcacaggagtataaactagagaacttcattgagatggcctcgagttctatgggactgaagtcagttccacgacacttagtagaaatgaaagacaagtaaagaaattgtgtaatattttttcttaatgaactattctaggtatggctgaatgaattgtgctctccaagggatagtcaaagaagcagcagtagtcaccaatcactgagttttgttttgcaagatggaaattatgaattaagtgtaaaagctaagttttcctccacagtaaagtgagattctgagttactgtataagaaaagagaactatgtaagagaagagaggaagaagagatgagattacgggaatgaggaaagaatgttggaattttcagttagagaaattaacggatttgcttgtaagtagtgtgtggtatgaatcatctttctcttcttctctcccaaaagatttctccataagatcatcacaaaatatccatttctagttattgcgtcacaaaattg

SEQ ID NO: 87198 - DNA, 1444 bp, Homo sapiens
tattgattcaacatatggtttttatattctattagggaaatttgagataataagaaaatgtaagtgttccaaaaatgtattacatgttttgctagcttttctccagtgacaagagatggaaaatacatttgctctgtgtggatcttgcaccatgtcgagtgacataaataagataatctctttcatcctataattcttaaaacaatgttcagagatattctttcccaaatgctttaaattatggtctttcaaaagacaagtacagtatttgtaaagggaagaaggattttgtagcttgtgtgggaagagggttgtaatcaatgataaaaaagctgaagaaccacaatcttgcaggcagcaaagggcaatttacttggctagatcatgtctccaatagttgagctcttatctaattgtactaaaatgctataatgcctgttatgtttatttggagtattacaaataattttaggaggagggagaagtgaaaaggtggagcacagaggatttttagggcagtgaaactactctatatattataatggtggatacttgtcattatacatttgtctaaaccaatctaatgtacatggggtgaacccttatgtaaactatgggctctgtgtgataatgttgtatcgatataggtttatcagttgtaacaaatgtaccactctggtgaaggctgttagtagtgggggaggttatgtgtgtgtggggggtggtatatagaaaacctctgtaccttctgctcaatttttgctgtaaacctaaaatggctcttatgaaaaaagatgatgagaagaaaagactgcattaaaaataataaaagtatattcatttaacacatgcatttgagcaaagataaaataaatgaataaacaattctgcaygccttatgaccaggtgtaaattttggttgggtcctcagaaccttgtctgcggtactgcagtcagcatgacagctgcagcaggtgccctatgtctcctcattgccagccaactagcattgtgggaaagttagctttcttggccagaactaaatgataatcacggagcagcaagtcactttccagactttatttataacagcaaattagcagcaagacagccaatgaccacagtggttgctgaattagtttgcctggactgaactgggcttcccatgggtcttgatagcaaagagcactgggaagttgaatgtggaattacaaaacaagacatttctcacttcacaagtcctctcctctccctaccctttccttaggaatgttttaacccccacttctggcctttgcttcataataaatatctcagaaaattattctatgaattctttttgaaactgtttctgcctttgttttgttgttgttgtttttgttgtttgtttgcttgtttgttttgaaacatagccataaggaatgtttttcattgctctctttcc

SEQ ID NO: 87199 - DNA, 609 bp, Homo sapiens
agacaggaaaaactgactgactgagaccccatggtgagtcagtatcaaaaccagtacgaaaagtaaggtcctggctgggtgcggtggctcacgcctgtaatctcagcactttgggaggctgaggtgggcggatcacgaggtcaggagatcgagaccatcctggctaacacggtgaaaccccgtctctgctaaaaatacaaaaatttagccaagcatggtggctggagcccgtagtcccagctactcgggaggctgagataggagaatggcgtgaacccaggaggcggagcttgcagcactccagcctggacaacagaatgaatgagactgagtctaaaaaaaaaaaaaaagaaaagaaaagaaaagtaaggtcccaggactctccaatcaaagaaaatctcactaaaggwacacaagttacttcagggtctaatttcacttcttaacttagatttcagcttttttcaaacccaaactacaggaatcttgcagtttcacccttactgttacatttcctccatttttagtggcacaaaaaaactcaccaatttacactgaaacattagagccagtttaggttaaaggataaagagtagatatgtaactata

SEQ ID NO: 87200 - DNA, 938 bp, Homo sapiens
agggccttgtccacatattcaccaaaagggttgggatatcttattccacccccacccaccactcactacccccattagccagaatgaacaacataatagaaattaacggcggggctagtcttcttcaggatgaagcctctcagctgtcacccctgcctccctcttaaatggctgacatcatctctgatcctcccccaaacaagtggctctttctctggtcccaaataattagtttccccagacacaatgggaaggccttagcccaagcttttagggaagacgtttgaagcataagggaatactagtgttttgcttgggctatgggacaaaagttccggaaatgaaagggtttttttgttgttgtttgtaattatgcacatcctgcagtatctgcataatgggtccaattcagccctggccttgcagaaaaattaccatgtccctggaggaaggtcagcatatgagtgaacaggaagcttcatgctgacaatagtgccttaatttttttttctttttaaattttaaggatgaactttgctcttttagtccatttgtctgcaggcatttgcagacatgttctaaacacacccacacttgtaaaatgtacgtacttaaaatcagccttggctttgagagaacagtataaagattttggatgatagatgrgctgactgctatattcttcccggtacctggtggaattttaaagccagaggaagccttatatgttaatcaaactttttgtaactagagatagtcaggaacactattggctaaaggactcaacgtgaataagacatgagatgggtttaggttcattttcaaaaaaatttctttagagaactatacaaaatttcattttgatttaacaccagaaggttgttttttttttttaaaacatgctggttctgctcatggttttgtagaatatctatgca

SEQ ID NO: 87201 - DNA, 938 bp, Homo sapiens
agggccttgtccacatattcaccaaaagggttgggatatcttattccacccccacccaccactcactacccccattagccagaatgaacaacataatagaaattaacggcggggctagtcttcttcaggatgaagcctctcagctgtcacccctgcctccctcttaaatggctgacatcatctctgatcctcccccaaacaagtggctctttctctggtcccaaataattagtttccccagacacaatgggaaggccttagcccaagcttttagggaagacgtttgaagcataagggaatactagtgttttgcttgggctatgggacaaaagttccggaaatgaaagggtttttttgttgttgtttgtaattatgcacatcctgcagtatctgcataatgggtccaattcagccctggccttgcagaaaaattaccatgtccctggaggaaggtcagcatatgagtgaacaggaagcttcatgctgacaatagtgccttaatttttttttctttttaaattttaaggatgaactttgctcttttagtccatttgtctgcaggcatttgcagacatgttctaaacacacccacacttgtaaaatgtacgtacttaaaatcagccttggctttgagagaacagtataaagattttggatgatagatgggctgactgctatattcttcccggtacctggtggaattttaaagccagaggaagccttatatgttaatcaaactttttgtaactagagatagtcaggaacactattggctaaaggaytcaacgtgaataagacatgagatgggtttaggttcattttcaaaaaaatttctttagagaactatacaaaatttcattttgatttaacaccagaaggttgttttttttttttaaaacatgctggttctgctcatggttttgtagaatatctatgca

SEQ ID NO: 87202 - DNA, 938 bp, Homo sapiens
agggccttgtccacatattcaccaaaagggttgggatatcttattccacccccacccaccactcactacccccattagccagaatgaacaacataatagaaattaacggcggggctagtcttcttcaggatgaagcctctcagctgtcacccctgcctccctcttaaatggctgacatcatctctgatcctcccccaaacaagtggctctttctctggtcccaaataattagtttccccagacacaatgggaaggccttagcccaagcttttagggaagacgtttgaagcataagggaatactagtgttttgcttgggctatgggacaaaagttccggaaatgaaagggtttttttgttgttgtttgtaattatgcacatcctgcagtatctgcataatgggtccaattcagccctggccttgcagaaaaattaccatgtccctggaggaaggtcagcatatgagtgaacaggaagcttcatgctgacaatagtgccttaatttttttttctttttaaattttaaggatgaactttgctcttttagtccatttgtctgcaggcatttgcagacatgttctaaacacacccacacttgtaaaatgtacgtacttaaaatcagccttggctttgagagaacagtataaagattttggatgatagatgggctgactgctatattcttcccggtacctggtggaattttaaagccagaggaagccttatatgttaatcaaactttttgtaactagagatagtcaggaacactattggctaaaggactcaacgtgaataagacatgagatgggtttaggttcattttcaaaaaaatttctttagagaactatacaaaatttcattttgatttaacaccagaaggttgttttttttttttwaaacatgctggttctgctcatggttttgtagaatatctatgca

SEQ ID NO: 87203 - DNA, 1229 bp, Homo sapiens
gcatgacatgtccactctggcacctggtgtccctgagtggatggccaagcccctgggtctctgcagagcctcattaagctgcacaccttcctctccagctataactggatgtttgctttcctgtttctttgattctgaatacatgctgtcctggccaccacagtctccgtctccctgcggaggtcacaaagtggtctcggtctcggtctccctgccaaggtcactagttataccctcaagggtggggtgggaggcaaaagccgcttcaggtggctgggtcagctccccatcgaggctttccactggacagggaaagggcggacctctgccctgtccacacctgctcttcttctccccagacaacttcctccttccagggctggtatcctctgcagctcctttgcacccacatcccccacccacaccctccggctccacaagatcatccaagaaccaggccctggaggatccttctgggtgcctccccacattctctgcgccagtggccagcaccaagacccccgattttctgtgctcagtgaagtccctgctaccctttcctggtaagagcatcgaaacattcaccccaggacaagtgagggcatcagagaaatggtggcatcatcaccacaggtcacaactcagatgtccccagggaccatccaggtggggatgatggcaaactccrggggggccaccattcagccccactgtcctgccacacagcaggtcagacctgcaccgcgagaagttcaggtttcaggaagaagctagcaattctgatgctaaggtaagaatcgtctgatgtaaatattggccactgtcttgaaactgaaacagtgtttgggtcacctgcaggctgagtggtgcaaagaccactgcccggcaggctccggtccaagagcgagcaagcctgccgtttcccaaatgactgtcgcatgcgatctggcagccagcagcccctgaggctggcacacacaaggttgttctatccctgtcttacagataacaaggcagctctggagggcgggtggtttaccccaaaatcacagttcacctaggtgtgcacctggggctgtttctgagctgcccggcccaggcctctattagttccctgccctggctcaaggggcaggctgcccacggtggtgctcacaggacgatcctaggtccctgcaagtatgagaagcgtgtgagtattttgtttaatagttaagtatataatgcat

SEQ ID NO: 87204 - DNA, 1229 bp, Homo sapiens
gcatgacatgtccactctggcacctggtgtccctgagtggatggccaagcccctgggtctctgcagagcctcattaagctgcacaccttcctctccagctataactggatgtttgctttcctgtttctttgattctgaatacatgctgtcctggccaccacagtctccgtctccctgcggaggtcacaaagtggtctcggtctcggtctccctgccaaggtcactagttataccctcaagggtggggtgggaggcaaaagccgcttcaggtggctgggtcagctccccatcgaggctttccactggacagggaaagggcggacctctgccctgtccacacctgctcttcttctccccagacaacttcctccttccagggctggtatcctctgcagctcctttgcacccacatcccccacccacaccctccggctccacaagatcatccaagaaccaggccctggaggatccttctgggtgcctccccacattctctgcgccagtggccagcaccaagacccccgattttctgtgctcagtgaagtccctgctaccctttcctggtaagagcatcgaaacattcaccccaggacaagtgagggcatcagagaaatggtggcatcatcaccacaggtcacaactcagatgtccccagggaccatccaggtggggatgatggcaaactccgggggggccaccattcagccccmctgtcctgccacacagcaggtcagacctgcaccgcgagaagttcaggtttcaggaagaagctagcaattctgatgctaaggtaagaatcgtctgatgtaaatattggccactgtcttgaaactgaaacagtgtttgggtcacctgcaggctgagtggtgcaaagaccactgcccggcaggctccggtccaagagcgagcaagcctgccgtttcccaaatgactgtcgcatgcgatctggcagccagcagcccctgaggctggcacacacaaggttgttctatccctgtcttacagataacaaggcagctctggagggcgggtggtttaccccaaaatcacagttcacctaggtgtgcacctggggctgtttctgagctgcccggcccaggcctctattagttccctgccctggctcaaggggcaggctgcccacggtggtgctcacaggacgatcctaggtccctgcaagtatgagaagcgtgtgagtattttgtttaatagttaagtatataatgcat

SEQ ID NO: 87205 - DNA, 1229 bp, Homo sapiens
gcatgacatgtccactctggcacctggtgtccctgagtggatggccaagcccctgggtctctgcagagcctcattaagctgcacaccttcctctccagctataactggatgtttgctttcctgtttctttgattctgaatacatgctgtcctggccaccacagtctccgtctccctgcggaggtcacaaagtggtctcggtctcggtctccctgccaaggtcactagttataccctcaagggtggggtgggaggcaaaagccgcttcaggtggctgggtcagctccccatcgaggctttccactggacagggaaagggcggacctctgccctgtccacacctgctcttcttctccccagacaacttcctccttccagggctggtatcctctgcagctcctttgcacccacatcccccacccacaccctccggctccacaagatcatccaagaaccaggccctggaggatccttctgggtgcctccccacattctctgcgccagtggccagcaccaagacccccgattttctgtgctcagtgaagtccctgctaccctttcctggtaagagcatcgaaacattcaccccaggacaagtgagggcatcagagaaatggtggcatcatcaccacaggtcacaactcagatgtccccagggaccatccaggtggggatgatggcaaactccgggggggccaccattcagccccactgtcctgccacacagcaggtcagacctgcaccgcgagaagttcaggtttcaggaagaagctagcaattctgatgctaaggtaagaatcgtctgatgtaaatattggccactgtcttgaaactgaaacagtgtttgggtcacctgcaggctgagtggtgcaaagaccactgcccggcaggctccggtccaagagcgagcaagcctgccgtttcccaaatgactgtcgcatgcgatctggcagccagcagcccctgaggctggcacacacaaggttgttctatccctgtcttacagataacaaggcagctctggagggcgggtggtttaccccaaaatcacagttcacctaggtgtgcacctggggctgtttctgagctgcccggcccaggcctctattagttccctgccctggctcaaggggcaggctgcccacggtggtgctcacaggacgatcctaggtccctgcaagtatgagaagcrtgtgagtattttgtttaatagttaagtatataatgcat

SEQ ID NO: 87206 - DNA, 540 bp, Homo sapiens
aacccagaaaaagccaccacagatatgcccccgcccttcccgaatccaatgcaaggaaggagcacatattactctcccgtcctcctcgcccctgccaccgagcycacgccgagcccatggttgttttttactttgtaaaaataaataagcctgggatgtttatggagctgcttgaactcaggaacagcataaactatgagtttgtaaacctgaccgtggttttgggcctcataaccattgctcaaaattctggtttccacaaagcccaagatgtgtcctcccacatgtttttgccttgctaagctgttgtttatttttactggaacaaagtccattttgtcctacaatcatgtacaatgaactcatcacagaaggccatctgatgtccaaaatgccttagagcttcctacgaggactgcattaagctttgttcctccctagaaatcataactttcattttgcctaggagaaaggaacttgaaggctccaagctggtttggaaggcagagaacaatttcccagaaaatttgcaatgtgatc

SEQ ID NO: 87207 - DNA, 540 bp, Homo sapiens
aacccagaaaaagccaccacagatatgcccccgcccttcccgaatccaatgcaaggaaggagcacatattactctcccgtcctcctcgcccctgccaccgagctcacgccgagcccatggttgttttttactttgtaaaaataaataagcctgggatgtttatggagctgcttgaactcaggaacagcataaactatgagtttgtaaacctgaccgtggttttgggcctcataaccattgctcaaaattctggtttccacaaagcccaagatgtgtcctcccacatgtttttgccttgctaagctgttgtttatttttactggaacaaagtccattttgtcctacaatcatgtacaatgaactcatcacagaaggccatctgatgtccaaaatgccttagagcttcmtacgaggactgcattaagctttgttcctccctagaaatcataactttcattttgcctaggagaaaggaacttgaaggctccaagctggtttggaaggcagagaacaatttcccagaaaatttgcaatgtgatc

SEQ ID NO: 87208 - DNA, 879 bp, Homo sapiens
gatccaccgactaaaccagcacgcatgtggcattctggcctccaaggagaacacatctctttccctaagttcctctccccttgtggaacagactcactcctccataccctcattcaaacagcaaacacaggcatgggcgtgaatcagcacccggacatcaggaaggcrcagtgaacatgaaacaccacccctgggtagcaggcctcagaaacacctctgccagcaggctgactttactcatttgatcatatcacacaattccacacaaatacacacctgggtcagagcccacaggctggtgtttacagtcctttctctccccagctcctgccactgcctcacctctgtggccccctcctcgccccggcccactaacaaccttgaatgcactgcccgtgcctttctgataatcacataccaagatacaaatgttgcatatttaaacacatatacagaaacacacccacgcataggggattttggcgtggctttacaaaaatgggatatgtatcactctagtctacgtcttgtccttttcacacaatgttaccttggaaatccctgcaaacgcactggcatggtgacaaccccattctttcacagttacaccgcgtttcgtgacttcatcattcctcttttagtatagagatgaataatctcccttagcgtggatgtattagaatttacacaatcattagtgttatgtttattcatgcttctgttatttctactataaataatgtcaatattctgattttatacttttttatgtcatcttacttgctgattcttttaattctctgacatagattctcatgggtgtactgagaagttacagggtctgttctggatgaattctctatctgttccaatggccta

SEQ ID NO: 87209 - DNA, 879 bp, Homo sapiens
gatccaccgactaaaccagcacgcatgtggcattctggcctccaaggagaacacatctctttccctaagttcctctccccttgtggaacagactcactcctccataccctcattcaaacagcaaacacaggcatgggcgtgaatcagcacccggacatcaggaaggcgcagtgaacatgaaacaccacccctgggtagcaggcctcagaaacacctctgccagcaggctgactttactcatttgatcatatcacacaattccacacaaatacacacctgggtcagagcccacaggctggtgtttacagtcctttctctccccagctcctgccactgcctcacctctgtggccccctcctcgccccggcccactaacaaccttgaatgcactgcccgtgcctttctgataatcacataccaakatacaaatgttgcatatttaaacacatatacagaaacacacccacgcataggggattttggcgtggctttacaaaaatgggatatgtatcactctagtctacgtcttgtccttttcacacaatgttaccttggaaatccctgcaaacgcactggcatggtgacaaccccattctttcacagttacaccgcgtttcgtgacttcatcattcctcttttagtatagagatgaataatctcccttagcgtggatgtattagaatttacacaatcattagtgttatgtttattcatgcttctgttatttctactataaataatgtcaatattctgattttatacttttttatgtcatcttacttgctgattcttttaattctctgacatagattctcatgggtgtactgagaagttacagggtctgttctggatgaattctctatctgttccaatggccta

SEQ ID NO: 87210 - DNA, 1274 bp, Homo sapiens
gctttccacaaaaaggacactgcccacttaggaggaagagggcttcccgaaacaaccgccaaggaggaggctggatatggagaaaagccaggggaaaacctcggagagagaagggacacgatgaggatgtgagctcctgggcagaaagcctgcaccaggaacccaaagaccagcagtgcgagcccagggccccgtggaagacatgactccaggtcacagaaataaggtcactggtgctatttttattaattctctgagtatgctgcaaatttggtttctacttatgatatcagccttaactttttttaatgttgatgagaatgttcatttttagcacagataattttaaaccattttcaaatcaaccttttctggcaatgaatagatgcgatttgctcccacgaagacacccacagactgtcaaaatccagtgtcactgagagggaacggtgacggatsgagaccgtaagtcgtctctgtcccaggttttttactcgctggactgggcccttcccttccttcctctaccacaaacacacaacacacaaaaacacagttttcagctgaaagtgtaactccccctctctctggccatgccaagaaggaagttacactgggctttagttctcagcctatagaggatccagaggaggaggctctgctcccaggcagctgatgctccagagcatgggcacaaccccaacattcgggatttggctcaaggctgggctctgccccctgatgtgacctcagggaatcacctatgactcttgtctgtgatggccacatgacagcacctcactcgtgtggtgtggactgaaggagagggcaggcctgaatgcaagccccaatgaggcagggagcatccacaggcagggagcccccataggcagggagcaccttccaggcaaggagcactcactggccgggagcacccatcaggtagggagcactcactggccaggagcactaccaggaagtgagcacccactggcagggagcacttgcaggcagggggtatccaacagttaagagcatctacatgcagggagcatctgaaatggtgcctgttactgtcttccccttactcccaggtggtcggctgtgtgaagctcacaatcaccagccagcattcaataaatggctcccggcagccagtggggccggtgcccactctgcagagctgtgcatgaaggaagacgttccccgttccctgaaggcaatgcctgtgtccagaagccccgcccactggcccttggttcgggctccttttt

SEQ ID NO: 87211 - DNA, 1274 bp, Homo sapiens
gctttccacaaaaaggacactgcccacttaggaggaagagggcttcccgaaacaaccgccaaggaggaggctggatatggagaaaagccaggggaaaacctcggagagagaagggacacgatgaggatgtgagctcctgggcagaaagcctgcaccaggaacccaaagaccagcagtgcgagcccagggccccgtggaagacatgactccaggtcacagaaataaggtcactggtgctatttttattaattctctgagtatgctgcaaatttggtttctacttatgatatcagccttaactttttttaatgttgatgagaatgttcatttttagcacagataattttaaaccattttcaaatcaaccttttctggcaatgaatagatgcgatttgctcccacgaagacacccacagactgtcaaaatccagtgtcactgagagggaacggtgacggatcgagaccgtaagtcgtctctgtcccaggttttttactcgctggactgggcccttcccttccttcctctaccacaaacacacaacacacaaaaacacagttttcagctgaaagtgtaactccccctctctctggccatgccaagaaggaagtyacactgggctttagttctcagcctatagaggatccagaggaggaggctctgctcccaggcagctgatgctccagagcatgggcacaaccccaacattcgggatttggctcaaggctgggctctgccccctgatgtgacctcagggaatcacctatgactcttgtctgtgatggccacatgacagcacctcactcgtgtggtgtggactgaaggagagggcaggcctgaatgcaagccccaatgaggcagggagcatccacaggcagggagcccccataggcagggagcaccttccaggcaaggagcactcactggccgggagcacccatcaggtagggagcactcactggccaggagcactaccaggaagtgagcacccactggcagggagcacttgcaggcagggggtatccaacagttaagagcatctacatgcagggagcatctgaaatggtgcctgttactgtcttccccttactcccaggtggtcggctgtgtgaagctcacaatcaccagccagcattcaataaatggctcccggcagccagtggggccggtgcccactctgcagagctgtgcatgaaggaagacgttccccgttccctgaaggcaatgcctgtgtccagaagccccgcccactggcccttggttcgggctccttttt

SEQ ID NO: 87212 - DNA, 1274 bp, Homo sapiens
gctttccacaaaaaggacactgcccacttaggaggaagagggcttcccgaaacaaccgccaaggaggaggctggatatggagaaaagccaggggaaaacctcggagagagaagggacacgatgaggatgtgagctcctgggcagaaagcctgcaccaggaacccaaagaccagcagtgcgagcccagggccccgtggaagacatgactccaggtcacagaaataaggtcactggtgctatttttattaattctctgagtatgctgcaaatttggtttctacttatgatatcagccttaactttttttaatgttgatgagaatgttcatttttagcacagataattttaaaccattttcaaatcaaccttttctggcaatgaatagatgcgatttgctcccacgaagacacccacagactgtcaaaatccagtgtcactgagagggaacggtgacggatcgagaccgtaagtcgtctctgtcccaggttttttactcgctggactgggcccttcccttccttcctctaccacaaacacacaacacacaaaaacacagttttcagctgaaagtgtaactccccctctctctggccatgccaagaaggaagttacackgggctttagttctcagcctatagaggatccagaggaggaggctctgctcccaggcagctgatgctccagagcatgggcacaaccccaacattcgggatttggctcaaggctgggctctgccccctgatgtgacctcagggaatcacctatgactcttgtctgtgatggccacatgacagcacctcactcgtgtggtgtggactgaaggagagggcaggcctgaatgcaagccccaatgaggcagggagcatccacaggcagggagcccccataggcagggagcaccttccaggcaaggagcactcactggccgggagcacccatcaggtagggagcactcactggccaggagcactaccaggaagtgagcacccactggcagggagcacttgcaggcagggggtatccaacagttaagagcatctacatgcagggagcatctgaaatggtgcctgttactgtcttccccttactcccaggtggtcggctgtgtgaagctcacaatcaccagccagcattcaataaatggctcccggcagccagtggggccggtgcccactctgcagagctgtgcatgaaggaagacgttccccgttccctgaaggcaatgcctgtgtccagaagccccgcccactggcccttggttcgggctccttttt

SEQ ID NO: 87213 - DNA, 588 bp, Homo sapiens
ccaacacggtgaaaccctgtctctactaaaaatacaaaaaattagccgggcatggtggcggtcgcctgtagtcccagctacttgggaggctgaggcaggagaatggcgtgaacccaggaggtggagcttgcaatgagccaagattgggccactgtactccagcctgggcaacagagtgagactccgtctcaaaaaaaaaaaaaaaaaaaaaaaaacagcaaaaaaacagcatagaccaaattacattaccagaaagrcaaatggccataaataatggaagcttataaaaaataacacagggcactcgttaaagctagcttaaggagaagaataagaacagattgattttactttatattctctgtgatggatattgacaaccagactggaaatatagattagacattgatcggaaagaactgaaatcccacctagattaagagttatcagagagagcttactttcaagtaagtttaaccctctgggactaatggaattaattctcaaagtactattactatggattagatggcagatctttaaggaatcttgcaaaatatgagagttcctaaatatttggaaactgat

SEQ ID NO: 87214 - DNA, 660 bp, Homo sapiens
ggatccattgtaggaattttcagcggccagtctatgggatgatattaatagaagcaatgtgaccttgttctttaaacatgggttcagacaatcacccctttgacatatggggataggttgagtaggaatctcctcactccaactttgtactaaatgcttcttccagtcttttggggatcatttttagaatgctcttttgaagatggaggcaggagagcagtttagaccctggcaagacttaactatttcttaaagaatagcattgactgcagtgagaaggtaaatattaaagctgttagaagagttattaaatccgaagcttttttttttttttttttttttttttttttttttttttwaaaggtgagatcttgctatgttgcccatgttggtctggaactccagggctcaagtgattctctcatctcagcctcccaaagtactgggatttcaggcatgagccgccatgcctggccaaatccagggcatttaaaagactttttcccactgcaagacagggacattggcaaggagatgggatggaaggtacagatgtgaggtttgccaggttggcatggaaagtgtgtgagtataacccacgcagcaaaggggtgggaaaataatgaaataattatatcaaactttcccaaaacacaagcg

SEQ ID NO: 87215 - DNA, 660 bp, Homo sapiens
ggatccattgtaggaattttcagcggccagtctatgggatgatattaatagaagcaatgtgaccttgttctttaaacatgggttcagacaatcacccctttgacatatggggataggttgagtaggaatctcctcactccaactttgtactaaatgcttcttccagtcttttggggatcatttttagaatgctcttttgaagatggaggcaggagagcagtttagaccctggcaagacttaactatttcttaaagaatagcattgactgcagtgagaaggtaaatattaaagctgttagaagagttattaaatccgaagctttttttttttttttttttttttttttttttttttttttaaaggkgagatcttgctatgttgcccatgttggtctggaactccagggctcaagtgattctctcatctcagcctcccaaagtactgggatttcaggcatgagccgccatgcctggccaaatccagggcatttaaaagactttttcccactgcaagacagggacattggcaaggagatgggatggaaggtacagatgtgaggtttgccaggttggcatggaaagtgtgtgagtataacccacgcagcaaaggggtgggaaaataatgaaataattatatcaaactttcccaaaacacaagcg

SEQ ID NO: 87216 - DNA, 660 bp, Homo sapiens
ggatccattgtaggaattttcagcggccagtctatgggatgatattaatagaagcaatgtgaccttgttctttaaacatgggttcagacaatcacccctttgacatatggggataggttgagtaggaatctcctcactccaactttgtactaaatgcttcttccagtcttttggggatcatttttagaatgctcttttgaagatggaggcaggagagcagtttagaccctggcaagacttaactatttcttaaagaatagcattgactgcagtgagaaggtaaatattaaagctgttagaagagttattaaatccgaagctttttttttttttttttttttttttttttttttttttttaaaggtgagatcttgctatgttgcccatgttggtctggaactccagggctcaagtgattctctcatctcagcctcccaaagtactgggatttyaggcatgagccgccatgcctggccaaatccagggcatttaaaagactttttcccactgcaagacagggacattggcaaggagatgggatggaaggtacagatgtgaggtttgccaggttggcatggaaagtgtgtgagtataacccacgcagcaaaggggtgggaaaataatgaaataattatatcaaactttcccaaaacacaagcg

SEQ ID NO: 87217 - DNA, 715 bp, Homo sapiens
atctctgtttctttcatatttggctaaatggcacttatccattctgttttgtatttaccaattcttaatgtatatgtataaaagtgcagatggatagctgggcatggtgactcgtgtcatagtcctagctactcgagaggctgaggtgggaggatcgcttgaactcaggagtttgtgaccagcttggtcaacatagtgagactccatggtttttacgtgtgtgtgtgtgtgtgtgtgtgtgtgtgtgtgtgtttaattattttttaagagaggaaaaaaagtacagatggaatatctctggcactcattggatgatgggtaggggatcttgctagaaagcagcagcgttgacgggaaaaacatgagacaagaattaaaatcaaaactgaggcttgagtgatttacttaagtgaggagtggaagtggctgcaggtgacagagcactgaatgttcaaaagagaccgggagtgacctccaggtgtgctggcccttcatccagatggtgacaggagatggggtgcacccaactctgcagccagttagcacaaacagtgaataggaaacaaatcaatctggacaacgcaagaccaacccaagcccaacccaagcccaagccaaggccrccatgtttctttgggagtctgaattgcttttctttggaaataaatctgctctttacatgggactatactggaatccaaggttagctattaag

SEQ ID NO: 87218 - DNA, 719 bp, Homo sapiens
agatatatccctgctttctaaataaacattggcacagattaagtgtcctgctacctcctacggggtcaggctgcactcacttaattattccggaaatgtttgttgaaccccttctacatgcaacgcaacatcacagtgatgttagtcatataaagacaaagcccacctttgtggagcataggacagtctagaggagagccaagatgctcacaaacaagtggataaagagttagaaagtggtaagtgtcctgagagaggtacaggtaatatgagtcacatgagaatgtgaaagggacagagattacttagagaccatggaaaggtcacctaaagtcaactgagccttctgggacttccaggaaacccatagcttccctcagcagctctctggctccccaagcagctatttaaaccttttctgctctcctgaaacctaggttgctacctctgccccgtcaacctcatcagctgaccttgttcccttattctcaaagtaaactaaatcacctggtggsaaccccttccgagtctcatcactaccttcctgcatcctcactggccctgtttccctccctcctgtcgctgtgacagggctctccctactcctgggtaaggctcctttgcatcccatccctcctttctaccacctcttcagatacctctctaatgtgtgtatcattctctccctcccctgtagggtcaacatttccatctctact

SEQ ID NO: 87219 - DNA, 613 bp, Homo sapiens
tatgtctttcattaataaaagtgaaaatgaaatcactgtgaccaaaaatcacactcacagctcatggaagatccttgattcccagactaaggtttatgtccaccatatcatcctgtcattttcttgacatttaggtcaatgaagaattttagtttgataattagtttcaaatcactcagcttaaattccaatgtaataaattcttttttcaaattttattttaaagaagactatagctactatacatttcaaaccagattattcaccatcaatagaaataaatacaaaacaaagcattgtaattgaattccagctaaccacagttttgccgaccaggggctcttaaattgaggtctgttccctctttgttaaggaaagagggtggaggagatgaggaaatgttgagaggtgttaaaggaaaattggcaccaaactgaggctctctctagacttattcagaatatggaaaggcaataaaaaagggaatacttttctcataaaaattatctcatagttcctgctgccttcarcccatgggagaaataaccgtattacagaagtcagaaatagagcctctgccccaaccactaccttcccctttctggtttggcta

SEQ ID NO: 87220 - DNA, 608 bp, Homo sapiens
taaattgaaataaaagaaaatttcacccrtaattctaatatcaccataaatcaaactgttctcagttttaattatactgtagacaaaattcgattttctactttttaaattaatgttattttagcctgtgctcttttataaactagaaaaaagtttcatgtttttcattttcctgtttagttcaagttaactgtgttataaataaatttttggtgccaccaaagaaatagcactcaaagataaatttaattttctcagcaaggcaatttttacttctatagaagggtgcgacttgaggatggagcaacggtgagagcacacgtgaacaagggaggggaaggggttcttattcctgatgcaggtagcccctgctgctgtgtcatttccccattggctagggttggactgcacagtctaggctaatcccaactggctattttaaagagagcaggggtataagcccagagtggtggggtgagcagtttggagggaaagacggttacagaacaggtaactaaaggtgacttaaatcatagcaggtgaccaggggtgactcaggtcaaagcaggtgaccaggatgagtcaggacagagcaggtgacccgggga

SEQ ID NO: 87221 - DNA, 636 bp, Homo sapiens
ctacatctacaacattaaatagtacatttgtgaaaaaacccatacactttttctttttgtttatttattttattattattattttaaagatgagggtctccctatgttgcccagagtcatctcaaactcctggactcaagtaatcracctgcctcagcctcccaaagtgctggcattacaggcatgagccaccgcgcctggcccctaaacacatacactttttaatccatttccactgccatttccccctcccaagctgtccttggactagatgaccagataacattccaatttgtttttctgcatccactttttttgagggggaagagggcggacggaagggcataacattaaaatggttttattcttctctattgcttttttgttgtcggttgtgggtgatggcggtgggggtgaaacttgcttttttttccctcaatatcttgggtagatttcacagctctaccttcagttattaaaattcagttagcattaatcccaaattttatttatgttttaataatttattaaaaattctttttataatgaaaaaattcaaatatacacataccaaagtagaaacacaataatataataactttctccctacacctaattaccctgctttgataattg

SEQ ID NO: 87222 - DNA, 636 bp, Homo sapiens
ctacatctacaacattaaatagtacatttgtgaaaaaacccatacactttttctttttgtttatttattttattattattattttaaagatgagggtctccctatgttgcccagagtcatctcaaactcctggactcaagtaatcgacctgcctcagcctcccaaagtgctggcattacaggcatgagccaccgcgcctggcccctaaacacatacactttttaatccatttccactgccatttccccctcycaagctgtccttggactagatgaccagataacattccaatttgtttttctgcatccactttttttgagggggaagagggcggacggaagggcataacattaaaatggttttattcttctctattgcttttttgttgtcggttgtgggtgatggcggtgggggtgaaacttgcttttttttccctcaatatcttgggtagatttcacagctctaccttcagttattaaaattcagttagcattaatcccaaattttatttatgttttaataatttattaaaaattctttttataatgaaaaaattcaaatatacacataccaaagtagaaacacaataatataataactttctccctacacctaattaccctgctttgataattg

SEQ ID NO: 87223 - DNA, 636 bp, Homo sapiens
ctacatctacaacattaaatagtacatttgtgaaaaaacccatacactttttctttttgtttatttattttattattattattttaaagatgagggtctccctatgttgcccagagtcatctcaaactcctggactcaagtaatcgacctgcctcagcctcccaaagtgctggcattacaggcatgagccaccgcgcctggcccctaaacacatacactttttaatccatttccactgccatttccccctcccaagctgtccttggactagatgaccrgataacattccaatttgtttttctgcatccactttttttgagggggaagagggcggacggaagggcataacattaaaatggttttattcttctctattgcttttttgttgtcggttgtgggtgatggcggtgggggtgaaacttgcttttttttccctcaatatcttgggtagatttcacagctctaccttcagttattaaaattcagttagcattaatcccaaattttatttatgttttaataatttattaaaaattctttttataatgaaaaaattcaaatatacacataccaaagtagaaacacaataatataataactttctccctacacctaattaccctgctttgataattg

SEQ ID NO: 87224 - DNA, 942 bp, Homo sapiens
tgtgcaataaaaagtaccaacttttaaattagaacctacaaagtaccatgtaaaatgtcatggcataaagacaacagtgagaaaactgtcaccaatacacaataaataaagaagggctgtgatgcatacattcttggaatccccataataagacaaacaaaactgagaataattaggaaaggaaaaaggcagaattgatctttaaattcagcaagagtcagctttgcagcctggaaaacatgtcctctccacatgaagaataaatgttatttcttcaccattgctattttccatccctgacttgaagttacaaactaactccagcaggaatatttatggtgtattataaagcatctgtgacacagcaagccctgtcatgtttgtttgctgcatttatgtatagaaacatcctcatgacttatgaagtctccctagtactgacctgaacaaattggcccaatcaatcaataaatttacttatgtcatttataaaaagtgaaaggaacaataactaaagaaatgtaggctcatgtagggttctccaattaataaatgaaaatggaatgttctaactaaataaaatataaattaatgtattagtccattttyatgctgctgctgataaagacatacccaagactgggcaatttacaaaagaaggaggtttattggacttacagttccacatggcttgggaagcctcacaatcatgatggaaggcaaggaggagcaaatcacttcttacatggatggcagcagacagagagcttgtgaaaagaaactttcgtttttaaaaccatcagatctcatgaaacccattcactgtcatgagaacagcacagaaaagatgctgttcaatcatctacaattcaatgattcaatcctctcccactgggtcccttccacaagagggaggaattatgtgagctacaagatgagata

SEQ ID NO: 87225 - DNA, 942 bp, Homo sapiens
tgtgcaataaaaagtaccaacttttaaattagaacctacaaagtaccatgtaaaatgtcatggcataaagacaacagtgagaaaactgtcaccaatacacaataaataaagaagggctgtgatgcatacattcttggaatccccataataagacaaacaaaactgagaataattaggaaaggaaaaaggcagaattgatctttaaattcagcaagagtcagctttgcagcctggaaaacatgtcctctccacatgaagaataaatgttatttcttcaccattgctattttccatccctgacttgaagttacaaactaactccagcaggaatatttatggtgtattataaagcatctgtgacacagcaagccctgtcatgtttgtttgctgcatttatgtatagaaacatcctcatgacttatgaagtctccctagtactgacctgaacaaattggcccaatcaatcaataaatttacttatgtcatttataaaaagtgaaaggaacaataactaaagaaatgtaggctcatgtagggttctccaattaataaatgaaaatggaatgttctaactaaataaaatataaattaatgtattagtccatttttatgctgctgctgataaagacatacccaagactgggcaatttacaaaagaaggaggtttattggacttacagttccacatggcttgggaagcctcacaatcatgatggaaggcaaggaggagcaaatcacttcttacatggatggcagcagacagagagcttgtgaaaagaaacttycgtttttaaaaccatcagatctcatgaaacccattcactgtcatgagaacagcacagaaaagatgctgttcaatcatctacaattcaatgattcaatcctctcccactgggtcccttccacaagagggaggaattatgtgagctacaagatgagata

SEQ ID NO: 87226 - DNA, 687 bp, Homo sapiens
aacagcaaaccactcagaaactccaagcactttccagataatcttactttgaatggtctgctgcccacatttattcaaaatcccaggtaagctatgtatttatggaggatgtaagaagaataaatgatcctccaagttctatctaaccttttgaacatactatctgcgttttccatcctttacagattttctttccttgaatctcgttttagtgtcatattctcagcttttagcaaaggacaatatgagcagcagtgacatgaaactaagcagttcattgtaggtctgctataggggaaattatatcactgaatacttyttacaaaaaggcctatggagacatatagtctcaagctatactgtgtttctcttgaataactgggatagctttttctaactgacagtaagaactgattgcttctctattcttttgttagccaccaggaagctttaaaaaaaaataccaatttgttctgggtattttttttaaagcttcctggtggctaataaaagaatagagatgagttcatgtcctttgtagggacatggatgaagctggaaaccatcattctcagcaaactatcgcaagaacaaaaaaccaaacaccacatgttctcactcataggtgggaattgaacaatgagaacacatggacacaggaaggggaacatcacacaccggggactg

SEQ ID NO: 87227 - DNA, 601 bp, Homo sapiens
ctagccacaaacgcaactgagcactcagaatggggccagcccaaattgagaccacatcagctttgaaagaataattatgaaaagatgtaaatgatttcattaacaattttgagattaagaacatattgaaatgatgctttggcttaaatgaaaaatcctagcctcttaaataaaaaaccttaaattctcaaacttttcaaatgttgcaaaattatttcacttctttactattgaattcattgctcttacttcaaagtttgatattttctctcatttatttccaaaaacaggtaatttctcccctatctctagctcatttgcctaagtgtattttatattttaaacagaccaatttctgcctataacaaagaacatttcaaagacttttttgaaaaagtattataacacatattttgtacggctytttgtattatcagcaatttctagctatttagactgcgtataactggttacttgggtaataaaagtataaatacaaaaattatgtattaaggaactttccaaagacaaacttggggtatgcagtgataaaaagaagatatggggcccctgtgcttgtttcctctggccaaacatgttg

SEQ ID NO: 87228 - DNA, 1026 bp, Homo sapiens
agagagagagaagcaacgaattgttttatattatagggagttatatagaaattttgttcatttgtttgttgttaaatacattatgttagaacgtctaaataccctaaatattattcttaacaatattgtcttaaattataataagtagaaaactcaaacaaaattaattttttaattactgcaaacagcagtaaccacatagatttcaaaggggttaaacattaattaatgaggatatgttcttatatttcaaagacagctatagtttaaaagaacctcaaattctccctttgaaaatatatttgtaataacagatgactaggcaataaaaacaagttccattatgtgtgtttagaagagggcttgaaatatgtggtaccttatagacattatgagggtaaaggaaatcatctgtttttctttcttattcaatagaaacctttcacatatcagtcttttctctcgctttaaagtaaaataaaagtataataatatacagacacatctacataaactacaagagttctgaaatgtagaatgaataaattttagtaaaactatctatttttacagatgaagctaacgtaataaacataccttagattccctcacccactatttatattttacctgaattcctcatttattgccaatacaaatgcttttctcatagatcttacaaggttacatttaatgcccataagtgattagaataaaacataaaatatgcccaattccaggaggctaatcctagagaagagtaaatgctctgtacctttgtggagatacttctgggtcagctcactcattaattcattatttgaataggtatttactgacyattaactttgtgcaagacactactccaaacattctagtatcaagaatcaaaaagaacaaggcaggtaacacttcttccctcatcaagcatacattctttaaaggaaaaaacaacaacaacaaggacaacaaaaacaacaaataaattaataggagaactacagattaatgtacctatgatgagga

SEQ ID NO: 87229 - DNA, 1026 bp, Homo sapiens
agagagagagaagcaacgaattgttttatattatagggagttatatagaaattttgttcatttgtttgttgttaaatacattatgttagaacgtctaaataccctaaatattattcttaacaatattgtcttaaattataataagtagaaaactcaaacaaaattaattttttaattactgcaaacagcagtaaccacatagatttcaaaggggttaaacattaattaatgaggatatgttcttatatttcaaagacagctatagtttaaaagaacctcaaattctccctttgaaaatatatttgtaataacagatgactaggcaataaaaacaagttccattatgtgtgtttagaagagggcttgaaatatgtggtaccttatagacattatgagggtaaaggaaatcatctgtttttctttcttattcaatagaaacctttcacatatcagtcttttctctcgctttaaagtaaaataaaagtataataatatacagacacatctacataaactacaagagttctgaaatgtagaatgaataaattttagtaaaactatctatttttacagatgaagctaacgtaataaacataccttagattccctcacccactatttatattttacctgaattcctcatttattgccaatacaaatgcttttctcatagatcttacaaggttacatttaatgcccataagtgattagaataaaacataaaatatgcccaattccaggaggctaatcctagagaagagtaaatgctctgtacctttgtggagatacttctgggtcagctcactcattaattcattatttgaataggtatttactgactattaactttgtgcaagacactactccaaacattctagtatcaagaatcaaaaagaacaaggcargtaacacttcttccctcatcaagcatacattctttaaaggaaaaaacaacaacaacaaggacaacaaaaacaacaaataaattaataggagaactacagattaatgtacctatgatgagga

SEQ ID NO: 87230 - DNA, 1187 bp, Homo sapiens
gtttccaaaataccaatgagctcatttgtaattggcaaacaggaattttgtactagtataatgcagaagttgtgtagctttatatacaatttattctaggcaaagggaagcagaatagtcagcgtagaattataaccttgggtgggcaaagaagccctcagtttgaatgttgtatagtcagcaggagcccttttggctcagttttaagaaaactaaaaacaaaaacaaaaatgaatgcctgcatctggggcttcctcttcaaaggggcatgcccctggccttgtgcagctcttaaatatttgcagttgccctgaccctgtacccatttcaatggcaagcctactggcttggagtttgccttccaaccggatttcttccaccaattctggttaaagtgttgccagcatttatacccaattatttttttatgtaattctgagtcacttccttgagtggtccaaattattttctgaggtgccaatattatttttgctagcaatatactcccaaagttgcatatgttttgagtgaacttcctagaatcaatttttcccacaagttctattatttaggtgctgttttgttttgcattgtgaggattacaagttgcatatgtcttattatgaactaaamctcattttacgaacatgaacctctccaactctgtattaccttatagtttctgaaagttataatgtgttgaatggtttgcaaattgcaaaataacttacttcctcagagagattatttcatttctttgataccactagtgttgtatttgttttgtattaccccgctgtgtaaagcccacttgggttactatttttaaagcctgcaagacttctaacttacatttcctgtcttctatgctgcatcagcagaacatatacttttagttattggctctttcatctataaattactgcttcttagataaaagtacgtagtgatttaaagacctggaaacagtaggccaaagatgaccatttcttcactaaagaaagacattttctataaaaaatggttacgatttaataatttccatgattcattgtgtctatactaagtgtccaccactcatttttctaagacctttggttgcattattactaatttttatatttggtgtatataattgctctctgtatccattttctgagtgcaatcagtttcagaacaataatgca

SEQ ID NO: 87231 - DNA, 636 bp, Homo sapiens
agtttcagctttctacatatggctagccagttttcccagcacccaaatggttacattttagacttcatataaaagcagggaacagctggataagctctaaamgctgtggtgtaggtgtgcaattgctagtctatcataaactattcagagctgattttcttggcaaccactggggcaagctgcctctaaggcacattcagctttctgagtctatttcttaagagctctaaagaagtttaggcaaaaatccctacttcataatattcttctggctgcttggaaggccagattttttactggcctgatttcatgacatgcccaaactcaatgacatccatctccaaggctacttcagcagcaaacctctgggaggtctctaactcagccgtctgttcatccagaagtgctatacctctaagattgcaagttcacaatctactatcctgccacaggtaccttagcttcctcatttgggatttcacccatcactcctacaaatattctcctcagtgtcattattccttctcataaagtaaagaacaactccccctaggattttaacagcactgggggaaaaaaaaaattggatctctagccccaagcactctgttgagctctagccttacattttcatat

SEQ ID NO: 87232 - DNA, 776 bp, Homo sapiens
tctgccctgttgctttcagttggatttcatcttcccacccttttcattttctcagcttgattcacatagatcatacataagagctaaagaaaatgtgtttagtgcctgagggaattcattttctgcctgggataactagacaaaatgtgatgcaattcctcccctgaatttaaaatgttttgttatcttgaaggcaattttcctcatccaataaaaacagagaaggaaaacgggtgacctttaaaaacatatttttgaaatcgaagattctcacacacagaaatgcctctgataattttgggtgtagacagatgctctcttcctctttgtactccccacacattctgtcaatggcctattgttaaagtgtggactttctcctagaccacatcctgtctgtcttacagaggagaagcatactgttgaagtgaaaagaaagtcttgatatctgtgtgtagtctctgaaggtatagaaaaaacaaattcactgcagtacctcaagatatcattatattcaactcagggcccgtaagatttaggttggaaatttcctgatgatgaactcatggaactaagacatgtttgttttattgacaaatcaaagcttttttcataaaaggaaagtgtattattttcattgccaacactggttaaaaatggtaggaaaaagggatgaagagcaaatgtwtatatttgaacctcattgaaaaaaaatcattctcctttgaataaaacctctgaagaagctacttctaatttgaaaaattcctgttaaa

SEQ ID NO: 87233 - DNA, 507 bp, Homo sapiens
tcccttgttgctctttgaatgaacaacactgctctyactgttgggggaggaggtctaaaggaaggagagaacctagtgcttgccctgaataagattccagtacaatggaatagacaggatagtgaccaggactcaggcagagccaaacaaaggcaaaattagaagcaggagctgggtacagttctagatgctagaagaatggggagaaaggctgtttgacaaagaagtgtcctagaagatagttttaaaggagatagtactagtctgaaaagaaggagaatcttttgtagcaaggaaatgtataaggctcaattcaattaaacagctatttattaaatgcacattacatgcctggcatctagtgggtgctgtgcaggagtgaacaagagatgctccttacctacgagctacaatctaggggaaaaagaaagaaaataaagacacacagaaaactgctattttaatctaggtgtactattaaatgaaggcgagtgttagaagggagtc

SEQ ID NO: 87234 - DNA, 831 bp, Homo sapiens
acaaagatcctggagccagaagaactaactcccgggtagtctgtacacacagaagatattgaaatcctcagaggagctgcatacagatttccctgtactaagctagacaccaagaccccagacccttgttcagagaggcttgaacagcagagaattccttcagattcatccacatttacatccacagatacaaaacaatatatacatacacttgcaggaatacatatacatacatacayttacttgcatgaaagcacatacacacctctcttaatcaaatgcaaaaattacaaagtctacacttaataggaactcagcaaatgtttgttccctcttcccatcctcattgcctgcccacctcctataggcaggaaactaaaggataaaaaaagctctttccttaagtaaggttttctttaaaatacttgaagatggatactatgaagccaagacaaagatgaatcagacaaaatcaagaaaaacgtggggatggttagtgggggaatgattctggactctttcctctcttttgggagaacaaaatctcagagaggaaaagaacaccattgttattattactacgcccttaccccgactcatggtgacaaacagttactatgggtatggcagtaatgccgtttggagcgacacttctaccgagctaagtattcatcatgcacttgagtgtgtttgtggaggaagctcagaaggcctcttatccaatctccctctgcagcctgaatctctttcacagtcagcctgctggggagccagccagcttcagcttcagtactcctgctaaaatggagctcttaataagcagtctgcccc

SEQ ID NO: 87235 - DNA, 1169 bp, Homo sapiens
aacccaaagtaaacagatgatattaaataattaatattaattttgttaggtataacattgtggttattcttttaaattcttactattagagatatatactgaagtatctgcaggtgaaaggataattggagtttaactttaaaacaccccaacaaaaaagaaaaaggaagcaggacagataacaaaaaattagcaggatattgctagcgattttctgtacttttctgtgtatctgaaatatccatagtaaagtgaaaaatacctgcccagaactaaaaactgtcaagggcatcaaaaacaaggaaaatctaagaaactgtcacagccaagagaattttatggagacacaggtactaaatataatgtagtatcctggactggacactggaaaagagaaaggacattaggggaaaatttaggaaatctgaatcaagtatggactttaataatcgtgcataaatattggacrattaactgtgataaatgcacagtattaatgtatgatgttagtaggagaaacttggtgtggtggcatatgagaaccctctgtactatcttcacaataactttataaatctaaaactgttctcaagtttgtaaaaagtaaacaggagtagcttatttatttatataaaaaatgatcttgaatcgataaagagtcaattttatctttactcatcaggatgcaacactgtgatttctccacactgatcaattagctcaaaagtgctattcattttctgagctcacagaaagtatattttgaagattcaggctcctcagggaccacccatacaaaacacatacaaaacaaattgtataactgatgaaacatacatttattttttccaatcaagtcttaaaagtttgatgaaagcgcattattgttaccaaaagtcttcaggcaataacagagataaaacttaacacagacaaacaatgattttattccatagtctcttggacttgagaatccatttgagtttcagaaagaatactaaattaatgggggttatgtcaggatgccaatgtccatgctgaggcttctcctgatacaatcttttgcaacataaccaacaaagatcaggagcttaaaacaaaacaaaacaaaaacaaacaaaaaacaagttcatgttatttctacaatgtccaaaaagaaagaccaagat

SEQ ID NO: 87236 - DNA, 1169 bp, Homo sapiens
aacccaaagtaaacagatgatattaaataattaatattaattttgttaggtataacattgtggttattcttttaaattcttactattagagatatatactgaagtatctgcaggtgaaaggataattggagtttaactttaaaacaccccaacaaaaaagaaaaaggaagcaggacagataacaaaaaattagcaggatattgctagcgattttctgtacttttctgtgtatctgaaatatccatagtaaagtgaaaaatacctgcccagaactaaaaactgtcaagggcatcaaaaacaaggaaaatctaagaaactgtcacagccaagagaattttatggagacacaggtactaaatataatgtagtatcctggactggacactggaaaagagaaaggacattaggggaaaatttaggaaatctgaatcaagtatggactttaataatcgtgcataaatattggacgattaactgtgataaatgcacagtattaatgtawgatgttagtaggagaaacttggtgtggtggcatatgagaaccctctgtactatcttcacaataactttataaatctaaaactgttctcaagtttgtaaaaagtaaacaggagtagcttatttatttatataaaaaatgatcttgaatcgataaagagtcaattttatctttactcatcaggatgcaacactgtgatttctccacactgatcaattagctcaaaagtgctattcattttctgagctcacagaaagtatattttgaagattcaggctcctcagggaccacccatacaaaacacatacaaaacaaattgtataactgatgaaacatacatttattttttccaatcaagtcttaaaagtttgatgaaagcgcattattgttaccaaaagtcttcaggcaataacagagataaaacttaacacagacaaacaatgattttattccatagtctcttggacttgagaatccatttgagtttcagaaagaatactaaattaatgggggttatgtcaggatgccaatgtccatgctgaggcttctcctgatacaatcttttgcaacataaccaacaaagatcaggagcttaaaacaaaacaaaacaaaaacaaacaaaaaacaagttcatgttatttctacaatgtccaaaaagaaagaccaagat

SEQ ID NO: 87237 - DNA, 977 bp, Homo sapiens
atcttgtaagttggctttgatctcttaagagggtaacatcatcagccaccatgctcttgttttatgttcaggaagttgcttattacccttctagtgcagtgttttgtacacagtagggacactctgcacttcagatgaagtggtttgttttagggccgaattttgctggaattaaataaagtagcattgaacagctataggaacctttagaaaaaaagttttggtcttccttttcatggcacattatttattatttgtttatttttcatattctagatacatgaaataagtaataattcagattcagaaattatacataattttataatccacaacctggatacagctagtttttttttttttccttaaatgtgccccttcttctggatccacttgtgctctgtgtctccatcaccagaaatactaagtggagggcmaagggacatgcttcgcagagcctggcatcagaaggaaggaaaccagcatgtgttgagcatttcctaggagtcagacaccctgctaggcactttcacatgagaaagtcctccgaccctgaggaagacagtggtagttcctctctctttacacattaagaaactgagagactttaagaggttaagtaatttgcccaaggtcaattatatagtaagagatagatgaggtttttctccacacaatccactgggtagagcaaggtggtactgcccacttttagttgatcacatttttgagactgccattgtaaaaactacagttactacatctttataactttctcccatttcagacttactcaatttgtaatttagacttaccaccctctctagctttgacttttttgggtgttgattccctctattactttataacagaaaatagtcactctttttctgccttggtgatatgaatttcctcaggcaattcaagaaccataggaatccaaggccttctaaaaattaaagaggtaaattatatgt

SEQ ID NO: 87238 - DNA, 1521 bp, Homo sapiens
ctgccagggctctaacctaaagatgatttttctcaggcacctcccttctgacttcctttgtgatgtgtcctcatgctctgtacctgatgggataccttactgccctagactctcttttgctgtcctcttgtctgctagaaatttccagaagttacagacagctttccctgaaagtttatcctcaacaacaattctgagatgtggcatagtccagttgttgtcttggcatccaacatatctggtctgtatttacttgacattgtaaattgtctatgtaatatcagtcaattcatatcacagccttgactatccttttagaatatgatttcctatcacctctgtctcccttaactccatgagttgctaatatcttgatttcatctgtaataattccctggagttctgcatcaaacatcatggtagggaagcacatggaaaccaaacagttcccttcttctggacatgtaaactgctcatccaagaatgacacttttattttttacttttcacaaacaaccctttcttttattaattatattctaccttaattacatctctgttattaactttgccccaagtggatgtaactgttgactttcattttttacacaacttggacagaatctcagatgtgttgttagtttgtactttcacatagttctagtgtcatttccaattttctgtaatttttcttacaactctagaattttgtgttatccagatctgtatgatatttaatgaattctgtaaagttagtagcagaaaatgaggctgcctgtgcttcttcaacaattgttaacaattttctattctagcattctaaaaaaggcttccgtcacttaaaaacttttggagcaatttttggggcttcaataatattaaaaacacttggacttttaaatagcattatttgcatcatttaattattgtttatggtcacaaacaagtagataactggtagttttgatacttaaatcactcaaagaatccaccattatattgatggcattattttagtccatttaatacacagtgcatggcttctattgctatttgcatttctaacttagtggaagaactatttgatgtgatgcattcttgaaaaatggattcagaagcctgtttctttcagacatcactacctcctttctcactcttagctggttgtcttgccttgtaaccatggaatatcaaaagagctgagcgttctagcaagataaaaggtagaatgtgtcctttgtatttggcaattaggagatccctggtcactttatataatgtgatttgatagagacagaagccaaattgctgtgggttgagatatgaatggaaagtgagacagtggaaatagccagtgggaaagatgagaagcagaggtgagagagactggatggtaaggaaaagggacagatgtgcaaagaggtgttttaggaagggagagactttaggatatttattggctaagagaaggagtcagcagaaaggcaaagcctttcaagagaggttatgactrggggagca

SEQ ID NO: 87239 - DNA, 663 bp, Homo sapiens
tgccgtccccctggagaagcaaatgtaagttcttgggagcaaagcccaacctcacctcccagttcacctagtttttgccctctctttcatgtcatcttcttttaaaaatccacagactgggccgggcgtggtggctcacacctgtaatcccagcactttgggaggccgaggtgggtggatcacttgcctaggagttcaagaccagcctggacaacatagtgagagcctgtctctacaaaaaaaagaaaaaaaaatacaaaaattaaccaggtatgatggcatgcacctgtagttccagctacttgggagactgaggcaggagactgaattgaggccaggaggttgaggctgtgttgagctgtgatcacactactgcagtcgagcctgggcaacagagcgagaccctgtctcaaaaaaaaataaataaatacccagactgaggcatgctagaactccaggggccttctagcytgcccctacctccccctctgtgtatacatgggcaggttaaggctcttggaaggttgaggctcccacccagccagtggtaggcccaggattagaacacatacctcctagcttctagccctgaactttttctctccacactgtgttgccacccttaccttcaatggcaggaggaactgcaaaagagtctacagg

SEQ ID NO: 87240 - DNA, 465 bp, Homo sapiens
  misc_feature (1)...(465): n = A,T,C or G
ttttcatttctacacgattgatagattatctattttcttctctgcatcatcagttttttgaaggtgaggcattgatttttatttagtattacaactttgaagatacttaggaccaccatgaccaccaaataactaaaattaaaagaaaatacaccaaaaattttagtacagttgtatagtgtgattataagttctctatctcatgtttttaccactttaatttttttaatattctataatgaacagaagttagcataggggaatactttagagtagaaattttggtcaaatacaacggattttaaattacttcttcctcactttacgactataacaggttatctattgcttcatctaatccatgaattgggagctgttggtgaaaccgatactcaagtttgttgtaacaactatatatacacttagagactctggcagaaagcagtcartaggtgttagttanta

SEQ ID NO: 87241 - DNA, 1292 bp, Homo sapiens
cagaatccgggtccaggctgttgtgtgaaaatgtgatcaatcatcactgattggcattttgagttaaactatacaagaatgtggaagaacagatgcttgctaggaacaagggaaaggaagttagggccaggaggctagcattttaattggcaagattcaaggtggttaaaacagactagaccaaaaattctgagttttggaataagagaaaataattatgcaaaacccagggaagaacgacttttcaaactaccttcatgtgaaagatacctttaaaacaatgctatagatgcttaaaaatggtacctgcagttgtgatttaatagggccatgaaaataggacttgacccatattttttgtacctaagggaaagtagctaagtgtaatgagaatcagctattcataaaacaataaacttggaagatatttaatgtatcctgtctctattttgtgctttgtgttggaggagtggatttattaaattagtttttttaaaatctctagatacagtcattcaagaaaaaataatagctatattgttttaagctgatgagataagaatatttatatacattgaggtttagataatataaaacacaaaatgaaaaataatataaaagcaaattatataagtcaagtagaattagtcatatatgtgatgctacgaagactatatttcagatttagaaaataaaatttcattgtgtaaaaattaagttttgacattttaataatcaactttactatactgtattatttttaaacaaatttttcactaaatcagtttaggaaagagcacttctcattaaaatattacttccccactacatatactgagtttttaacactctcatgatggtatacacacaataattattttgagatttctacgtaactaacaaattaataaaagaatgaataaattttgcatgtaatctgcatcatttcttccaaytggctgcatctctatcctgttaggatataaaaatatcaagaaatagttactacaaaagtaagtacatttattgtatgattaatcagttagtttaaaatggtgaattctgactgcagtgaagataagatggaataaagattccaattttgtatcttcactgaaagcaagtggaaattttgagaaagccaaagttctataaacatgatttttttaaagaaataagccttttgttacacaagccatctatgcgttttatgacttagttccccttactattaagtgatagaattcaattttctctaaattcattaatctttatttctataagttgcttaa

SEQ ID NO: 87242 - DNA, 513 bp, Homo sapiens
aaaaaaaaaaaaaaggaaagaaaatctaaatttccaaagwtcgttttatacaacattccataatacactcattgtataaaatgagatctagctatacagtttggagtactttcccagtatgagatccaaaattactcagtaggaatcctcaaagtctacctacaaaaattttgaggagctgagcacagtggttcgagcctataatccaagcatttgggaggccgaggtggacggattgaggtcaggagtttgagaccagcctagccaacagggtgaaaccctgcctctagtaaaagcaaaaaaatagctgggtgtggtggcacgttcctgtagtcccagctacttgggaggctgaggtaggaggatagcttgaacccagggggcagaggttgcagtaagccaaaatcatgccattgcactgcagcctgggtgaagagcaagactgtctcaaaaaacaaaacaaaacaaaaattgaggaaatcttaacattggtgcaccagcccagaggtgtgt

SEQ ID NO: 87243 - DNA, 513 bp, Homo sapiens
aaaaaaaaaaaaaaggaaagaaaatctaaatttccaaagttcgttttatacaacattccataatacactcattgtataaaatgagatctagctatacagtttggagtactttcccagtatgagatccaaaattactcagtaggaatcctcaaagtctacctacaaaaattttgaggagctgagcacagtggttcgagcctataatccaagcatttgggaggccgaggtggacggattgaggtcaggagtttgagaccagcctagccaacakggtgaaaccctgcctctagtaaaagcaaaaaaatagctgggtgtggtggcacgttcctgtagtcccagctacttgggaggctgaggtaggaggatagcttgaacccagggggcagaggttgcagtaagccaaaatcatgccattgcactgcagcctgggtgaagagcaagactgtctcaaaaaacaaaacaaaacaaaaattgaggaaatcttaacattggtgcaccagcccagaggtgtgt

SEQ ID NO: 87244 - DNA, 513 bp, Homo sapiens
aaaaaaaaaaaaaaggaaagaaaatctaaatttccaaagttcgttttatacaacattccataatacactcattgtataaaatgagatctagctatacagtttggagtactttcccagtatgagatccaaaattactcagtaggaatcctcaaagtctacctacaaaaattttgaggagctgagcacagtggttcgagcctataatccaagcatttgggaggccgaggtggacggattgaggtcaggagtttgagaccagcctagccaacagggtgaaaccctgcctctagtaaaagcaaaaaaatagctgggtgtggtggcacgttcctgtagtcccagctacttgggaggctgaggtaggaggatmgcttgaacccagggggcagaggttgcagtaagccaaaatcatgccattgcactgcagcctgggtgaagagcaagactgtctcaaaaaacaaaacaaaacaaaaattgaggaaatcttaacattggtgcaccagcccagaggtgtgt

SEQ ID NO: 87245 - DNA, 937 bp, Homo sapiens
gtactttaaatcatctttcatctgagcttatggtagggatgctaagaggattctgttccaaagcacaatggatctcaagcatcaaataaatctccaactacacatgaacctaaaggaaaggcccaccaccagtacttcctatgtacacagtggcttctcacaaatcagtagatagccttaagcttatatatttgatggcatgccctacttgctgtcaaaatttccaaggctttcataacaattactggagatccactatgcagtcagaattccactttcttctttagggtacactcacaaagcaaatggaagaggtaagttaatggcaaagaactttgcaccgctattttcttcactatccccaatctggagataaacagaaggcatctgtctttgaaattgctgtcaccatagtgcttcatgmtttcctaatctgtatattggactgcagcaatctcttctgtggggccagctcagaggacccactggggcagaacagaggccacacacaagccatttgaaatgcgtgaaagcatgccgtgccttgcaagctgcactggttacatatttacttcaaaatgaagtcaagttgatgtggtccaaaaggccctctattacataaattctagtttccttagaaattgaccatcttcatgcagctcagctgttgtgctgctgctaatagtccctgcatttatatttcagggacatgaaggagcagtgagcctgaactgttatttcccacctgtttcaatccatatatttttctggactagttcagagtcttttgtatgaaaatcacatctccacccatattggttaatacaccagtggattaaaatgtactattattatagttttatgactctaattagtttgaatgtttaaaatgagcttaagttataagtcatactattacattgcagtaaaaagtact

SEQ ID NO: 87246 - DNA, 621 bp, Homo sapiens
cctcctcccagggagctcatggtgcagtgcccagcctggcctcccagcggaagtgctcactagacatctcagggctgactggccttaggtttggagcagtcaaggtcccattttccagttctcaactttctcagccttctcccaagtttcttcgttttcccagcttcccaattctcctttcccacctaggcccccaacaatttcttccccttccctgttcccctgaatctcacttggccgaggtgagccccccatcaagcagcagctgcttcccactgccagagagcccacccatacaaggyggagggcttcctggggaggtggggaggaagttgagggcccaggtactcaaaaactaggtgcaagtggtcgagggacaggagggactggtgtgccttcgtgttgcaggcatctccagctcacaggagtgaggggacatgaaagtctagcttccacaacactctcctttcgccatgcactatcccaatcccatgtctttccagcaggcctctgggccagtccctcccaagccaccagcgccacgttggcaacactggcatgatgcccacgcccactgacactgtccctgccctgggtggacccaggatttccatgcatctt

SEQ ID NO: 87247 - DNA, 702 bp, Homo sapiens
aaaatgtaaccttcgttttccgcgccagaccctcctttcaaatatccgcggctgccaatcagcgggcgcggcgcaacgccgggcgcgcggcacgctgggagttgtagtttacccgccgcgctgcgcgctcccgcggcgccccggagggtcttgctgctctgcgcgttarggcctcttgggggtgcgggtttcccccttttttccagtcagagctcagtttctcagctacctgtcgcttagtcgctatcggtaatgccaccccttttcctcctttatcttcagagctcaggcaagagtttaagtttcaagagaagagaaataacaaaaagaacttaggaactcacgcggtttgggttactagaaaaaaagggcttagacttctacgaatttttttttttgatagggtcttgctctgacacacaggctggagtgcagtggcgtgatcacagctcactgcagcttcaaactcccgggcttaagtgatcctcccacctcagcctcccaaagtgctgactacgggcgtgcaccgccacgcccaacttcctacgaaattattttaaagatggttttctaggggaactacaatgagtacccgtagcgacctccagctctctctctgccttccagccttactccttctattggttgtatgagaaagacaagatctggtgctcttcgatgggggagagagggtagtggggt

SEQ ID NO: 87248 - DNA, 936 bp, Homo sapiens
ttattacatttctttttaggcacttttgccaacattttaattagaaatttatagatattttttgcaaaatataacaaaacaaagttgtttacagttgcttttgatatttgtggtttaaacatagttgtattgcatttttttaacaactaaatgacttccacatgaagaggtatgctcactctctctcctctccattgaaacccacagacgtcttgcgggaaacgctctgacatacattcccaagggagcattcactggcctttacagtcttaaagttctgtaagtaaactgagtgttgttggatatatttctgattttagtgtcaaatggctgctaattaacttgtaaaagctgagtgtctctaatacactatttaaatccatgggataattcatctaaattcaagtttacttcattggtaccatacagccatatcacacttggctaaatttgtatgtgaaaaaaaattcatctctccttttctaattttaatatctaaaatttttgcctttaaataactaccttatcaactcagacttttaaaagagtatttccctttccctttgtgttatgaaattggggtgcgtgtcttcaaaagcattttgatgacaggatgaataaatcactgtgatgctgacataatgagaccacagcttcaaaccggtttcaaaggggagtgaataagcatcagctaaaaaaaccaagtttgtgttccacctgtgaatagatagggtaaagcctagtgtakagcagatacactgaacagttgtttatttgttaattcattgaaaattgtaaatatgaggtttctcattatttaatgtccaatttctcaatttgtttatcagaaaaatcattattattgaatacttccttcttctggtacccattgtttaattttcttttagtttgttctgtgtagaaaaaagaggcact

SEQ ID NO: 87249 - DNA, 674 bp, Homo sapiens
tggaacagggcctggggtccccgagagccctgacatctggagcattttcctctccagatgatctctccttctcattcatgtgtagactgttgcttcctaggtcctctggctctaaaattccatggtgctataattctcttccaggcttgtaggtaatgttctctcatggatggaagtggcctcccctgaggtatggagtttcagtgtgatgatcttttagtttctttctgacactagcatagagatatccttttcctcctcccaccctaagccaaaggaatgtttttgctttccctgactgttttgaacatactaaacatactagtctaataagctgttcagtaagctctgggaaaagattatttcatttcagtatttgaaggaactgcgtaattttttttttttttttgagacgaagtctctcgctcttgtcgcccaggctggagtgcaatggcgcgatctcggctcactgcaacctccacctcccgggttcaagcgattttcctgcttcagcctctcgagtagctgggattacaggcgtctgccaccacacctggctaatttttrcatttttagtagagacagggtttcaccatgttggccaggttggtctcgaactcctgacctcatgcgatctgcccacctcggcctcccaaaaaactgggattacaggt

SEQ ID NO: 87250 - DNA, 1380 bp, Homo sapiens
caacttgagtttcataaataactacctgtgcctttgtaaaaattcctaatataagaattccaaagaaatggatctaaacacgagtgttagggcttttgatagaagggaacctgaagtgaaaagtgagcacaagattgcatttcataatctagcaaaaggaaaaagtaaaggcacaagaaagagtactaaataggaaaagaaaatcttcataatgtccttgatgatgttactattataaataatttcaacatccaaagcccttcattatcttaaaatcaaattatgatgataatttttcagtaatgtactcattgttctggctatacattgaatcatgcttaatatgcatatttatgcttaygtgcatttgctaataatgttccgtctacctggaattcttttctctgtctctttctccatctagtaaaatcatcttaatatcttcagcttatataaagtatatggtatcgtctcatgtatagatatgaaaacaaaagttaataaagtttaatttgatttaatttaccaatttaatagcaattggcactaagtctacactggcataaaataaaatgtttgacttaaacatatttctggatagagaagctatggtcaaggaaatgtgaattataatttatttatggatccctctttcgcttaactttgctctacgtcagattttgtggtgaacattaaaagaatgatgaggacactggtgattatctctcctatttaacaataggaaaaattatcagctcttggggcttagaaaagctcattccagaagtcatactctgagccctatgtagcctgtctggaatcctctgttttgcctttagcttatcaaccagctaacccacctacctatattattctctgctctttgtccattgtcctgttttatctgtcaaatagctaacaaaaatcagaataaattgtgccaggaatgcgccacaactcaagcatgcccaagaatttcacgtagtccagaactcctggggaaaaaatccaaataaaagcaaattgacaaccatgcaagataatgacaatagtaatgatactaacaacaacaatgacaaacaataaaaaatgctgttttggttactgtagccttgtagtatagtttgaagtcagggagcgtgatgcctccagctttgttcttttggcttaggattgacttggcaatgtgggctcttttttggttccatatgaactttaaagtagttttttccaattctgtaaagaaagtcatttggtagcttgatggggatggcattgaatctataaattaccttgggcagtatggccattttcacgatattgagtcttcctacccatgagcatggaatgttcttccatttgtttgtatcctcttttatt

SEQ ID NO: 87251 - DNA, 866 bp, Homo sapiens
ctttacctaattttttgaaaccagctttctcatggatgtgtataggagtaaaaataagagacttgatattcacccaaaataaattgtgtgtatcttctatgtgctggtggatgtgtgttagggctaagaactgagaactctcctttatgattctttacttgacaggaaacatatctatattcccgaaatccaagcatatgtcattgctgctctcagcacaataaacaaattgctacattaaccattttttaaatgggttgggtgtggtggctcatgcctgtactgctagcacttttggaggctgaggtggaaggatcacttgagcccaggagttcaagaccagactgagcaacaaagcgagacctcctctctacaaaaataaataaataaacatttaagaaaatagccagttgtggtggtcacttgagctagggaggtggagactacagtgagctgtgattgcaccactgcactccaacctgggtgacagagtgaggccttgtctcaagaagtgaaaaaaaaaaaaagaatttttgatacagttcccagaaagtggtttttaggaaagcaataccctattccctatttttgcctttaattcccctttcctttgtttattgtaaaaattcacagagtacaccattaagaccctgctctctggcctgagaagctcttggcctcttgtgcacacaaacttacagaggcatcactcccaagcatgcttctcaaaccctgtatagggtgctcatgctttgrgtacctatgcacattatctccattgctcattctcccagaataaacttcttcacaaagtttctctggcaaactgctacatctggtttatattggcacatggatgtgcagaa

SEQ ID NO: 87252 - DNA, 774 bp, Homo sapiens
attattgttgcttcgacagacgctagaaagcaaactgctcacaccctgtagacctaaccatagtctatttacagaattaagcaaaacactgcatgctttaggcatcagaaatatacaaataatttttgcggcatttttggggaggaagacaactatttatattcattttaatgttggacatttaaaagtgcatagctgtatgtttttaaaaagatatcttactttcaagaatgacaactcatatttacatccaggttttgttttaaatatatcaagcatttcttttgaggagaatattgattttatttgaggcttcggtagcatagtgctgagctaaatatttatttaggattggctttaaagagggcactgtgaatccttgttccatggctacttataaacactatccctttaacccatgatggactagaatggcagtagaatcctagtcctaaggtttaaatttcaaaactgtaaaatattaataaactcagagttttctgtcttggaccctctcccattgaaatgccaaaactggtggttagaaaatagttacaaggttgatgtgcacagatatcctcagcacagatatcactaatcctaagggattttgttacatatcttttgacttaaattcttattattggaacagcagtcagtaagcagggattatttttaaaaggacactgtccagatcattattgttaatgtaagcttttcaacacaaaaataaagcmctgtatggcaactaaattcactgcatgattctagatt

SEQ ID NO: 87253 - DNA, 354 bp, Homo sapiens
ttgtacacatttagtgcatatacttttttattattattatactttaagttttagggtacatgtgcacaacgtgcaggtttgttacatatgtatacatgtgccatgttggtgtgctgcacccattaactcgtcatttagcattaggtatatctcctaatgctatccctcccccstccccccatcccacaacagtccccagtgtgtgatgttccccttcctgtgtccatgtgttctcattgttcaattcccacctatgagtgagaacagtgcatacacttttatttgtcaattatatctcaataagggtagggtgggaaagtgagccaggacttctaatatcctgctagtcaatgc

SEQ ID NO: 87254 - DNA, 1357 bp, Homo sapiens
tgcataacacaaaacctaactatccatttctttattactgtaagctatttagaatgtcatactttattcaagtcttctcttataaatacattatataacttcatttagtatttcactgtcaaaaatattcttattaatggagaaaccaaaatctgattttgacattctcaagatagaatttttaaaaatttttacttattttttaaacaataaaacggcatacatcaaagccataatactcaacttagttccttaaaataagtaggtaataaatgaaaaattttttatttcacattacttgaatgtattctttatttttgtatatttattttttcttcagaaatactattttaaaatgtatttattttaatccatgcccatttccccataagaaattgtatttcaatatgcaatgagtgtttattggaaaagccactctgataaaacaactacaatggtgaagttaataggatcccacaaatgactctttccaaagattggtgacaggagagtcaattggttaattcaatttagatcatatgtaaaccctagggatctggatgtctagttctcagcaattaattaattaaacccaactttatctgttgaagtaagctgcataagcaggattatttattgattatatataatcaagacaaaagtaagcagcatgaagacagaatcattacgaacccttcattaaacttatagtgcataactaaaagcaggttattcgataattacctttttataaactatattggcctttgagattaaagagtggctagaggtacacactaaatttgcacaggttctgcatgcttggaattacttatgcaataatattttaaaatgtaatcttaaatattttgatatttaatagtgttttatattttaatcatattttaactttaaattaagttaataaatattayatcactgcattgaaataatactcctatatgtaaaattagaaaatatcctttctctaccattttggatcaaagacataaggaggtgagaaatatcataataaatatccatgacaaataaataagttcacttaaagagtttataggttacaggcttggactttgccaccagacaaatactggtgccactatttgctaaatttgtgtgaaactcagcaagttaagcacattgggcttcagaatagtctttcataaaattagaaagatatcactacatatggagtgaggttttatgatttaatttatggtaaacactaatgtacaaagaaaatcaatgctttattaaaataaaaggtgtttatcacaaaaattacatttaataattacatgccaagagtttttaaagtcaattatgcacacatgca

SEQ ID NO: 87255 - DNA, 793 bp, Homo sapiens
ctttcctcctgtgtgtctcttataagtacactggccattcgatttgggactcactgtaacccaggatgatttcatcttgagatatttaccttgcttacatgcacaaataagttcatattcacaggttctggatggacatatattttgggggccatcattcaacccactgcaatgagcaagatgagtgcatccttccagcctcagatgaatcacctcccacagcaccaaggagtttatggatagattccaagcacgtcattggagtggggcacgtgatcccaagcatgtgattggagcatggcatatgttggtgctcggttctcaccgtcagatccactagtttctcttccttttccaaggaggctgtccctgcaggctatgatttccagttacccacaactggcttcagctgatgggaggcactggtagaagattggaagcaagaggaacgcagccctcccacccatggtgtccatggtagcagccacatttctcctgcttaatgagtcctctgtggttccattgtcctttgtgtgaccctgatccctggttctgaaaacattacttccttctgtccttctggcctaggggtgctatcagctccctgctgcactaatctcagttgggccttccagatgcacatgaatgcacaccctcttccctggattaattttcctgttttaaatgctyagagttgcttctgtcctggtcagatgcttaatggtacaagagatacagagagagaaaggaagacaccaaatttgtgttggccttggtactgaagcacactata

SEQ ID NO: 87256 - DNA, 1058 bp, Homo sapiens
tcagtaagtagggctccttcatcgatgttccagcaccacacctttctgttctgttttggtttgtaaagaaataattacaaattgttttaaaagcattcccaaataattccaatacatcgaaaactttttcatatagatgagaagctrcgaccaccatgtctcttcaaggtaggggaaaagtacgttgcagttaaaaacaaaaagctttctttgcaaaagaagaaaagtttttttgatctccttgaatgtagcacacaaaaaaagtgatggttcccccaggctccatcagcaatagtaaagggcaggaacgtagagatttctttttccaggcccaggcctgtgaaaaacgatggctaagtgttagtccttagcagggccgacggatggtctccattcctggttaaccctctggaatctgggagcatgagtatctccaagaattcatttctattcagtaaagatggggaggggaatcctaaagaaggcacaagccagagaggagacaagacaaacatgagaacctgtctgacttcaggccgggctgagctgctgtctgccagtgcagccctccctgccccccagcatgtggttcttacccactgttacttgttgaactggaaagaatagaccccatgctctgagggtgcgtccactgccacttggttctgttggccgctgctctcctgtgccatagccaaggaggggggtcatcttgcgcattcctttcctcacctccactacagcagcctgaccaaagcccaccctacatcgagtgccctcccaaacctacccactctccacactcatgtgtgagtgtttccacccacaccaccacttccccaaccttcctacagcctgtcctcttcccaagacgcattagtcaatacaagccagcatcctggtgtcaactactggctggccaaatgtaaggaagggcctcattcatgaactcagaccaagtccttctttcctacatctgctgttgttttttttttaaatatggaacgcttcacaaatttgcatgtcatccttgcacaggggccataatcttctctgta

SEQ ID NO: 87257 - DNA, 675 bp, Homo sapiens
aggagaattgcttgaacctgggaggcagaggttgcagtgagctaagagtgcgccactgtcctccagcctgggcaacggagtgagactctgtctcaaaaaaaaaattaaaattaaaaaattagaagtaaataaatgaatattaatggccaaaattgagtctcatggccacctgtagaccagtcactggccaaggagaacgtgatgatcatgactagttccacccagtgatgtttcatcacccagggctggaatggaagctgggtagggcatgagtagggaatggatgatatttgactacaaagtggttttttttctttttttgccagaaatgttcccatggcactacagaccatttaaatccctgtcttccagctgcccctccccactacaagatctccagcagcagcagctaggtgttatcagcaccacscatggctgattctttgggaataatggcagaatgccggccattaggatgaaggatggatggccacgttgttggcagactaaagggccagatgcagcttcagacacatggagggttctggaaagggagagactttgtaagccgagtttccagaaaagacgttcaggaggcagggaataggaccttgaaggatgcacccctctctctagttttattagttcttctcatagatttatttatccttatga

SEQ ID NO: 87258 - DNA, 633 bp, Homo sapiens
aatattgctgtgttacctaggctcgtcttgaacccctgggatcaagtgattctcccgcctcggcctcccaaagtgtcgggatttcaggcatgagatttctttaaattgaagtaaaatccacacactataaaactaacagttttagagtgaacaatttcacggcatttagtacattctcagtgctgtgcagtcatcacctctatctagctcccgagcactttcatccccygacaggaactccattcccatgagctgtcactccccactcctcccttcctccggccccaggcacccagcagtctgcttcctgtctctgttggtttacctattctggatatttcatataagtggaattgtatgtgatttcttgtgactgccatcctccctctgcatagtgttttcaaggtccacttgtcttgtacctttttgtggctgaataatatcccatcgtacaggtatatcgtacctccgtgaggacctacagggcatctgacaccttatgtatgtaggcttagttttcccaaccacccaagaactgggcactgtcgtttgcattttttagatgaagagactgagggtccgagaggctgcagaacttgtccagggtctggaaggtaagaagtgtccaagctt

SEQ ID NO: 87259 - DNA, 633 bp, Homo sapiens
aatattgctgtgttacctaggctcgtcttgaacccctgggatcaagtgattctcccgcctcggcctcccaaagtgtcgggatttcaggcatgagatttctttaaattgaagtaaaatccacacactataaaactaacagttttagagtgaacaatttcacggcatttagtacattctcagtgctgtgcagtcatcacctctatctagctcccgagcactttcatcccctgacaggaactccattcccatgagctgtcactccccactcctcccttcctcyggccccaggcacccagcagtctgcttcctgtctctgttggtttacctattctggatatttcatataagtggaattgtatgtgatttcttgtgactgccatcctccctctgcatagtgttttcaaggtccacttgtcttgtacctttttgtggctgaataatatcccatcgtacaggtatatcgtacctccgtgaggacctacagggcatctgacaccttatgtatgtaggcttagttttcccaaccacccaagaactgggcactgtcgtttgcattttttagatgaagagactgagggtccgagaggctgcagaacttgtccagggtctggaaggtaagaagtgtccaagctt

SEQ ID NO: 87260 - DNA, 633 bp, Homo sapiens
aatattgctgtgttacctaggctcgtcttgaacccctgggatcaagtgattctcccgcctcggcctcccaaagtgtcgggatttcaggcatgagatttctttaaattgaagtaaaatccacacactataaaactaacagttttagagtgaacaatttcacggcatttagtacattctcagtgctgtgcagtcatcacctctatctagctcccgagcactttcatcccctgacaggaactccattcccatgagctgtcactccccactcctcccttcctccggccccwggcacccagcagtctgcttcctgtctctgttggtttacctattctggatatttcatataagtggaattgtatgtgatttcttgtgactgccatcctccctctgcatagtgttttcaaggtccacttgtcttgtacctttttgtggctgaataatatcccatcgtacaggtatatcgtacctccgtgaggacctacagggcatctgacaccttatgtatgtaggcttagttttcccaaccacccaagaactgggcactgtcgtttgcattttttagatgaagagactgagggtccgagaggctgcagaacttgtccagggtctggaaggtaagaagtgtccaagctt

SEQ ID NO: 87261 - DNA, 965 bp, Homo sapiens
caccacaattgaaagcatatattatttttaattaattttagcctggtaatctctcagtgtcaccttgttttggtgctgctctatgtagattgttcaacatagtacaaaacacgactggaaaagatcaatcttgctgacatttactcgggcttaagatatggctcaagggccttgctcttttggtcttgtgcaaaccrcccacagtccacctgctggctggatgccctcattgcaggcaaagcaccaggatttcttataataccacccatagacccaagtaggatcctggtggcctcgtggtaagctgtgacaggaatgcacaaggatctcctggcttgttggctggcatcgctggcccagtgatgtgaggtgaagggattctttgctctgactcagctcaatccccctgtacaaagggactaggtgggcttgctgtgcttttggaaggaccagaaaaatctgcttccttcactcactgggagccatgtattctctttgacttttgtttgcaggagcaaaacaaacagatgcttggggaaaaccaaccaaaaaggggggaaggggaggctggtgctggctggcaaccttgactcagcgctcggcaggaggtccattcggaacagaaaccctcaccctgcactttcctcacccagccctgaaatcacaaacaaccccttggccagggtcctaatgagcctctgacaaacacagcccgccctcctgacacagaaaagacaattagacatgcacaagtggcctgtgaaatgccaggctgggcacttgagctctccatgaatggcaccccctgtaccctgggccttctcggaaaaacattgcttgggttccttacgggtggtaatggctaataatgcagagagaacaccgtgttttggtttcaggcctttggccagggcggtgagagaggggtgtgtgtgtgtgtgtttagtgatggtagtggggtgata

SEQ ID NO: 87262 - DNA, 1416 bp, Homo sapiens
tttttaatcttatttgtttgataatacagacaagattcttaatatcattctattagagaattacgtggtaaatcacagttgaaatacaagagttttatagcaagaattgttatggatatttaattatctttagcaacattggtaagtcaaatacatttaaaaatgattaataatagattagatcttaataattagatcccaattacagaaatgtaactttttttcttaatatggatgacatctaagctcaccaagctcaccattctttgaccttttcttttttatcctttactgtctttcctctaccttcattaattgattcatctttctttcctatgcttctcttcttcaaggtttgtttcctttttcccctcttgttgtctactttgttcaaattcgtctcccatagatttttagtcatatttcctcatctcatcaagaatgatggtattcttatgcatttatatcttcgtttttcccaatttttctattttttttaaactttccattctgtagctctgtaccagctgtttctggttcttctggaaagaacactcgtcttatagaaagaacactgtccaggatccaaaagacataaggttgagtgtagttctggcccagctttcttatctgtaaaactgtaagattaaaagaggccagactgaatttcctcacagctttaaaattctataaagtatgcttaggtgtttggaactttggatgaaattgttagctttggaagagagagatgcttttgcaagggtcaaactaagtaacaataccctaccctgcagcagcttccagccccaagtcagatcagccatcagtgcgtgggtatcagcttatgagtattcaacaccttgcctcgtttttttctcaaagcaaaatgggccaaatgggctcatgatggattccagaatcttgtggtaatataaggacataaatatagttcaaagctagacttttaagattctattttcaaacaatatctagagaattattgttatatgtcatgtagaataagatactattgtagaggcagtttcagacattgttcctgtcccatcaatgcttgtgactttactatgtttttttttctgtattccgcaaatcacctaaaattaactgtagacatgaaatgcaactaagaaccatttgaagcaaatggtgactgtattttaataatcatggcatttcactaaaagtctttctaataaataaaagcctagtgtttgatagtgggaatgtaaaggtttaagtcgtaaaactcaaaggataaaccattaccgatactatgagataggaatgattatcattccattttagagatgaggaagatgaggctcaraggttgaataatgagcccaagttcataaaccaaggaattggtgaaggaggaaaatatccagagccagt

SEQ ID NO: 87263 - DNA, 669 bp, Homo sapiens
ggtttaacatctagatctgagagaaatgattgagcattacctggagactctagggtttgagctggattctgtgatgggatgaggtttaggagtattctatttggacacaaaggaaaataatatttctcccttccttataataagattacaatatttttgtagatagaattgatataaggcactcctagaattagtcattgacaatatcccatgcaattctctaatctctctctttgtctttcattgcaaccaaggaggccatctgttgagatgagaacctgtgaagatggaaggaacctagatgtttgagtcatggggtggagaagagaccatgtaaacctacattgaaatttgtgtggtaagtaaataaatctttattgtattaagttactggtgtttgggggttaccacaccatagctgatctatcttaaataattcacccactcatacatatgctacagtaaaatttaagaacataacagataaaaaaaaagttaaggcttctggaaagaatagctctcttacaaaaaatatrtaatttaattgacagatttgtgaatcacattatttgatgcaagaaaatgatgaagtaatatgtttgaagtattgaagaaaaattcctctgcatctagagatttgtatccaatcatgctgttattaaaatttgt

SEQ ID NO: 87264 - DNA, 486 bp, Homo sapiens
aatacgctacatatgaaattatgaccaagaatatgtctaagaatatgttactgaatgaacaaagaaacagaattatatatatataatcatttaggcaaatttaaatatataataaagctactgccttgcaaggacatacaaataaaaagatgaatactgactacgctaggtgagagggcagttaatggaagtggggaatggtaataaaacaatgccaggaaggaagaaatagttttttcataatctcccccgcaatccttttttttttttttttttcaaatcagcatccataccaacactgaagggagttttgccttccaatctgtttgtctgggtttgtgctacacttattcaaacatttgtcaagattccattatgtgccaggcattggtgatacattttctgctctaaaaggttrcattctaaatgtgttctgtgcggagcaagacagtaagcaaacaaacacggaaatatcaaatagcgtta

SEQ ID NO: 87265 - DNA, 632 bp, Homo sapiens
cccccatgatcaatccccccaccccaaacaactggacaccggtgcagctgaggatgacagagctgtcagcaacgtggggcccagaatgactgagaggtcagtcctatcacctccaactctgaagaccaggaaaatcagcattggaaagttcagaatgacaaaaaaaggttgactttattttgttactgaaacttcgtggtttgtttgttacagtagctaatgtaaccctaactcagacattcttacaatccaatgaggtagattcaattattgacttcattttagaggtgagaaayctgaggcactaagaaattatgttacttgtccaaggttacactagttaatgtgtggcagagtcagaattgagccaaagaagtgtggctacagatgctcttctctcaattgctattctgagacaaaattattgggtttgaacaagaataagttgctgctgaccctggaaaggtgtatttcaaagtagcagtgggaataagttatgattatacacagataatattaatatggttaatataaactatcacagtattttactaaatctctctaaaactctcaatattttactaaatgagatttataattttcacacattctgacagcctcagtgctataat

SEQ ID NO: 87266 - DNA, 1296 bp, Homo sapiens
ttttcatacaatatcactgagaaacagatttcctgaagcccatccatcaatcccatatctacccctggaattcaggtacagaatctctgggatagactcccatctggcagtaaaattctatgactctaaggagaaaagacgcaaaagtaagcaataaaatcaatggcaaaaccctgggaagcatgtaacgcaatcctgtttttcaaaaggttctgatttctgagcgggatagttggctttaatttgcatttgatttctgtatgtgctttacagtataaattctaagtaatttgatgaatggaaatctcccctgtgtccacctgtccctctccatagctcacctgtaattctctgcaagcctcctagcrtcccctccctaccctgaataccatagcacatgcgacgcagcaggcctgccccataacttccccaacaccctccagatccttttcactcacctcccttcatcttcattgccattgctatcccacgtctgctgtccagatacagtcccatttttaatttactcattttatttattattatctctttttcaaatatattgagggtgacttataaaatggagaaagttctacatgtattctaaacatagaaaaataaacttgagattacggaaagatgcagaagggagacatttgaatcatagctgttaataacataactgcaattccttgcagttaggacacaaaagaaaatctaacatgattttccttataggaaaaatagaaacagacacattcctcatgggacaaaattacatttttaattctgctgctaaattctgaaagagatttctcatgtgagcccttatgaaaataacagcatgatataataagcaatattgttagaatattaacatttatatgcacacacatttcctggatgtttgttgaaggcctagcaagccactggttcctaaggatctgaagcacaacccagacgttctagacctctgttgagatttgtgcaagatactgactataaactagtcaattccagaacattaagataagtgcaatgggaaatacagagaaggaaagttgaggacacacctgcagagaacagcacatttcattcagtcatatgctcattcagtcagtgagttattacaaaacatacgttgtcttcctgggccaagcaatgctggaagcccataggatatttcagtgaacaagatgggaaatgtcctcacccttggggagcttaacttacagtgagggagatagaaaacaaaacaattaacgtgtgtgtgtgtgtgtgtgtgtgtgtgtgtgt

SEQ ID NO: 87267 - DNA, 764 bp, Homo sapiens
ttctggagtaacatggactctgtgaggagaaaaatactagaatcccatcagagaaaaaagtgtcacagtcccagtggatgaagcccctgtacagacggcagtagtcctggccctgtcatrgagtcactggacaacttgagccgagatatttgagctctctgagccttggtttccccatatgtaaatgttaagctggacaagtaattcctaaatttttctctaacacacttaaaacatgcccttatttttcctaactaaaaataatctatgttcatggtagaaaaattaaaaattgcacaaactaaaaacgaattacaatccctcctgaaatcatcacatttatttatttatttatttatttatttatttatttattttgagacggagtcttgctctgttgcccaggctggagtgcagtggcatgatcttggctcactgcaagctctgcctcctgggttcatgccattctcctgcttcagcctcccgagtagctgggactacaggcgcctgccaccacgcccagctaattttttgtatttttagtagagacgggatttcaccgggttagccaggatggtctcgatctcctgacctcgtgatccacccgcctcggcctcccaaagtgctgcgattacaggcgtgagccaccacccccggcagaaatcatcacctttctataaatatatgcacacatgtatgagtgtgtgtccacacacacacatctctccccacaaaagcaagtgtgatttcttataaatgcctta

SEQ ID NO: 87268 - DNA, 764 bp, Homo sapiens
ttctggagtaacatggactctgtgaggagaaaaatactagaatcccatcagagaaaaaagtgtcacagtcccagtggatgaagcccctgtacagacggcagtagtcctggccctgtcatagagtcactggacaacttgagccgagatatttgagctctctgagccttggtttccccatatgtaaatgttaagctggacaagtaattcctaaatttttctctaacacacttaaaacatgcccttatttttcctaactaaaaataatctatgttcatggtagaaaaattaaaaattgcacaaactaaaaacraattacaatccctcctgaaatcatcacatttatttatttatttatttatttatttatttatttattttgagacggagtcttgctctgttgcccaggctggagtgcagtggcatgatcttggctcactgcaagctctgcctcctgggttcatgccattctcctgcttcagcctcccgagtagctgggactacaggcgcctgccaccacgcccagctaattttttgtatttttagtagagacgggatttcaccgggttagccaggatggtctcgatctcctgacctcgtgatccacccgcctcggcctcccaaagtgctgcgattacaggcgtgagccaccacccccggcagaaatcatcacctttctataaatatatgcacacatgtatgagtgtgtgtccacacacacacatctctccccacaaaagcaagtgtgatttcttataaatgcctta

SEQ ID NO: 87269 - DNA, 764 bp, Homo sapiens
ttctggagtaacatggactctgtgaggagaaaaatactagaatcccatcagagaaaaaagtgtcacagtcccagtggatgaagcccctgtacagacggcagtagtcctggccctgtcatagagtcactggacaacttgagccgagatatttgagctctctgagccttggtttccccatatgtaaatgttaagctggacaagtaattcctaaatttttctctaacacacttaaaacatgcccttatttttcctaactaaaaataatctatgttcatggtagaaaaattaaaaattgcacaaactaaaaacgaattacaatccctcctgaaatcatcacatttatttatttatttatttatttatttatttatttattttgagacggagtcttgctctgttgcccaggctggagtgcagtggcatgatcttggctcactgcaagctctgcctcctgggttcatgccattctcctgcttcagcctcccgagtagctgggactacaggcgcctgccaccacgcccagctaattttttgtatttttagtagagacgggatttcaccgkgttagccaggatggtctcgatctcctgacctcgtgatccacccgcctcggcctcccaaagtgctgcgattacaggcgtgagccaccacccccggcagaaatcatcacctttctataaatatatgcacacatgtatgagtgtgtgtccacacacacacatctctccccacaaaagcaagtgtgatttcttataaatgcctta

SEQ ID NO: 87270 - DNA, 1247 bp, Homo sapiens
gatactatctcacatctcaggtgacaagaattagttcacagagtggaatggcattccaacatagatcagtcagtgacctcccattgtatgaaatgcgttttttcctctcaagtggtgaagacctgagtgaccgagcacagaaacttctagaagttgtctttccagccttctaaagaaagacggtctgcaagaggaaaggttgaagccagatgcagagaaaagcaaagatgagttgaggaaagagagcccttctacataaccttctacattcaaattcctacctttcccactatagatatcgatttcaattaactcaagtttgagttatcaatcttgctactaaaaggtgtcatgaatagaatagttgtttggcaagagatgttcttgatacaaagcaaaggggaaaatttgcggactgtggccaatatgccctcctgaggtctaggttctactcctatatactttttccagctgtctccacctcatcaagccacttaacttctcagaatcacatttttctcaacagaaatacataaataaatacatatatatattaaccatgtctttttgttttctatatttttgatgctttgacatcttgaaggcttgctgactctggaaggattgcctttcccaagactagctaattcctgcaaataaaggacttgcctaggagtccttcatttgcaaaccagccaatacagagcccatacccttgaccatctcatttatcaggctctaacacttcaggtcactattcctctgccctaatcaccccagtgccaacaccaggcaactagggacagctyctatgcccccaaagctactgaaatgattcaaactagacaaccctaaactacttactctacttcacctgttccttcctaagaaagcaacaataaaggctcttaccccagttttcctcttgctctctctgcctcctgatcaatcttagtgctttcccgtgtggcccctgtggcatggtgggcttcctctttttgggaactgtaatacattatcttatctggcaattttctcctggtctgttggactcaccaccacacctgaatattaataaaacctaaattttaaaagactacctcccaagactgaatgagaggaaagcacctggagttatgctaggtgtggtggattttgaatatttagctattcaatcaatgtgaggaaaatactaatgactgttaagattagaaggcaatttgagagtgacaaaagctgttgcactt

SEQ ID NO: 87271 - DNA, 545 bp, Homo sapiens
gacttgatcctggagagacataaaaattgttatttagaggcagggtcttgctctttttccatattgttttccttgaactctagatggatacatgtatatgtatatacatttataagaatgtttagatttttccaatatggtcttcaatcaacaaatatttattttaaacartttttcatatttttcatttactttctttttagagacagggtcctggtctgtcacctggctggaatgcagtgacatgatcatagcttagtataacctcaaactcctgggctcaagctatcctcctgcctcacttcctgagtagctaggactacaggtgtgcaccactatgcctggctaacttaaaaatttattttttttttgtagagatggggtctctgtatgttgcccaggctgttctcaaactcctggcctcaagtgatcctctcaccttggcctcccaaagcattggaattacaagcatgggccactgcacccagacttatttttcttattatagaagaaaaacacacattttattgcaaaaagatcacaaa

SEQ ID NO: 87272 - DNA, 545 bp, Homo sapiens
gacttgatcctggagagacataaaaattgttatttagaggcagggtcttgctctttttccatattgttttccttgaactctagatggatacatgtatatgtatatacatttataagaatgtttagatttttccaatatggtcttcaatcaacaaatatttattttaaacaatttttcatatttttcatttactttctttttagagacagggtcctggtctgtcacctggctggartgcagtgacatgatcatagcttagtataacctcaaactcctgggctcaagctatcctcctgcctcacttcctgagtagctaggactacaggtgtgcaccactatgcctggctaacttaaaaatttattttttttttgtagagatggggtctctgtatgttgcccaggctgttctcaaactcctggcctcaagtgatcctctcaccttggcctcccaaagcattggaattacaagcatgggccactgcacccagacttatttttcttattatagaagaaaaacacacattttattgcaaaaagatcacaaa

SEQ ID NO: 87273 - DNA, 1119 bp, Homo sapiens
actagaagtggggagtgagggttagtttctcaccagaaaatgacctccaaggtctctctttgagtcttaagatgctaggacatgatccatttgttgtacatctatcataaacaagggctaaggtcaaggctgcaataacaagaagcactgttctaggtcagacactaaaatggtgggggggacaaatgtgttctcagcatcttaacagctgataaaattcaacatatgtcttatgagtgaatcataacaatgaaaggaaaattaattttaaaactcaaaatggaattgggatggggggggaaaccccatttgggagacaaaaaatcaaccccaactgtcaggaaaccataaattagcaaaggagagagagaaacaagctacttttttactwtgaaaggaagttaaatagctacatttccttcaaaccaggaacagatttgagcagttataatttgccaggatgagtgggccacctaaattacctagttggatgagggtcatttgatcagagtaactatgatcgcattaactccatgtaattctccaaccaaaacaaatcaactcagaatttttcagtggtcttagctgatgacagtattgtttgtctttaacatactacttcttgagcacttgaaaatgtaaccaacaacacaaaaagtaaaataaaaagcacattttctgtagcattttaaaactacagaagatcttttaaaggccttggatattctaaaataagtagcaatacatttggaaagaaaaaaaccataacaaaattcagaccagcaacccagaagaatacagaaaaaaaaaactattagaattaataaatgaatctggcaaagttgcagcgtacaagattaacatgcaaaaatcagttgtgcttctctatacaccaacaataaacaaaaaagggaaattaaaacaattctatttacaaagtacagtgattacaatcacaagttttgaagacaggcttcttgagttcgaggcccaactgccactactaactggggaatcttctggaaattacctaatcattctgtagtttagttgccttatctgtatacatggaaataaaccacaacctatttcacgggttgttctgagaataaatcagct

SEQ ID NO: 87274 - DNA, 657 bp, Homo sapiens
ccagggtgggagacagcacccaggacttctgcagaaataaatgcaagcccacgaaaatcccatgtagtccagattagctgtgcagtgatgtcttccacaggtccttctgccaggtccccaaaccatttcgtaacaccacagctgctgagcacactcttccctgaatcttacctgtctggtaccagacccagtcacacccatggaacccctgccagccaaacttgactgggcaggggaattacctgggcagctcagcttgtaagaaaggcagatcagggggctgcaaccccaggcacttttcagcagtaggtgtattagtttcttgtggctgcttgatatggtttggctctgtgtccccactcaaatctcaycttgaattgcattcccataactcccacatgttgtgggagggacctggtgggagataattgaatcatggggctagtttcctccataatgttctcgtgatagtgaataagtctcacgagatctgatggttttataaagaggagttctcctgcagaagctctctctctttgcctgctgccatccatgtaagatgttacttgctcctccttgcctgctgccatccatgtaagatgttacttgctcctccttgccttccagcatgattgtgaggcctccccagtcatgtgg

SEQ ID NO: 87275 - DNA, 668 bp, Homo sapiens
tatttaagggcctaacactggacttctaaggagaactacctccagcctccttgactactaagtatgattcttgatgggaccagaaacaaggtccccagaggatctgccccttaacataaagcctgacagtttgagaagatggagccaggctgcaatacaatggatcataacaccagacagttaggagagctttcaactactagaccaatgctgagcaaactaaactagggcaggagctaccgcatgtcattcctcttcagaaacacaacgctctgcacacactgggcatgaagcactattatcagactgacctggagacccagaaaacgatgaaaggagtgagggagtagagggtttcccttcccataacccacaaggaaaggaaaagagcaaaccgatacactctgcattgtgtgcacaggattaaagaaaaggaagccccaagttggccttggctggagcttggttctcagaagggagaaattccccggcatgggtaagtaacaccaggaattgcccccacaaatggtggcaaaccagggcaacttacctggttgcctccagstgagagggagaaatccgcattccctctcacctggagaggccggcagcttctcccggcaggccggcaaactcttagggggaactgaagagcaaacagcatagga

SEQ ID NO: 87276 - DNA, 1191 bp, Homo sapiens
cagggcttcagcctccaatccagggccaacccctgccttggggggaaggcccctccccaaaggctgacaccagatggcgcggaagaaagtggcgcccgcgcagacccgaaagtgcaggaggagcggcgcacctggcggggtcgcgcgggtgcggcagccgcggccacttggagtgcgcgccyccctctcgtccctcccagctcggcctctctgggggcgcgggcccggggctggcggccgctcggcccggcccatcccgcctggccggcgccgcggcctcacctcgctcaccagcccctgccagtcgctctcagtccggtcgccgttcatggcctcctcctccatgcgctggccggcctcctggacccccgccgcctcctcctcctcgcgacgtcgcgtcgccgccgccgcccgggccccgcgcggccccgagagggcccggcgcctccgagccgctgcgccgccgcctctcgcggccgccagcgctgttgactccacgtcagcctccgccggagggaaagggaggaggggcgcggccgccggggccgcagacacagcccgggccgcagccgagccccgccgggcccgccccgcgccctcagccccgcgacctcgggctccgcgcctcctgcccggcctctaggcaaggggaagccagggtctcagcctacaggtcactccggacccctcagcgctctccgcgcgggaggcgggccccacgggcaggcctgtgtcccccgcaagaagcaaatccccaaatccagtccttctccgaccaccatcacgactcccacgcctagaatgcaagctccccgagggcaggggtttccttggttcgcagatgtgcctttggcaagatcctggcccataggagatgctctacatatatttattggacgaatatttgttgaacgcaagaatgaatgaaccacgttttattatatacttagcattgttttttaaactattagtgcttgcttatatattttttaacgtatcatttgtcattaatagaaagcaaatgtaaaaattgaaaataaagcattattcaattctaaatagggccaaaaactctgagggagatggttagcatgggttgagagaggtgtcaaagacaaattggcactggtggcattccatggctcatgcctgtaatcccagcaccttgggaggctgaggcaggaggatccc

SEQ ID NO: 87277 - DNA, 1156 bp, Homo sapiens
tccactggaggacacatcaatctctggggccaaaggaataaaagaattcagagccctaaaaattaaagacctggggagggagtacacagttttaatgtgggaaaacaaaatctgggacaggaagatacttgtctggaaccaaagggagagagatagcttggtgataaaggtgtgctgagtatatagggcatggggcatgtgtgtgtgtgtgctagcacattgccctatgaaaacaagacatgcacagtgcaagaagggccctacaaatccagttaactggcagaaccgtgtctaaaaaaaaaaaaaaagggccgattagaaaacgaaataacacatcacagaagaaacttctataaactgaacatttttaattaaaaggcagtgaaagctatgcatagaggcatttgctcaggtgagagcttttgaattcttatgttttaccagtacacttttcaaaataaaattatttatttgtactatatcccaccctctgtagagagctttcaagataattttagaatattggtcatttatggagaagtctgaagaatccatgtcaaccctaatatatttgccattccctgagacctactataatcatttgttatcatgttcactgttatattgacttcatcatcactaacagcagagaatatattgcttttttcatgcaacataaaaactagttattaggccggacgtggtgctcatgcctgtaatcccagcacttctggaggctgaggcaggcagatcacctgaagtcaggagttcgagaccagcctgccaacttggcgaaaccccatctctactaaaaatacaaaaatgagccgggcgtggtggaggtgcygtaatttcagctactcaggatgctgaggcaggagaatcgcttgaacccgggaggcagaggttgcattgagccgagattgcaccactgcactccagcctgggcaacagagcaaagtccgtctcaagaaactagttaatgaaaacatctctttattctctttctgtggttacattatcccaacagttttacatatttcctggagccctttaatgtgaggccatccatgagagtgggtagcacatggtctctgaacccaagttccttattacggatcctgcctctgtccacgctaccacaaggccatttaat

SEQ ID NO: 87278 - DNA, 801 bp, Homo sapiens
cctttacctccgaagcctctagcccttttcttcttattactaagttaacatttggctgctctattataaagccaactgactagaggctggaggaaatagaagtgccagacttgaacagggagtcgaggactggattcaaggttcacttctgtcatttattcattttgtgagctcagggaaatcactttctcttgtactttcccatcccagtttctccatctgtaaaacaaaggagctagatatgatgaccgattttgcttccacctctgaaattctaccatttaaccagaaatttcagcatactgtgacatagtgtgacaaactggtcccattctgagaacccaggatctccatgatttctagtatctttttacataatactatttgtttaatcatgtaagtaggacagatatcctacatgttcatgttaatagcttgtctttttttttgagacagggtctcgctgtgtcacccaggctggggtgcagtggtgcaatcgtggctcactgtagccttgacttcccaggctcaagtgatcctcccaccttaagttccctagtagttgcggctataggcatgtgccaccatgcctaattgtttctttagttttagtagatacaaggtcttactatgtttcccaggctggtctccaactcctgaactcaagtgatcctcctgccttggcctcccatagtgctgggattatgggcgtgagccaccatgcccagccatattaaacaarattaacaaggatgaaataaaacaagatctattaagctctataatttatccatcaagata

SEQ ID NO: 87279 - DNA, 825 bp, Homo sapiens
attcagtttgctagtattttgttgagaatttttgcatcaatgtttatcagggatattgacccgtagttttctttttttgatgtgtgtttttctggttttggtatcagggtaatattggcctcatagaatcagtttggaattatttccccctgctccatttttcagaatagtttgagaagaattggtattagttctttaaatgtttggtaaaattcagcagcgaggctattgagtaccaggcttttctttgccgagagatttttttgttatggcttcagtctcattacatgtgattggtctcttcaggttttggatttcttcatggttcaatcttggtaggctgtatgtatttgacttctctatctcttaatctctttcctttgtgtgagagttccccatcctgtaaatcagagttggaagtagaaaattcctctcgtggctgaggctgaaaagtccagttcttgcctttccaccatccatcctctctgtgcgggctggaccactgagccctcatgccgtagacaaagcttgtctccactttattctggtgtcaggcctgtggaaggagagttcgggtgaaggatgtgtattgtgcagtttgctccaatcacacgatttggggaggtgatgataggacagataataccagagtgtcaatgtgttctgttgcattaatattgggttcaggtttgtgggtgggtggatgctgagtagttttcccaataatgaacttgtagacagaccagataataaaggcctgagcaaagccagcaatattttgtcttgtgacacmaaattgttggctttacagtcagaggtaggatt

SEQ ID NO: 87280 - DNA, 1166 bp, Homo sapiens
tgcatgtatctatcatcctctgtcacattacatgcaaagtatctgcttatggayctgtctgtccaactagacctcaagctcctcaaaaacagatccctcactgtgttcgtctctgtgcctccagtacctggcacagagctggacactcagtgaatgctccatacacacgggcccaactgatccattctcaaattatgctcggagttggtagattgggcagaaattattacccccattatatagagaggggaccccaaagctcaaggaggtaaagcaaacattagaaacatgattcctgtgactggctgtggagactccgtgtaataatcattctggtattgccaattgcaaaaggactgtaaaactaatagagatgctgtctaaataccgacatccaatcctttcatgctcttctgagcaggcttgaattttccagtgcctctcttaaaatacagcccgcaggactgagcataaaactgcatgtggcctgacctgccagcacgcgctgggagtattgcttccctccttccacactctgctgtgctattaatagagcctcagattgcactagggttctcaacagcctcctcgcgctgtaggttcacatcaagctggtgatcagctaaccccccgggtctttctcatgcaatgccttctgtcaggccaggcctccccagcagccacttgggcaatgaatgtttttgaatgctcatgattatttgtgacttagactagaaggtacaacaccagatcatgcccttctttctcatgtggcattttgctgagtgggtgatggggtcttaggggtcctgttcaggacccagagctgtggccagccactgggggccaccagcatcatcggccccacaaaagtaagaggatgatggcgaaattaattttctggctcacttcaaattattcttatgttcatccctactcctcttggattaggtcctttcttggtcttgttctaatgctgggtgtttgtatgcacagcctcttttccctcccacccatggacacagccacattttgatttctcatgccctttccaaatagtagtagtatttttagcatgaatatcttgctcagaaattggctgtacagtctatcccctattgtcttcacatctaatacttttcttttttccctctgcctctcctatg

SEQ ID NO: 87281 - DNA, 542 bp, Homo sapiens
ctgtcataatatttatgacttttgcaacaacgatggcatttatcatcatgtgatgattatccatacatctgcctcttccaccaggtgagttcttgacagcaaagatggtgttttcatctctgcttcctccacagaccagcagcaaagtagatggcacagagcggacactgcaaatagtctcgtaagtgctgagcctaattacaaagcctaaactgtcacctcagaccgtctttcctacttgaaaagctgctagtgatttcttacccagtaccagctacatcatataagtacaaacaggaagccarcaatgcttaataagagttcaaaaagggaaaagaggaagcttcagacaagtggtaagcagcagaacagttcagtgaggccaccatcaggaagccgggcccaggaggagcttgagaagactgctcacggcaataacagttgaagttacgctcaaacagcaagaaaggccagagcacaatggtttaaaaaacatgggattacaggcatataaaagagcagaatacaaaaattcatcaaag

SEQ ID NO: 87282 - DNA, 788 bp, Homo sapiens
aagaccctaggggctcgacagcgactgcaggcccgaaggcagcacacccgcaaaaagtagcctttgtcccctgtccctgttccccccaccccttccctaaatctggaccttggcacgtgctagaaagagccttggacccttccagctgcgtaaagcaaacctaccccggatctctggcttcagccgccagggggcagtggcagccctggggccctttcccttctggaggaagcacaagcctcagggaaggggaagcaggatgcggagggccaaagcccgggacctctacttgaacagttccactggggaggctggagaactaaggaaacacctgtacatagtgtccgctrccctgactcccgcttagcgcacccttaggcaggcgccccttccacctttccccgagagccgtcgtcgctggagggggcagggtccagcccgcctggatcggtggtgtgcacctgatgggatttgggaaatgggctatccgtaaagctttatcttgcttggcttagctgtgagaagtggttctcttcctctggtcccttctggggactctgtttccccatttcttgctgctgtgtccctcaccggttccttgcaggattccctcctttttaaatgcccttgaatctagctttgccttggagaccccagtgggtgctgctcctgccattttcttcctgccaagcctgaatcaatgtttcatctccaaccctctgccagtttggcccctcagagcttggtggctcaagactgttagcctggcagagccaggggtgaaggga

SEQ ID NO: 87283 - DNA, 682 bp, Homo sapiens
aaaacaaaattctttaaaattattattatttgtagagaagggggtctcttatgttgcacaagctggtctctaactctggtctcaaacagtccttctccctcagactcactaagtgctagcattacagttgtgagccactccacccggctcataaagatttctttttttttgtttttgtttttgtttttttttttaagatggagtcttgctctgtcgccctggctggagtgcaatggtgcgatcttggctcatggcaacctccacctcctggattcaagcaattctcttgcctcagcctcccaagtagctgggatcacaggcgtgcaccaccacgcccagctaacttttgtgtttttattaaagacggggttttgccttgttggccaggctggtctcgaacttatgacctcaggtgatccacctgcctcagcctcccaaattgctgggattacaggtgtgagccaccgcaccccaccgctcctggacccactttaatcaatggcacagtcctcactctgsccccttccccatgcttaggggtagacatcccctatagtcaaaccctagaacctagctcccctctcaggttcccttctcacctccctggatggtgcagtgtcttatcctacctgcttcttgaggtatgtgacctccacgctgggctcatcccaaagctccagag

SEQ ID NO: 87284 - DNA, 671 bp, Homo sapiens
tctcttaatgacagacggatttgtcttacaaaggccattttcccgaaaaaaataggaaataacttggaggatactggtgggggctatacgtttggtgaaatccatcagtgatattcaagccaagcaaataatcacccactaatttgtgttttccacttaaaattcttggaggggaccatgttaaatggggagccctggtacagaaaacaacatgggctcatattcactcccttccccatctccctcttctgcttccccatgaaccttcccccacaggcgttacatagccatgtgccgcgagaagcagcccatggtgccagagtctctggctgactacatcacagcagcatacgtggagatgaggcgagaggcttgggctagtaaggatgccacctatacttctgcccggaccctgctggctatcctgcgcctttccactgctctggtaagtgcccaaattgctggagggccatctgttttgacccttaaaggggtagctccttaccgtgctctcattgccgcctycccacctcccgctccagccctgccggggctaaagtgctgacagtgcagatagtggtcctctccgtgctaccgcactgtgggtacttgctgctccagcagggcacgcacagcgtccgtggagggaaaggccttttccccacttctta

SEQ ID NO: 87285 - DNA, 1615 bp, Homo sapiens
  misc_feature (1)...(1615): n = A,T,C or G
cgcctgtcttctctccctgctcaacctgactgattttggagaggcaggtagccaggaagctaagtttggcctactagatgtgcaatcctcattcattcaacaaacatttaccagcacctattctgccaagtagattattaaactcttgagtctcagctccttgcctgtaaaatatgtatggtaattgcacctaccacatcaggctgttaagggtaaaatgaggctacagatgcaaagtatctggtccagagtctgggacacagtaggtgctcaataagtgatggtggatatcattagcaaccattgttacttttttttttttttgagatggagtctcgctctgtcacccaggctggactgcagtggtgggatctcagctcacggcaacctccgcctcccgggttcaagtgattctcctgcctcagcttcctgagtagctgggactacagatgcatgccaccacaccaccacgcccggctaattcttgtatttttagtagagacagggtttcactatgatggcccggctggtcttgaacccctgatgtcgtgatccgcctgtctcgccctccaaagtgctgngattacatacgtgagccatcgcacctggnccattattactttttaaaaaattttcttaaggcaagggccaatggctcatggctgttatccnnnnnnnnnnnnnnnnnnnnnnnnnnnnnnnnnnnnnnnnnnnnnnnnnnnnnnnnnnnnnnnnnnnnnnnnnnnnnnnnnnnnnnnnnnnnnnnnnnnngattggccgtttgaggccccctccgagcggaagtggagccgggcggaagtggcgcgaggaggctggagggagtgtcgtgtaaacagtgtccttccgcgcggcgccgcgtagagagctgcggcccgggggggcgtgcctgggatccggagcttcgctcgggcccgggaaaggcggcagtgggctgggatcgcggtgtctctgggtgtgatggccaatggctggactggctcccgccctgggcggaggaatcccgagctgtgaagcggctggaatccgggcccatgtgcttctttgtttactaagagcggaagcgatggcgggagcgggggtggggtgcggtggcggggtgcggtggcggaggtcccggtgaaatcaggggctaaggggacccaaagaaggcgggggatcataggggtggaaagaaagctgagaacyttgagaccggagtgtgaggggccaacggggaagggcgctagaattttaaactaaagtagggaccggaattcccctggggagatgttggatggccctgtgcactgccacgggctctttattcttcgctggttagaaacagacttgtgaaaaagagttatgcccactttggggagacttcggtaggtttatttaaatgctcatattattaattagttcataggtcgtgttttaagcgaaaatgggtatctaagatttgtcttaaagtttgtgtcttacggttttacatttcatgttacagaaaaggttaagaagttcttacaagagttctaccaggatgatgaactcgggaagaagcagttcaagtatgggaaccagttggtaagtctaagattgggtaaagggaatgggg

SEQ ID NO: 87286 - DNA, 1154 bp, Homo sapiens
ctcaaaaaaataatcacaaaacaatttgagcatagtagatttctccagatctggatttttcaatcatattcatgatcatcttgtcacctttatcaggttgggtctactggctggttggttggggcattaaaaatacaaaaaaccactttcattggtctctcatagccaggaaattcaagctgcttattagcatagcaaaaattcttttaaagcacttgtaaggaagcaaaaataacaaaacaaaacaagaagtactaggaagaaagaacaagaaaaggaagaaaaatgaaagagcaaaaaggaacattcagagagtagcaaatgctggagacccaaaagcagagtgggtggtagagatccgaggtggagctggctttgacacagattctggggtggaaacagcaggaggatagaagtgaccgggcaaagaagagaatctgctatgtgaagagcaccaacaggattctatgacatgaaggaagcccgttagatatctctgttccttacagagaacctgtgatctagagggacggtcactgaaaggtcgtgcaacttgttaacttctgcagctccaacgagcacacggcagaattcaaaccggggccatgattaaggtaccctaggggctccggtcagttcagctgccaaggaagtatttgctgcatggtctgtaataataacaatatttgagggcaatttgtcataatgttactggatcctcacagttctgagggttgatatttacagcagagttagtatgacccattaaaagaggaaacaaaatgaaaaggtattttcaaggtcttctgactccacatctcatatttatttttctccaacacaacagactttgattcagtgattaatttagtggaagctcagctctgaaatcatgcaactgcataggtatcctttctctttatttgaaagaggcaaataatttaaaagtaagtagatatcaaggaacttttgatatctggagcaagttcagtgtcctttcctatttagtcctacatttgtttgtttgtttgttttcccccagcattcagagctgtttatttccatcttcatactacaccaaagaatttcaaacagtgttaggtagactagctggaagttgragcttagaacatcctacatccctgaaaagttca

SEQ ID NO: 87287 - DNA, 807 bp, Homo sapiens
caggcatttgaggttcaagaatgactaagacatggtctgcccctgaaggttatgctagacagactgacaccctttccaccatcaaatgtccacatcctaatctcccaaatctgtgaatatgttaacttacatgcaaaaggaactttgtagatgtggttaagttaggattttgagattggaaaattatcttggattaaatatgggcagattcagtgtcatcacaagggtccatatgagagaaagagggagtgaggagaagcagaggcacagagaaggaggtgtgacaatggaagcagaggtcagagtgaagtgagaaagaggccaaggccaagcaatgtaagcagcctatagaagctagaaaaggcaagaaaatggattttcttctaaagcctccagaaagaatgtaatcttgccaacaccttgatcttagccattagacccattttagacttctacccccacgcccccaaatagtaagatgaatttttgttgttttaagccatgaagtttgtggtaatttgtaacagcagcaatgggaagctcataacagtggcttgcaatgtrtgagatgaaggaatccataaacagaaaatctcaattcagtattgtaggtgctatgacaggggtgagcacagggtgctatgggagaatagggcagtgctcctcacgcagcccgtgtgtgtgttagagttcaaggaaggctgtcagacttagatgagcttggtcattaagatatttttctcttgcctgtgtcttcagtatttccctctctattgttttttcctatcggcctatcaataggatccc

SEQ ID NO: 87288 - DNA, 1382 bp, Homo sapiens
atataaagtatttaatgtaataaataatatataggtgcttgataagtgctggtgcccttatataagattgataattttattaccttcttttagagagtaccaacacatgtaaggctgcccaggatgctgaaaaatcctgcactacagaaatgcattcaaccttgttcagtgcagaacctctcagatgaatttcaccaaaagctcttttttaaggggttttaaaattattcttaacatcaagaygaacactttgggccacactaccacaggtctgtgaatttagctgagggcaactcacacccctagtggccatcaagccctaaaggaagatgcaattcagaaatatacccccatttggctggtgggtcacttctgaagtctgagtccagcttcccttcaccatctgtcttttaatgtccagtactaagcacaggccttagttaattgaacatgcaaagtggaacccacaggcaatgatctcagtatatattttgactcatcatccaaagaaatcagagatgaaagcaacatctaatggctgagaatacataaatagccatttccactcactttcaattaccctgcagaggaatctggtcacagatgagctcagtaaattcacaatatgttatcctcaatagctaagctgagcaaaatcacccaatttgttagaacattaatcctctaaaagcctgccaaccctaatcattttatggcttcacattgcttaatggtaaagataagaggatccccagggatgcccaggtgtgaccttcagtgagtcaagtgcagacagtctcctgagaatgtagatggatattgtatggcctaaatatccagcctatagctagtgtggtcagtgttctaactctcctctgcactatgtgcctttcacagtcatcctggaggaatttccagtcctttgaaactggggattacaatgtatttatttctgaatccccaatgattggcataatatcagatacctggaagtcacacatttaacaaatatttgttaaatgaaaaatcaaataagtgatagtaggcagttaccttcagcaaatacactcaccatacatatgtacatacataaaggatggggttcttttttatatttctcaatctgaactgggaggtgaagtctctctttgcttgattctacctgtgaggggaatcgttctgaagtgctgataccttaagagcacaactggcagaactgtggaaagcaccataatctacaggtttaaatcttaggtctgtctcttagtagctgtgtgactttgggcaagctagttattctttctgtgtctcaatgaccaaactgtcagataggagtgataatcaaggttgtcatgagataggaataaattatatgcagctat

SEQ ID NO: 87289 - DNA, 1382 bp, Homo sapiens
atataaagtatttaatgtaataaataatatataggtgcttgataagtgctggtgcccttatataagattgataattttattaccttcttttagagagtaccaacacatgtaaggctgcccaggatgctgaaaaatcctgcactacagaaatgcattcaaccttgttcagtgcagaacctctcagatgaatttcaccaaaagctcttttttaaggggttttaaaattattcttaacatcaagatgaacactttgggccacactaccacaggtctgtgaatttagctgagggcaactcacacccctagtggccatcaagccctaaaggaagatgcaattcagaaatatacccccatttggctggtgggtcacttctgaagtctgagtccagcttcccttcaccatctgtcttttaatgtccagtactaagcacaggccttagttaattgaacatgcaaagtggaacccacaggcaatgatctcagtatatattttgactcatcatccaaagaaatcagagatgaaagcaacatctaatggctgagaatacataaatagccatttccactcactttcaattaccctgcagaggaatctggtcacagatgagctcagtaaattcacaatatgttatcctcaatagctaagctgagcaaaatcacccaatttgttagaacattaatcctctaaaagcctgccaaccctaatcattttatggcttcacattgcttaatggtaaagataagaggatccccagggatgcccaggtgtgaccttcagtgagtcaagtgcagacagtctcctgagaatgtagatggatattgtatggcctaaatatccagcctatagctagtgtggtcagtgttctaactctcctctgcactatgtgcctttcacagtcatcctggaggaatttccagtcctttgaaactggggattacaatgtatttatttctgaatccccaatgattggcataatatcagatacctggaagtcacacatttaacaaatatttgttaaatgaaaaatcaaataagtgatagtaggcagttaccttcagcaaatacactcaccatacatatgtacatacataaaggatggggttcttttttatatttctcaatctgaactgggaggtgaagtctctctttgcttgattctacctgtgaggggaatcgttctgaagtgctgataccttaagagcacaactggcagaactgtggaaagcaccataatctacaggtttaaatcttaggtctgtctcttagtagctgtgtgactttgggcaagctakttattctttctgtgtctcaatgaccaaactgtcagataggagtgataatcaaggttgtcatgagataggaataaattatatgcagctat

SEQ ID NO: 87290 - DNA, 661 bp, Homo sapiens
caaagttcattcttttccctacattacactgccccagagctcttgtagccctgccaatctaggctcactccaagagaaatattccccacttgcaagagttcrtagaactgtccacactactgaaattgttatgtctctgggttttccttttaataggcacacgtactcaaatttgcataatgtaaatgtagacagagtgtaactaccatgtaagcacaactaccatataagtgttatgagtgatcctttggaaacaagcctaaaaaatcctgaaatcatatgaaaacagacactttttattctcctgggaagcagatgacatcattttttatgcaaagtacactaagacagtagagtgctggtgaggtgctgataacgcagctctctgtcgggaatacgggagccctaacttccagtgtttgctgatttctgtggtgtaaatatttccaccatggcaaaatataagctactaatatgacatcactgaatgcagaactggggaaaattgtgcttagttagctcttgtgagcccacacaagctggcaccggcatacaacagcactaagggccgcgcacccatcactggaattagactgcacgtgcacatcaaggaagagagcctgtagcaagtaccatgacaagcaggatagggtgaagtgtg

SEQ ID NO: 87291 - DNA, 708 bp, Homo sapiens
cccccgactgtccagtcctcagcctttgccatagtcccaccccacctgccgccaacactgtctgaggcctctcctgcccgcttcccatgcagaagaaaatcatgatcatcatctgctgtgtgatcctgggcatcgtcatcgcctccactgttgggggcatcttcgcctagaagccacccaaactgccactccactccaggtgggccactccaaggaggccctggctgctgccacctggctgggctgccctcccaacccccgcctctggctcagagcaccctccctcccggcccccatgctcccttctctgccatgggccctccgtccccgccccgtgtcgtgtgcatgatctctgtgagtgtgcgtctgtacgggaagaggcagagggaggcagccagcggggcgtgatgcagtgtgcacagcgargagcagacccaggcagggccgccagggtgacacaggccacccttccttgccttcagtaactcggtgggcccaggttctgctcttccctggggaccctaacctcgcctccagctgacctgccctgtcctctccagctgtccccacaagcagagccctgaggggtggggaccagctggccacatggtgctgcttttcaggttaggggagaggtggccctgagggacagcccagctctgagtctcagtcgctgatcactgccagggaggctcaggctgccatggc

SEQ ID NO: 87292 - DNA, 1163 bp, Homo sapiens
ttcacgcgcatctcccaggcctacgtggtgctgggcagtgccaccctccgtcgcaagtatgatcgcggcctactcagcgacgaggacctgcgcggacctggcgtccggccctccaggacgcccgcacccgaccccggctcgccgcgtaccccgccgcccacctctcggacccacgacggttctcgggcctcccccggcgccaaccgcacgatgttcaactttgacgccttctaccaggcccactayggggaacaactggagcgggaacggcgcctgagggcccggcgggaggcccttcgcaaacggcaggagtatcggtccatgaaaggcctccgctgggaggatacccgagacacggctgccattttcctcatcttttcaatcttcatcatcatcggcttttatatttaatcggagagagaagggaaggggagtgtccccagccaaccccccagaaacggccttttttcctgcctctgaacccttggccattgatagtctacctttgctgggatccgaaggaactgtactccccctgccctccccgacccgcccagcttagccgatgacctgcacatcgctccactgtggtccagaaaaggaggcctttcgatgtctgagaaagaggccccacgctgtagagtcccgaaagcccaggagtgaagggggttcctggagtctctagggtgcttcttccagagtctgtcttcttgcttccagatgtggtcaacttctggaacactcgctgtagctttattgtttagccccaagcaagatttatctcctcctgccccgcatgtgtatggtgggcctctgtaaccttgaaatgtgcaatgtgaccaattgttgactaccaaaagaaaaggtctggggttgtacgaaacttgtctttctgtgacttccccaagccgcaggtgagacctggtccagggtaagaatgggatcggtggagagcctgtcgttcctcccgctaaggtcagccccctggggcactcctccttatgttgatagcatgtaggagtgagaaaaagtcattgagcataaggaatgagtgttcctgtgcccatatttaatgtgtgaccttggagaagttactctgtaggcatgacagcagaggagaaaatcatttggcatcttgaggtctgtcatgctttattatccat

SEQ ID NO: 87293 - DNA, 582 bp, Homo sapiens
ctcattcagactaggaccactgagacacaccaacaaacctaatgtgcacagctttgatgtgtgggrggaaactggagtactcagagaaaacacaggcagacacagacatggggaggacttgcaaactccacacagacagtggccccagctgggcatcaaattttttttcataaacattataatgaaacattgttgaattaaacaatattatttgagaaactgccgtatgccactgcagaattcagcaagaggaatttcaagtaggaggaagagtttgacaatgcttacaattgtttgatttttataatataaggattaaaaagcgtccggtgaatttggcagttagttcttcattaatcacagtgaggccatcttcagtggagccatgatggcagaggaaggctgcatcactgcagtttaaggaatgacagggaagtgaggagcctgcagaggagaattagttgacaaccccatgagaaagtacagactggtgagtgataaccgggagaggatgaaggctccagggagagatttgtgcatgcaaaatggctgataaacttgtagaaacccagtggttgtttg

SEQ ID NO: 87294 - DNA, 1552 bp, Homo sapiens
tgctttcaccatgtgatgtacctgcttctgcttcaccttttgcttgagtaaaaactctctgaggcctctacaggagctaagcagatgccagtgccatgcttgtacagcctgcagaacccgtgagctgattaaacctcttttctttacaaatcactcagccttgggtatttctttacggcaaggcaaaaatggcctaacaaagagatgttgctttctaatcctgtactcttggaccaaatccagcatatgtttctagctgagattatcagcttttgttcagagataacatgcttttccttccatagctttatgttgttgctgggaaacagctgctcagaatgattctatccgtctgcgaccccccacccttgcatctgagatgatttgactaattctcaccaataaaatgtgaacaggagagacaattattactttcaggacaaggagctacagatgtggcatgccttgctcactctttgtctccatctccagatgaaggtggaggttttcaaggcaaagaggaggatggagccacaagattcactcactacatagaaagctacacattgaccaggaacactcatgtattagagttcttcagaaaaaccgagccaatagggcacacgtgcacacacacacacacatacacacacacacaatgttagctcacaaggttgtggaggctgagaagtcccatgatctgccttctacaagctggagacccaggaaagtctctcttgtagatagaaatatactgttaaaatgtgcctctagttaatgcatccaaattattactgtaaaagcatggggcctacctctttaagccagtgcactcagttgttctgagcgctgagattctggatttccatggcatccttgggaagcctacttccttatacagtaaataagggctttgagagtagacaatgagttttgcttcataacaccatgtgcaaatgagggttgcttgtctaaaaaaaaagcaaagtcctgaaatacctgcagcaaaggtatctccataaaagattccaaataacagaggtcttctgggctgcctagagtctaaaaaaaggtgttaagcaccttaggtgtctgtgtgcccatagtatggcaaaatctcctcaccatagagggtactaactctctaacctrcacacagactcacactttgatagcaacaactgcagtattagaacaaggaaatcagtctggctctgaatcgcagctttgacgtcaagttggagtgtgcctttgggaaagtcactttttggggtggagcttcatcttcctcacttctaaataagatgtactctattcagctttttattggaggaagtggggaaaggttctatatcacatgcccttttgagattctgaagaaaaaaccatagactcaggaaaaatacatctttttcatacaatatcactgagaaacagatttcctgaagcccatccatcaatcccatatctacccctggaattcaggtacagaatctctgggatagactcccatctggcagtaaaattctatgactctaaggagaaaagacgc

SEQ ID NO: 87295 - DNA, 884 bp, Homo sapiens
aacattgtttcctctaactagcttctctcccttttaggaacagctccctttttcctagtcaatgccctttccctacatmgggtaggtaccagactccattcccatagttgtttgttccttggaaatttttgaactggatccaggagaagagactcagtccttctctggagaagaaagtgtcataaggatcttggaagaaactggtggccatgattcctaccatatttgaaaaaagaaagcataaaacaggcggaggaagagttctggtggaactctagggcctttctaaattctttgagccttttggcaaattctcttttctctggcctagaacaatttgagttgggtgtctgtagcatggcttaaggagaaggaatttgagttccagagaaattcagaaatactaagacttacagagctagttggtagcggggaagaagagtaaccagatttcctcttccaaggcttggtgctcttaccaccactgcaaagcatagctccatgttctctgtgtctctagtagcctgcgaatgcctctacttaaagtaagatagagaaatatcacacgtgtggatatgcatataatatatatactctgcctatatttgtatctgtatgtatatgcagaatatatatgcttgtatacaataagcatataatgatatatatacacacatgtatacacacactctaaccctaaccgtaaccatatatatgtgtgtgtgtatatatagagacacattctcataatatatgtatatataatataaatactctgcctatatatgtatctgtatgtatatgcagatatatccatctacctatctatcttttagtcagttcaggctgctatgggcatggtggcttctaaactacagaaattt

SEQ ID NO: 87296 - DNA, 671 bp, Homo sapiens
gttagtaaataaaaaagcaaatgcataatatgatttttattactattaataagtgtatgtacatttagtcatagtaaaatatttatactgtttaactcaaagtggtgaaattatgggtgacttttatcttttctgcttagttgaattttctgttgttttataatgaacatgttaattaaaaagataatgaaattgcaataactgtttaaaagaagagctcatggagaggaatgcaggacaagaacaaggctttatatttagttaatgaaaggtattgagagagtatgtattttaattattgtgagtattgagagaacagtttttgtagcagataaaagttagattccatggaataagggaaatgggaccaggcaatagaaacattgaatatataatatataygattataattatttgttatatattatattacatgttaatatattacatgatatattccatattaatatacattatgttgtattgttatatattaatatatgttatatatattatgacaatattatatataatattcaatgcctctaccaccttctaccaccagaactttgatggtaaagggaagaagaaaaatcagatggtcgattgaaaagataacagaatgagagacattttaattttggggggagcatattcttagaatagttgaa

SEQ ID NO: 87297 - DNA, 695 bp, Homo sapiens
ataaatttgcttttttttctagtagattctttctcagagtggcaagccagaccaggaggtctgtgctatcaactatatggtttcaatttagggtgatcaggctaggaaaaactgttgggttatacacggttctattaaataacagaatttaaaagtcctggttttattccagggcaccatcacctgtaccaaatgccttagttctcccaagaagctgcatccaataactttatagaagacccttctggcttggtagtagctatttatagtaggctgcttaattcctggttaagccaagctcagcacagctgttttgttacagaccttaaattaatccttcaatttccacctccgttcttatcatttttctctttcctttcctccaacttctgttgcagtgcctttctgaagttttggtttgcaggctgaatctcactccgctagagtcttcyagggccatattctggtcaacagcgtcatagactgaaatatagtgattgctcaaactttctagcttctagaaatttgatgagctcttacttgtgttaattctctatatcattttgggtttattattatttgcacttcaatgctatgatcataatggggcttcagaggaaagagaggctaaaatgttctaaccagtgttgaaatagaagctaaacttctttaagttaatattgtttagtgaattt

SEQ ID NO: 87298 - DNA, 1079 bp, Homo sapiens
  misc_feature (1)...(1079): n = A,T,C or G
gggaaaaaaattgtttgtcttaaatatgtgcattttacacaaatgcaaaaatagtcggcaaacaaatgtaaaatgtgtttatagaaaatgtacgagttattgtttaaatagtgcctactgtattatgataccacatatacaattttcatattttatattgattgtaattttcaytatgattatagtagataagactaatccccttgccagacgagaaaanagttttaaggaggtgaaccaactaacaaaacacacacatgtgtggtgattcctactggtgctgttgacagctgtccatgattgacaatgacttgctaagggatttggttactcctggctcttccagagagagtaagacaatcagtagctcagcaaagtgattgggaagctctgattggaagaatggtagaggtatttggtaatgaggccaaaagtgtgaaataaatggctcatgactctggcccaaatcagtggagaaatagttttgctggagtattttagcattaaccctacataaaactttagatctcacattttgttaaatcattcctaaccactaacatcgtcgtcaagtataagaaagtatgtgtttgttcagcctctacttgcttcccttttatcatgcccccccatcatcagcacaccacactcttttttggggtgcctggctattttgtatttcattcggagcttatggactctgcttacccttctagattcttattcccaccatcacatatcaaaatattcctgtcaagtatcacatatcttcaaaaagttggtgtctggtaaacgtatcacgatagggtttattatgttntgaatccttttaagaacgttaatcttctgtggcaagtaagaataggtggcttaagcaaaaagcaaatttgttcactcaactaactgaaaattatagtggttctaccattaagtagtactatactcttggactcagataataccattagggaattgtctttctgagtctcctaactctgctatctgtgctgactccattctcaggcaggctctcccttgccagggtacctgtagctccagacttatgtattaatagctca

SEQ ID NO: 87299 - DNA, 636 bp, Homo sapiens
tttcccctttctaaaggcttcttacagtgacccatattaaaattttcttttagaatttagggccaggcaaactttgccttcccgcaggaaactaggttgctttctcctttgataatgaaaaggaaagtggggaaggaaaacacgttttgtttgtatactatgcaccatgcagtgtgcttgggcctccctgacacactgtgcagggtaggttgtattcttcccctttttcccagagaaagaagttaagacacacagagaggtcaactaacttgcccaagtttccctggatttgcactcagttctgcttctttgccacactatgtgtggctytttctataccacactgtctttccaactgattatgtttctcctcttctccttggcttccaggctgctcagcacacaatgtgatattctgtctagcaactatattaccctcaacatcagcatatttattgctgctttcctgaactgtctctttttctgtgtgtgtgtttatgtataaatctctctatatatattctttataaagtcatcacaaaaggcttctggaaaactgtatggataagtgaattaaatatagtaagtaacattgctagctgggcgtggtggtgtgcgcctgtagctgagatggga

SEQ ID NO: 87300 - DNA, 558 bp, Homo sapiens
cttttaattttaatttagctaactagtaataattatccatgtcataatttgcctgtttgccttctcctctctttaacatgattcacgcatggtcttttgttgayggttgttttctcgtcctcttgatatttgtatttcaggtatctattatattaatccacaaaggcattgcagggcatttctctgctaatattagctatactttgggttaaactctcatctaggaaacatcctaacttagaagatggttttcctttgggtcactgcttcaggaatgccaactgagtctaagaagaaagatataaatcctcataatgtaacattgttaaatgccagacaataggatgcctgggtgagtaggagggtcttaggtgacatctccaaatacgaggctgatattgactttaaagtgcttgctttttgtgcttatagaggtaacacataaaatttgtagaaaattaacttgaagaaaagtataaaaatgaaagcaaaatttatcatgaattccacaattcagagacatcatcttctgttaatcattattgatatatttaggtt

SEQ ID NO: 87301 - DNA, 679 bp, Homo sapiens
aattctggacaatgagacctgrgcagaattctaggtgtgttctgggaaagtttggttttgttttgtttttaactcctggtaaggattgaaactgcattgcccttttgctttccagcttctttcccccactgaattgtggagataatagcaagtggacacatgggttattaaaaatattttaaaaacatttttaatgattcaatatttttgggagaaaggctaatagaatcgcatagatttttgtctttgacaatattgattcattgctactatataagaaaaatggcatcctatttatgtaaactactattggttctgcattctatttcttatagccagacaagttattaactaatacaattgtatctgatattatcctcagggtggattagattgtgtggaaccgttatgcctgttctcagcaccctctgactgctatgtatttacatctgctttttaaacaataattttttaaaattatattttgttgggtacagtattctataaatgccaattaggtcaagttgttttatagtgttgttcaagtcttccctatttgcactgcttttatccattaatttgattaattattgaaagggaggtgtcaaaatctccagctataattgtgatttgactactctccttggagctctatcagttttttgcttcatagattttg

SEQ ID NO: 87302 - DNA, 679 bp, Homo sapiens
aattctggacaatgagacctggrcagaattctaggtgtgttctgggaaagtttggttttgttttgtttttaactcctggtaaggattgaaactgcattgcccttttgctttccagcttctttcccccactgaattgtggagataatagcaagtggacacatgggttattaaaaatattttaaaaacatttttaatgattcaatatttttgggagaaaggctaatagaatcgcatagatttttgtctttgacaatattgattcattgctactatataagaaaaatggcatcctatttatgtaaactactattggttctgcattctatttcttatagccagacaagttattaactaatacaattgtatctgatattatcctcagggtggattagattgtgtggaaccgttatgcctgttctcagcaccctctgactgctatgtatttacatctgctttttaaacaataattttttaaaattatattttgttgggtacagtattctataaatgccaattaggtcaagttgttttatagtgttgttcaagtcttccctatttgcactgcttttatccattaatttgattaattattgaaagggaggtgtcaaaatctccagctataattgtgatttgactactctccttggagctctatcagttttttgcttcatagattttg

SEQ ID NO: 87303 - DNA, 894 bp, Homo sapiens
tgcatagcaacagtaggctgagtatccaacactgatcataacaaacaggtcactggcagggcaggtcacaaccgttggctgggcaagaggccttccagtgggctacagcaccacaaggggtgctgggctggccgaaagatttggccactacccttcatgaagagttatgtgaagctgccttctgatgctgcccaaagctgatatccctgtattgtaataatgtgcccccctcccctgaaaaaaaaaaaaagagcactagcaggttcttgagcagctggaactcttagaaacttgctgttttaccccaagtttccagtatgagtatagtgattagattctccttcttctcatcttttctctttcactggccctcaaggcacttaaaataaagccattaatatttcatggtaaacctttgtttttatcatgctcacttcagcagcacatatactaaaattggaatagtacagagaagattagtatggatgacatgcaaattcgtgaagtgttatatttttaaaagaatgaaatgctgtcacttacagcaacatggagaaacctggagggcaatatgttaagtgaaataagccaggcacagaaagacaaacaccacatactctcattcatttttgaaatctaaaaagttgttctcgttgaagtggrgaggagaatagtagttaccagaggatggggagggtaggaaggagagagagatgatgagagtgatggtcaacgtgtacacatttacagttagataggaggaataagttctcatgttcttttgcatactagactggagatgacaataaaatagctaaaagagaggtttttgaacattcttatcacaaagaagtgataaatgttaaaagtgatggccatgttaattaccctgat

SEQ ID NO: 87304 - DNA, 1841 bp, Homo sapiens
tcctgcctcagcctcccatgtagctgggaatacagggatgtgccaccatgaccagctaattttaattttttcttgtagagacaggggtcttgctatgttgcccaggctggtctcacattcctggcctcaagcaatcctcctgccttggcctcccaaagtgttgggattatggcataagccaccatacctggcatatagagataattttttttctagaattttgttctttaaatgcagtaatatcccgatttacattataagaatttattaaacccttttctctgaagcagtctaagttatgcacagagaactttaatatgatacgtcttcatgttatatagttatagcatttaacaaagaaggagaagaagtcataaaggaagacaatgagaggaaatcaagagtaccttagaagaccatatagaaagtatggctttagatacactttcttttttggcttaagatttgcatggtgtggtttctccatttaaaactctggatttagtttaagtggggtaaataggaggttaaaaaaaatcttgtgctgaggcgggcggatcatcttaggtcaggagttcaagaccagcctggccaacatggtgaaaccccgtctctacaaaaatacaaaaattggccgggcgcagtggctcatgcctgtaatcccagcactttgggaggctgaggtgggcagatcacgattttttgagatcgagaccatcctggttaacacggtgaaaccccatctcaactaaaaataccaaaaattagcggggtgtggtggcaggtgcctgtagtcccagctactcgggaggctgaggtagaagaatggtgtgaacctgggaggcagagcttgcagtgagctgaaatcatgccactgcactctagactgggcgacagagcgagactctgtctccaagaaaaaaaaaaaaaattagctgggcatgatggcaggtgcctgtagtcccagctacttgggaggctgaggcaggaaaatcgcttgaacccgggaggcagaggttgcagtgagccgagattgcgccattgcactccagtctgggtgacagagcgagactctgtcccccgctgccccctaaaaaaaccttacattgccaggatgaatactatcatatctactttgaaatacctctgtattaactaccactatttttgtttttattatatccagtgaagtgaaatatcgtgctttagactattgcattattcatgcaattaatctgaaatcctgccattagaaattaatactgagttaatccatttctctgatttttagatgtactacagtgtttcttaaactttttgtttacaaggaagttgagacttacagaaaagttacagaaattttacagagttcctgtaaaattcactcaggttctcctaatgttatcttatataactacggtatgattacaaaaaacaaggaatttatattgatacagtaccttaaaccagtggtccccaacctgtttggcaccagggaccagtatcgtggaagacagttttcccatggacaggggtcgggaagatggtttcgggatgaaactgttctacctcaaattttcaggcattgggttctcatgaggagcatgcaacctagatcccttgcatgcacagttcacaatagtgtttgtgctcctatgagaatctaatgccactgctgatctgacaggaggggkagtgcaggccctaattctcccgtgctgctcgcctcctgctgtgttgtccttggcctgggggttgggcacacctgctttaaactatagacatcatttggatttcttcagtttcactaatgtcctttttctgttgccagatccaatcca

SEQ ID NO: 87305 - DNA, 755 bp, Homo sapiens
gtctgtatgttttgtaatatcttttacagtaaactggtaaatgtgtttccttcaattctatgagccattcaagcaaattaatcaagagaaggagttggtaccccaacttgaagccagtcagaagttctgtaggcccagatttgcaacttgtttctggtgggagaagggagtagttttggggaccrggccctcaatctgtgggctctgacactatctccaggtagatagcgtctgaattgaattacagaacacctagctggtgtccactgcagaactgatagcttgtgtgttgagaaattccccgacatttggtcacagaggtcttctgtgttgcttgttgagtgagaaaataggaaaaaggactttgtggggggttttctatacaactatgaaaaacgggttcacagggataaaactgatttcttgtcctcttacagaaaaagggatttatgtctggtgcattggctcactcctgtaatcccagcactttgggatgccaaggcaggctgatcacttgagcccaggagtttgataccaacatgggcagcatggtgaaaccccatctctaaaaaaaatacaaaaattagcctaggtgtggtggtgtgtgcatgtagtccctgctacttgggaggctaaggtgggaggatcacttgagcctgggaggtggaggttgcaagtgagccaacattgtgctgctgtgctatagcctgggcaacagagagagaccctgtctgagaaattaaaaataaagtttt

SEQ ID NO: 87306 - DNA, 755 bp, Homo sapiens
gtctgtatgttttgtaatatcttttacagtaaactggtaaatgtgtttccttcaattctatgagccattcaagcaaattaatcaagagaaggagttggtaccccaacttgaagccagtcagaagttctgtaggcccagatttgcaacttgtttctggtgggagaagggagtagttttggggaccaggccctcaatctgtgggctctgacactatctccaggtagatagcgtctgaattgaattacagaacacctagctggtgtccactgcagaactgatagcttgtgtgttgagaaattccccsacatttggtcacagaggtcttctgtgttgcttgttgagtgagaaaataggaaaaaggactttgtggggggttttctatacaactatgaaaaacgggttcacagggataaaactgatttcttgtcctcttacagaaaaagggatttatgtctggtgcattggctcactcctgtaatcccagcactttgggatgccaaggcaggctgatcacttgagcccaggagtttgataccaacatgggcagcatggtgaaaccccatctctaaaaaaaatacaaaaattagcctaggtgtggtggtgtgtgcatgtagtccctgctacttgggaggctaaggtgggaggatcacttgagcctgggaggtggaggttgcaagtgagccaacattgtgctgctgtgctatagcctgggcaacagagagagaccctgtctgagaaattaaaaataaagtttt

SEQ ID NO: 87307 - DNA, 773 bp, Homo sapiens
  misc_feature (1)...(773): n = A,T,C or G
agcagctgcacagctcaaggttatttttctgccagagggaaacaaggtgggctgcagacacagttctgattttggagcagggtcgtgtgcaagggtcatccattcccactcatttactggctgttcctgcaggtctcaatgagacgtgtggctggctgcacagtagctgccaactggctctgctggttataatcaatggttcagccttctctctctctttctttctttcttttttttttttgagacggaatctcactcttgttgcccaggctggagtgcactggtgcgatcttggctcactgcaacctccgtttcctgggttcaagcaattcttctgcctcagcctcccaagtagctgggattacaggtgcacatcaccacacctggctaattttgtayttttagtagagacagggtttctccatgttggtcaggctggtctcaaactcccgacctcaggtgatccacctgcctcggtctcccaaagtgctgggattacaggcgcgaaccaccttgcctggcctctctttctctctcacacacaacatctttcccagggctttttactccttagaaatactttattctgatttttgtaaataattttgaaaagattttcctgaaattgtcagtgtacagggtgggagtccagttctcaaggggatttggcaannnnnnnnnnnnnnnnnnnnnnnnnnnnnnnnnnnnnnnnnnnnnnnnnnnnnnnnnnnnnnnnnnnnnnnnnnnnnnnnnnnnnnnnnnnnnnnnnnnng

SEQ ID NO: 87308 - DNA, 773 bp, Homo sapiens
  misc_feature (1)...(773): n = A,T,C or G
agcagctgcacagctcaaggttatttttctgccagagggaaacaaggtgggctgcagacacagttctgattttggagcagggtcgtgtgcaagggtcatccattcccactcatttactggctgttcctgcaggtctcaatgagacgtgtggctggctgcacagtagctgccaactggctctgctggttataatcaatggttcagccttctctctctctttctttctttcttttttttttttgagacggaatctcactcttgttgcccaggctggagtgcactggtgcgatcttggctcactgcaacctccgtttcctgggttcaagcaattcttctgcctcagcctcccaagtagctgggattacaggtgcacatcaccacacctggctaattttgtacttttagtagagacagggtttctccatgttggtcaggctggtctcaaactcccgacytcaggtgatccacctgcctcggtctcccaaagtgctgggattacaggcgcgaaccaccttgcctggcctctctttctctctcacacacaacatctttcccagggctttttactccttagaaatactttattctgatttttgtaaataattttgaaaagattttcctgaaattgtcagtgtacagggtgggagtccagttctcaaggggatttggcaannnnnnnnnnnnnnnnnnnnnnnnnnnnnnnnnnnnnnnnnnnnnnnnnnnnnnnnnnnnnnnnnnnnnnnnnnnnnnnnnnnnnnnnnnnnnnnnnnnng

SEQ ID NO: 87309 - DNA, 773 bp, Homo sapiens
  misc_feature (1)...(773): n = A,T,C or G
agcagctgcacagctcaaggttatttttctgccagagggaaacaaggtgggctgcagacacagttctgattttggagcagggtcgtgtgcaagggtcatccattcccactcatttactggctgttcctgcaggtctcaatgagacgtgtggctggctgcacagtagctgccaactggctctgctggttataatcaatggttcagccttctctctctctttctttctttcttttttttttttgagacggaatctcactcttgttgcccaggctggagtgcactggtgcgatcttggctcactgcaacctccgtttcctgggttcaagcaattcttctgcctcagcctcccaagtagctgggattacaggtgcacatcaccacacctggctaattttgtacttttagtagagacagggtttctccatgttggtcaggctggtctcaaactcccgacctcaggtgatccacctgcctcggtctcccaaagtgctgggrttacaggcgcgaaccaccttgcctggcctctctttctctctcacacacaacatctttcccagggctttttactccttagaaatactttattctgatttttgtaaataattttgaaaagattttcctgaaattgtcagtgtacagggtgggagtccagttctcaaggggatttggcaannnnnnnnnnnnnnnnnnnnnnnnnnnnnnnnnnnnnnnnnnnnnnnnnnnnnnnnnnnnnnnnnnnnnnnnnnnnnnnnnnnnnnnnnnnnnnnnnnnng

SEQ ID NO: 87310 - DNA, 615 bp, Homo sapiens
ccttcacctctgacgagctgctcctcagaagaacagtgaacatttcctggagtcacagccattgggctttagcaggctggcatcacaagaggcccagggggtgggtcagctgtgcagagccaaaggtggcagctccaggacacagctgyggcctttgtgggccctgggaacatgcacaggcagagaaggcgcatggggaccctcggagagcctcgccagccacctttgtctccgagtcttgagctcaagtgcctgttttgttgacacatggccatatttgtctggacatctgctcctctctcctcctggctggcagcctttccctcgcctctcatcagagacagcaggggacacaccttgcatgcagcaggtcacggccctcaccctcacagcggggcaggcacgtggtgccctgtgttggctcagggcagcagcggagggctgcctttcagagctcccacccacggcagttcaacccacactggccttccctgtgccacagttttctgatctgtgaaacgggaatgatggctgcgcccccctcccagggttagggcaggtgatgcatgggagacactgactcggtcctggcatgtggtgggtactcgataccag

SEQ ID NO: 87311 - DNA, 556 bp, Homo sapiens
tcccttcagtctgatgggttcaaatgaggctcaaggctctctacctttggctcactttgcaggtcctatctttacctttactgtgctgtttgtgagacctatgctcctgcctttccattgacagcaggtgttacaaaataagagccaactgcattaaggaattccattaattgcccatacatggctcagacagaactgacagccagtgccaccccatggcgactttaaatgttcgttctgcaagcagatactgctccaaagctctcttttggaggctcgaggctgcaggtggtgggctggcatgtctgtgcacctgtgagattttaaaagtgcagtgactgtgtgaaaggcaactgtgagaaggtcaagttcaactctgagttactgacactatgcagatccactctcygccaccatcctctatgggaaactgacctctatagacagctctacctgggctccccagattccttgcttcctgttgggatcagccagcaagaggctctgatctggcattgcggggtggggggatggaggagagagaggctggagtact

SEQ ID NO: 87312 - DNA, 903 bp, Homo sapiens
agtgctgggattacaggtgtgagccaccgtgctggagctgtttctatttctgcatatctcctccaaagtatcagctgccctgtgggatgaaagcggggacttttccagcctctggtgtttgctcttcctgtaccccttcctgttacctaattaggaactgggcctgtatctatatccttcccaggctgccttgtagctctccatacatgtttgatgaatgaacactgaaccacactacaggtttcaaagcctcatttgactctctagtctaggggggactagaaaggtcttttggcaagacagcaacaataataactaatgtttgttgagtatttctgtgtgcccgtgaatgttctaagcaccctacagcagtgcggtttcttttaactcagaaaatcgttgctggccccaggtagcctccatccatcagtgctgacatggcactacgcaacaggaaacagtctaccccagtaattctcaacaggataactttgtgccccgggagactcttggcaatgcctggagacatttttggttgtcacaactgagggagaagtggagaccagggatgctactcaataccctacagtgcgcatggctgcccccaccacaaagaattatctggaccattatgtcagcagtgcagaggtggggagaccctacatgacatgcattatctcctattytaccctctcagtggccccgtgatgtaggatcacagaagaggaaactgagggtcagacaagttaggcaaatgcccaatggagccaggacgtgatcgctggatgatcgggtgtcaaatcccgtactcttgacccctgctctgcggaagccaactgggagatgagggcagaggggctgccttgggcagggacaggggggctgctctgttggagggcctgg

SEQ ID NO: 87313 - DNA, 739 bp, Homo sapiens
catcatccttctgggcagccatctccagagtgccttgcccagcccatgtggcccccatcgccatagccccaggtgccaccattgtcctgggtggtcagctcagtgccaccctcactggcagcccaacctcatgtcccacagcccagatttcctggcattaagctcagtctcttgcwgctacagggagcaagaactgtgccaggaagctggggggtgaaccaggtggaggaagaggaccctgcatcagaggagaggtaaggtctgggcatccagggccagactggtctctgccagctccaaggctgacagcatcctgaggggacagcgggccccagatggacggagaaggggccgctgcagtgataaaccccggacaaacacaggagtgatacaattgtaagaatcacgaggccgggcattgtggctcacacctgtaatcagcgctttgggaggtccagagaggcagattgcctgagctcagtagtggaaaccagcctgtgtaagatggtgaaaccccgcctctactaaaatacaaaaaatcagctgggcgtggcggccggcgcctgtaatcccagctactcaggaggctgaggcacgataagtgcttgaacccaggaggcggggattgtagtgagccaagatcgcgccattgcactccagtctggacaacaaagcgaagctgtgtccaaaaaaaagagaaaaagtcacggatgatggggcagcgcacattaaaaagggg

SEQ ID NO: 87314 - DNA, 739 bp, Homo sapiens
catcatccttctgggcagccatctccagagtgccttgcccagcccatgtggcccccatcgccatagccccaggtgccaccattgtcctgggtggtcagctcagtgccaccctcactggcagcccaacctcatgtcccacagcccagatttcctggcattaagctcagtctcttgctgctacagggagcaagaactgtgccaggaagctggggggtgaaccaggtggaggaagaggaccctgcatcagaggagaggtaaggtctgggcatccagggccagactggtctctgccagctccaaggctgacagcatcctgaggggacagcgggccccagatggacggagaaggggccgctgcagtgataaaccccggacaaacacaggagtgatacaattgtaagaatcacgaggccgggcattgtggctcacacctgtaatcagcgctttgggaggtccagagaggcagattgcctgagctcagtagtggaaaccagcctgtgtaagatggtgaaaccccgcctctactaaaatacaaaaaatcagctgggcgtggcggccggcgcckgtaatcccagctactcaggaggctgaggcacgataagtgcttgaacccaggaggcggggattgtagtgagccaagatcgcgccattgcactccagtctggacaacaaagcgaagctgtgtccaaaaaaaagagaaaaagtcacggatgatggggcagcgcacattaaaaagggg

SEQ ID NO: 87315 - DNA, 739 bp, Homo sapiens
catcatccttctgggcagccatctccagagtgccttgcccagcccatgtggcccccatcgccatagccccaggtgccaccattgtcctgggtggtcagctcagtgccaccctcactggcagcccaacctcatgtcccacagcccagatttcctggcattaagctcagtctcttgctgctacagggagcaagaactgtgccaggaagctggggggtgaaccaggtggaggaagaggaccctgcatcagaggagaggtaaggtctgggcatccagggccagactggtctctgccagctccaaggctgacagcatcctgaggggacagcgggccccagatggacggagaaggggccgctgcagtgataaaccccggacaaacacaggagtgatacaattgtaagaatcacgaggccgggcattgtggctcacacctgtaatcagcgctttgggaggtccagagaggcagattgcctgagctcagtagtggaaaccagcctgtgtaagatggtgaaaccccgcctctactaaaatacaaaaaatcagctgggcgtggcggccggcgcctgtaatcccagctactcaggaggctgaggcasgataagtgcttgaacccaggaggcggggattgtagtgagccaagatcgcgccattgcactccagtctggacaacaaagcgaagctgtgtccaaaaaaaagagaaaaagtcacggatgatggggcagcgcacattaaaaagggg

SEQ ID NO: 87316 - DNA, 739 bp, Homo sapiens
catcatccttctgggcagccatctccagagtgccttgcccagcccatgtggcccccatcgccatagccccaggtgccaccattgtcctgggtggtcagctcagtgccaccctcactggcagcccaacctcatgtcccacagcccagatttcctggcattaagctcagtctcttgctgctacagggagcaagaactgtgccaggaagctggggggtgaaccaggtggaggaagaggaccctgcatcagaggagaggtaaggtctgggcatccagggccagactggtctctgccagctccaaggctgacagcatcctgaggggacagcgggccccagatggacggagaaggggccgctgcagtgataaaccccggacaaacacaggagtgatacaattgtaagaatcacgaggccgggcattgtggctcacacctgtaatcagcgctttgggaggtccagagaggcagattgcctgagctcagtagtggaaaccagcctgtgtaagatggtgaaaccccgcctctactaaaatacaaaaaatcagctgggcgtggcggccggcgcctgtaatcccagctactcaggaggctgaggcacgataastgcttgaacccaggaggcggggattgtagtgagccaagatcgcgccattgcactccagtctggacaacaaagcgaagctgtgtccaaaaaaaagagaaaaagtcacggatgatggggcagcgcacattaaaaagggg

SEQ ID NO: 87317 - DNA, 739 bp, Homo sapiens
catcatccttctgggcagccatctccagagtgccttgcccagcccatgtggcccccatcgccatagccccaggtgccaccattgtcctgggtggtcagctcagtgccaccctcactggcagcccaacctcatgtcccacagcccagatttcctggcattaagctcagtctcttgctgctacagggagcaagaactgtgccaggaagctggggggtgaaccaggtggaggaagaggaccctgcatcagaggagaggtaaggtctgggcatccagggccagactggtctctgccagctccaaggctgacagcatcctgaggggacagcgggccccagatggacggagaaggggccgctgcagtgataaaccccggacaaacacaggagtgatacaattgtaagaatcacgaggccgggcattgtggctcacacctgtaatcagcgctttgggaggtccagagaggcagattgcctgagctcagtagtggaaaccagcctgtgtaagatggtgaaaccccgcctctactaaaatacaaaaaatcagctgggcgtggcggccggcgcctgtaatcccagctactcaggaggctgaggcacgataagtgcttgaacccaggaggcggggattgtagtgagccaagatcgcgccattgcactccagyctggacaacaaagcgaagctgtgtccaaaaaaaagagaaaaagtcacggatgatggggcagcgcacattaaaaagggg

SEQ ID NO: 87318 - DNA, 1053 bp, Homo sapiens
gcagagttttatggttggtgcttttcttatgttttaggtcaaggtaactcctcttaagggaaccagtgtagaagaaaagggcttctgcacctgtataaaaacctgaaataactagaattaggaactagaaaaatggaatcacaaatacttattggtttattgaacatatgtaaataaatctgaaataagaagggaagggaggagatgaatcattattgagcaatcactgtgaggaagacactttcacagacatttatttccataacttaatattgtagggttgatttatcatcactgctatgctaattaaggagcaaaaagctcaggaaggctaagtaactccttgaaagtctatcaagacttccaagaaaggtatccatggccacttgattctgaagctcatggtctttccagtctactcacatactcggcagtgttagagattaaaaggtgctttcttagcatatagactgtgttcccaaggacctcacatcccagacaaatagaacagggcagaattagacacgtggggtggtgggaaaacagtacatattaagcctggtggagtggagagaggcatatgaggtgacttggaagagtgggaagattgtgggtaggtgagatgtgcrcacgtgccaggcagggcaactggagctgggaaacccaggcatgtttgggacacagccagaagtccctcttggcagcacatgtgtgtagggaagcagttagagatcaagctggagaggcaggctgggctgtactgtggagattcgcataccatgcagaggaattgatttaattctctagctagtgagccccattgaaggagggccatgtgtgtgtatgtggttttgtgtgtaatttttggttgtttgctcatttgtttttatcatggaaagacactgatgaaagtgggcttcagtaatattgatatggccaggggttgggggaggcagtggattagcaatgtgttttgggaaagaaaacaaaaaaacaattggacatggctactgctttgcttatggaattacacataccaaattaactccagat

SEQ ID NO: 87319 - DNA, 759 bp, Homo sapiens
gctctctttgaaggtctcagccaccaagctccatctacttggcctgtacagttcctcaaacaaaatgaactccttgcagccacagccttygcttcaactattccctctacctagaaatgtgacccattggaacttctcctgaccagcttcttcccgatattggaacctcaaattaaaaggcacctcctcaaaaaggccttccctgactattctcatcataaggaacgatttattcactccattccatccactctgggtagttcttttcactctctggttttttaaattgtctgtgtgttgtctgtctccccctcagcagaatgcaggctccctgaagggaagactttgactgtatccttgactgtatccccagtgcctagaagaacgttttgcatgtaggagggcctcagtaataatgctcaataaatgaatgctcaacaaatctgaatgaatacaatgggttatctaattagcaatcagatattttactcattaatgtcattaattatcagatttgtgtaaaatgtaagctacttttagtttttaaagaagaaaaaatagatccatagtattataaaaaacaaacggttcctaatcatttggagccagcgatacttctttagcctgaaaactacattcctcagatctttttctctcttttgcagacttcatgaaatgttaacaatggccccattacctatcctattccactcttggatgctgctacaatttgtattatctgacactgattcagggaaa

SEQ ID NO: 87320 - DNA, 1011 bp, Homo sapiens
ataggatagatagatagatagatagatagatagatagatagatagatagatagatrgatgttgcagaaattaaatgcaaaactttgctctgaataagctccccggcagtcaggctagagttactttgtccatatttggaggaaatacacagctaatgtgaagctggggttcttcttggtcatgagctatcagagggacactgagcaaaggaattctgaacaataccgtcaatggaagttttattaaaatgcaaatttaagttacatatggctgtttcttttattggccttctgggcataatgtaaaagcataattatgcacagttacttctccagggtcagaatgatacagtgcaggtcacggagccttatctatcttgaaaaatagagatatcaatggggaatgatataaattattagcacttcccttaagtatcttttatacatcctcatttcagtcaagccttccataagagttacagggaaggctgttcaaaatgagagatttttcagccacgtagatggcaaagattatttcactggcacaggaacctggcttgtgtccttgccaaagtggagggcagcacctttctgcagggaggtgagaagcccgagaaaccctaggcaggctcagtgtttgtggcttcatagtgatttcttggagctaaagttctctaccaaagaagtatgacctagttaatctgtgttatgggtgatatcgccaagttcccacctacagaactttcgtgcgcgtcttgtattatatgtgccagtagattgcatacaaaatgaacagctgaataagtaaacttatttaatagaattatttcataatatccatctaaatgccaaaggaaaatcaccagcaatgattatttctgtttggacataatcccaatccacacgacattcttgcccataatttgctaaatcaagggctcttggacaccactccagaaagcatggatgcaggactgggatcaccagccagccgtgaaagcactcagttcat

SEQ ID NO: 87321 - DNA, 1260 bp, Homo sapiens
tgcattaaagatcccccagcagtatgggccttggcagctcacagtggagctcacagcctctgcttctgcagagggactgacactggttctcttcatgcccaccacgtacctcacagctagcaatgatataaaagcaactctcaaaagagcaactccattcaccagctcctcaggcacaacacacaactttatacacatttgtcatatgtccaaaaagtaaaaaaaaaaaaaacaaaaaacttgttccaactttttgctccaagagaaaaaaaaaagctagttaatctaagtgcttcaggaakccttaatagccttttcatctgctccagcagcaacgcccatttctctggccaattggagagaatcaactcaggagttacaggttctagcaccaggagaaaaccgcagtgagaacgggtcatttgtttggagagactgccactcccagcatttttgcatgtttacaacttgactgacttggaagacttcatttcctaatactaaggaaagtttgcagaagggcccatgaagtatcaaagcctcctaactgcactgtgagacgcaggaaaacccggccatacctcctcatgtcagttttcagctttatggactttatctgacaaaaagttggtttcagaatgtcttccgtacaagccttcaaatagagggctttgtaaattcccaaagccaaaattttaaaatctaattatttgtatattaaaatgcttctctttattgctaattggctgcaacataataattagtctgcattatattttactgctaatcacaacctcaataaaatgggcaatgatgtgtttccattttcaaggttacctatgaagcccaagggctctaaaataggtcaggacttctcttcacccccctggctcctcctcctctctggattttaggttatttcaatatcctgtgtactctctgataataaagaaagtaatgacagagctgtaaagaaaaatgcatgtcagtccactctggaaactatttagtaactgtggtccgtgagtttaaggaaaggggaaaccaacacatttcggtaaaattaggttggagaggggcttgtgaatttcaaatacctatgacacaatagtctcttcctcctaaaatcacagacattaaataagaactggataaaatcggttaagatatttctatcttgcactacaaataacagagcaaactgggtttcaaaaataaattccttctgactggcaatcagaaacgtgaggttctcttcca

SEQ ID NO: 87322 - DNA, 1260 bp, Homo sapiens
tgcattaaagatcccccagcagtatgggccttggcagctcacagtggagctcacagcctctgcttctgcagagggactgacactggttctcttcatgcccaccacgtacctcacagctagcaatgatataaaagcaactctcaaaagagcaactccattcaccagctcctcaggcacaacacacaactttatacacatttgtcatatgtccaaaaagtaaaaaaaaaaaaaacaaaaaacttgttccaactttttgctccaagagaaaaaaaaaagctagttaatctaagtgcttcaggaagccttaakagccttttcatctgctccagcagcaacgcccatttctctggccaattggagagaatcaactcaggagttacaggttctagcaccaggagaaaaccgcagtgagaacgggtcatttgtttggagagactgccactcccagcatttttgcatgtttacaacttgactgacttggaagacttcatttcctaatactaaggaaagtttgcagaagggcccatgaagtatcaaagcctcctaactgcactgtgagacgcaggaaaacccggccatacctcctcatgtcagttttcagctttatggactttatctgacaaaaagttggtttcagaatgtcttccgtacaagccttcaaatagagggctttgtaaattcccaaagccaaaattttaaaatctaattatttgtatattaaaatgcttctctttattgctaattggctgcaacataataattagtctgcattatattttactgctaatcacaacctcaataaaatgggcaatgatgtgtttccattttcaaggttacctatgaagcccaagggctctaaaataggtcaggacttctcttcacccccctggctcctcctcctctctggattttaggttatttcaatatcctgtgtactctctgataataaagaaagtaatgacagagctgtaaagaaaaatgcatgtcagtccactctggaaactatttagtaactgtggtccgtgagtttaaggaaaggggaaaccaacacatttcggtaaaattaggttggagaggggcttgtgaatttcaaatacctatgacacaatagtctcttcctcctaaaatcacagacattaaataagaactggataaaatcggttaagatatttctatcttgcactacaaataacagagcaaactgggtttcaaaaataaattccttctgactggcaatcagaaacgtgaggttctcttcca

SEQ ID NO: 87323 - DNA, 1260 bp, Homo sapiens
tgcattaaagatcccccagcagtatgggccttggcagctcacagtggagctcacagcctctgcttctgcagagggactgacactggttctcttcatgcccaccacgtacctcacagctagcaatgatataaaagcaactctcaaaagagcaactccattcaccagctcctcaggcacaacacacaactttatacacatttgtcatatgtccaaaaagtaaaaaaaaaaaaaacaaaaaacttgttccaactttttgctccaagagaaaaaaaaaagctagttaatctaagtgcttcaggaagccttaatwgccttttcatctgctccagcagcaacgcccatttctctggccaattggagagaatcaactcaggagttacaggttctagcaccaggagaaaaccgcagtgagaacgggtcatttgtttggagagactgccactcccagcatttttgcatgtttacaacttgactgacttggaagacttcatttcctaatactaaggaaagtttgcagaagggcccatgaagtatcaaagcctcctaactgcactgtgagacgcaggaaaacccggccatacctcctcatgtcagttttcagctttatggactttatctgacaaaaagttggtttcagaatgtcttccgtacaagccttcaaatagagggctttgtaaattcccaaagccaaaattttaaaatctaattatttgtatattaaaatgcttctctttattgctaattggctgcaacataataattagtctgcattatattttactgctaatcacaacctcaataaaatgggcaatgatgtgtttccattttcaaggttacctatgaagcccaagggctctaaaataggtcaggacttctcttcacccccctggctcctcctcctctctggattttaggttatttcaatatcctgtgtactctctgataataaagaaagtaatgacagagctgtaaagaaaaatgcatgtcagtccactctggaaactatttagtaactgtggtccgtgagtttaaggaaaggggaaaccaacacatttcggtaaaattaggttggagaggggcttgtgaatttcaaatacctatgacacaatagtctcttcctcctaaaatcacagacattaaataagaactggataaaatcggttaagatatttctatcttgcactacaaataacagagcaaactgggtttcaaaaataaattccttctgactggcaatcagaaacgtgaggttctcttcca

SEQ ID NO: 87324 - DNA, 1260 bp, Homo sapiens
tgcattaaagatcccccagcagtatgggccttggcagctcacagtggagctcacagcctctgcttctgcagagggactgacactggttctcttcatgcccaccacgtacctcacagctagcaatgatataaaagcaactctcaaaagagcaactccattcaccagctcctcaggcacaacacacaactttatacacatttgtcatatgtccaaaaagtaaaaaaaaaaaaaacaaaaaacttgttccaactttttgctccaagagaaaaaaaaaagctagttaatctaagtgcttcaggaagccttaatagccttttcatctgctccagcagcaacgcccatttctctggccaattggagagaatcaactcaggagttacaggttctagcaccaggagaaaaccgcagtgagaacgggtcatttgtttggagagactgccactcccagcatttttgcatgtttacaacttgactgacttggaagacttcatttcctaatactaaggaaagtttgcagaagggcccatgaagtatcaaagcctcctaactgcactgtgagacgcaggaaaacccggccatacctcctcatgtcagttttcagctttatggactttatctgacaaaaagttggtttcagaatgtcttccgtacaagccttcaaatagagggctttgtaaattcccaaagccaaaattttaaaatctaattatttgtatattaaaatgcttctctttattgctaattggctgcaacataataattagtctgcattatattttactgctaatcacaacctcaataaaatgggcaatgatgtgtttccattttcaaggttacctatgaagcccaagggctctaaaataggtcaggacttctcttcacccccctggctcctcctyctctctggattttaggttatttcaatatcctgtgtactctctgataataaagaaagtaatgacagagctgtaaagaaaaatgcatgtcagtccactctggaaactatttagtaactgtggtccgtgagtttaaggaaaggggaaaccaacacatttcggtaaaattaggttggagaggggcttgtgaatttcaaatacctatgacacaatagtctcttcctcctaaaatcacagacattaaataagaactggataaaatcggttaagatatttctatcttgcactacaaataacagagcaaactgggtttcaaaaataaattccttctgactggcaatcagaaacgtgaggttctcttcca

SEQ ID NO: 87325 - DNA, 1962 bp, Homo sapiens
ggagtgccgtacagatttgcagggttccctggagaggttggggtcttcccttcatctctggtagcttgttggaggtggtgctgacggccacagccttggcaccactcctcatgttctagctgtggttaggttgagattgagacagtgaggcaacagaggagacaagaaagtcaactccagtggcctttccggggccttgggaagcgagcccacgcctgcaggatgccatctgcaagcttggctgtgttatcsaaattcttgaggctcgttcaagaacaaggaggtaaacagagtcaagctagatatctgtagtacttccttatgtgtctctgatgtgcctccttaccagcataagtaagtgtgaatgatatactccaagtggtgtcctttggaaaaggaagctgattttgggagggaatttgaatgtatacttaccaagatagaaagtatttattgatgtcttcaccagcccagtctggagaaaacagagtaatacaaaaagatttttttttttttttgagacggagtctcacactgtcgcctaggctggagtgcagtggtgtgatctcagctcactgcaacctctgcctcccaggttcacgccattctcctgcctcagcctcccgagtagctgggactacaggcacccgccaccacgcccggctaattttttgtgtttttagtagaggcagggtttcaccgtgttagccaggatggtctcgatctcctgacctcgtgatccgcccgccttggcctcccaaagtgctgggattacaggcgtgagccaccgcacccggcctacaaaaagatttttaaaaagtgtttctgccattgtaccaagcataaaaatcctgaattagctgtcagtgtgagaagagtcctgctcatgtacctagaacttctcactgggtgaaacccctcctctgttttgtgctgttaggatttctgggctgttcttactttctgtcccagacctgactcaaaggcctggatcatgcatatgaagcacgtgatttttcaatgcctttgataatagcttgctgtgggaaaatcctgtgaaagaaaaatatgggaaattttgtgaagacacatggagagacacagagctggatccctaactgtgacatctctgaataaagggccttccttcctcattggatccaggagctttgctagctggatggggacctatccgcagcaagggcttggggtgcccctttagccctgaagttaggaacaaaggttttgagaagcctttcaatttcagctttatcctaagcaaaaatcttcccagaaaggttgataagacagcactggacagaaatgtcggaagtccagagttacttttcatcagcgctttgccaagtgctcggtcttttcatacctctgaagcatgtgaagaaggcagctttcttcccatctcgctggtgttattgttccaggctgtttggagagacctgaagatagccaagttctgttagccaaaaatttgctttgtttataaacccaagttttgtttttgcttttgtgcatgttatcggtttgatctgtgttaccaaaagaacattgaaaataatgaattgctttgatgagaattccaaggaataatggcaaacaagtgtgtatatacaacagtacgtaaacagaaatatgtaagccgggcacagtgcaggcacctctaatcctggctacccaggaggctgaggcaggaggatcacttgagcccaggagttggagctgtagtgtgctgtgattacacctgtgaatatccagtacagtccagcctaaacaacctggggagaccccacctctaaaacaaaaaacagaaaaccccagaaatacatagaaccaacaagaataccacatacttttcccgtttgatacaatgaggtaagaggagaaagttaacgcccagggcagttcatttaagaatgcctgaaaaacaccttcatttcaaaggat

SEQ ID NO: 87326 - DNA, 896 bp, Homo sapiens
atacaggaagcagcagraaggccctgggagctcgctgggtcccctaccaggacattcctgcctagcaccacagggatccaatgggagaggagcagggggtaaaactacaagggagttggaaatctgtagcagaactttgtaacaatttgaatgctgttagaagcctactggacagaacttgcgggagggcacaaatccagtgtgcagactccacagatgagagaagaaccaagcccttttctttcgcagctgggaggtggagagcctgggacagggtttcaagtccatatcgctctctacctggaaacagtctgggggccattaagggtggggggcatggtggaagtgagaccggtccttcagtttgcgtgggagctgggtgaggcctgtgactgccagctttcccctacttccctgagaacctgcatgactcagcagaggcagccattatcctaggtacaatctctagtgtatctgggaatcttacccccacccccgacagcagctgcatcaagacctgctcaaggagagtctgagctcagacatgcctagacccatccgcacctgaatggaccgtcactactcactctggtagcagaagacaaaatgcatataatcttgggtgttttagggccacacagcaccaccgggttcctccccatactaccatcggctgatgctctctggaaagcaccacctcctcggcacgaggccaaccagcacaaaaatagagcattaaaccaccaaagctatgaacccccacggagtccattgcacacagccccgcccctgccggccgcaccacctccaccaaaacagatagctagtatcaacggctaagagacccatagactgttcaaatcacaggactctgtgcagacaacccccagtaccag

SEQ ID NO: 87327 - DNA, 896 bp, Homo sapiens
atacaggaagcagcagaaaggccctgggagctcrctgggtcccctaccaggacattcctgcctagcaccacagggatccaatgggagaggagcagggggtaaaactacaagggagttggaaatctgtagcagaactttgtaacaatttgaatgctgttagaagcctactggacagaacttgcgggagggcacaaatccagtgtgcagactccacagatgagagaagaaccaagcccttttctttcgcagctgggaggtggagagcctgggacagggtttcaagtccatatcgctctctacctggaaacagtctgggggccattaagggtggggggcatggtggaagtgagaccggtccttcagtttgcgtgggagctgggtgaggcctgtgactgccagctttcccctacttccctgagaacctgcatgactcagcagaggcagccattatcctaggtacaatctctagtgtatctgggaatcttacccccacccccgacagcagctgcatcaagacctgctcaaggagagtctgagctcagacatgcctagacccatccgcacctgaatggaccgtcactactcactctggtagcagaagacaaaatgcatataatcttgggtgttttagggccacacagcaccaccgggttcctccccatactaccatcggctgatgctctctggaaagcaccacctcctcggcacgaggccaaccagcacaaaaatagagcattaaaccaccaaagctatgaacccccacggagtccattgcacacagccccgcccctgccggccgcaccacctccaccaaaacagatagctagtatcaacggctaagagacccatagactgttcaaatcacaggactctgtgcagacaacccccagtaccag

SEQ ID NO: 87328 - DNA, 896 bp, Homo sapiens
atacaggaagcagcagaaaggccctgggagctcgctgggtcccctaccaggacattcctgcctagcaccacagggatccaatgggagaggagcagggggtaaaactacaagggagttggaaatctgtagcagaactttgtaacaatttgaatgctgttagaagcctactggacagaacttgcgggagggcacaaatccagtgtgcagactccacagatgagagaagaaccaagcccttttctttcgcagctgggaggtggagascctgggacagggtttcaagtccatatcgctctctacctggaaacagtctgggggccattaagggtggggggcatggtggaagtgagaccggtccttcagtttgcgtgggagctgggtgaggcctgtgactgccagctttcccctacttccctgagaacctgcatgactcagcagaggcagccattatcctaggtacaatctctagtgtatctgggaatcttacccccacccccgacagcagctgcatcaagacctgctcaaggagagtctgagctcagacatgcctagacccatccgcacctgaatggaccgtcactactcactctggtagcagaagacaaaatgcatataatcttgggtgttttagggccacacagcaccaccgggttcctccccatactaccatcggctgatgctctctggaaagcaccacctcctcggcacgaggccaaccagcacaaaaatagagcattaaaccaccaaagctatgaacccccacggagtccattgcacacagccccgcccctgccggccgcaccacctccaccaaaacagatagctagtatcaacggctaagagacccatagactgttcaaatcacaggactctgtgcagacaacccccagtaccag

SEQ ID NO: 87329 - DNA, 625 bp, Homo sapiens
ttattgcttaataagatacatatataataactctagtcacttaatatgcacataaatgatctatgatagatacacacatatacacatgtatatatacatacacacatatatatacagcatttatatacacagcatacacacacacacacacacacacacacacatayacacacacagcaattaagcagaaagaagaagaaagcactgtggagtaaatcaagactttgattctagttatgattctgctttacctggagctagcctctaaagaggttgctataataagatattcattaattattttcatattatcatgttattcgattgttgtctaaactacatattttgcctggatatcttagtgcttagcatactacgtggtacatagaatctcaatacctatgtggataattattgggtaagctttcagaataccaaaaacagataaattcaaagtcagtcttcttgcatattattaatttgtattgttaaagaataatagtcatgttttcaaaataaaggcttcatgatatagacctcctactttattgggcatgtttcagtcacatatgtcagtgtgtgtgtgtgtgcttgtgtgtgactttctctaactatacagaaaaca

SEQ ID NO: 87330 - DNA, 1069 bp, Homo sapiens
tttagaaattaaaaaaacagaaaagaacattaaataaatggatagatatgttcatgaaagataaaaatcaaaattayaaagatatcaattatagtcaatttatcctaatagcagttttattcaaaatcttagcaagaattttgagagcacccaaaagcttatcttaaaacttttatgaaaacaaatatctaagaatattaaaataaaaattttaagaacaagggtacaataaatatcattcttatgtgttacaaatttaaatataaacagaaataagattgtctattagggttaatggctcaaaaatatgaaaaattataaatataaaagattgctagggttagcaacattaaaataaatacaaaaaaagaaaaattctacataagaaaaacatcattcatttaattcacaaactaagttttggtgaagagatgtgtaatgaattaaaatgaaaaagattatattccagggtataaaaggagtttatattccagagtttaaaatgtgcacacacacacacacacacacacacacacacacacacacattcaggagcccacagatttgagagtggcaccagtcatgcagtattaactcaagtaggaaaaataagaagagtttttggttttgagaaacagatgctacattaatttttaaaatatatttgcttactcaacagatattttttgagtctcaacatgcaaacaaccatgctaggtactatggggtataaagaggtaaagaaaacctggtaaaaaatatagacactgagacaaatatatctggtttcaagttcagatacaccttttgctgtgtgattttaagtaagttcttagcctctctttctattagaattttcccatttgttaaagaatagtaatattatttatttcatgtattttctgtgatattaatgagtttacatttaatacatatatgtgtgtatgtgcgcgagaatcttttccttctccctctcccacacacatctgtacctgtgtgtgtatgcctgataaatcgtttgtattcagtaaatgagtttcaattttctctcacctagtaatgttgtagc

SEQ ID NO: 87331 - DNA, 1069 bp, Homo sapiens
tttagaaattaaaaaaacagaaaagaacattaaataaatggatagatatgttcatgaaagataaaaatcaaaattacaaagatatcaattatagtcaatttatcctaatagcagttttattcaaaatcttagcaagaattttgagagcacccaaaagcttatcttaaaacttttatgaaaacaaatatctaagaatattaaaataaaaattttaagaacaagggtacaataaatatcattcttatgtgttacaaatttaaatataaacagaaataagattgtctattagggttaatggctcaaaaatatgaaaaattataaatataaaagattgctagggttagcaacattaaaataaatacaaaaaaagaaaaattctacataagaaaaacatcattcatttaattcacaaactaagttttggtgaagagatgtgtaatgaattaaaatgaaaaagattatattccagggtataaaaggagtttatattccagagtttaaaatgtgcrcacacacacacacacacacacacacacacacacacacattcaggagcccacagatttgagagtggcaccagtcatgcagtattaactcaagtaggaaaaataagaagagtttttggttttgagaaacagatgctacattaatttttaaaatatatttgcttactcaacagatattttttgagtctcaacatgcaaacaaccatgctaggtactatggggtataaagaggtaaagaaaacctggtaaaaaatatagacactgagacaaatatatctggtttcaagttcagatacaccttttgctgtgtgattttaagtaagttcttagcctctctttctattagaattttcccatttgttaaagaatagtaatattatttatttcatgtattttctgtgatattaatgagtttacatttaatacatatatgtgtgtatgtgcgcgagaatcttttccttctccctctcccacacacatctgtacctgtgtgtgtatgcctgataaatcgtttgtattcagtaaatgagtttcaattttctctcacctagtaatgttgtagc

SEQ ID NO: 87332 - DNA, 1069 bp, Homo sapiens
tttagaaattaaaaaaacagaaaagaacattaaataaatggatagatatgttcatgaaagataaaaatcaaaattacaaagatatcaattatagtcaatttatcctaatagcagttttattcaaaatcttagcaagaattttgagagcacccaaaagcttatcttaaaacttttatgaaaacaaatatctaagaatattaaaataaaaattttaagaacaagggtacaataaatatcattcttatgtgttacaaatttaaatataaacagaaataagattgtctattagggttaatggctcaaaaatatgaaaaattataaatataaaagattgctagggttagcaacattaaaataaatacaaaaaaagaaaaattctacataagaaaaacatcattcatttaattcacaaactaagttttggtgaagagatgtgtaatgaattaaaatgaaaaagattatattccagggtataaaaggagtttatattccagagtttaaaatgtgcacacacacacacacacacacacacacacacacacacacattcaggagcccacagatttgagagtggcaccagtcatgcagtattaactcaagtaggaaaaataagaagagtttttggttttgagaaacagatgctacattaatttttaaaatatatttgcttactcaacagatattttttgagtctcaacatgcaaacaaccatgctaggtactatggggtataaagaggtaaagaaaacctggtaaaaaatatagacactgagacaaatatatctggtttcaagttcagatacaccttttgctgtgtgattttaagtaagttcttagcctctctttctattagaattttcccatttgttaaagaatagtaatattatttatttcatgtattttctgtgatattaatgagtttacatttaatacatatatgtgtgtatgtgcgcgagaatcttttccttctccctctcccacacacatctgtacctgtgtgtgtatgcctgataaatmgtttgtattcagtaaatgagtttcaattttctctcacctagtaatgttgtagc

SEQ ID NO: 87333 - DNA, 635 bp, Homo sapiens
aacataaaatttttaaaagacaaggctgaagactttaagtattttaatactgagaagagcaatttttaaataaaaagcaggagatattataatgtatccttatgttttggagaagggagaattttattatgtagggaaggtggtgatgaattgtggagtaaaggtttttagaaagttatgaaatgggatacagggcacagatttatcctttgctaagagccatttggttaacctgctctattgggaaggaaggtggagagaatggatacacttgcaggcaggctagtggtgggagtcttttcttccaagatcttcaagtttctcatgaaacaaaagacaagaacttaagctaaatgtgagaaatgggaggaggagagaaaatgaactcatcctctttgtgagaaaaagagatgatgaatgtgaaactttccttacagtgatttgctgtaattggaagtatggtgcagaatacggagaggtacataaaaaaagactgagctgagattgtgccactgccctccagcctgggcaacaaragcaaaactcaatctcgaaaaaacaaaaatgctgttaatttttgtttgttgatatttatcctgcaactttactgtacttgtttattagctcccatcgga

SEQ ID NO: 87334 - DNA, 1890 bp, Homo sapiens
tcattgcacagcagcaactttatttccccttgaaaattgtggtgaattgtccctgatgagaaaaaatcttttgcttagggcctctggtgacttgcttccctcccaactttagcaggcttaactataagctcagttggtaggactgagctagctcaacaaagaatgcaaaatctctggcttgctgtgcagactcccctagctaagttccagatcctagtcatttccttggtgtggatgctcccagcatcacatagtagacccggtgtttctgtctgtctcccaacttccctagaaatatcaaaagcagaagggacaggattccattcctggaggacgttccacagtatgaccagctgtgcccaatccaagaacacctcaatatgaaataataagaatttaagggatcatgtcatatgcactctcttcctcctcctccctttgctgccactattgtttttctcaacaaaccttcctttacatttcagtagtgtttgtatgatacagggtgtgtatgtgtgtgtgcatatgtgtgcatgctcacccatgccccttgcacattgctagctgtctcagcctgggttcctcagtaagtagagtttgtgggttggggctcatatgttgttactttattaagacatgcaattccaaggaggatgatgagaagcaaggggagtgcaaaggcaggacagcccaaatgaggatgtggtattgagctgaccactgttaagtgtgaccagttgcttcattcaaaggggcagtcttccaaaaaatccatataaactgactctcaagaaccatcccatagaggagaggtaagtggaaggatttatccaccagytcttgcctcccactggtcaaaagtttgccccacagtgtgttaacaacctacacttccaggaagcacaggtgtgggtgctgagcagggcttcacagctgtgccaacaagggagcccagggagaaggaggcaggaggcttgggttccatctgacaatgcctctctaaagtcagccagagcacatgcaaagcttgtcaccacagcgacagctagaaaagagataagtggagctgttagtcacgaatgaatgcatgtgttggacacactgactaaaaaccctgttgtgtgcctgtcttgaccagctgctagtctaagcttcaaattcagcatgactattaatctcttggtgctagagttcctttattgagtattaagtgttctatacaatggggacatggaacaaaaagttgtgaacagaggtcattgagtatttgtgagatggtccatcttcaattctactacttagttccctgacttatgtactctggttaatggaagaactgcatcatatattgagctggttcaaagaatattcttaatcttacaggcagcactttatattgaaagcatttatttaactgagggcatgagtgaagtataataggttattccactattctataaggacagctgcttctgggttgttgggtatcacatgataagaccagtgattctcgtctgctataacccattatttaacttggggtccttggttagaagcaatgttgtccaagaaactacaatcatttataagacctaccgtaagtccccagacagtggttctggcaaagcatgaccaaaaccaagtctgtgaatccttcatggggtcttactgtaagctgagctgtctgtagacactggaagcatgattagatctaaaggacaaaatcagatcatatctgatcagcagaggaatcttctcatgctctgagctcactgaaacctggtagcttttcattcacctctcaagtgggtactggagcacacacaaatcttatacttgctgcctcgaaaacatgtgccttcttttggtagaaggtgcagtgcacagcgc

SEQ ID NO: 87335 - DNA, 1943 bp, Homo sapiens
cagccatttataaaataattttccttttgagggaaatgcactaatgcactaatgagacagaattacattagattgttctttctctagcctaggtgaaacctggcctagagaatatacataatgatagtatccttttccccaggaagcactgaagaaatggtaatatggcccacctttttaaaaactacaccacccactgcttttcacttaacaaatcactacctcagacaagttaatgaggctatagttttctttttagttgctctgttcctatatggaggatatgccttggtcacctgcattatgctgaaacacagtctgtttctgtttctagggtaaagaaaagggaaagcctatcacttaattgtagtatctttacagaccacatcttaaggcagcttgctttgaaacaggtgattttgtttccattttggaaggcaacaggtctgatattttccctggatagaggaaaggtgaagggaacaaagccctctctaaattgtggctacaggagtggcaggcaagtgcaagaataccccttttccacagagggaattaacccaaagggaatgactgaaagggtcattatgttctccaagacaatcaagcaagcagcatagagagtcaacgtgctgatgagggaatgttcccaatactgtgggtgctgttcaaactaccctcacacctagaaataacaaacactgtttagccagcttacaagtctgcaatttggtcagggctcaacagggaaagctcatctttgcagtacttgccaagagcagctctgaggctgaggactggaataactggaatcacttacaagtctggcagatgatgctgggaaaactcagtcagctgggttctgcaacagctctggctcctcagtcgtctccctctatccctacatgacytcttcagcatggcggcttcaaagtagccagacattttatgtgtgtgttgtcacagggatccaaaggtatgtccagtagagccaggcagaaactgtactgcctgctctaacctagtcttggaagacactcagtgtcacctctaacacattctatgagtttgaagtcagtcactaaggctggcccatgttcaaggggaaggaaattagatctcacctactgtggtctgaatgtatcccccaaatttcatatggtaaaatttaattgccagtgtgacagtattaagaagtaaggcatttaggaggtgattaggtcatgagggggggcccttatgcatgggattagccacttataaaaagggcttgaatgggtaagtctgttccttccattccttccacctcttctgctatgaggacatagagttagccccctctggaggaaatggtgttcaaggtgccaccttggaagaagagatcaggccattatcagacactgaacttgccagcactttgatcttggacatccaagcctccagaactgtgggaaataagtttctgtatacattacccagtctaagatattttgttatagcagcacaaatgcactcacctttagtgaaaagagtatcaaaaaattggggaacatgtttttaaatcaccagggtaattttatgtagttaaataattatgtgatagtatactctttactaagtcattcattcacaaatacttacggagctttttaccatatattgaataaacattgcatttcaaagttaaaaaattctagatattatagcctgagaaaactcacatttggatatgattttatgtattgagaaggctgtattttgttttaggcctgtctttgaaagttttcaaaccagcacaaaatgtcagatgaggacaaatccatttagagaggagtataatcaaaacagcataaagatttttattagaattcatttaaaacctgagaaaatggaagtataaatccttaatcagtacaattatattctagaaaagttatctgttg

SEQ ID NO: 87336 - DNA, 1943 bp, Homo sapiens
cagccatttataaaataattttccttttgagggaaatgcactaatgcactaatgagacagaattacattagattgttctttctctagcctaggtgaaacctggcctagagaatatacataatgatagtatccttttccccaggaagcactgaagaaatggtaatatggcccacctttttaaaaactacaccacccactgcttttcacttaacaaatcactacctcagacaagttaatgaggctatagttttctttttagttgctctgttcctatatggaggatatgccttggtcacctgcattatgctgaaacacagtctgtttctgtttctagggtaaagaaaagggaaagcctatcacttaattgtagtatctttacagaccacatcttaaggcagcttgctttgaaacaggtgattttgtttccattttggaaggcaacaggtctgatattttccctggatagaggaaaggtgaagggaacaaagccctctctaaattgtggctacaggagtggcaggcaagtgcaagaataccccttttccacagagggaattaacccaaagggaatgactgaaagggtcattatgttctccaagacaatcaagcaagcagcatagagagtcaacgtgctgatgagggaatgttcccaatactgtgggtgctgttcaaactaccctcacacctagaaataacaaacactgtttagccagcttacaagtctgcaatttggtcagggctcaacagggaaagctcatctttgcagtacttgccaagagcagctctgaggctgaggactggaataactggaatcacttacaagtctggcagatgatgctgggaaaactcagtcagctgggttctgcaacagctctggctcctcagtcgtctccctctatccctacatgacttcttcagcatggcggcttcaaagtagccagacattttatgtgtgtgttgtcacagggatccaaaggtatgtccagtagagccaggcagaaactgtactgcctgctctaacctagtcttggaagacactcagtgtcacctctaacacattctatgagtttgaagtcagtcactaaggctgrcccatgttcaaggggaaggaaattagatctcacctactgtggtctgaatgtatcccccaaatttcatatggtaaaatttaattgccagtgtgacagtattaagaagtaaggcatttaggaggtgattaggtcatgagggggggcccttatgcatgggattagccacttataaaaagggcttgaatgggtaagtctgttccttccattccttccacctcttctgctatgaggacatagagttagccccctctggaggaaatggtgttcaaggtgccaccttggaagaagagatcaggccattatcagacactgaacttgccagcactttgatcttggacatccaagcctccagaactgtgggaaataagtttctgtatacattacccagtctaagatattttgttatagcagcacaaatgcactcacctttagtgaaaagagtatcaaaaaattggggaacatgtttttaaatcaccagggtaattttatgtagttaaataattatgtgatagtatactctttactaagtcattcattcacaaatacttacggagctttttaccatatattgaataaacattgcatttcaaagttaaaaaattctagatattatagcctgagaaaactcacatttggatatgattttatgtattgagaaggctgtattttgttttaggcctgtctttgaaagttttcaaaccagcacaaaatgtcagatgaggacaaatccatttagagaggagtataatcaaaacagcataaagatttttattagaattcatttaaaacctgagaaaatggaagtataaatccttaatcagtacaattatattctagaaaagttatctgttg

SEQ ID NO: 87337 - DNA, 684 bp, Homo sapiens
ggattacaggtgcccaccaccacgcctggcttattttttgtatttttagtagagacggggtttcaccatcttggccaggctgatcttgaactccttaagcaattctaattataatgaaaattgtgattgtctccccaacatccattctatgccaggtctatgggtgcccctgattaatccaagcaaataatctaaatcctttccttagtcgtgattgataagagaatgggcaggtgacaggattcagattaatgacacacaaaaaatggtttgctggtagcttttactcttctgccagatgtgaatgaggatgcaatgatccaggctgctcctggcagccattctatgcccatgaggagatctagctgcagggtgagcttgacacagtggatggcagagctggaagataggagatgaaaatayatgtgttattcagtggtattgagggccattgttttgggaaaccctgaaatttggttatcaatgccaacaaatctctattgtttaagcctcttggaattgagcttttggttatttaccgcctaaagcatagggatttttttaaaaagaaacaacaaaaatttagaatgaggaattaaaaatcctacagtgattttagcagtctaatttaatacagatattggccagttaggttaatgaaatagaatagaaagtctagataga

SEQ ID NO: 87338 - DNA, 1214 bp, Homo sapiens
caagttctaagaaaaagtgaattgtaaatgtgttcaagaatcaaaagagaacattagacatttggtacaggggcaggtgtttgtaaacaatgcaggactgtctgaataattatcacttgagtatgcagtaccctgattctgattggtgggttctgccagttttcaagtttccggcctgtcttgctgtctgctagcttgtggagcagaaggtggaagggaagatggggtggaggagagaggaaagtggggaaaagaggagagacggtttgcctgtttccagcaccatgtcaccttctccttttctttctccttttaggcaaacctaaagggttatgctttaagaggctaagccaaataggtttaatagcttagttggataacgagttgttctcccaaacactaaaattccatttagtgtctttcttactctatgaaaacattttcccccattggaaattcctaatgcctgatgacaaatcttaaagagtaagagggttatgctgtgctgatacataaatcctgattgaactagtacaactgattaatatctgtgagcgatgggacagagactgggattttcatgtgaaatgttatgcataggcatcagtataatcaagggaagtgtgagagatctgagactaatcctcaaccacagacttctcagtatcagaaatggagccaggatggccagcttagaccactaaaggcattaccagctctccaacatatgctctatgcagtgaatcccctccataatcctaacaaaagcccaacttttcttgggctctaccatacttaacagagaaaaattgattccacagataattacagtgtggtaaagactgatgtgcttattgtataatgttttactattttaaaaaatggatcttgattccaaggtccttatgaagatatataaaaatgtaataatgattttttttwaaaaaaagaaacagtgggagattttaaaggacaatttaatttttatttattttattttatttatttatttatttatttatttatttatttatttatttatttttagacagagtctcgccccgtctccaggctggaatgcagtggcgcgatcttggctcactgcaaccttcgactccctggttcaagcaattctcctgcctcagcctcttgagtagctgagattacaggcaagcaccaccatgcccagctaatttttgtatttttagtagagg

SEQ ID NO: 87339 - DNA, 865 bp, Homo sapiens
agatcaattataaatccagaggaaaaataaaatgaaatgtaaacatagtatattatttggttctatagcaagtgacgcattatgatcatcataattaaaataccatttatgaaatttcaagtttttaaatcaagctaatagacatagcataaaaggcttaaaggtgtttaacaggatataaacttgatcacccttggcaatttaaaagtaaaatacaggccagtcayagtggttcacgcctataatcccagcactttcagaggctgaagtctgagtattgcttgaggccatgagtttgagaccatcctgggcaacacagtgaaaccatgtacctacaaaaaaataaaaaataaaaaattagccaggtgtggtggtgccacctataatcccagctactcaggaggctgagatgggagaattccttgagcccaggagtttgaggctacagtgagctattatcaccactgcactgtataatcaccactgcactgcagcctgggccagagtgagactatgtctccaaaaaaaaaaaaaaaaaaaaaaagcgaaatgcagacagaggatttagaagaatttaaaagaagttcaaggatgttaacagttgtcatcttataaagtgaagtgtctggggaaaatcttagtggaacaggaaataaagacataatatcaagatataattattgttctgggttgaattgtgtcacctcccaaaacatatgctagagtcctagcccccagtaccttggaatatgaccttctttggagacagggtctttgtaggggtaatcaggttaaaatgaggccattcaggggaaggggttgggcaatacaaacccgtgcctttataagagagggaaagtaggac

SEQ ID NO: 87340 - DNA, 700 bp, Homo sapiens
aagtccctgagtttaactgtttcttttagttcttttttatgaactctcatgcaggtaaatattataaaataagtgtgtctttactcctgttaacctgtcttttgttagtttagttcataggccctgagtcactgatctaagagggtggcaaaaaacattttcccctccttgacagttttggcaatgaggatgggctggttgggcttgaagtctttgcttgctcctgaggctctggctgagatctcaggacgtccaacaaagctggcaagataagaataattaccaatgcagccacctggattcctacttagagtctagttaagtgaggcctgtaaggacctcttcctaagtttagcttaacaggaaaaaaatgttcgtaagaactagttctttggatattgcaactcttgggattttgatttgagtcattttgttattgatcttttccttccctgggatggtcactgttttatcttaatctctgtgttttgtgtcatttctccataaggaggagaatcatagaacacaagaataagtcttacaagcctattgttcaagtcggcctcacagactggtgaatttatagttctcaccaacccagcattcacgttgacaaactttgtcgtgggtcactgattaaaaaataccrgataatgttctccttccttgttttgtgttctgagagcttggcttggatcca

SEQ ID NO: 87341 - DNA, 1070 bp, Homo sapiens
ttgtgtgatccttatgagcaaatctctaatgatcaatgatctgaggtgaaatagtttcatcctgaaactattcccctcctggccttgcctcccctcagggcccccatcccccacttccccaccttctgtggaaaaattgtcttccacaaaactgctccctggtgccaaaaagtttgggtactgctgctgtataatactattccaaaaaaagtcaaaatagcaattttgtaaatatttgttacttgatccaccttattttttgttcaaactggcttgtgtgtttagacatagcacaagagatagaaattgcctggaaaattaatttctatttctagtccttttgtggtctgttaaagaaacagtgatttcaggtgcttgaacacaagtagccctttctccaccccataaagtaagctcacgttcttttgatagatgttccaggcccatataaatttttctttctccttttttttaaattatatggtatgctgatacaaagaaaatgcttgagaataatttgtttcttaagttttcaaatcctttctatgctcatttttttttgtccagaatgcttttccatcctatctatatccctaactaactcaatattcctgtccttctccactgctttaatgatctgagatagcatatagaataaaattgaagaaaactgccctgcaattatgagaataaaataaatataagccagtgcccgctgcctttcacctataccttcactcctctcagcacactgctttctgctaatcgtcacaatgacagccatgctgattatttgcyacctctatgagtaccacatgttctgtgtcttcacagtgcctggggtgcttttagaacacaggaaaacagctataagtggcttgtgtttaggcagaaaatgttcccagaaactctagatgcaaaaacagttattttgtattcctgaagacacttatgatactgcctgaaccttaattatgcttcccaacatttgcaaaattaaaacctcaaattaaacatctcattaatgtagctcctttgcaattcattcattcgtttcaaaaatgataaag

SEQ ID NO: 87342 - DNA, 1035 bp, Homo sapiens
tgttccctttaatattggggatggaaaaacactccacaattaaaaccacctttgcaaaaactacaactgagaaaattatgactgaaagatctgacttgactccactttgcttctaacctgcaagctgttcttgttcattcatggacataggccaaaataactttgggaggaacttgaaactaagacaataatagccctttcacaaaacaaacctctttcctgcctggggactacactaccttcataggactaacaaattagccacaagattagaaataatggtttaggaatcacatagctggagactgaaagattagaaacctccccagattscttctggggataaatcactattgcaaaacctaagatcagtgcttgagatattttgcagatgctgtacaggatggctcagctgctaccacccagactgataaactgggtcatctggtctcctggccccaggagactgactcagcatcaagaggacaactttgacaccctatgatatcatctccaacccaaccaatcagcagtccccactttcagacccctacccaccaagttttccttaaaacccccatcctcaagtttttgagaagactgatttgagtaataataacactcttctctcctgtacagctggctgtgcgtgaattaaacttttctctattgcaattcccgtcttgataaatcaaatctatctaggcaccgggcaaggagaacccactgaagggtcacaacgatattctcatacatacagaggttttttttatatgatataactaattagtttggggtctagatctgagaaggactcaccgtttttgactgtcagcttattctagtgggtataaaggaaaataatgagtgataattttaaaatagccaactttccaatgacaaatgacaggtaatttaaaaagacagagctgttatgagctaaaaaaatcttaattttgaagatgacatttaactcaaatagtgaagattttaggaactgccaaagaaaaatattattgatagaaaattataata

SEQ ID NO: 87343 - DNA, 709 bp, Homo sapiens
cgctgcaggtgtccgatgggcagcaccaggccatcacggtgctggaggtgcaggccttggagccttacctctgtgtggccaatggctccggcctcatggttcctcaaggaggccagggtaccatcaacatggccgagctccacctgggcaccaacctcaacatctgcagtagggatgaggcccactaccacgtcacagacagccctcactggggacagttgctccaagccactcagccagccacagccttctctcagcaggacctgctggttggggctgttccctatggccacaatggcagcctcagctccygcaacaccctggccttctcaatggatgtgggaccagtgcacacagatgccaccctacaagtgaccattgccctagagggcccagtagccccactgaagctggcccagcacaagaagatctacatcttccagggagaggcagctgagatcagaagggaccagctggaggtgaggagctggaggtggtgagcggggtgtggaccaggtagagggccttcctcccagcctccatgccgggaacacatgtgacttgggctgtacctgtggtggtcccagcttgcgtgtgtgcacgtgcctcagatatgctcccatatatgttgtgttcccaagagtttctggggagcttgctgtacacccatcctcctgggagtggtgtgtgcctctagagctggtgccca

SEQ ID NO: 87344 - DNA, 658 bp, Homo sapiens
tttttctatttttagttgtgatggggtttcactgtgttggccaggatggtctcgaactcctggcctcaagttatccaccygtctcaggctcccaaagtgctgggattaccagcatgaggcactgtgcccagccctaagcataattctttacttgaattaaaagatttattttaacctgtttaagaatgaaaaagtaaagagcatgattacaaattctgtatcatacaaaggaggcgttatttaaagatgtgacttcccccacctcctacccctaacaggctcaggcctgcctatttttgtaaataaagttttattggaacacagccgcacccattcctttatgtctatggctgctttcatgctacaaaaggagagtagttgacacagattcacaaagcctaaaacttttactatctgaccctttacagggaaagttggtcaactgctgatctaaaggctgtgatgcaagaaaatctttttcaaggcttcagtagaatccaagttttaaaacccttttttctatatagtgaagatagtctcttaaaaaggttttaaaagaatgtatgacatgaggttccaaaataaaaggtcacagaaaagtctctctttaacctctgtcctcaactactttgttcccttccctggacgtcatgttacc

SEQ ID NO: 87345 - DNA, 658 bp, Homo sapiens
tttttctatttttagttgtgatggggtttcactgtgttggccaggatggtctcgaactcctggcctcaagttatccacctrtctcaggctcccaaagtgctgggattaccagcatgaggcactgtgcccagccctaagcataattctttacttgaattaaaagatttattttaacctgtttaagaatgaaaaagtaaagagcatgattacaaattctgtatcatacaaaggaggcgttatttaaagatgtgacttcccccacctcctacccctaacaggctcaggcctgcctatttttgtaaataaagttttattggaacacagccgcacccattcctttatgtctatggctgctttcatgctacaaaaggagagtagttgacacagattcacaaagcctaaaacttttactatctgaccctttacagggaaagttggtcaactgctgatctaaaggctgtgatgcaagaaaatctttttcaaggcttcagtagaatccaagttttaaaacccttttttctatatagtgaagatagtctcttaaaaaggttttaaaagaatgtatgacatgaggttccaaaataaaaggtcacagaaaagtctctctttaacctctgtcctcaactactttgttcccttccctggacgtcatgttacc

SEQ ID NO: 87346 - DNA, 658 bp, Homo sapiens
tttttctatttttagttgtgatggggtttcactgtgttggccaggatggtctcgaactcctggcctcaagttatccacctgyctcaggctcccaaagtgctgggattaccagcatgaggcactgtgcccagccctaagcataattctttacttgaattaaaagatttattttaacctgtttaagaatgaaaaagtaaagagcatgattacaaattctgtatcatacaaaggaggcgttatttaaagatgtgacttcccccacctcctacccctaacaggctcaggcctgcctatttttgtaaataaagttttattggaacacagccgcacccattcctttatgtctatggctgctttcatgctacaaaaggagagtagttgacacagattcacaaagcctaaaacttttactatctgaccctttacagggaaagttggtcaactgctgatctaaaggctgtgatgcaagaaaatctttttcaaggcttcagtagaatccaagttttaaaacccttttttctatatagtgaagatagtctcttaaaaaggttttaaaagaatgtatgacatgaggttccaaaataaaaggtcacagaaaagtctctctttaacctctgtcctcaactactttgttcccttccctggacgtcatgttacc

SEQ ID NO: 87347 - DNA, 792 bp, Homo sapiens
tttggacctatgatttttttttttatttgacggagtctcgctctgtcacccaggctggagtgcagtggcacgatctaggctcactgaaaactcctcctcctgggttcacgacattctcccgcccccgcctcagcctcccgagtagctgggactacaggggaccacaaccacacccggctaatttttttttgtatttttagtagagacagggtttcaccatgttagctaggatggtctctatctcctgaccttgtgatccacccgccttggcctcccaaagtgctgggattacaggcatgagccaccacgcccagcccggacttatgatatttttgacttgcaataggtttatcaggacataacctaactgtaagytgagaagcttctgtaatggtatttgcctcattgagattattgaggcaattaaaaaaggcagtgcatgaacagggacttgcacatagtagataattaaaaaaatagttattctaaattgctctatcacagtaaatacacatagtgacaatgactttcacaaagactgaaatctataatttatttaatctgacttcccattcaagagaaattcagctgatcaaataggaatgtcaatgaataacagtttgtgtacataatcatgcacagggagaaaggcatgaaacacacaggggcaagcagcaaaactccagctgttattgtattggaacagggaattagaacatggattgtctaggtgaagctataatttctccctgtcaaattgccacttagttagagtttttaaactaggatccc

SEQ ID NO: 87348 - DNA, 705 bp, Homo sapiens
aatcattttgtaatgtatacatatatcaaaacattacatagtacaccttaaatgtttgcaattattatttgtcagttatacctgaataaagctggaaacaaaacaaacaaaatgaaagcaataataattgaaaaccaaggaaattaaattcagcgttggacagacatgaggcaggagtggggtgtcagcagggttggacaggaagcataagcaaatgacaacatatgcctgcagccatagagtttggggaaatgatagcaatccagcttttcaaatgggagcagtgggagaatacaaagattgggtttcactttaaaggagatctgtgtctaggtaaagaatatgggctctatatttttctatttctttctggaagttctctaggctttctgggtgagggattcatgagtgtgcggagaggtgagctgagcagggatgcacatgtttgtgagtgaggcctggcactgcgaggatggagttcacgtgaaagtaacaggactcggyaacttcttggatgtgtggggtgaagaagagcagggagatggggagggcttagtgttttttgagcctgggtgactgggaagatgatggggatatttgccccagggtgtgtgtgtgtatatttaggttaaacaatttcatattctactgtgttcctcaaataatataattccaagacatgtactcagctaaccacatttctct

SEQ ID NO: 87349 - DNA, 1093 bp, Homo sapiens
tgcatccgattatccattgttcattcatgtgatacattgagtgtctgctatgggatagggagccgtgctaggtgctaagggcctagatataaaaactgcagtttctgctcttttaagagactggtgatattgtgggatagctgtataaaaagtaacactggcagcagaactatgattagggctaaggcagcacaaaagctgggtgctatggtagcagaagctagaagctctagtgagttatttagttctaggcctacatgttttcagtagaatttgagaagactaatgttccctttgtgactccttgattgaatgtggagctcaccctatatctgaaagcttctcagccatagactttctgtacatgggtctttactgtgccctgtccaactgcctggaggagttaccctcttgggaacatcttttgttcagttccctatatatttgaggcattcgtctctgttctttctctaaagccmaacactcctttgtcacagtttcatgggactttaattagtttctcaatgcagaatcgtaatttcagtttctaccatcagtcagctcctgatattgtagtcattatttaaactggtacttgcgactctacctcttgttttcattcttcacactcttggttcacttctgtctgctcattaaagtcaaaaaaagtttgccaactatacataaaattagagccctcttctaaatcaatgacatgtctatataaaaagttctactgtgttttaaaaacacaatgatttcagctatatgttaagatactataaaagtcataacctgccttggaatttactgtggggcaatgccataatattacaacattactttcagagacagaacttttaagaacaaattttgagcttgtaatcactttactttgaaagcattctgaagttaaaaaaagatcatttttataaactgtccttccctgctttgaatttgactgttgcaatccccgcaaaaactaggtatctcttggatagcgttagtcatcactttctcattatcaagcatcctggaatattgttccatactgattttctttctctacatcttatttcaaaatttattcttt

SEQ ID NO: 87350 - DNA, 1093 bp, Homo sapiens
tgcatccgattatccattgttcattcatgtgatacattgagtgtctgctatgggatagggagccgtgctaggtgctaagggcctagatataaaaactgcagtttctgctcttttaagagactggtgatattgtgggatagctgtataaaaagtaacactggcagcagaactatgattagggctaaggcagcacaaaagctgggtgctatggtagcagaagctagaagctctagtgagttatttagttctaggcctacatgttttcagtagaatttgagaagactaatgttccctttgtgactccttgattgaatgtggagctcaccctatatctgaaagcttctcagccatagactttctgtacatgggtctttactgtgccctgtccaactgcctggaggagttaccctcttgggaacatcttttgttcagttccctatatatttgaggcattcgtctctgttctttctctaaagccaaacactcctttgtcacagtttcatggractttaattagtttctcaatgcagaatcgtaatttcagtttctaccatcagtcagctcctgatattgtagtcattatttaaactggtacttgcgactctacctcttgttttcattcttcacactcttggttcacttctgtctgctcattaaagtcaaaaaaagtttgccaactatacataaaattagagccctcttctaaatcaatgacatgtctatataaaaagttctactgtgttttaaaaacacaatgatttcagctatatgttaagatactataaaagtcataacctgccttggaatttactgtggggcaatgccataatattacaacattactttcagagacagaacttttaagaacaaattttgagcttgtaatcactttactttgaaagcattctgaagttaaaaaaagatcatttttataaactgtccttccctgctttgaatttgactgttgcaatccccgcaaaaactaggtatctcttggatagcgttagtcatcactttctcattatcaagcatcctggaatattgttccatactgattttctttctctacatcttatttcaaaatttattcttt

SEQ ID NO: 87351 - DNA, 1093 bp, Homo sapiens
tgcatccgattatccattgttcattcatgtgatacattgagtgtctgctatgggatagggagccgtgctaggtgctaagggcctagatataaaaactgcagtttctgctcttttaagagactggtgatattgtgggatagctgtataaaaagtaacactggcagcagaactatgattagggctaaggcagcacaaaagctgggtgctatggtagcagaagctagaagctctagtgagttatttagttctaggcctacatgttttcagtagaatttgagaagactaatgttccctttgtgactccttgattgaatgtggagctcaccctatatctgaaagcttctcagccatagactttctgtacatgggtctttactgtgccctgtccaactgcctggaggagttaccctcttgggaacatcttttgttcagttccctatatatttgaggcattcgtctctgttctttctctaaagccaaacactcctttgtcacagtttcatgggactttaattagtttctcaatgcagaatcgtaatttcagtttctaccatcagtcagctcctgatattgtagtcattatttaaactggtacttgcgactctacctcttgttttcattcttcacactcttggttcacttctktctgctcattaaagtcaaaaaaagtttgccaactatacataaaattagagccctcttctaaatcaatgacatgtctatataaaaagttctactgtgttttaaaaacacaatgatttcagctatatgttaagatactataaaagtcataacctgccttggaatttactgtggggcaatgccataatattacaacattactttcagagacagaacttttaagaacaaattttgagcttgtaatcactttactttgaaagcattctgaagttaaaaaaagatcatttttataaactgtccttccctgctttgaatttgactgttgcaatccccgcaaaaactaggtatctcttggatagcgttagtcatcactttctcattatcaagcatcctggaatattgttccatactgattttctttctctacatcttatttcaaaatttattcttt

SEQ ID NO: 87352 - DNA, 1264 bp, Homo sapiens
gtctttttttttatatatatacagcagctctattcgagctccatcctctggatattgtcccattttattccattaaatagcaataccaaagaaaatccctcttccactagaagaaagggagtcagttaaagattgttaagaatttctactcttttgaaaagcactttcaaggaagttgaataagaagtgacaaaataagaccattataataaaagaaaaactgataacagagagcttagaaaagtggtaagagccgaaaaggagttactctattgagctgtgcaacagaaatattttgcttcactctctataatatttgcagaacctcccctaaaccacagcaatttcaatcccccatttgagaaagctacaaggccagagcatttacattcttctattaaaatgatcatcatgactgtatagtctcagatgattctagacaaacctgtctccatttccatagaggagctattttgtttctgctttaatttcatattgctttaattttatactttatggcttaaagctcttcggctaatagattatttcaactgcatatgttcattttacacttaaatatatactgggattcacagagcttatgcctttggagataatttttatattacctaaaaatcattccatgttgtgataatgatcgtaattatcactcatcacctaataatatagagttcttctgcagttactctcatcttgaaattctgagtcccttctaacagccactgaagtctgtcacagcacwgttattaacactcagtgaattttttgcaagtattccccagaacaattccaacctaacactgatttggtgatagagagctcatgtagttcatatgctaattaaggagaagcccaaaaatcccatagagaatggagagagggagacaaactatcagggtatagacacttctactctcacataatgaactccgaaaatacaaacttggaaaataaatatataaatctcaagaagaagaatatttaaaagattcagctctgaggcatgctgtggtaaagactgctattctgtgctagaactacagaagcaatgcctgagaggagaagcaaatgagagtaaaaaaaaaaaaaaaaacagagagagagagagaaagaaccagaacccgcatttgtgtatgtgtctgcctccgtactgtgaataacttcgaattcattcttcatgcaaaaatcaagaaggaaagaaataagctatggtgtttgaacacctactgaatgccagtaatgc

SEQ ID NO: 87353 - DNA, 538 bp, Homo sapiens
tgtagagagagttgaacagatttgtgaagctactcagcacagccaaagttgaatagcttccagattgttaatattccacaacagcattcctattgtaataggctacttttattcagtctctttgcccaaatcttttcctcttgtagaataaaaacttactatttctaagggctcccaatgtgcctggaacaatgccaacgctttatgttgaaattaactygtagggccctcaaaatggcctcatgactggggacttagtgaccagtgagaatactgaagtttagaagtttaagtaatttgctcacgattagaggtttgcaaatgtctgagccaggatttgaacctagataatgtgacttcagagcctgcacatttttccaatgtgtcattcagcctgccctgtatatgctgtgcatgaaaggtagtcatctgtgtatgtgcttgcttcctctgctagactgaaaacgtgttaaggaaatagattataatattcccagcttgtctcttttatggtccctaggaataataaaaacacttt

SEQ ID NO: 87354 - DNA, 538 bp, Homo sapiens
tgtagagagagttgaacagatttgtgaagctactcagcacagccaaagttgaatagcttccagattgttaatattccacaacagcattcctattgtaataggctacttttattcagtctctttgcccaaatcttttcctcttgtagaataaaaacttactatttctaagggctcccaatgtgcctggaacaatgccaacgctttatgttgaaattaacttgtagggccctcaaaatggcctcatgactggggacttagtgaccagtgagaatactgaagtttagaagtttaagtaatttgctcacgattagaggtttgcaaatgtctgagccaggatttgaacctagataatgtgacttcagagcctgcacatttttccaatgtgtcattcagcctgccctgtatatgctgtgcatgaaaggtagtcatctgtgtatgtgcttgcttcctctgctagactgaaaaygtgttaaggaaatagattataatattcccagcttgtctcttttatggtccctaggaataataaaaacacttt

SEQ ID NO: 87355 - DNA, 1050 bp, Homo sapiens
atatatatatatatatatatatatatatgtcacttagcattttataaattactttcatatattttctttttagacttcaccatcaattcatacagcagatatcatcatacacagtccaggtatgaagatctgggctcagagagactaagtaagtgaattgcctgaagacacattgttggtgagtaacaaaatatggggacctggagcaatactaatttcacaaccctatttactatcttctggaaagtaagaaaaaaaatggtatggctttggaaaaaattgatgaagttcccaggtgtcagattaaagcacaatattggagaaggggaaactgttcatcacccagtgaagtgggtttggggattagatctttctctgttagttatagcacattattcagggcagatacatgtgccagaccatgttgatcagataaagcagatgaccattaaagttgcctatcacagtatgaaatatgactgtatgttctgctattcctatttaatggagaaatgtgagaaagctgttccttgttggaaataaactcacaaaataaacaaataacattgtatctattaacactagcaaatgagaacagaaaatagatgactgaaaatcatactttttaacataacatatgaataatgcaaattccttgggggtaaaaaaaattagcaatctgttcatattggttgccagaaatttcttgaattttaaatacgaatacttctattgtgactatgaaggctgacagagctgtatgtctgaaatttaatccaaccagtgaggttaggatataagagcagatattctggactcaaagtgggtactcatcaatacaaataccatactgaggtgtawtaaatatctccttgccaacttttttctatgatgtcactgtgagctttatgcaagaatatttgttactttatattttaaaaacctttaaaataaatgatacatggaataaaagattagcagtagtagataaatcatcaccatttgatcatttatatttggtgatgatagagtgatagacttaatgtcatt

SEQ ID NO: 87356 - DNA, 778 bp, Homo sapiens
tgcctgaggaagactgttacagccaggacacctgtctagaacagctgcttagaaggaagaggttggagtagtggactggggtgctgtgtgaggttacaataagaaaaatgtttgtttgtttgtgatactcactggccaaccagagcaggccttttcagtgttgttctgagttgttttttatttcatttttaaagcttaaaatcctgtaagggactgcctaaccttcctgattcatatgtacatgaataagtaagcycttgttaacatgtgtgatacatagtatttgacagtgtttccaggaatttaggacactactcagaagcttattagatatgctatacttcatgaaaacacccaaattatttatcatcaactctcatgtaactggagaggaatattaccgaaagaaattagattttccagggtaagctgaaattaatttatttgattttgaaatatctttctttttatttccttttcttcctttctttcctttccttttattttaattatcctttgagcaaatatttttcctataaaaaatgactctaaacagtaacctttggctacctcttctcagtaccagatgacttacgcacagtaaatatattcagccaatgatgtgaccaattatttttttgaaatgtgatttttagaagggaaggcgttctccagactgactgatggagatggactacccctggtccaaaataagccactggcatcttctgccagcccatggtgcaactacctgttttctttctttcttttgtagagc

SEQ ID NO: 87357 - DNA, 778 bp, Homo sapiens
tgcctgaggaagactgttacagccaggacacctgtctagaacagctgcttagaaggaagaggttggagtagtggactggggtgctgtgtgaggttacaataagaaaaatgtttgtttgtttgtgatactcactggccaaccagagcaggccttttcagtgttgttctgagttgttttttatttcatttttaaagcttaaaatcctgtaagggactgcctaaccttcctgattcatatgtacatgaataagtaagctcttgttaacatgtgtgatacatagtatttgacagtgtttccaggaatttaggacactactcagaagcttattagatatgctatacttcatgaaaacacccaaattatttatcatcaactctcatgtaactggagaggaatattaccgaaagaaattagattttccagggtaagctgaaattaatttatttgattttgaaatatctttctttttatttccttttcttcctttctttcctttccttttmttttaattatcctttgagcaaatatttttcctataaaaaatgactctaaacagtaacctttggctacctcttctcagtaccagatgacttacgcacagtaaatatattcagccaatgatgtgaccaattatttttttgaaatgtgatttttagaagggaaggcgttctccagactgactgatggagatggactacccctggtccaaaataagccactggcatcttctgccagcccatggtgcaactacctgttttctttctttcttttgtagagc

SEQ ID NO: 87358 - DNA, 778 bp, Homo sapiens
tgcctgaggaagactgttacagccaggacacctgtctagaacagctgcttagaaggaagaggttggagtagtggactggggtgctgtgtgaggttacaataagaaaaatgtttgtttgtttgtgatactcactggccaaccagagcaggccttttcagtgttgttctgagttgttttttatttcatttttaaagcttaaaatcctgtaagggactgcctaaccttcctgattcatatgtacatgaataagtaagctcttgttaacatgtgtgatacatagtatttgacagtgtttccaggaatttaggacactactcagaagcttattagatatgctatacttcatgaaaacacccaaattatttatcatcaactctcatgtaactggagaggaatattaccgaaagaaattagattttccagggtaagctgaaattaatttatttgattttgaaatatctttctttttatttccttttcttcctttctttcctttccttttattttaattatcctttgagcaaatatttttyctataaaaaatgactctaaacagtaacctttggctacctcttctcagtaccagatgacttacgcacagtaaatatattcagccaatgatgtgaccaattatttttttgaaatgtgatttttagaagggaaggcgttctccagactgactgatggagatggactacccctggtccaaaataagccactggcatcttctgccagcccatggtgcaactacctgttttctttctttcttttgtagagc

SEQ ID NO: 87359 - DNA, 369 bp, Homo sapiens
gatttccaccctttccaactcaattcaagagcaccatgctttaagagatccttcctggaatccccactgtgaagaatcaggctatttctaaccaattactgagcagggaaaaattacaagggctagaatttaggccaaagcaagactctttcaaaggacaatctttgctcaggagctctctattggacaagacactgatagctccacattttgttctcagsctccccctgtcagtttctgctttttctgcctattaccttccacaggtgttagcttccagtaaagctcacacctgcctaatattgcctcactgtctgcttcccagaggacacacctgacacatcctctgagaagtcaatgcttctctgt

SEQ ID NO: 87360 - DNA, 571 bp, Homo sapiens
gatttttcagtgcgggcgttcccccagctctctgcagcacctgtttgcaccttaatctcacagcactagcacataggagggcagggaatccaaccctcatgagctcyaaggatctgatggaaaccgtggaggatcccgcgagaagtaaatgagccttaaagcaggacagaactgattgcctgttaagtgctaaactgtgtgcttcatacacatatttaatcttcacaactgttctgcaaggatggaaatgaggttagtcatgataatcattttagaagaaaactgaggttaactaaaaggcccaaggtcatgtagcgaatgagtggaggaagtcaggattcacagcctgaccttgctgactccaaagcccatgaattttccaggtttcaatgctgcttcctatttctctccactttgtttcggagtcccaggccacaccatactctaccccggcatccccgtacccaactctgctgtgtgtctgtgtagtttctccttgcctagagctatgtttgtggccaaaactatccttgctagaactctggctcctgttcctttgctgatacccacg

SEQ ID NO: 87361 - DNA, 571 bp, Homo sapiens
gatttttcagtgcgggcgttcccccagctctctgcagcacctgtttgcaccttaatctcacagcactagcacataggagggcagggaatccaaccctcatgagctctaaggatctgatggaaaccgtggaggatcccgcgagaagtaaatgagccttaaagcaggacagaactgattgcctgttaagtgctaaacygtgtgcttcatacacatatttaatcttcacaactgttctgcaaggatggaaatgaggttagtcatgataatcattttagaagaaaactgaggttaactaaaaggcccaaggtcatgtagcgaatgagtggaggaagtcaggattcacagcctgaccttgctgactccaaagcccatgaattttccaggtttcaatgctgcttcctatttctctccactttgtttcggagtcccaggccacaccatactctaccccggcatccccgtacccaactctgctgtgtgtctgtgtagtttctccttgcctagagctatgtttgtggccaaaactatccttgctagaactctggctcctgttcctttgctgatacccacg

SEQ ID NO: 87362 - DNA, 821 bp, Homo sapiens
tttgaagttcagtaatgtaatgcttccagctttgttctttttgcttaggattgctttggctagctgggctcttttttggttccatatgaattttaaaatagcttctgctaactctgtgaaaaatgacattggtagtttgataggaatagcattgaatttgtaaattgctttgggcagtatggccattttaacgatattgatccttccaatccatgagcatggcatgctttttcatttggcaaacattttttacatcaaacgatgtgtgatatagatgtttacatatgagcaaataaaacccaccctaaaatgcaaaggtcattttctctgctatctcttgagaaaaaaaaagaaaaagatattgaatagcaactgttggtattaggcaaccagtatcatgtttcagggaaaccaactgacttaaacaagtagataagattttcaaagatgaatcaatcagaaacctgcctacagcacagattagcaattagtgtattcagactcatctacyttttttttttttttttttttttttttttttttttgagacagggtctcactctgttgcccaggctggagtgtactggcatgatcatggctcactgcaaccttgacctcccaggctcaagtgatcttcctgccttagccttctgagaccagagtgcccgacggtctaaaatgagcttgcagtataacttagggttcatgtcttaactcaagtaaatttcagaaaggggtcaaacccttgtttaaagataaatgtaagctggatgtggaggcacatgtctgtagtcccagctactcaggaggctgaggcagga

SEQ ID NO: 87363 - DNA, 536 bp, Homo sapiens
taccactgtgtctgcattctagtcagtacaaatggagaaggggacggtatgccctttgcctgttagaggatcacttagaagtggcatactttccttctcacgtcccattggccagacttagcagccacaccctgctgtagaggakcctgggaaatgtagtctttgttctggatggcctccaatctagctaaaaaattgggattctgcttctacagagggagagaacaaatatggaggaagagcccctgtaatacagaggaaacatgtcaaactaatcacataaatcaacctaaaattgtaagtctataaagagaaaaagagtatgtagggggaatttgatgtagagagggaaatcaaggaagccctctctgagaaagaatttacagaagagtaaagccagagggcatgaggacagtgtggtgttagaagaatcccaaaatatcattaaaaatacagtttattgcgtaactttgaggtatctaaactgacggcagttcataaacatttttgctcatgtcaagataatattgcatggt

SEQ ID NO: 87364 - DNA, 1096 bp, Homo sapiens
tttccaagtggagaaagcaaattacaccagatggggaaagttgtgagtgagtagattttagggtcatcgctaaacacacattattaaaccttgcatctaaattagtgtttcagacactgagctttcccctgactgttcctactagggtaaatcttgaagccactttccagaactcatttgtcatttattttagcaggagcagatgatgttcctgagacatttaaattaataatgtgagcaggccagtgtcaaaggacatgggaaagtcttcccaaacagaacctcaacacagagagtcataatgaaaattcagcgtgttaattcctagtttcccacttctaaaaggtgctgatgtcgagtttggctacaaggaggcatatcaggcaaaattacattcctgtgacccttataagaattagcagtgatttggagaggctggggtggagaayaaatcctctgatgtaaccacaatcataaaccaactcaaactcaagggagggctgcttctcttagttgtttttgaataggctattagagaggaaaaaaatgttacacttgttcttcacaaacctttcgggcattagaaaatgagcttcaggagttttcctttatctatttttcgtgaaataaaggcttatgtttccatcttgagacctgaatactgaaaccagaatgcaaattggcaattaactcccatatatttaggaaaatatatggaaattatttcaggtcagtagaaagagcttctggaagagttggtaatgaattcaatctttatccctttggttctccatagttcttccaaatgctggaaaataaaatcagtaggtgggaggaaggctcctcaaagttattgtggggtcattggttttagtaaaagaagcttttactcagctatctcatgaggtaaagtcttctctcactggttgttcttctaacaacaagaatctcctttctttcatgtgcatgccagctttagaactctctcttaagctggcgtagggccagtcttacccactcactactgtgcagttgttggcttctgggaattgcatctggagggctggagcagggcagcctttctgtttatagatgc

SEQ ID NO: 87365 - DNA, 1100 bp, Homo sapiens
gtcctaattagttttcatttaaaaaaaatctttcctgaatgaacatgaatattctgtttacttcctgactttctgttttttgtttttgttgttgttgttttgagatggagtcttgctctgttgcccargctggagtgcagtggcgcgatctcagctcactgcaagctatgcctcccaggttcacgccattctcctgcctcagcctcccaagtagctgagactacagtcgcctgccaccacgcccggctaatttttttgtatttttagtaaagacggggtttcaccgtgttagccaggatggtctcgatctcctgacctcgtgatccgcccgccttggcctcccaaagtgctgggattacaggtgtgagccaccgcgcccggctgaccttctgttttagtaatattttcttttatcctaaacgttaaggtttgcttaacttttttttttttttgaagttttgctgtgttgcccaggctggagtgcagtggtgccatctcagctcaatgcaacttgcacctcccgggttcaagtgattctcctgccttagcctcccaagtagctgggattacagacgcgcaccaccacaccagtctaatttttgtattttatagtagagacggggtttcgccatgttggtcaggctggtcttgaactcccagcctcaagtgatccacccgcctcggcctcccaaagttacaggtgtgggccactgtgtccgggctggcttgcttaacttttaaacctgtgtccaaatgactaaagtaccagatttgtcccaaaccaccgattcactatcaccctcttgtgattctaggtagccttcaaagacatgagagaggagctgtagtctctaggatctactataaaagcacagagcttttattccagcaaaactaactgactgagacaatgctaacaagatcaattttaatcattgtttagataatgcctgcctttaatgttaacactcatttaaagaatacaaataaataaacaaaatttaaggaagactcagctaaatttggggctctagattctaggtttctcttaaagaaaccaatttacagaatttaatttgcagaattaagattaaaattgt

SEQ ID NO: 87366 - DNA, 1705 bp, Homo sapiens
tgagtcctgctcaattcctggctgcttgcttctgctcctccagctccgtattagccagtcacaagttaccaagcacattcaaatacttgtaaacctcctttgaggcagagtatagttctcattttatacagattaaaaattagtgctgagaggttaattaattgcctggyacggcacaggtaagcagggagccaggtctgccgcctaggtctcatgtttttctccctatatccagcttccaggttctctctgggtctggctcatcttatgcctggtcttgggtactgccctcagtcttaccttgtcttttctcatcttgcattctcatctcagcttcctgcccaaccgttatacattgcataactttcttcccaatatgtttgctctacaacaaatggtattatttttcgagtgaggcattttttgagttatagttctaagaaggaagtgaaggcatgtagaagtagacaagaggagtcatgaaagagaaagctctctcaccagaactattagcattgctctttatcttcaggaagagaaagaaaaggtttaaaaatggaggtccagaaacaatggctactgttcagggggacactacaataacaaaaagagagagaaactcagtgtcagatctttaaatgaaagaattgatatgaaggacatttgctttggcacatctagaaaaatatgagaaaataatatattgtaatttatttgcaatatatttaagctgcttatgtggatggcttattaattaggccaggaattcagccaagtcccattgatttatacaaccaaaattctttgtttagcttatgatggatgatacataaatgctgatgattaatctcttgtaagttttccctttttttaattcccagaacactacagtttgcctcaagtgagttgatgctcttcatagcctaattgtcatatttaatttgttaagtcagagataccttctctctaatcaatgattacacacacacacacacacacacacacacacagagccttgtaatgagcttctacacctgaggatttaccaaccaccaaaaatgacttaaatctgggcttttacttccgatgtctccaggtcagagtcttaagactctgtgtgtgtgtgtgtgtgtgtgtgtgtgtgtgtgtgtcgtgtgtgtctgtgtatgtaaagccatgtatgaaacccaaagttgttattagatcaaaccatggagtttgggatggtggtttctagagttaatggatcaaaaatagttaagttcaaacattcatcaggtttgaaataaactgtaatgctcttctaatacagtaaaaggatcctagcaaaaattctacattagaaggtaagaattataactctccaagtgcatgttgttatatagtttaagaagtacaatccatggtgtggaatgagttactaaactagaagattgagcttctgacaccaattttgccaaagttactaatactgtgacctttggcaaggacgtcatctcgctgagcctgattttcacatctatgagtgggaaggatacaacctgttcagaggactgtggtgatgaaaaactgtgacaagggaggtagcataagaggcagaatgactagcacatggttccttcttctttcccagttctatttaagacctaaacaggatcagtgaaacccaccaagatgttggaacataagtagagtctggaaaaaa

SEQ ID NO: 87367 - DNA, 565 bp, Homo sapiens
cttgtccctccgcagagggacgcatcagtgcagtgaggcccagtcacacagtagatgctagtcagccatgggcaggcatgaaactcgaatacctgttaccacaccggtgaacctcaagaacactacgttaagtgaaaaaaccagacacaaagggacaaactcctcgaaaacaccacgttaagtgaaaaaaccagacacaaagggacagactcctcgacaacaccacrttaagtgaaaaaaccagacacaaagggacaaactcctcgaaaacaccacgttaagtgaaaaaaccagacacaaagggacagactcctcgacaacaccacgttaagtgaaaaaaccagacacaaagggacagactcctcgacaacaccacgttaagtgaaaaaaccagacacaaagggacagactcctcgacaacactacgctaagtgaaaaaaccagacacaaagggacagactcctcgacaacactacattaagtgaaaaaaccagacacaaagggacatgactcctcgacaacactacgctaagtgaaaaaaccagacacaaagggacatgactcc

SEQ ID NO: 87368 - DNA, 565 bp, Homo sapiens
cttgtccctccgcagagggacgcatcagtgcagtgaggcccagtcacacagtagatgctagtcagccatgggcaggcatgaaactcgaatacctgttaccacaccggtgaacctcaagaacactacgttaagtgaaaaaaccagacacaaagggacaaactcctcgaaaacaccacgttaagtgaaaaaaccagacacaaagggacagactcctcgacaacaccacgttaagtgaaaaaaccagacacaaagggacaractcctcgaaaacaccacgttaagtgaaaaaaccagacacaaagggacagactcctcgacaacaccacgttaagtgaaaaaaccagacacaaagggacagactcctcgacaacaccacgttaagtgaaaaaaccagacacaaagggacagactcctcgacaacactacgctaagtgaaaaaaccagacacaaagggacagactcctcgacaacactacattaagtgaaaaaaccagacacaaagggacatgactcctcgacaacactacgctaagtgaaaaaaccagacacaaagggacatgactcc

SEQ ID NO: 87369 - DNA, 565 bp, Homo sapiens
cttgtccctccgcagagggacgcatcagtgcagtgaggcccagtcacacagtagatgctagtcagccatgggcaggcatgaaactcgaatacctgttaccacaccggtgaacctcaagaacactacgttaagtgaaaaaaccagacacaaagggacaaactcctcgaaaacaccacgttaagtgaaaaaaccagacacaaagggacagactcctcgacaacaccacgttaagtgaaaaaaccagacacaaagggacaaactcctcgaraacaccacgttaagtgaaaaaaccagacacaaagggacagactcctcgacaacaccacgttaagtgaaaaaaccagacacaaagggacagactcctcgacaacaccacgttaagtgaaaaaaccagacacaaagggacagactcctcgacaacactacgctaagtgaaaaaaccagacacaaagggacagactcctcgacaacactacattaagtgaaaaaaccagacacaaagggacatgactcctcgacaacactacgctaagtgaaaaaaccagacacaaagggacatgactcc

SEQ ID NO: 87370 - DNA, 565 bp, Homo sapiens
cttgtccctccgcagagggacgcatcagtgcagtgaggcccagtcacacagtagatgctagtcagccatgggcaggcatgaaactcgaatacctgttaccacaccggtgaacctcaagaacactacgttaagtgaaaaaaccagacacaaagggacaaactcctcgaaaacaccacgttaagtgaaaaaaccagacacaaagggacagactcctcgacaacaccacgttaagtgaaaaaaccagacacaaagggacaaactcctcgaaaacaccacgttaagtgaaaaaaccagacacaaagggacagactcctcgacaacaccacgttaagtgaaaaaaccagacacaaagggacagactcctcgacaacacyacgttaagtgaaaaaaccagacacaaagggacagactcctcgacaacactacgctaagtgaaaaaaccagacacaaagggacagactcctcgacaacactacattaagtgaaaaaaccagacacaaagggacatgactcctcgacaacactacgctaagtgaaaaaaccagacacaaagggacatgactcc

SEQ ID NO: 87371 - DNA, 565 bp, Homo sapiens
cttgtccctccgcagagggacgcatcagtgcagtgaggcccagtcacacagtagatgctagtcagccatgggcaggcatgaaactcgaatacctgttaccacaccggtgaacctcaagaacactacgttaagtgaaaaaaccagacacaaagggacaaactcctcgaaaacaccacgttaagtgaaaaaaccagacacaaagggacagactcctcgacaacaccacgttaagtgaaaaaaccagacacaaagggacaaactcctcgaaaacaccacgttaagtgaaaaaaccagacacaaagggacagactcctcgacaacaccacgttaagtgaaaaaaccagacacaaagggacagactcctcgacaacaccacrttaagtgaaaaaaccagacacaaagggacagactcctcgacaacactacgctaagtgaaaaaaccagacacaaagggacagactcctcgacaacactacattaagtgaaaaaaccagacacaaagggacatgactcctcgacaacactacgctaagtgaaaaaaccagacacaaagggacatgactcc

SEQ ID NO: 87372 - DNA, 519 bp, Homo sapiens
gcaggcagtacggcgacatgggaggggtggaaaaatagtccatggggagacaaggaagagcagcaagggacatagggggacaacattcagggtgccagccgtgaccaacagccacctgttggaagcaccctcacgctcacgcgctgtgctgggcacctcatatcytcccagccccctaataagtgaatactattgtccccactttgtggatgaggaaactgattcagaaaggtaaattacatgacctgggtaattgtgtaattaataagatgatacgatcaatatggggccaggcacagtggctcacacctgtaactccagcactttgggagaccgaggcaggtagatcatctgagatcaggagttcgagaccagcttggccaacatggtgataccccatccctactaaaaatacaaaattagcaggtgtggtggtgcactcctgtaatcccagctactccggaggctgaggcaggagaatcacttagaacctgggaggcagatgttgcagtgagccga

SEQ ID NO: 87373 - DNA, 600 bp, Homo sapiens
cagaggccccacagtgcaggcacagcctctcgtacatctcccacaacacgtatcgcggtacagggtctgcgtgatctgtctgtctacaccagactgggattcaccagggaggaaccatgtcttattagatgagtggatggatggagggagggatggaaagatgcatggatgggtgaatgaatgggtggataggtggctgctggacagaaagaaggaaggatgaataagtggatggaggagtgaggggatagacagaaagattcayggaggccgagcacggtggctcatgtatgtaatcctggcactttgggaggccaaggcaggtggatcacctgaggtcacgagttaaagaccagtctagccaacatggtgaaaccctgtctctactaaaaatacaaaaattagctggacatggtgatgcatgcctgtagtcctaactactcaggaggctgagacaggagaatcacttgaacccaggaggcagaggttgcagtgagccaagatcatgacactgcgctccagcctgggtggcaaagtgtgactctgtcccaaaaaaaaagattcatggatgatgagtgagtgcgtggatgacagatggaa

SEQ ID NO: 87374 - DNA, 1873 bp, Homo sapiens
caaacacagagcttccatatcttctccccatggagtcaggatgtatcaccctcctagcacactggtgttcacccaccaggaggctcaattgagccttgaggtccagagtttttattggtgtttcatcacgaggcatgattgatcaaataattggccatgtgattgaactcaatctctaacctccctggaagtcaggctgatataatctggctcaaaaccccaaccctctaatcatttggttggttcctaatggctagtccccatcttgaaactatctaggggcccaccatgagtcaccttgttagtataaactcaggcatggtcccagtggctcactatgaataacaaagacattcctatcacttgggaaattccaagggtttagaagctacctctcagaaacccaagacaactggagaaattattatgcaacaaatgccagcctatcttcaccacagtgtgccccatgaccccttttctatgctcttggcttaggtcaggcagagcagcttgcggctctccatgtggacctggagatttttcacctcgcttcctttgcttgcactgatccctttgtctggaattgcctccatgagggtacccatccttcgtgtagatataactgtcctcattttagatgagaaagttgaggactagaagatgaagtcacttttcaaagacaattggatctatatgataaaaccaggccataaatccaggcctatctgaagccccaacctgtgtgatcccacttccccgtgggcagtaggattggctgatattattgaaatcccttaaagatcattctgtaattattctcccatgaaaaaatggcttaaagggggcaaaacttgccatcactaacaatgccaccttggggaagctaaactcccaaattaacagataccctcaactgcaagtaatagaaaggcccacaaaaagacccttagaccaggagctggcaaactttttctgcaaagggccaagggccagagagtaaatatttgaggctttgcaggccataaggtctctgtcgtgactatgcatccctgccattgtagcactaaacaatatgtagacaatacataaacaaatgggcatggctgtattccaataaaactttatttacaaaatcaagcagtgggccagacttggctcctgggtcatagtttgccaacccttgtcttaaaccaggaggacatttattcaccatataacaagaagtctagaaatagggtggatccaggtgagctactcaggcagctcagcagcatcttcagatcctaggttccttcctgttatttgcagatgacaacatccagaaacagaaaagttcatgcctccttggtcagaatagttcacaggctaatccctggctaatgggaaaggagttatccagattgccttagacaaatggtctcatccctggctgcaacattagaatcacctgagagcttttaagaaacacctgggcccagctgggcacagtggctcacacctgtaatcccagcactttgggaggcggaggtgggaggataatgaggtcaggagattgagaccatcctggctaacaaggtgaaactccatctctactaaaaatacagaaaattagccrggcgtggtggtacgcacctgtagtcccagctacttgggaggctgaagcaggagaatctcttgaacctgggaggtggaggttgcagtgagctgagattgtgccactgcactccaccctggcgacagagagagactccgtctcaaaaaaaaaaaaaaaagaaaagaaaagaaaagaaaagaaacacctgggcccctaccagagttttgcatttaatggttatgaggtggggccttgtcattgatattttttaaaaccatt

SEQ ID NO: 87375 - DNA, 766 bp, Homo sapiens
cagttagaaagattattcaatgactactgttaggcaactggctgatccattagaaaaatatagttagattattttctcataccacatatcgtgcagaaataaaaaatttaaacaacacataaaattgctttcaaaatatagacaaatatttataaatttctggtatgcaaaaagccattcagagaatgactcaatttcttcaaatagtaaaatttttattaaaacaagcaaacaaaaagtaatgaagtctatttatttaaaaaacaatagaacaaaacctgctttttatatatgattgaaaaagtaaaaaccatttacaaccagtatttttttagttactaaaaatctagctgtgtggcatcaacatgcaacacacacatgtactttttttcctttagaagagatatggttttgaaatgtatgtgtgtgtatatgtacaactgtctacacacaaatacatacacatacgtatgtatctctaaagtttttagttaccactaaaaggraatgattgtgatataaatagaagaggaatgtttgaaagggtattcgatgggtcacagattccctagaaggatggcacaataaaaggaatcaaggcaggctaagtgatataaaccataacccaaatcctgtttagaaactttttcactgccattactgcctctggagatgttctcactgtgattgctgtaaagaattctcctgtgtcctggcttctttgtgtcacatctgattagacaaacctgtattttggatcctagcc

SEQ ID NO: 87376 - DNA, 766 bp, Homo sapiens
cagttagaaagattattcaatgactactgttaggcaactggctgatccattagaaaaatatagttagattattttctcataccacatatcgtgcagaaataaaaaatttaaacaacacataaaattgctttcaaaatatagacaaatatttataaatttctggtatgcaaaaagccattcagagaatgactcaatttcttcaaatagtaaaatttttattaaaacaagcaaacaaaaagtaatgaagtctatttatttaaaaaacaatagaacaaaacctgctttttatatatgattgaaaaagtaaaaaccatttacaaccagtatttttttagttactaaaaatctagctgtgtggcatcaacatgcaacacacacatgtactttttttcctttagaagagatatggttttgaaatgtatgtgtgtgtatatgtacaactgtctacacacaaatacatacacatacgtatgtatctctaaagtttttagttaccactaaaagggaatgattgtgatataaatagaagaggaatgtttgaaagggtattsgatgggtcacagattccctagaaggatggcacaataaaaggaatcaaggcaggctaagtgatataaaccataacccaaatcctgtttagaaactttttcactgccattactgcctctggagatgttctcactgtgattgctgtaaagaattctcctgtgtcctggcttctttgtgtcacatctgattagacaaacctgtattttggatcctagcc

SEQ ID NO: 87377 - DNA, 766 bp, Homo sapiens
cagttagaaagattattcaatgactactgttaggcaactggctgatccattagaaaaatatagttagattattttctcataccacatatcgtgcagaaataaaaaatttaaacaacacataaaattgctttcaaaatatagacaaatatttataaatttctggtatgcaaaaagccattcagagaatgactcaatttcttcaaatagtaaaatttttattaaaacaagcaaacaaaaagtaatgaagtctatttatttaaaaaacaatagaacaaaacctgctttttatatatgattgaaaaagtaaaaaccatttacaaccagtatttttttagttactaaaaatctagctgtgtggcatcaacatgcaacacacacatgtactttttttcctttagaagagatatggttttgaaatgtatgtgtgtgtatatgtacaactgtctacacacaaatacatacacatacgtatgtatctctaaagtttttagttaccactaaaagggaatgattgtgatataaatagaagaggaatgtttgaaagggtattcgatgggtcacagattccctagaaggatggcacaataaaaggaatcaaggcaggctaagtgatataaaccataacccaaatcctgtttagaaactttttcactgccattactgcctctggagatrttctcactgtgattgctgtaaagaattctcctgtgtcctggcttctttgtgtcacatctgattagacaaacctgtattttggatcctagcc

SEQ ID NO: 87378 - DNA, 1316 bp, Homo sapiens
acacctggctaatttttgtattttttactagaaacagttttgccacgttgaccagattggtctcgaactcgtggtctcaagtgatccatccgcccgcctaggcctcccaaggtgcttcttttattcttggggtgagattcacaaatacgattcatcttttttcttgttacagacacactctcgctctgacgtccaggctggagtgtagtggtgcaaccttggctcactgcagcctccgcctcccaggctcaagagatcctcccgcctcagtctcccaagtagctggaaccacagatgtgcgccaaccacgcccagctaattttgcattttttggtagagtccaaaaaatgagcaacatggggtttcgccacgttgctcaggctggtcttgaactcctgagatcaggagatctgcccgccttgacctccatataaagtgctgggattacaggtgtgcgccaaccgtrcacagctaatttttgtatttttagtagagacggggtttcaccatgttggccaggctggcctcaaactgctgactgcaacggatccacctgcctcccaaactgctggaaccaccggcgtgagccaccgtgcccgacccttttttgtttctaagacagagtcttgctctgtcacccggcctggagtgcagtggtgcaaacacagctcaccgtagcctcaaactcctgcacgtaagggctgctcctgcctcagcctcccgagcagctgggactacaggtggtgccaccatatccagctaattttttcttttttttaaagggagggcatcttagatgttgcccaggcttgtttgaccaccagtgatcctcctgccttggcctcccaaagtgctaggattacaggcctgagacacggctcccgacctcgtgttccgccattccagggcagcctctctcttacacaagggcagtgggggcagtgctggggttgcaggtccgggccctggggcgtgcttccttcctcacgtggccatgcccagcagcaccaaacatccccatccagcctttggaccccgccctgcccgtgctgacgttcagaaccaggccctagggctaggcttgcctccgtttccctgtcgacacggtggagaaaggggcactcaggaagctccagtgtgcagacgcccagctgccctggggaaaaaaccactcaaggcccacagtacccgagcccacctcctacagagcagacaggaggaggaagccagcccacccggctgggggctccaactcaaagccccagggtttaaatgagatgccaggagaagcaggagttggggactgctggggggca

SEQ ID NO: 87379 - DNA, 701 bp, Homo sapiens
cagcagcctccctgcagccggggctctggggccgagccctctggctggcgtgcctggtgcctcctgcgcgacctggaaggtgccgtggcccaagggagacagcagccacacactctggagcagccgcagtctacgaccccatgccctctgcaagaggctgccaccctgctgccaggtaacacctggccacggcactcacggcaccttcacaaagggccagccctgcactcacacctgcacacctcgcctgtgcatctcacctgtgccgcacacacccgtacatctcgtctgtgtacctcacccgtgcctcatgcacactgtgcacctccccaccatcctcacacccatccaggggagagaacagagggcrcagcccatgcggcctggtctccacaggcagatcatgagcctggtgctgcggacgtggccgcccgccgggcctggtatgagaagcggccattcactcagcgtgggcttcagaggccggcaggcaagccaaggccttgggctccgaccctgcgagcaagcgtgtgcctgaaaacctctgccccgactctaccctgctgggaggcctctccctccctccaacccctgcccgagggtcacacgggaggctttagctcatctcaaatgctctcaagggaatatctcagacaacagcaaaggcaggaatgggattccagtggggcaggaacaggatt

SEQ ID NO: 87380 - DNA, 986 bp, Homo sapiens
acaggtaaacccagaggcagtctgggtaaaaaaaaaaaatttctgttatcagtttatgaagaaaccaattttctatcaagaacagtgaaattttaatgggcctcaatagtcagctcttcaaagatgtttgtgtcccaatcccttgaacatgagaatagttctattaaatggcaacagggtgttaaattgtagacggaattaaggctgtcaatcagctgaccttacaatatggagattatcctggattatccaggtgggccaaatgtaattacaatgaactttaaatgaagaagggagaaacagaagagtcagaaccagagaggtggcactaagacaaagactcaactagccattatttgccttgaagatggaggaagtagtaaggagccaaggaattcagggggcttctagaagctggaaaaggcaagaaaacacattttcctctagagttccagaaaaggttacagctctgcttagactttgaattttgtccagcaagacgtatttcagactcctgacttccggactataaaattatacataaatgttgttttaagccactaaatttgtggtaatttgttacagcagcaatagaaacctaatatatatctttctgcatttctacgggctcttctccatgcctgtattcattccttcaatctataaatatttattgagtttccactctgaaaaagccccactggtttctgaggaaacttatacttcttggcttcctggctctaaccctctcagcttggtaaacttttactcacatttgagatcattttcaatgtgytgaattgtgtcttccccaaaaaaactatgttgaagtcctaaatctcagtacctcagactgtgtcctttcttggaaatactactgttgttgatgtgattagttaagatgaagtcatactggacaaggatgagtctttattccagtgtgactggtgtccttataagaagagaaaagagagaaagcagccatg

SEQ ID NO: 87381 - DNA, 713 bp, Homo sapiens
gattattcgaattttkttttgttttgttttgtttttccttttttgagatggagtttctctcatttcccaggctggagtgcaatggcgcgatctctgctcactgaaacgtccgcatcctggattcaagcaattctcctgcttcagcctccctagtagctgggattacaggagcgtgtcatcacacctggctaactttttgtatttttagtagagacggggtttctgcatgttggtcaggctggtttcaaactcccaacctcaggtgatccacccaccttggcctcccaagatgctaggattacaggcgtgagccaccactcatggcctttatttgaagttttgaattcagctaggctgaagcattgtggacttgctgactactaacaatattccaaatcaaacagtaattatatacaggagtggagttgcctcagcctgagttctccagaaagaattgcctgggacaagtatataaggacaggtggagtattttgcgaatttatccccagaattaggattggagattgggaaaaaagaaccaagaaagagagaaaattaacacaagggtacattcccaagttgtttaaagcagggcaatgtgatcttgattttacaaggacctcctaaagaacactaaggtgtatatatatatgctcagaatcgtctgtccaaaggacgaaaaaggggaatattcatccaccagctcttatctc

SEQ ID NO: 87382 - DNA, 1345 bp, Homo sapiens
aaatagatacaatcaataaaagaaaattacaaagaaagacaaaggacaagaaggctgtgkgtcaatagcgacaccgatattctccactgcgtggtcttctacagcagcattcaggaaactgggcatggtggacccaaggttagatagagcgggtgttactgaagtcacagggcaagggagatgcgagaaggatggaaggcaaggacgctgcttgtccaatgggagaaagtacggatgtgtttcagacacggaacagttcccgaccccaagaacgcagatcacctgggaccagaggaaagaaactaaggtgctaaaaggttaaataatttacaagggcacacacacctaccagagcgttttgttctggctccagggcctaattaaccttcaccgttatgcgacgctccatttcacaaaatcatactaagcaaaaaagcaggacacgaaaccatttatatagtatgagcacagttttacgaaaagggttataaatatatatatgtatatatgtgtatatatatttataggtggtgtatgtataggcagacactggaaagaaatatgctcaaatgttaagagtggttatgagtggtgatttttaaaactgtttttctagactttctaaaattaacattaacataattaacaggaaaaaaatgttatttaaaatagccactgggatgggcaagaatcaaagacattctataaaaatagactttctgggaaaaggtaccctggcaacataccctgagaatttgaataaataaaaagtactttacttgattcatggagtgataatggaaagaacatgagatttagaagacctggattcaggcttcttagaaaagtgttaactcactaagcctccatttccttatataaatataggcatgaaaatagcaaaacttgtttcacaaggctgttgttgtagagaccaagacagatatttcaaatgaaaaaattctataaaccaaactgtgttagtttaatattatttattcatttattgaaaatggaggcagggtctccctctgtcacccaggctggagggcactggttcaatcatagctcactgcagtcttgagctcctgggctcaggtgatcctcccatctcagcctcccaagtagctgaggctacacgcgtgtgccatcacgcctggctaattaaaaattttgtgagtgtgtagagacaaggtctcactatgttgcccagattggtctcaaactcctggcctcaaggaatcctcccacctcggcctcacaaagtgctgggattacaggcatgagccactgcacccggcagtttgatgctattaattctaccttttacttatttattaatgca

SEQ ID NO: 87383 - DNA, 635 bp, Homo sapiens
tggccactgtgttccggttggggtgggggggtggggagggtgacagtgacttacacatcccctgtcctggcaacccagaaagctgtttgatgccctctgcaccccccgcatacacagctagggtgctggcgctgcctgggccctgggtgtgagagtccgccctctggacaggtccaggtgagctggttcaktccacacatcccagaaactggtgaacacaatgggccctaggacccagagaacaactcaggcacaaagcctccccccactcccagctgcttcctgcatctcaggcctttctgcggcctctgcctcctcccccgccctcttcccctccatcctcttcctccttttcctaatctcccactctctcccccctggcctggaagggctggcaaagggagccctcctaccactccactgcaggggtgtgtgtgggttttgtgggatattaacgcgttaccatgtgcaaaagagcttagagtacagcgtgggggatggggtgtggggaagccgcctgggaaccctggatattgggatcgggaggggccaggaaccgcaggactgatcctgaggctggtgctaaggaagagggaagatctaggttgtgagctagagccggaagtgaacccaga

SEQ ID NO: 87384 - DNA, 654 bp, Homo sapiens
agagcttaagctcttaatatcgtatctatcatatcatcttgctttagagcagcttgttctgtgggtacctgtgcctaagtgtcagcatgtgcaggtgtgagggtagggggaccctgctcctcaacacacacatgcacgcacgcaaaagcacacacatacgcacccttacctttcttttcagctgctggatctctgcctcagtgaccgcatgcttgatctggagctgttgggcagaggggcaggcactcagctccagcagggtggggcaggcagtgccaagggcaggagacctgcctgcctttccctccaccactccagggagcccctcctcccacctccttgaacttgtgcaccagcttctcgggctccatgtccacaggggacagtgcatcctcgttctccgctagctcaaacacctcgatggccatctcaccacccgggaacgtggggctcagctcctcatcctcgtcagtggcatactctccygtctgcgaagggagaccggagactgtgggcccaccccacccagctgccctcagccctgatgaccagggctgggaccagttgcccatgccagacagagagctacccaggaatgtggttcatgcctcccacttcagcctgaggctggaccagagacacggtttatgtctt

SEQ ID NO: 87385 - DNA, 937 bp, Homo sapiens
gatcacgggatgacgtggctggaaaccgaccacaggcaccaccagtagttggaaagatcagaacagagctgcctccctcccttttgctggagaactattgtgagctgaccaccacacacacgacatctcctttaatcctcacaacagctctgggacgtcagccttaatatctctattttatagctgtagagtcagaagggccgaggcgttgtgcaagatcccctttctcaagctcagaaagaacccaggtgtcctgacagccagatcaggcttctctcattgatccacacrtcccctatttccaaatctacatggcttctagacacacacagccacatacaacagaccacgcagaatgttggaaagaattacagctcttggccgggcgcggtggctcacgcctgtaatccctgcactttgggaggtcgaggtgggtggatcacctgaggtcaggagttcaagaccagcctgaccaacatgatgaaaccccgtctctactaaaaatacaaaaaaatcagctggacgtgatggcggatacctgtaatcccagctacccaggaggctgcggcagaagaatcgcttgaaaccaggaggcagaggttgcagtgagctgagatcgtaccactgcactccaatctgggcaacaacagcaaaactccatctaaaaaaaaaaaaaattacagctctcggtagtgtttgaagaagcactttgcacctcctcattgacaatgccccaggaagggcttatgctcattctgttgtgaggggaagcccttgctggggctcccccccctggctgggaagtggtaaagctgtgaatagatcccatgtctgcctggcctggccacaaagctagtgctcctcccactctccaataccacctgccaccctcactgtcaccagcccagaagcaccccctgcacacaccatatcccca

SEQ ID NO: 87386 - DNA, 790 bp, Homo sapiens
gatgaaataattgatataaaaatggcttctttactgtgaaaaaatgcatatatatgtatatgtcctcatttgctgctcaacgtcagagagcatgggtcagctttataccacacagcaaacttgcctcatctgtttctggtatagactcaaaactccattaatgccaagtaacatctgacggtgtatgggtggaaaggagacagtctcaggtgctgaaagaagaggcgatcaaacttaatgacaaattttgctgtgttctttatgaatatgcagaaagcttgggaaatgtccttgaatttataaaattaggtgaaaggaatgagataagtctcgacatgtctgacttttcatgcctatargcacccatttttctgcagacacatgggggctgtgcatcttcttgttctgctgggtcttagaattgtggaaatgcagcctcccacaactcacggggcattgaagagaccctgactctcttccaatgtttagggaggaaactgagctcctgagaaaggactgaagaatccaagctagagagagttagaggaacaaagagtctacaagtttgagcttcagctctcaacagggcctttcacctccctgctacctgggggctctgtcttagctgtcacagtgcagccagcactgtcaatgatctatcaattggcagctctcttatgttttggtctggagccactttagatgtgatgaacaagattaattttgaaaaataatgctgtgttccaataaaaatggctcatgtactgtcaagaccaattggagtcctttt

SEQ ID NO: 87387 - DNA, 756 bp, Homo sapiens
  misc_feature (1)...(756): n = A,T,C or G
agaaataaataaaaccttggtctgtcaaaacagtttttctgcttggcaaaacaaaataagaatctgaaaagcagatagtcttgagttcacattctagacataagttaattctgttccttattaactgtgtgacttcagccaattacccaacctctctgtttccttttctgtaayaatatctacttagatattttgggggaacagtgggtgaggcataaaattaaataatataaacaaatgactagcacataggaggcaatcctatatcatagtaattatttttactattttattgctaatatgctggggttgctcaggggacagagaaactttctgactgagtttttggtgacagtatttagagaaaaaacagtgtctggctgaaggccctgtctccaaatgttctggcaatgttgcttttggctgtccctggctggtgtctgtctttaccttgaactgccctaagattagaatttcttgtaaacggtgacttaattattcgcctgcatccttttacaacgtcgggctgcttccccctgtgctcagggagttgcctctctggctgctgcttagagtggactggaattgacttgtctgactgctctttttgagggcattatctccagtccctgaaggtaagtgtggaggtgcacatnnnnnnnnnnnnnnnnnnnnnnnnnnnnnnnnnnnnnnnnnnnnnnnnnnnnnnnnnnnnnnnnnnnnnnnnnnnnnnnnnnnnnnnnnnnnnnnnnnnng

SEQ ID NO: 87388 - DNA, 1721 bp, Homo sapiens
cgactcataccgaaagccgggggtgctggggccttgcaaaccaggtcacctgacagagcttttgcttctatgagcctggatgaaaccagctatacaataaagccaataaaaagaaaagaagatgccttagtgccacataaatttggcagaagtgaacatctcactgattaaaaatacattttaaatagaagaattatatggcatgtgaattatatctcagtcaagcagttgtgaaatatataacaccccctgcttacacacacatgcaactactacatcacatgcaggcacttggcctctctgcctatcaaaagtagcttgcatttgtacagctccttgcaatttacacagggccttcatacgccagtggtttcacacttaggaattgaacagagaagtaggaaaaaggaaacagagagtttacccttacaagataattgatgttcctaaggtcatacagtgaatgaatgtcagagacagagcttgagttttaatcccagtattctttacaccacctccctatcagtgtctccgtggaggtgagggcatgggctttgcaacattttaatttctcaaggttaccatgaactctaatagtaaggagggaatgctaggaagaagagaaaacttatgtcttggagggaaattctaaatagatgttttctattaagttctagaaatatattcaacacaattgaaaaaaattgtggaatctctattatctgtcaagtctatgccgtcctcatttactctccatgtaaaattagtggatttctgaggatcctgcataagcctaatatttaatgaatttagatttcttaaggaatcaaaattttgtattggtgaattagaacatgaccagaagtcaaccaaagtctctccctgagggaaagagtaactgaagcttgaataatgtgtggactcaggaagtcaggggaaggcactgctgctgagaagatgaatrtatacaaatctatgaactaaagaattcaagaaatgagttaccagaccgaggtgtgtgcaagaacattctggaagggggcaaatgggacacaaagttgacatcagacaacttggaattgaaaagggaattagagaattggcaactggcagaaagctttcaaatgaaggacatagggcctgaggtagaggaagtaacttgccccttgaaagccacacaacagcaagacagaaccagggctggccctggaagtcaggttcccagattcgtggtgtggcccccacgatactgctctgcacgtcatatctgagcatgagacgactcagaaatctttgctgattcaacctttctgcctctgcatgtaaatgccaccatgccttcccacattgcctctctcccacgtgaaacatctggtttgaggttcaccaataatagcttaaaaccacaagtctaagtcagtgggacccagaattgtcaaaagaatcacccaaaaatccagggaaaaggaaacagatgacttgggtttaacatactttaatcgtgctctctagatgacggttttaaataagtatgccatagaaatagataacatggcagccatgattctctttttatcgaacaattaccctttaaattctcaggcccctcagtaggagcctacctttcaaacttaagggctcttctctccgttattagtgacgtgcttttcccattcctgtatgttaattattttataaaaattgaagggatttaacattga

SEQ ID NO: 87389 - DNA, 1573 bp, Homo sapiens
cacattccatgagcttagtaatgacttaactctcccatgtaagaaaactgagtctatgttggtatatatttttccctctgagatgaggtcttgctatcttgcccaggttggagtgctgtggctattcacagccaaatcataatgcactacagccttgaattcctgggctcaaatggtcctcctgcctcagcctctggcgtagcttggactatagatgtgtgccaccacaccgagctgtgttggtgtatttgaaatgtatttttctgaatgatacatttggtggctttcaactgtaaagctaaatatatggttataatctagtaatgataatggaggtttcataaccaagttagaaaagagatgctattcaccctaccttggaattctaggaagattcagggaagttgtaatatctcctagcagtattactagagtgcagacgtttaccaccctggtgtgccagataccattctagtgctttcccatgctactccctttaagtgctcatcaaaacttgggagtagttgatatttcttccaattacagagaagggaagtgaagttcagaaagtcagagtaatgtttccatcttacgcagctgtgagttttagagtcaagtttcaaacccaggtttgggtggctccagtgccctattattttccataacactaccctgcctcccacgagtttcctgaaatagaattagaaaactatgtgactcatagtcctcctggccacaaagtcatttcaaaaatctcaggcttgaagatgactttgaatgacaacaggtcaggcaatcttcctcctcctcatctcctccccgatggtggagtcacctctgtggtgtctaccaagcaatttgtactccacttgagcacgtccaggcacagagagctgactacatctggtaatggccaatagatgggagaggaagagaggtcctttgattccacctcttactatgtgataattggtgttgaggcccaaagaaaggctaagagttgtccaggaccatgcattgaggactgcatgtccagatgatggaggttagttttctagagcagcttcaccagacccaaggccacactgaaaagatctgagaaataacactaccaaatcacagaatattcatcccaaaagatgcattaaaatagaagaaggtgactccaactcaccatgggcaagatccacactttccagattgttctctcacataggaacgcgattggtctgaaatgatgttcttttccctgcctgattccctgtaagaaaaggcaataaacgctaccaacatttactaagaatgttacaatcgacaaaaccttcttctgatcttcacactaattctgtaaagaaggcaatgcagaattaatctctatttgtcagacaagggacctgagattcactaagtattgtattagtcagtgttacaggcaaatcgctacaagaaaaaacaatctttaatatgtgaagctactgggatatggggtctttatcactcacatcrcagtctgatgtgagttggcagcaagaatgtgggaggattcatttccatgcactctcgcagagatcaa

SEQ ID NO: 87390 - DNA, 1141 bp, Homo sapiens
agaggaagcctggcagttcagaacctagtcaagtctgcaccagagagtctggctagggtgccaatgatggtactgtgtcccccggatactcacagtgctggatatttccacagatgacctcacggtgttggacaggagcatctgattggccaagtccaggttactggagcagcaaagcacagggagagaggatatttgttccttccttttgtttctgttrgggatctcaccagccctcccacaaaggcctgcataacaaagggggagtccccaagtaagagagtgttcaaatgctagaaagccaaaagctagctaattccgccatagcactgtacaaaaccacagcattgaacagggtcatgcataaaaatcatagaaaattcattgcaatgagttaaatgaatgatgttcccctttcacggaaaaagaaaatcatgtcttttgaagataatgttgaaaaggctcaattcatctagaccacagcccgtggcagtagatagttcaactgactatcatcactccatttaattgttctgagccctgcccattcttcaagggcaatcttaaatctctatgcttccataaagtgacataaatccttttctactaaaacaatcacctaccatcgactgagatacaggtatttgcaaacattctagaatctacatgaaagcaaacgttaagatgagaagggccatcctgacaccaattacatcttttgagaaaatagcatcccagaagctggcattaggcagtgagcagacaaaaggagcatatttcaaccattcacagtctacctggaaatacaacatagtggcatactgcagtcccctggaaaacatagactacagttagagtcccacctgctctatttcccggccatgtaatcttggctaaagttacttaactctctaacctaaagttgcttcagctgcaaaatagtagtaataataataatgatagcacttaccccttagggttgttgctaaaatgaagtgaaataatgcacataaaataattagcaaatgtcttattcatcatcaattgattaatgttaactaggattattatactttgacctcaattcagattttaagcttcattcgtggctaaagtaataatcatcccttttaatatttct

SEQ ID NO: 87391 - DNA, 727 bp, Homo sapiens
agcaatcctcctgcctcagcctcccaaagtgctaggattacagttgtgatctgccgtgcctcgcccccaattcttagagatagtaatatgacactccattgggctctgcatatctctcatggctttgtgaaactctttagttctaatattaaagtcacgctattaaagacaaacacatggaaaagacgttttacactgcagctcctgaccttactcaaactggactccctctttgaaaactcatgttccctcccttgctctgctttttccatrgcacctaccaccttcaatcatgatgtaacataacatcacttgatgattaaattttctccccaccaactagaatatgaactccatgagggcatggagttttgctgtcttgcccaatgatatatccttgcacctagaacagtgcttgatagttattaggcactcaacaaagatatgttgaatcactgatcatgagagaaatgcaaatcaaaaccacaatgagataccatctcacgccagtcagaatggcgattatgaaaaagtcaagaaacaacagatgccgatgaggctgtggagaaataggaacgcttttacaatgttggtgggaatgtaaattagttcaaccattgtggaagacagtgtggcaatccctcaaagatctagaagcagaaataccatttgacccagcaatcccattactgggtatgtacccaaaggaatataaattattctatta

SEQ ID NO: 87392 - DNA, 727 bp, Homo sapiens
agcaatcctcctgcctcagcctcccaaagtgctaggattacagttgtgatctgccgtgcctcgcccccaattcttagagatagtaatatgacactccattgggctctgcatatctctcatggctttgtgaaactctttagttctaatattaaagtcacgctattaaagacaaacacatggaaaagacgttttacactgcagctcctgaccttactcaaactggactccctctttgaaaactcatgttccctcccttgctctgctttttccatggcacctaccaccttcaatcatgatgtaacataacatcacttgatkattaaattttctccccaccaactagaatatgaactccatgagggcatggagttttgctgtcttgcccaatgatatatccttgcacctagaacagtgcttgatagttattaggcactcaacaaagatatgttgaatcactgatcatgagagaaatgcaaatcaaaaccacaatgagataccatctcacgccagtcagaatggcgattatgaaaaagtcaagaaacaacagatgccgatgaggctgtggagaaataggaacgcttttacaatgttggtgggaatgtaaattagttcaaccattgtggaagacagtgtggcaatccctcaaagatctagaagcagaaataccatttgacccagcaatcccattactgggtatgtacccaaaggaatataaattattctatta

SEQ ID NO: 87393 - DNA, 920 bp, Homo sapiens
gcagaaatgtccccattttgaaaactgtgaagaactcccaggatgtctaattaaaatagggtatggataatgaaagtgatcccataagtgtgctggtggagagctgcttccacttacttttctgtgcaaacccaaaccatcactatcacaaagttccaaaaaccatgacctcagcaacatgtaattgttaggtactcactatgaatttcttaaaccacacagtatgaattcttttagcaaattaggccccaatgattttactaagcaaaatgtcccactgtagaacatcatgtgaattttagagctagaggagctcagaatggggaaaatggataataatacgaattaaaaggaagaagttgaaattcctagttaaataatcattataaattatatctttcaagtaaaactacaactattgatttccatggtgtgtgtaaacaagacaatacaaacrtgttttataaactgactataccttttttcttaatttctctatatcttttaaacaatatttacatgctgttcattttgttttatttaattttccatatttaccttgtttttcatatctagagtatgacaatctagcaactctttatttctggtaacattctaaaatgttttatttggaaccacttattatggcagatgataaaaatctaggctcagttttatcacctccacctaactcctaaaatagatgacataaattcaataagaatctaaatctacttatcttcagggtacaatacaaaatccatctacttattcaaatttttgattaacagcattcatatttatgaaatgctctgggctttgcaggtgaaaatatgtgaaactcaagtatcattaaatattctgtgatgttatcacagtgttttgtgtgcatatgtgctaatgttcaataactttaccct

SEQ ID NO: 87394 - DNA, 920 bp, Homo sapiens
gcagaaatgtccccattttgaaaactgtgaagaactcccaggatgtctaattaaaatagggtatggataatgaaagtgatcccataagtgtgctggtggagagctgcttccacttacttttctgtgcaaacccaaaccatcactatcacaaagttccaaaaaccatgacctcagcaacatgtaattgttaggtactcactatgaatttcttaaaccacacagtatgaattcttttagcaaattaggccccaatgattttactaagcaaaatgtcccactgtagaacatcatgtgaattttagagctagaggagctcagaatggggaaaatggataataatacgaattaaaaggaagaagttgaaattcctagttaaataatcattataaattatatctttcaagtaaaactacaactattgatttccatggtgtgtgtaaacaagacaatacaaacgtgttttataaactgactataccttttttcttaatttctctatatcttttaaacaatatttacatgctgttcattttgttttatttaattttccatatttaccttgtttttcatatctagagtatgacaatctagcaactctttatttctggtaacawtctaaaatgttttatttggaaccacttattatggcagatgataaaaatctaggctcagttttatcacctccacctaactcctaaaatagatgacataaattcaataagaatctaaatctacttatcttcagggtacaatacaaaatccatctacttattcaaatttttgattaacagcattcatatttatgaaatgctctgggctttgcaggtgaaaatatgtgaaactcaagtatcattaaatattctgtgatgttatcacagtgttttgtgtgcatatgtgctaatgttcaataactttaccct

SEQ ID NO: 87395 - DNA, 907 bp, Homo sapiens
tgcattctcctagtcttgctgggcacacagcagctcagctagggactacatttcccagacttccttgcagtgtgaggtggacacctaagtttgggtcaataggatgtgcgaaaagtgaggaatgcaatttctagttattttcaacttaaagacaatcagctttccccggacttcctcccaaacccactccccgctgggggctggaataccaaagtagcagcaatccagcttcggccatgctaatgaggactacttacaggatggaagaaaaacatgtaaggaacttgtgtctctgaatgatctaaaggttcagggctaccctgcagtctaagccagaatgttaggtaagagagaaacaaacctctaacatttttgtttcagcgctttacattagcttaaacatttatagacagctaggttacaggaaaactcctgaaattaaataaggaaataaaatcaccagtgatgtccttcacgatactgaactgcctggaaaaaattgactttaatattaccatagatgctacattgaattatttcttaatcttgaacaaagtacgaagaagtcacaccagttttaaaaggtagatgagtgactcaaaagtcctactgaataaataaacaaaggtgctcaagaagtgtttcatctattactgatatarcataaattaacatttaatagaaacttaaatttttaagaacaaactttaccagtctgaaaatggtaactattgttccacagtacaagtcagtgctagaaggtaagctccaggagggtaatgaattatggcttatttattgttaaattaacagaacctagaaaaaattcctggaataaaataggcatggagtaaagctgtagaatgaacgaataatacaatctctttcatggtccaacatccatgca

SEQ ID NO: 87396 - DNA, 736 bp, Homo sapiens
tggcttgattaaggctttgtgagcctcccagcctcattacaaatcaatggagatgaactgagtgcttaatactcaaaagccaagctaacaaaagctgacttattacaagctaagaggttgggactctcctgggtgtttcagctttgttttgttttgtatttcatcccattttcccctctcctcctcttcctgaccacccccaacccaatccattttttgtggcaatattcaagtccatagcctgattctgttccttctcccttatttccgtctacataaaactgcagcttttagaagaataatatttctgactagatattatgctccactgtagccagatgasttttctgaatgacagggaacggctccccttccctaggccatttaacttcagtttttcacacaggacttaacgatcctagtatcttttggaaaacttcctgtttactgtttctcatctaccgactcttcccatccataaccccaacagacacacaagtgcggaatggcaaagggcaatcagaaacatttgaccatcgttaaagaaaagatatgagttaacataaacctgcttccagatccttcagcggtttcagacacctcttctcttcctgtctccctctttctctctcctctcagagaaaactgcactgaaagtgttttctgttccatattcagagacaggaaggtgccagaactgtaatgagctgatgagaagccccatatggaaaggaaa

SEQ ID NO: 87397 - DNA, 736 bp, Homo sapiens
tggcttgattaaggctttgtgagcctcccagcctcattacaaatcaatggagatgaactgagtgcttaatactcaaaagccaagctaacaaaagctgacttattacaagctaagaggttgggactctcctgggtgtttcagctttgttttgttttgtatttcatcccattttcccctctcctcctcttcctgaccacccccaacccaatccattttttgtggcaatattcaagtccatagcctgattctgttccttctcccttatttccgtctacataaaactgcagcttttagaagaataatatttctgactagatattatgctccactgtagccagatgacttttctgaatgacagggaasggctccccttccctaggccatttaacttcagtttttcacacaggacttaacgatcctagtatcttttggaaaacttcctgtttactgtttctcatctaccgactcttcccatccataaccccaacagacacacaagtgcggaatggcaaagggcaatcagaaacatttgaccatcgttaaagaaaagatatgagttaacataaacctgcttccagatccttcagcggtttcagacacctcttctcttcctgtctccctctttctctctcctctcagagaaaactgcactgaaagtgttttctgttccatattcagagacaggaaggtgccagaactgtaatgagctgatgagaagccccatatggaaaggaaa

SEQ ID NO: 87398 - DNA, 736 bp, Homo sapiens
tggcttgattaaggctttgtgagcctcccagcctcattacaaatcaatggagatgaactgagtgcttaatactcaaaagccaagctaacaaaagctgacttattacaagctaagaggttgggactctcctgggtgtttcagctttgttttgttttgtatttcatcccattttcccctctcctcctcttcctgaccacccccaacccaatccattttttgtggcaatattcaagtccatagcctgattctgttccttctcccttatttccgtctacataaaactgcagcttttagaagaataatatttctgactagatattatgctccactgtagccagatgacttttctgaatgacagggaacggctccccttccctaggccatttaacttcagtttttcacacaggacttaaygatcctagtatcttttggaaaacttcctgtttactgtttctcatctaccgactcttcccatccataaccccaacagacacacaagtgcggaatggcaaagggcaatcagaaacatttgaccatcgttaaagaaaagatatgagttaacataaacctgcttccagatccttcagcggtttcagacacctcttctcttcctgtctccctctttctctctcctctcagagaaaactgcactgaaagtgttttctgttccatattcagagacaggaaggtgccagaactgtaatgagctgatgagaagccccatatggaaaggaaa

SEQ ID NO: 87399 - DNA, 678 bp, Homo sapiens
cctccaggtctcttccttgtccttactgtagaccatcacaccrccactaatttcccccctctggccaggtgagagcagattgtcaccatttcagagaaatttgaaccaatcagaaagagagctcaggagtactggggtgactgagatgagcacatgtggcttcttgaggaccttccaacccccaagttattcttagaaagctgcacacaagccaggcagctgtaggctggcgttgaaaagtttttagctttactaatctacattgtgcggagagactgactgggcgggtgtccatcccgtgtgtgccatgctgcctccatctctttctccctctcttctgagaccttctggttatccccagctacctgcccctccacctcctgtgccctcagggtgtgcagtttgggtttctttcctttttcttttgtctgctgttgtttaggattgtgaaagtgcagcagtgcactctgtccctgcaacaggctctgcggtgggctagctccagtgttgcattctcccttcatcagtggagaaatgcactcttggaaccatgaagagtctgcacatgacagctctgcactcactaacattcaagcaccttgattcagagtttcacgagactaaggtgaggttacctttccctctctgttgttcttcccgtggaaagagggttttcta

SEQ ID NO: 87400 - DNA, 616 bp, Homo sapiens
ttaagaagattatctaaccagaagagataaaccaaaaaaagggggactattatgaagaaagctcatacagggctatgaagaaatgaatgcagcattgtttataagtagaacattagaaacaatataaatatccaccagtaggcagatggatcaataaactaggatatatccacagcatgggatacatacagcaatttaaaaaatgagttaagtctacatataataacagacttttccccaagaatctttttttactaagaaaggcaagttttaaagcattatgtgaagaattatttattaaaaacacacacccttacactcgaagtggttctgtatttcttctgtgggtgcatttccatgcatgtaaacgcacagtaaaaactctgcatatatcataggaagagacagcggagatgcttatcattttaaatgctggtgaaaggagactctcttatctgagatgtttaatttttacagggagcatatttatatattactcatgttactacaaacgaaacaataaaagattgagcactatcattctttcaaagaaaccagcttgttcccactcagtactatgaagtcacaacaggctrtattaaggaaagagaatgga

SEQ ID NO: 87401 - DNA, 561 bp, Homo sapiens
ttttttytttttttttttttttgagatggagtcttgctctgtcacccaggctggagtacagtggcgcgatctcggcccactgcgacctccgcctgccggattcaagtgattctcctgcctcagcctcccgagtagctgggattacaggcacgtgcaccacgccaggctaatttttatatttttagtagagacagggtttcaccatgttggtcagcctggtctcgaactcctgacctcaggtaatctgcctgcctcggcctcccaaagtactgggattacagacgtgagccagggcacccgggctcaattcttttgcgtacattggttttctgtgtttcagtttcctccactataaacctagagacaacagttacttggcgtaaaattaaaatatgtagtgaagtcacattttacccaaagtttgaaattatagaatcatgccatgattacctagcaaggaaacttgggaaattatttggatttcccttctcgtaattaaatgtctagacattccatacggttgccatttctatttaacaatgcgtttattgttcttggata

SEQ ID NO: 87402 - DNA, 1003 bp, Homo sapiens
tgtaaatttgtttgagttcattgtagattctggatattagccctttgtcagatcagtaggttgcaaaaattttctcccattctgtaggttgcctgttcactctgatggtagtttcttttgctgtgcagaagctctttagtttaattagattccatttgtcaactttggcttttgttgccattgcttttggtgttttagacatgaagtccttgcccatgcctatgtcctgaatggtattgcctaggttttcttctagggtttttatggttttaggtctaacatttaagtctttaatccatcttgaattaatttttgtataaggtgtaaggaagggatccagtttcagctttctacatatggctagccagttttcccagcaccatttattaaacagggaatcctttccccattgcttgtttttgtcaggtttgtcaaagaccagatagttgtagatatgtggarttatttctgagggctctgttctgttccattggtctatatatctgttttggtaccagtaccatgctgtaaccaaacaatttttaaagggaagttcatcaaatgcttttttgccaaccaaaaaaaaaaaaagaagtaaaaaagatagacaatcttttcttaaaaaaaaaaaatgtttcttttctaattgttttcttttctaaaaacataagtctatatgccaaagataaagctttgatgactgtacacaccctgtcttcttccatagtagctgttattactgctgagccttctgaaaagtgtttaaggagtgataacaagggaccctagagaatctgagacttttcgttgctaaacaaaaaatcagaaccacgcttgagatgttatactactaagacaacaggaacatttgtcacatatcaaacaagagacagggtctgctaactgcagcgatggccagaagagacagcctgcaagtctagttcatccttatgaagaaaacaggatctgaaaaaaactcacacctcgaaatcatctcttctgt

SEQ ID NO: 87403 - DNA, 1003 bp, Homo sapiens
tgtaaatttgtttgagttcattgtagattctggatattagccctttgtcagatcagtaggttgcaaaaattttctcccattctgtaggttgcctgttcactctgatggtagtttcttttgctgtgcagaagctctttagtttaattagattccatttgtcaactttggcttttgttgccattgcttttggtgttttagacatgaagtccttgcccatgcctatgtcctgaatggtattgcctaggttttcttctagggtttttatggttttaggtctaacatttaagtctttaatccatcttgaattaatttttgtataaggtgtaaggaagggatccagtttcagctttctacatatggctagccagttttcccagcaccatttattaaacagggaatcctttccccattgcttgtttttgtcaggtttgtcaaagaccagatagttgtagatatgtggaattatttctgagggctctgttctgttccattggtctatatmtctgttttggtaccagtaccatgctgtaaccaaacaatttttaaagggaagttcatcaaatgcttttttgccaaccaaaaaaaaaaaaagaagtaaaaaagatagacaatcttttcttaaaaaaaaaaaatgtttcttttctaattgttttcttttctaaaaacataagtctatatgccaaagataaagctttgatgactgtacacaccctgtcttcttccatagtagctgttattactgctgagccttctgaaaagtgtttaaggagtgataacaagggaccctagagaatctgagacttttcgttgctaaacaaaaaatcagaaccacgcttgagatgttatactactaagacaacaggaacatttgtcacatatcaaacaagagacagggtctgctaactgcagcgatggccagaagagacagcctgcaagtctagttcatccttatgaagaaaacaggatctgaaaaaaactcacacctcgaaatcatctcttctgt

SEQ ID NO: 87404 - DNA, 1003 bp, Homo sapiens
tgtaaatttgtttgagttcattgtagattctggatattagccctttgtcagatcagtaggttgcaaaaattttctcccattctgtaggttgcctgttcactctgatggtagtttcttttgctgtgcagaagctctttagtttaattagattccatttgtcaactttggcttttgttgccattgcttttggtgttttagacatgaagtccttgcccatgcctatgtcctgaatggtattgcctaggttttcttctagggtttttatggttttaggtctaacatttaagtctttaatccatcttgaattaatttttgtataaggtgtaaggaagggatccagtttcagctttctacatatggctagccagttttcccagcaccatttattaaacagggaatcctttccccattgcttgtttttgtcaggtttgtcaaagaccagatagttgtagatatgtggaattatttctgagggctctgttctgttccattggtctatatatctgttttggtaccagtaccatgctgtaaccaaacaatttttaaagggaagttcatcaaatgcttttttgccaaccaaaaaaaaaaaaagaagtaaaaaagatagacaatcttttcttaaaaaaaaaaaatgtttcttttctaattgttttcttttctaaaaacataagtctatatgccaaagataaagctttgatgactgtacacaccctgtcttcttccatagtagctgttattactgctgagccttctgaaaagtgtttaaggagtgataacaagggaccctagagaatctgagacttttcgttgctaaacaaaaaatcagaaccacgcttgagatgttatactactaagacaacaggaacatttgtcwcatatcaaacaagagacagggtctgctaactgcagcgatggccagaagagacagcctgcaagtctagttcatccttatgaagaaaacaggatctgaaaaaaactcacacctcgaaatcatctcttctgt

SEQ ID NO: 87405 - DNA, 982 bp, Homo sapiens
gttctctttatgagaatctaacccgtgatgatctgaggtgaaacactttcatcccgaaaccatcccccttaccgcttcccaggaaaccagtccctggtgcgaaaaaggttaaggaccgctgctctacagtcatactaggaaggaggaaaaagagaaagagtggggtgggggacaggtggggaaacaaaaacaaacaaaaaggaaatccaataacattacaggaaaatttaaaaatatcctatcggcacaaaagtaattacaaaaattagagatgtctaatcttggaaataggagtccataatgaactccaatacagccaatttaacttcaaaacccatctcttaaggaccagctgtcctacctctccaaaaagatgggttgcaagacaggaataagcaactatttttttcttcaataggcaattatttttttcttcttggtggctcatttaacatgcacttcatcaagaatttattaagtagggtggataatagcttttcttggtgcagagaaaaaaggaaataaggttttatggattctgacaattggcaaataagcctgaagtatagcaaggaagataacaagcaagatagcaaggaagtatcagtaagattcaataatagatggataaatgggtttatattctggctaacccaataccactgcagaattatatgaatgtaaggagaaaaataatcagtgtttagttttagaagatgcctctatttctccatgaggacagacaacataatttagaaagactgaaaatagagggcaagaagaatttttagtaacttcatatatatatatatatatatatayacacacacacacacatatgtgtgtgtatacatatgtgtatatgtatatgtttatgtagctctggtttataagaccagaatggctcataagaggggggatcttaaaaaggaaatgtgccacaagccagatacggacttgctcaggtgagaaaggagattta

SEQ ID NO: 87406 - DNA, 646 bp, Homo sapiens
tttcctgcctcagcctcccaagcagctgagattacaggcatatgccaccacgcctggctaatttttttgtattttttagtagagatgggccttcaccatgttggccaggctggtctcgaattcccaacttcaggtgatccacctgcctcggcttcccagagcgctaggattacaggtgtgagccaccactcctgggcagggaatgaatgctttctaagaaccatactgcttctccttttaaatatcaaggatttaatgacaattataaaacacttcagttttatttggttaattgttcatcatatttaagcctcagtgaaagtttggcttcctccagaaactccctccagaatacctgccatttttcattacagagcttgaaaacatggcagatctgatgactactcctttttctttttcttttttttttttttttagcaattttttcttgcstgaagtaattcttctggtaagtgatttctggattcactctcgaaattctcataactctttcactagtctttttaggataatcttctattctaagactaagcctcacataagtaaaattgtgtacaaatacatgcaacattaaataaaaccgaatcttaaatggagggtgaataaggagtgtaacaatgggcct

SEQ ID NO: 87407 - DNA, 1084 bp, Homo sapiens
aaagaacccagtctcaaaagattacataccatataatcacatttataagatattctggaaaaggcaaaaatataggaacagaaaacagatcagtggttgccaggggtatgtgatgaggatgggtcttaataaaggggcaggaggtgggattctttggaacattggaatttttctgctttggttacaagaatctatgtaaatgtaaaaactcatagaaaaaagtgaatttgacagcttgtcaattaaaaacttcactgcctccccacaccctgtgtaaaattagctttccacattcaaaatcttcttgatataaagttacattaacccagaaagtagatcagaggagcaggtacagaacaacacttggatctacaggtgccatgactttaggaagacatgagattatatccttatggtgacacgagctcatttacatagctgcatcagtttcataggaaaacaaaaaacaaaaataaagcaagaccacccaaagtacaacaaatacaaaagtataacacattaccacttcgaagaaatattgaaaacaaggctattgaggagagtttctgctacgtattagtttggcacccatcttatctttgccttttgttttgatcatgtagtattgagaaaatcctacatagaccattggaacggaatgcagagcccagaaataatgacgcacacctagaatcatctgatcttcaacaaagccaacataaacaagcaatggggaaagaactctctagtcaataaatagtgctaggaaaaccatctggataactatgcagaagattgaaactggaccccttccttataccatatacaaaaattaactcaagatggattaaagcctttaatgtaaaacctaaaaygataaaaaccctggaaagtaacctatgaaatatcattttggacataggacctggcaatgatttcatgacaaagatgccaaaaacaatagcaacaaaaacaaaaattggtaaatgggacctaattaaagtaaagagcttctgctggcaaaagaaattatcaacagagtcaacggacaatctatagaatgggagaaaataattgcaaagta

SEQ ID NO: 87408 - DNA, 1118 bp, Homo sapiens
aaatgggttctgaatcctccagctttctgcactgtatcgtgattacggccgctggtgccagtactggtgtgtgagctccagcacggcccatctgctgctcaggcttgcttggcggacacagatttatttcatttagtttggtaatttggcaacagtttctcttttctcattatcctagctgggattcagtaccagtgttactcattttgtttgccagtttgttgttttcttttgttccattttgtgaagatgaagaagccaacaacaggaattctgtcttccgaaaatgcagtgcttgtcctttcgggatcttgggcatgccttgctaaagtgctctctatttttgacacttgcaagccatttcaattgtttggataaatagaaagcttcatggtgtatttttcaaagagcttagcattcctttcctctccccactccaccaaggaagatttggaaattgttccaaatagaaattataaacattagcctggagctgtgctgtctctgtctggttttgatgctttttttgttttaactaaaggctcatgttgtttgtttaatcttcatcagtactgcaaaaacacatggtataagacttaactctgccccaagcaccctacacataagaagggattttcatctgaattagtttgtawttcaaagagcactgggatagccagattgctaagaatttgctcaagtaaaactttagaactattggaatcttagagatgtcttgaatggatttgttaggataggatggctgctgcctgagaatcctctttgaacctgacactattttttttttttttgaggagacattctttgtaatactttgtgctacttttctctctaggttaccctgaagagacttacccaatttatgacctttcagactgtatcaagcgtaggcaagaaacaatcttggtggattaccctgacccaaaagaactttctgctgaagaaatagctgaaagaatgggaatgatagaagaggaagaatcagatcatttgggttgggaaagtctgcccactgaccccagagcccaggaagataattctgttacctcgtgtgatccaaagccagaaacatgttcctgctgttttcatgaagacga

SEQ ID NO: 87409 - DNA, 916 bp, Homo sapiens
tgcattagttgtttgaagattgggtttgctataaaaacaaattctgcctctgctctctctcgcccatgtgatgcctttcaccgtgttatgatgcagcaagaaggctctcaccagattcatcacctcaactttggacttcccagcctccagaatcatgagccaaataaatttattttctttataaattacccagccctgctattctgttattgtagcacaaaatggactaagatgaagcttaaacattattagaagaatatacatatcaaaaatagatataagtatccatatatgtgaagacagagagtgaggctgctagtcacagccaggtctactaagagttcttgtaaaaatatcctccccctaaaggctgtgtgccatgatttttgggtgttggagacctgatctgcttttctagtacaactagcacaatctgaacctaagtcctgaatagatgaccatgtgtagaacacttccttacccaggaagaaagattattcagattgtctgatggctgcaggcattattgggccttctctcatatttgggtgctttcaggccatctacacatggatcatctgaatattgctcgtaactagaagttactgaaccaggatgtcagccaccctaggcccttcctggactcctgggggctgcaaatctacaactcattgctgaggttacttgttggaaagttctgcttyacaggacacttgtggaaccagggcatatgccttcttcagaatgtgtaatttatatgcagaaaacatttggtcacaggtttataaatctaacttttaataaaatattagagcagatttctattttagcaactaattgctcttaaaggaagacttggagagttagatagaccaaagggggtaagtagagcattctgttacctatgtgcacagta

SEQ ID NO: 87410 - DNA, 584 bp, Homo sapiens
gtaaagtacttacaacgagcacataggaaccatttaatcaatgggaaccagccctgcttctttccttttctctttctttatttcattttttaaggttttgagtgagaaataaagcagtgcataattacaagatttgctaatttaacaaacacattgagcatctactgtctgctaagtactgtgctgggtactggggaaatggccatgacaaaatggacaaaattatctgcctccatggaacttacattctaggagaragaagacagacaatcaacaagataataagtcaattacatggtatagcaggtggagctgagaactgcagctgcaaacagagtgctggggcagtgggtaaggaggaaccattttaaatctgatgttcctgagaggaactgctgagatgcaaaagtgagggagaagatcacatggaggactagaagtccccggctggggaacagcaagtgcaaaggccctggggtggaggcctgcctgggctgtccaaggtagagcaagtaggagagtgacttgattagggatagtggaggggaagagcagcaggcagtggggtcagagtgatagccatg

SEQ ID NO: 87411 - DNA, 584 bp, Homo sapiens
gtaaagtacttacaacgagcacataggaaccatttaatcaatgggaaccagccctgcttctttccttttctctttctttatttcattttttaaggttttgagtgagaaataaagcagtgcataattacaagatttgctaatttaacaaacacattgagcatctactgtctgctaagtactgtgctgggtactggggaaatggccatgacaaaatggacaaaattatctgcctccatggaacttacattctaggagagrgaagacagacaatcaacaagataataagtcaattacatggtatagcaggtggagctgagaactgcagctgcaaacagagtgctggggcagtgggtaaggaggaaccattttaaatctgatgttcctgagaggaactgctgagatgcaaaagtgagggagaagatcacatggaggactagaagtccccggctggggaacagcaagtgcaaaggccctggggtggaggcctgcctgggctgtccaaggtagagcaagtaggagagtgacttgattagggatagtggaggggaagagcagcaggcagtggggtcagagtgatagccatg

SEQ ID NO: 87412 - DNA, 1324 bp, Homo sapiens
acctccaagagagtcccctccaagatgtgggtaggtcactggagttgtttggtcgagctcccactgctgtctgtaaaaagcaaaaagaaagttcagggctggggtataggctgagggcactggaagagcctcctctggccctggggtagcagctaggacctggatttgccttttctaaaaatagtaccggcttttctccaggccatattaaacttggagtggtcttgatacattcttctcctcagttctttacctacagccagtaaccaagtcctgttggttcctcctttccactctccctagcacccgcccctttctttctgttccctttgccgtgttcctaactgagaccctcacctccctgccacgggcaatacgctggcctcctgcctgagtgaactgactccagtttctgttactcctgcacatgcctctttcttcatgttccccaaccccagccctgacccttcaatgagtctcccttaccttcaagattaaagccaaatcccaccaccaatcttctgaggtcaccataatctggtttctactttccttacccttgtttgctccctccttcccagtccacacaaatcttcagggctaagctaattacctgccattattttggaagcctgagggccttgagctggtctaccccattaccacccactcccataccctcatggaatgctgaactccctcctttccagcagcttacatttccaaattcgttctctaagaccctcatcagttcctatctcctctatacagctttctctaaatgccctgtcttaaaaaaaaaaaaaaaaacaaamccttgaaatttacaaaagtaacagatgtgaaatgatacaaatatttaaacaaacgaataatctacccctaccttaagaatcctgccccttgccacagattccacactccctcctcacccacatgcaaataccaccagagctcattagtggtgaacagactcatatgtgcctttccacatctttttccatgttcatgccaaaatggaaacacattcacacacatgtggggctggtgtttgtttctaccgaaataactaccctattttaaaagtcctaggtggaggggaacaacgcacacgggggcctatcagacagtggagggtgtgaggagggagaggatcaggaaacataactcataggtaccaggcttaatacctgggtgattaaataatctgtgcaacaaaccccatgccacaagtttacctgtgtaacaaacctgcacatgtacccctgaacttagaagttaaaaaataaaaataaaacatccaagtcctatatgtcatctatgt

SEQ ID NO: 87413 - DNA, 1064 bp, Homo sapiens
tcttatatatatcatttctaatggtagccttatgtccggtgtgaatttgctctgcttgatttaaccaactggcaattagaagacactaggatttttctaatttttcatcagtttaaacagcataaatcctaggtacatctttgtgtgtatccatggtgattttccttagaataaatttctgaaagtagaatagtaggcacatatctgtaagtttttgcctttgaattgccaaatcccactcttggaacagctgtaatagtgtacacacttctgtactgctcatttcctcaaaccctcaccaactctgggtagtattaaaaacaaacaaacaaaaaacagcctaccacattggctgggtatggtggctcactcctgtaatcccagcactttgggaggccaaggagggcagatctcttgagatcaggtgtttgagaccagcctggccaacacrgtgaaaccctgtctctactaaaaatgcaaaaattagccaggtatggtggcatgtgcctgtaatcccagctactcgggaagccgaggcaggagaattgcttgaacctgggaggcagaggtgcagtaagccgaaattgtgccactgcactccagcctgggtgacagagcaagactctgtctcaaaagaaacaaacaaacacaaacaaacaaacagaaaacctccctcaaaaacaacctaccacagcaaaaaaacaaaacaaaacaaaaaacaaaaaacctaacaactttactaacctgattggtgaaaaaaaatggcaccttattttttgaaatatcatttctgtgattactgcaggtattgaacttaaaaaagagtttggtcatctctctctgtctctctctctctctctctctgtgggagagagagagctgcttatttttgtcattattcatttttttttttttaggattggtcaaatgaaacaagcaatttttaatgaatgacgttttatagaagtaatttcaatccaaaagaattattttttttctttttttataggttatttatttatttatttattatactttaagttctagggttcatgtgcacaatg

SEQ ID NO: 87414 - DNA, 1563 bp, Homo sapiens
atccaaatctgtgtggttccctggcctatttatgccctttctactacaaaatgttgttcctctaacaagtcactgcactttacttccatttgcctccatttcctggtctataaaatagaaaaggataaaaccagaacttgcaaatcactccggtctactctggactggctgcctggtcctatgcaagagcaggaggcaggaggcatagtctacctacctgcaggtcctcaattgtcactgcgtactctaagccctgggatctcaggaaggatttaaatgcctgcagactgacagatgggaccaggacatccacaggccgattgaaggaggagggagatttccagaaattgagctgaagggaacagaaatgaaaccaggttaaaggaccgttcaggtaaaatgcacaatgaggttattcttctagaacactgccaaaagccagggtgatccctgagaggctaggctctgccaagggcaaagtttgcccatttcacaattgtgtctggttggacctgcccaacaagcagtatctggcagagaccaagagtcataagtggatggcagctagaaggatggagcctatactgttcaagcatcccctctcccaggacaccacagctgtgatgtgctccctctctcccatcagccccctcaattgtataaatggcaagtggactcccacaggattatattcagagactcctcagaaataaaaataataatgccagtagagcaagagtcttctcccagcaaagttagaaaacactcaggagagctaaaaagaaccaggtaccttcaagttgtttgaattcactagttgactcaatttgctgatctcgtctccatttctgacattaatcctcaaaacttggtccctggggaagaagcgaaaaggaaaaaagagcaaaagataatgatgagctttcagctggcaaagaaacccccaagcctcctatcccagacgtaaccaggccaaaagaaaggaaatggtctagtctttggttttaatgtatggccattaaaaatgaggctacatggcaactatgaaaaagtgcttatggcataactttaagggaaatattaagtgaaagagcaggacacaaaattgtatgtatgccatgattataagtatggaaaaagcagatgcattggaagaaaaacagacagcggaaatataccaaatgctgacagcccttatgttcgggtcgtgggattatggatgacttacttttttcccccttgtatctgttttctgtaatgtgatcatattactttataatgaaaaacacatatattttacaggaaggaatgtgcctgagttacacgcaaagctaactcaagacataaagaagcacttcttcactgtcagggctgaggactgaaaccctgacggaacctccatgctggaaagaaaacrgcatctccatgctgggagggtgagctgtgccgtcttaaaacaggcgaggctgggtgctcgctcagtcccttccagctccagaaccccacacagaggctcgtttgggtggaaactgactatggcccatggtgctgaggctggatgta

SEQ ID NO: 87415 - DNA, 810 bp, Homo sapiens
gaaggggtgatgctgagtgcagccgcccagccagcagggtggaaggagaaacagacaaaaggctcatcaaaaacagcaggaccaaaattgagcaggctggcagaaccagttcttgcagggacactgccaggacacacgactccagggagctggctggagaggggcaggcctgtgtgctccacaaacccagagggctctgactcacacaggtaggaaagagctcctttaacaatggcctcagtgcgtgcacgtgtgggtacaaataaatgtagacagagcagagccatcgcctagtagaggttgtcccgcacatgctccatgatggtcttcagccccagccacgtctcctctgcagtggggatgatctggttagctggcaggaggaagccataggtcccggtatctctcaactcaaatgtgaatgcaaatttgatgccgttgtcataygcccagtcgatgctgctcccgctagctggatctgtaagtcggaggacaaaacactcttgaagcccagttccctcctgggttagatgggaaggggccaagagctctgcctgcctggggttccttaaggaatccagagtttgctcctcaagtcatcagtcctatgacaaaatcatcagcctgatccctatgtctcaggacatcctgcattggcctgaggtgcacactggtctcaaatcaagagatctgaaacccctactcccaccttattactaacgctgtgtccgtcctgtaagtccctcaaaaccaatctctatagagagtatagtaggcagcctccaagatagctccaatgatacttggatc

SEQ ID NO: 87416 - DNA, 1023 bp, Homo sapiens
tttttgacatatttaaaagaaaaaattttaagaaaacatgctgcacaaatacactatccatgatagtaatgatggtatcttaattgtcaagtaaaaccccatagaccagaagcctgatgttaaaccaggaagagaatgaactcctctgatactttccccaaaacttaaaatccttcacatttctttttttggcgatggagtcttaccctgttacccaggctggagtacagtggtgtgatctctgctcactgcaacctccacctcctgggttcaagtgatcctcccgcctcagcctcccaagtagctgagagtacatacaggcatgcgccaacacgccyggctaatttttgtatttttagtagagacgggttttcaccatgttggccaggctggtcttgaactcctgacctcaggtgatctgcctgcctcggcctcccaaagtgctgggatcacaggcatgagccaccacgcctggccaatccttcacatttctttggagggaatgctaaaataatgttttttgtttcctctgcactccaaatgagacaactgagaatagaaatattataattttaacagtattttaaaacccttttcattaaaatactagattcaccaactaagctttaagaagtactcttagctgggcatgtgtgcatgtagtcccagctaacagggcggctgaggcaggaggattgtgtgagaccagtttaaggctgcagtaagttatgatcacaccactgcactccagtctgggcaacagagggagacttcatctctgaaaaaatgcaggcaggtagatggcttgagaccaggagtttgagaccagcatggacaacatagtgggaccatgtctctgcaaaaaattaaaaaattagccaggcagctgggtgtggtgtctcatgcctgtaatcccagcactttcggagtccgaggtgggcagatcacaaggtcaaaagttcgaaatcagcctggccagcatggcgaaaccccatttctactaaaaatccaaaaattagccat

SEQ ID NO: 87417 - DNA, 1023 bp, Homo sapiens
tttttgacatatttaaaagaaaaaattttaagaaaacatgctgcacaaatacactatccatgatagtaatgatggtatcttaattgtcaagtaaaaccccatagaccagaagcctgatgttaaaccaggaagagaatgaactcctctgatactttccccaaaacttaaaatccttcacatttctttttttggcgatggagtcttaccctgttacccaggctggagtacagtggtgtgatctctgctcactgcaacctccacctcctgggttcaagtgatcctcccgcctcagcctcccaagtagctgagagtacatacaggcatgcgccaacacgcctggctaatttttgtatttttagtagagacgggttttcaccatgttggccaggctggtcttgaactcctgacctcaggtgatctgcctgcctcggcctcccaaagtgctgggatcacaggcatgagccaccacgcctggccaatccttcacatttctttggagggaatgctaaaataatgttttttgtttcctctgcactccaaatgagacaactgagaatagaaatattataattttaacagtattttaaaacccttttcattaaaatactagattcaccaactaagctttaagaagtactcttagctgggcatgtgtgcatgtagtcccagctaacagggcggctgaggcaggaggattgtgtgagaccagtttaaggctgcagtaagttatgatcacaccactgcactccagtctgggcaacagagggagacttcatctctgaaaaaatgcaggcaggyagatggcttgagaccaggagtttgagaccagcatggacaacatagtgggaccatgtctctgcaaaaaattaaaaaattagccaggcagctgggtgtggtgtctcatgcctgtaatcccagcactttcggagtccgaggtgggcagatcacaaggtcaaaagttcgaaatcagcctggccagcatggcgaaaccccatttctactaaaaatccaaaaattagccat

SEQ ID NO: 87418 - DNA, 733 bp, Homo sapiens
tcatgatctcattttcttatttaccccttatatgatgtttgttaacaatattgtgccatctcagcaaatcagtttatctagagatatctcttcagatgcaacctttgattgctaagattacagtcaactccatcatagctgaaagagaaacaggctattctcatttaatttaggtttctattttggccaaaattttaatattttattgaaatctaaaattactgaaatcagaaacagcttttgtcattggagaatgacaaatattcacctgagtgttttaaacatattgggccagaaataatgacatgtaaacatgtttggaaacatgttctgaaacattggacttcatccattccaaggatccattttgccaccactataaaagcactaactttarcaaatccattggcacagaataaccttatcaacaagatttccctcaaatggttccctattgtgtaaggatcttatcatattcctggatttattattcaaaaccctctgcagtccaacttccatctagctctataactcagtacttcaagcatacttaggaaaagaaacataactaagcaaaacaaagcaaatatatgcttgctcagtgtccctttgagaaaaacaaagtacattatatgatttaaaacaatgacaaatactatagtaaaaaaaatctttcaaataaatatacagatgctcctcgactttcaatgaactgacatcccataacctgtca

SEQ ID NO: 87419 - DNA, 838 bp, Homo sapiens
aacatggtgctggattcaaccaagattttacccaggacctcatgatacacgcattaacatcttaaaccacacacccaccagcaccatgacagtcccaagaacacctgtatgtggtataaaaatgggtggcaccacattttcaagaaatctccacctttttccaggaatttccatgaatatcccaccccttggtcaaagaaacccctaaaggtggaaaccccaaacctcttggcacatctctcttgagtgcacctgctctcctctttctggagtgtgtactttttgctttgcaataaatctctgtactttcactattttctgagtcatccttgaattccttctcacaatggtgttaagaatctggatactggcatgtttgggaccttccacagctcactggtatcagaaccactccccatgagatggtgtagacatgatctgatagagctgcaggctgtgggagcttgcagagcctggggaagtcaagccagtcttcayaaatgaggcaggatattcatgctggcagttctgggaggatagactagcttgagtctagctatagactcaagtcatgctagctatagactagcatggaggtgtgggggtgcaaggttgtgtgcaggggaaccgcgaggagtctgcgtagcctaggaataagcccataggccaaatctggctgaccacctgcttttataaataaaatttcactggactacaaccatgcgcactcctttatatacagcccatggttgcttttttcatgcacattcctttatatatggcctgtggttgcttttttttttttttctttgtgaggaagttttgctctttttgccca

SEQ ID NO: 87420 - DNA, 873 bp, Homo sapiens
ccctggcaaacctgtggttgctttttaatgacaatgtttagtaattatgacagagaccctatggctcacagagcccaaaacatttactatttggctatcttggtccgtttgagctgctataataaagtactgtagactggggagcttacaaacaacagaaatgtgtttctcacagttctggaggctgaaggtttgagatcagagtgccagtatggttgtttctggagatggtcctcttctgggtcaaagaccgccatcttctcatcataccctcacatggtgggaagaggatgagaaagctctttggggtcgcttttataagggtattgatgccattcatgagaactccacccttatgcccaaattgtcttttgaaagccccagctttggataccatcacaatggaggtcaagattttaatgtatgaattttgggggaatacaaatatttagtccattgcacctgcctttayacaaaagtttgttttgaccgctggtctagtgtatttcaagaagctatgctgggtgctcttcagttgtattcccatgtaataaccacagcaaccctgcagggaaccatgattgcccttactttacagatgaggatcttcaggctcagagaggtgaagtgatttgccaaggtcacacagtcagtgagaggaggagtcaggtatgtctgagttgaaaggaccttctccggactaactggagttactctaacaatggtacaagtaggctgaagccagatagtggagaatcgtgcaaacattttgatctttgaagaacagggagccaccaaaggctcttaagaaagacagtggcatgatcagactggttggaggctgtcccatccaacctctttgctggacgtggg

SEQ ID NO: 87421 - DNA, 873 bp, Homo sapiens
ccctggcaaacctgtggttgctttttaatgacaatgtttagtaattatgacagagaccctatggctcacagagcccaaaacatttactatttggctatcttggtccgtttgagctgctataataaagtactgtagactggggagcttacaaacaacagaaatgtgtttctcacagttctggaggctgaaggtttgagatcagagtgccagtatggttgtttctggagatggtcctcttctgggtcaaagaccgccatcttctcatcataccctcacatggtgggaagaggatgagaaagctctttggggtcgcttttataagggtattgatgccattcatgagaactccacccttatgcccaaattgtcttttgaaagccccagctttggataccatcacaatggaggtcaagattttaatgtatgaattttgggggaatacaaatatttagtccattgcacctgcctttatacaaaagtttgttttgaccgctggtctagtgtatttcaagaagctatgctgggtgctcttcagttgtattcccatgtaataaccacagcaaccctgcagggaaccatgattgcccttactttacagatgaggatcttcaggctcagagaggtgaagtgatttgccaaggtcacacagtcagtgagaggaggagtcaggtatgtctgagttgaaaggaccttctccggactaactggagttactctaacaatggtacaagtaggctgaagccagatagtggagaatcgtgcaaacattttgatctttgragaacagggagccaccaaaggctcttaagaaagacagtggcatgatcagactggttggaggctgtcccatccaacctctttgctggacgtggg

SEQ ID NO: 87422 - DNA, 791 bp, Homo sapiens
ctgtctctaagaagctcatattctggttagaagagacatgcaataataaataaggaaaacatatagtatataagatgacaagaaatattatgaagaaacatgaagcaggaaggggagatatcaggtgccaggaggaggatgagcaacattgggattgtcaatagagcagccagataaagtcttgctgaaaaggcgtcccttgaggaaaggcctggataaagtcaggaacaagccaagtaggtgtgttagcaaaaaaaaaaagtttccaggcagacagagcgaccaatgcaaaagccagatatcagtgaacaattacagggcacttaccacaagccagggtccattctgaatgctgaatatacgtcagttatttaagccccacaccagctcttgagggaggtgctgttatcatcctcactttgcagatgggaacactgaagagcacaaagactgagacacttgactacagagctgggactgggctgagacagctcagctccagaggccatgctcttaaccgttacatccttccacaagcgagggtcatgmcttagaaaacagcaaagctgtttcatctcactccactcccacagcacactccactctcctgtattgcactgaaaattcccaggaggggataagacaagacgtgcatacaggaaaaagcaaatgacaaatccaagagccaactgggagccccagatgtagggtgatataaaggtcctattacccagccttttgctcttgcggttctctctctccgcaaagcaccctctccttctcatccatcc

SEQ ID NO: 87423 - DNA, 665 bp, Homo sapiens
cccctactagaccctgacatgcccattcagtcacaggcagaaagggaaacagagggtaaggagacctggctggctctgccagagacagatcttacctgtcctgcttgccctaaaaaagcctggtgcctatgcaagggactgagaggtggctcctgcggccatagtctaggcaaaataacccatccactaataagkgaacatggcagaaatacagtcagcatttcctcagtcttgccaataaagccaactcttctgctcaccagggaggagacgtatgaaaggggcagagagacttggaagctttcatcctaactcactcttctttgtttttgttttgtttagttttaagacccagtctcgccctatcacgcaggctagggtgcagtggtgcaatcttggctcactccaacctccgccccctgggttcaagcgaatctcatgcttcagcctccagagtagctgggactacaggcacccacgaccacgcctggctaatttttgtatttttagtagacaaacggtttcaccatgttggccaggctggtctcgaactcctggcctcaagtgatctgcccacctcggcctcccaaagggctgagattacaggcataagcaaccccacctgaacacctaactcactcttgagaggccggaagtgatgctgg

SEQ ID NO: 87424 - DNA, 665 bp, Homo sapiens
cccctactagaccctgacatgcccattcagtcacaggcagaaagggaaacagagggtaaggagacctggctggctctgccagagacagatcttacctgtcctgcttgccctaaaaaagcctggtgcctatgcaagggactgagaggtggctcctgcggccatagtctaggcaaaataacccatccactaataagtgaacatggcagaaatacagtcagcatttcctcagtcttgccaataaagccaactcttctgctcaccagggaggagacgtatgaaaggggcagagagacttggaagctttcatcctaactcactcttctttgtttttgttttgtttagttttaagacccagtctcgcyctatcacgcaggctagggtgcagtggtgcaatcttggctcactccaacctccgccccctgggttcaagcgaatctcatgcttcagcctccagagtagctgggactacaggcacccacgaccacgcctggctaatttttgtatttttagtagacaaacggtttcaccatgttggccaggctggtctcgaactcctggcctcaagtgatctgcccacctcggcctcccaaagggctgagattacaggcataagcaaccccacctgaacacctaactcactcttgagaggccggaagtgatgctgg

SEQ ID NO: 87425 - DNA, 607 bp, Homo sapiens
catgtaatttgaatttttaggttacaagtcactttcaatgacagattaatttcccttgttttcattattcatctttatgaactttgcttatatctcactaatttttagtttttctcatttatttaataaataaataagtgtgaacatgttacctcatacatattagaaaatagggaatacgttatttctaactggttttattgaaacatttttaaagctctttgcaaattgcagttacaatggcatagttcgaacccaacttctgcttagttgaacctaaaaaatgttacagccactataatgtcttcagcaggtgggagtaggatagagaaaagatcagagtaaaaagagacagttacctttaacttaaattatagctcgtgtttttcacttttgcaaattttacatgcaaccatggatccatcctcctcaggcctattatagccttcaggggaagcttccatggaaataacttaatctggtgagatccccctgagctcaggaaggtagagatcccaagcctcaygcctcagccagacttatctcgaggaaccacttaataatgttttctatgccacaagaatcttgctgaataatctattttata

SEQ ID NO: 87426 - DNA, 737 bp, Homo sapiens
ctggtcaagagaaggaaactggggaaaattaaaagttcctccagttaaggtcaaattaaaaacccctggggaaatagtaaaaagaaagcaataccctattcctctaaaacaagaataggtttaaaacctatagctgaaagtcttatccacaatggactccttgagccctgtatatccccttataacactgcaatattgcctgtaaagaagccagacgggtcatacctgctagtacaggatctcagggctattaatcaaatagttcaaactacttaccctgttgtccccaatccttacactaacctggagaccaagcccttgtcaagagctggaaagagggaaagctcaagcccacttgggaaggaccttatctagtgctcctgacaactgaaatggctttttcagaaaagtatctttgcccttcctggataaataaaactgcctgtaagagtgactcttacaccaaatgagcatgaggcagtcagtggaagttctgttttggttggggagatgtggtctggaccaccaagtatcaaggcttgacctccccaggagacggttgcactaacctaaaaccytacatccactttaccaaaaagactactccctctaattgtcaactccaacaatgtaaccgtgtgcaaatctctaccactgtccccacctttaccaacactaactccactttaggtcacttctatggcctagtagctgatattcctggaatagaccctata

SEQ ID NO: 87427 - DNA, 390 bp, Homo sapiens
gatgctggtgtgctcagggaccctgagtggccactgcctccaggcccttcagtaaccagctccaggagaaaacatgttttaaaaatcttgactttgtatagctggttccagttcaaatttcatattcaaatgttggcctctttacatttccatcacttcatggatttctctcatcccgatttrggtcaactgccgtgtttacaatttgttttgaagcgcctttttttctagccttttcttggtttttgtttaactgtgaggcttttttgtatatatatattttagctgtcttccttccatctttcctttgcttgtgtccacctttcactaaacatacattcagcatcagttttatccaagaaataggaagccttgaaagacaaggaccct

SEQ ID NO: 87428 - DNA, 595 bp, Homo sapiens
tccagagggagaattacacacataaggtatgcccaggttaaggaacacggtaaagattttaactgcctaataaactgtaaatccctaaataaactcccagacaaggcagtaaaagctagacgtcaacatgcaaaaatgaaactagttttgtgagggkagggggagtatgggtaatttctgtttttcctaaaatacatatttaaagtggcagttcgacaatgaaaagaaaagtatggttcggtgattttttttcttttatgtgttccacttagaatgtgtgaacacgtggcgctgtagcctacattccttattcttttacttctaccttatagcttaaaattaaaaaacctacaacagtgattaaaactatatatttttttctacttgccaaatgtgtgtagatcaatctaagaacactggacattaagaaattttcttatgcacaagtggaatttgtcttctccttttaaaacacgttaaacatcttgaaaatgagacaactgggacatgaaaaatttatgagatggctttgagaataactgctgatcctttaattgattggccttcttccccaagccccttaagatcgcttacc

SEQ ID NO: 87429 - DNA, 595 bp, Homo sapiens
tccagagggagaattacacacataaggtatgcccaggttaaggaacacggtaaagattttaactgcctaataaactgtaaatccctaaataaactcccagacaaggcagtaaaagctagacgtcaacatgcaaaaatgaaactagttttgtgagggtrgggggagtatgggtaatttctgtttttcctaaaatacatatttaaagtggcagttcgacaatgaaaagaaaagtatggttcggtgattttttttcttttatgtgttccacttagaatgtgtgaacacgtggcgctgtagcctacattccttattcttttacttctaccttatagcttaaaattaaaaaacctacaacagtgattaaaactatatatttttttctacttgccaaatgtgtgtagatcaatctaagaacactggacattaagaaattttcttatgcacaagtggaatttgtcttctccttttaaaacacgttaaacatcttgaaaatgagacaactgggacatgaaaaatttatgagatggctttgagaataactgctgatcctttaattgattggccttcttccccaagccccttaagatcgcttacc

SEQ ID NO: 87430 - DNA, 837 bp, Homo sapiens
agagtctaaattgcacagcccaggcatttcttccttcttccctccaaccttcctctctaactctttgtcttaacacagccatgtatctttaagtgtgaagaagtccaaatctatagatttggaaaccaaaaataaaattcaaatcccactcaccaggctgtcatttgaatgagcctgctcctccgccagggcaccctaaaatttaacctgaaagactggttcatgccatgaagtgaagtgagggttgaacatgcctcattttatccctccagcatyaacatcaacacagtccttaagtctgataagaaacatttataacctattatctctaaagcctgctacttggaggcttcatctgcatgacaacatctaggcccccacaaccccttattgtaacccagacatttctttctatagataataactctttgaaccaagtgacaattagaatatgtttaaatctacctatgacttggctgccccacctctgcaccactgctttgagttgttctgccttttcggattgaaccaatgcaaatcttacttttattgatttttatgtctccctaaatagtgtaaaagcaagtcgtagccctcgacctccttgggcataggtcgtcaggacctcctgagactgtccaatggcgcatccttaaccttggcaaaataaagtttctaaattaattgtgacttatctcagatactttttggtttacagattacagattttctattcacccaaaagtatttttaaaatattgtgacatttttataatagcttatggctgatttttattttgtctatttacaactggctatgatcgttgtagtgagtca

SEQ ID NO: 87431 - DNA, 837 bp, Homo sapiens
agagtctaaattgcacagcccaggcatttcttccttcttccctccaaccttcctctctaactctttgtcttaacacagccatgtatctttaagtgtgaagaagtccaaatctatagatttggaaaccaaaaataaaattcaaatcccactcaccaggctgtcatttgaatgagcctgctcctccgccagggcaccctaaaatttaacctgaaagactggttcatgccatgaagtgaagtgagggttgaacatgcctcattttatccctccagcattawcatcaacacagtccttaagtctgataagaaacatttataacctattatctctaaagcctgctacttggaggcttcatctgcatgacaacatctaggcccccacaaccccttattgtaacccagacatttctttctatagataataactctttgaaccaagtgacaattagaatatgtttaaatctacctatgacttggctgccccacctctgcaccactgctttgagttgttctgccttttcggattgaaccaatgcaaatcttacttttattgatttttatgtctccctaaatagtgtaaaagcaagtcgtagccctcgacctccttgggcataggtcgtcaggacctcctgagactgtccaatggcgcatccttaaccttggcaaaataaagtttctaaattaattgtgacttatctcagatactttttggtttacagattacagattttctattcacccaaaagtatttttaaaatattgtgacatttttataatagcttatggctgatttttattttgtctatttacaactggctatgatcgttgtagtgagtca

SEQ ID NO: 87432 - DNA, 1027 bp, Homo sapiens
cttcagattaaatattatttactactggaaaaatctctcaccaaaaaatattaggtcactgtattcatttcctatttatcacacagtagcttaaaacagtacatatttattatctcacagttctggaggttagaagtccaaaattagttccaatgggctaataccggtgtctgcaggatggtttactgctggaagacctaggggacaatctgcttccatgccttttccagtttctagacaccacctgcagtccttggcccatggcttctttctcgcatcatttcaacttcttgtttccatgttcacatctcctactggtaactctgatctcctcttataaggatccatttgattatatagaatccaacaagataatgcattataattgccttatctcaagattcttaattgcaacaacgaagttcactttgtcatataaggcaatatttcataggttttggtattygaatatggacatctttgtgggggggggcacattattcagcctattgtagttgggtattatatgcttataatacttacagtattataaaaacacagttcattataaaacatcttataattctttgtatcatcaaaattatttatttgtaatagctttaacatttacttatctttcttgactgtattcttattctgtttgagtacactggagatatatatatatatatatatatgtatatctggcatatagagaatgaatatttttgggtaattgtcattttcatattttaaaagtttaaaaatatgttcaaagcacacaaaaacacatagtatacatttttaggtacattttatgaaacttgtattcagagacaatccttgtcacttttaaacctgcagctacatacctaccttttgatgttagtgtctgaaaaaaaaaagaatcaggcaaaaccatgtcgtatttaaacattacaaagagaatgtgcaagctgtcagagctgagtttaagttggagataagttttagttcactgaaggaggctagtggcccaggttgcaac

SEQ ID NO: 87433 - DNA, 1027 bp, Homo sapiens
cttcagattaaatattatttactactggaaaaatctctcaccaaaaaatattaggtcactgtattcatttcctatttatcacacagtagcttaaaacagtacatatttattatctcacagttctggaggttagaagtccaaaattagttccaatgggctaataccggtgtctgcaggatggtttactgctggaagacctaggggacaatctgcttccatgccttttccagtttctagacaccacctgcagtccttggcccatggcttctttctcgcatcatttcaacttcttgtttccatgttcacatctcctactggtaactctgatctcctcttataaggatccatttgattatatagaatccaacaagataatgcattataattgccttatctcaagattcttaattgcaacaacgaagttcactttgtcatataaggcaatatttcataggttttggtattcgaatatggacatctttgtgggggggggcacattattcagcctattgtagttgggtattatatgcttataatacttacagtattataaaaacacagttcattataaaacatcttataattctttgtatcatcaaaattatttatttgtaatagctttaacatttacttatctttcttgactgtattcttattctgtttgagtacactggagatatatatatatatatatatatgtatatctggyatatagagaatgaatatttttgggtaattgtcattttcatattttaaaagtttaaaaatatgttcaaagcacacaaaaacacatagtatacatttttaggtacattttatgaaacttgtattcagagacaatccttgtcacttttaaacctgcagctacatacctaccttttgatgttagtgtctgaaaaaaaaaagaatcaggcaaaaccatgtcgtatttaaacattacaaagagaatgtgcaagctgtcagagctgagtttaagttggagataagttttagttcactgaaggaggctagtggcccaggttgcaac

SEQ ID NO: 87434 - DNA, 1027 bp, Homo sapiens
cttcagattaaatattatttactactggaaaaatctctcaccaaaaaatattaggtcactgtattcatttcctatttatcacacagtagcttaaaacagtacatatttattatctcacagttctggaggttagaagtccaaaattagttccaatgggctaataccggtgtctgcaggatggtttactgctggaagacctaggggacaatctgcttccatgccttttccagtttctagacaccacctgcagtccttggcccatggcttctttctcgcatcatttcaacttcttgtttccatgttcacatctcctactggtaactctgatctcctcttataaggatccatttgattatatagaatccaacaagataatgcattataattgccttatctcaagattcttaattgcaacaacgaagttcactttgtcatataaggcaatatttcataggttttggtattcgaatatggacatctttgtgggggggggcacattattcagcctattgtagttgggtattatatgcttataatacttacagtattataaaaacacagttcattataaaacatcttataattctttgtatcatcaaaattatttatttgtaatagctttaacatttacttatctttcttgactgtattcttattctgtttgagtacactggagatatatatatatatatatatatgtatatctggcatatagagaatgaatatttttgggtaattgtcattttyatattttaaaagtttaaaaatatgttcaaagcacacaaaaacacatagtatacatttttaggtacattttatgaaacttgtattcagagacaatccttgtcacttttaaacctgcagctacatacctaccttttgatgttagtgtctgaaaaaaaaaagaatcaggcaaaaccatgtcgtatttaaacattacaaagagaatgtgcaagctgtcagagctgagtttaagttggagataagttttagttcactgaaggaggctagtggcccaggttgcaac

SEQ ID NO: 87435 - DNA, 1027 bp, Homo sapiens
cttcagattaaatattatttactactggaaaaatctctcaccaaaaaatattaggtcactgtattcatttcctatttatcacacagtagcttaaaacagtacatatttattatctcacagttctggaggttagaagtccaaaattagttccaatgggctaataccggtgtctgcaggatggtttactgctggaagacctaggggacaatctgcttccatgccttttccagtttctagacaccacctgcagtccttggcccatggcttctttctcgcatcatttcaacttcttgtttccatgttcacatctcctactggtaactctgatctcctcttataaggatccatttgattatatagaatccaacaagataatgcattataattgccttatctcaagattcttaattgcaacaacgaagttcactttgtcatataaggcaatatttcataggttttggtattcgaatatggacatctttgtgggggggggcacattattcagcctattgtagttgggtattatatgcttataatacttacagtattataaaaacacagttcattataaaacatcttataattctttgtatcatcaaaattatttatttgtaatagctttaacatttacttatctttcttgactgtattcttattctgtttgagtacactggagatatatatatatatatatatatgtatatctggcatatagagaatgaatatttttgggtaattgtcattttcatattttaaaagtttaaaaatatgttcaaagcacacaaaaacacatagtatacatttttaggtacattttatgaaacttgtattcagagacaatccttgtcacttttaaacctgcagmtacatacctaccttttgatgttagtgtctgaaaaaaaaaagaatcaggcaaaaccatgtcgtatttaaacattacaaagagaatgtgcaagctgtcagagctgagtttaagttggagataagttttagttcactgaaggaggctagtggcccaggttgcaac

SEQ ID NO: 87436 - DNA, 602 bp, Homo sapiens
cctagggtccaacaaggagggatctactaagtcaccccaccattttggatggatactgaaaacgttatacccccaggagtaaggttaactgaaactaaactcttcctatgtaaccagtctcgaagtcatctggatggaccagaaaatcttgaaatttaaaattagggctggttgcagtgggtcatccctgtaatcccagcattttggaaggccgaggcaggtgtatcatctgaggtcagcagttcaagaccagcctggccaacatggtgaaaccccrtctctactaaaaatacaagttagctgggcatggtggcgggtgcctgtaatcccagctacttgggaggctgatgcaggagaatcacttgaacccaggagatggaggttgcagtgagccgagattgtgccattgcactccagctgggcgacaagagcaaaacctcgtctcaaaaaatacataaataaataaataaattaattaattaaattaaattagattaaggagtaactgaattgctagtgtcctcgtgtcaagcataacctctgaaggaagagaataatatcctatcattaaataattacagtgagtaatttttcaaataagc

SEQ ID NO: 87437 - DNA, 602 bp, Homo sapiens
cctagggtccaacaaggagggatctactaagtcaccccaccattttggatggatactgaaaacgttatacccccaggagtaaggttaactgaaactaaactcttcctatgtaaccagtctcgaagtcatctggatggaccagaaaatcttgaaatttaaaattagggctggttgcagtgggtcatccctgtaatcccagcattttggaaggccgaggcaggtgtatcatctgaggtcagcagttcaagaccagcctggccaacatggtgaaaccccgtctctactaaaaatacaagttagctgggcatggtggcgggtgcctgtaatcccagctacttgggaggctgatgcaggagaatcacttgaacccaggagatggaggttgcagtgagccgagattgtgccattgcactccagctgggcgacaagagcaaaacytcgtctcaaaaaatacataaataaataaataaattaattaattaaattaaattagattaaggagtaactgaattgctagtgtcctcgtgtcaagcataacctctgaaggaagagaataatatcctatcattaaataattacagtgagtaatttttcaaataagc

SEQ ID NO: 87438 - DNA, 602 bp, Homo sapiens
cctagggtccaacaaggagggatctactaagtcaccccaccattttggatggatactgaaaacgttatacccccaggagtaaggttaactgaaactaaactcttcctatgtaaccagtctcgaagtcatctggatggaccagaaaatcttgaaatttaaaattagggctggttgcagtgggtcatccctgtaatcccagcattttggaaggccgaggcaggtgtatcatctgaggtcagcagttcaagaccagcctggccaacatggtgaaaccccgtctctactaaaaatacaagttagctgggcatggtggcgggtgcctgtaatcccagctacttgggaggctgatgcaggagaatcacttgaacccaggagatggaggttgcagtgagccgagattgtgccattgcactccagctgggcgacaagagcaaaacctcgtctcaaaaaatacataaataaataaataaatwaattaattaaattaaattagattaaggagtaactgaattgctagtgtcctcgtgtcaagcataacctctgaaggaagagaataatatcctatcattaaataattacagtgagtaatttttcaaataagc

SEQ ID NO: 87439 - DNA, 588 bp, Homo sapiens
ctgagcctggggggggcctacctgccctgagattaaggacttactgctcacaatgaccctatcaggttctgactacagagcgaagggggcagaaaatggacccttgtggggtctgggatgccaggtcctcatccctctttcctgctagggatagaaatctattagaaaatacagtaagaagtgacaacatagatgtaagcaatcaattttattcagttctttggaaatggctagaggggaaaattgagacctcttatctcccaccctaaatcaaattataaaggaacttccgcttcaggccttaatgaagtaattagcaccagactagctttcccaatgtacataactgtaaaattagaagtagaagtggttttcagacattggaaaacagatggtattagactataatctcagagaaaagagaaacttatgaggtgactctatgatcacccagatctcagatggaggacaatttcctgagtgtagagcaagaagctagagtccatagcagttctgctgagcttggatacagagatctgagtctgagtcaacyggagtactagaatctccaggccagggccctggaaa

SEQ ID NO: 87440 - DNA, 1683 bp, Homo sapiens
gcatgagccaccacgcccagccaagttgccataatcttaagtgtactgtgtaatgaacatttacgtatgtgtagacctgtataactgccacccagatcaggacatagagtattctcagcacctcaaaagtccttctcatactcccaatcacagcctccttaaggcttgattgtaggttagttttgcctgtttttgaactgtaaataaaaatagacttatttagagtgcattagttttatctgactcttttcactatcattttttcctttcatttttcacagtgccagtgacaactgtatctgttgtccttgagaatgtctcacattcaggatttgtttttttttttgctcactggtattgtcttttaacttgttccactgactcccttatttcttataaattggaggttaaccaaaagggtcttgaatatcatcaagttaatgtttttccccaaggatgcttctttggtggtgctgtgtacttcatgttgcattccatcaaaagttacacaagagtctgactgccccattcttcgtgatgctaagattgattagtgggttcaagttgtggcagcgtaatgtcttcgttagaatgtttctcattgatttttttgtctaatgttttcaaatatattattttcttatgcattgaaaaattatgaattttgtaattatcttatttcttctgtacttatttcctggaattcttatgtaaaaagcacttctcctcatggctygttagtacctttgaaatactgttcattctggaaaagcaaaatgatgcttaattctttaattttcaatgacagttttcagaatatgtgggcattggtgccctagttattgtcaattgtgactaatgagttttacttttattttatttaggggctacatatattttaatattgctatgaactcgtgtttaaacattttattttcatgtgttctaatgaattgcagggttttgaaaatattctaattgggccaatggggaaagctatacaagaaggtgttttaagagtagttttatattttatccctggtatctccactctgaacacttattctctctgtaggtaaccatttgtggtggcttcttctttatcatttccgtgtttcttttcataaataaaagcacattgtatgaaattgtgtgtgtatgggggtggtggtgcagtatatatgctatttcagccctaggcaatgggaattaaagtgatttagccaagatgacaaaaagatgacatggtagggcctgaatttaaacttaggaatctgacttctgagcttgggtttttaaccactctgctctacttatggcagtcccattgactcccaacccaaggaaaggccaaagaggagacagttgtgattttgctactcttagagtaatacgtgcaaaactaatctgaacacagatttaacagtggaacttgtttttaaaataattgcagaaatgctttgtgagactgcatctgagtaaacttgtgccaagaaaatatatacttcttgattttctttcctttttttctcttttgtattttgcttgtttgtttggttcacattttctaatttggcttagcagtattgacttaatctgctggtaagaaacagtgagaaaaacttattttaagtgctttcagatgttgcaattgttattgcatgagaaatttgtaaaatggaa

SEQ ID NO: 87441 - DNA, 517 bp, Homo sapiens
ggaccaatagctacaacagcatctggagctctagtatccctatttcccatctcactcactaactcattaccagaactaccatcacgctcaatcctgaacaataagcaaggcatgataaggtatcttgatacatctgtgctggatcaataggagaaaaactagtagggttaaagataataagaagtggttcttactctgtgtgtcttaggcatgatcctggtggaaggatttatgaaccattaatctaaatggcattatgctttcaacttttgacatatagaacgtgagagatttctgctgccttctaaytggtatcccttcctccaatctctctttgtatgtcatctattctctacactgctgctagacttactctttttaaaacttaaatcaaatggcttcccattgcctattggaaaaagtcagaattccttggcttaccattcaacaaaattcacaatctggtttcaactcacctttgcagattcattgtccatatgtctcttcaagttcaaca

SEQ ID NO: 87442 - DNA, 1487 bp, Homo sapiens
  misc_feature (1)...(1487): n = A,T,C or G
ctggtggcgagaaagcggacgtccggggcaggaggggccagcgacctgaggtccggggcaggggttggggcgggaaccccgcagcagcaggggaggggctcaccgcgcatgctcccggctccggatnggcgcgaagccggcctttgtttctttcccacccaggagccgctgcggtgggggaagggctcttctgagcgctgctcttcagctgggggaagggtgcgacctgcccgaccccacagtgtggccgcccccagagaacagaggggcgcctcagagggaaaggtcttccgctaccaggccccgccagggaactccagggaccccgcagctgcgcctcccgcccctccccacacctttgaccttgtgctgccggagaggggtcaagaaccgcaggcaccaaggggtcttgctacycagacgcagccggcggtgtcagaggccaggctcccgggacccgaggaatgtagaaagcccccactcagccaggtgggaataaaggagcctcgctccccgggaatggaacttccccaccaactctggttctagcccagcgacagggctggaccaggactgggcctgcagcacaccgcagcctcttaggaaagtccatccttctgggaaattcttgagggattgagaagagtaaggacgccacgtgacccggcttccttttctttttgtactttctgaagcactcggatggatccactcccccactgtaatctcttaaaccctcaccttttaagaaatagtggtggccgggcgcggagcttcatgcctgtaattctagcactttggagggccgaggcgggcggattacctgaagtcaggagttccaggctagcctgcccagcatggtgaaaacccgtctgtactgaatatacaaaaattagctggacgtggtgtcgtgcgcttgtagtcccagctactcgggagcctgaggtaggagaatcgcttgaacccaggaggtggaggttgcagtgagccactgcactccagcctggtgttaaccttctgctccccagtcctccctcccagcactgggcctgccctggcctgttaaagatcaccagcccacttcttccactttccatgactgttccaacatctagatttcctacgcctggaaatgttccacaccagtagtttcattctaatgggagcctctaattttttcatgcgcatgttggggctagccagagactactaagtaaatgtcccacatctttaaaaaactcagtgctggtttcctattcaacaagccacttggcctcccaggaactggcactgtgggactggttgtggacatagtgtcactctctaaggattattgcaggttgaggtctcacagaaaccagaactgcacagcaggcagccctcataggaggggacacaggtgagcatcgttgctgtggaatgctaacccagcctcatagcttctaggtaccaccttagcaagcctgtttttctcacccactgggtaa

SEQ ID NO: 87443 - DNA, 1698 bp, Homo sapiens
gtgtgaaaagactttcgagtgacccaaaaatcttaaattagaggctccctgttttgtggctttaaaataaaacattgtccttatgtctaatgtccttggttctcaagagggagttgttttgtgccgtatttcaaagcatcacacttctacatttccgtctgagactcgccttttggacaggaatgcaccactgccagcagtcttggctttggtgggaagaaggtagaaggagctcatcaggttcatagaggaggaaataccaattcttagaaataaaatggttcataagaggtagaccaaaggtcatagagctctgttggctttgttcagtggcattcagggaatgaagcctcaatgtcttgtcacatttagggtgggaagagaaaatcatgttggaacagctgtgcttaaaacataagcatatcatcttgggggtgaagttggggagtgatctaagattagcattgacttgaggactatagagaggaaaatgccacataccagaacacactgtgggctaaggcatttagccagatggatcacgaatagtaatggggtcttctggggatttcaagactgagtatgaagcacgccagtgactaggggctggtggaaagaaggtaggtgatagaggagcagaccctccaagtcacgagaccgtagcatggtgtgagctaactttccctatctagaggaagtggaagtctgatgtgctagagagatatgcctggatctgttccatcttgaggtcagattgcccagagagagacacaaagatttccaatctagagtagacatgaggtgatgccccaggatcctcagctgattgaaccccgtrtcctctagtcattattttataattcaatggaaaaaataatcagtttttcacaatttgatatgtagaccactttcagaaatacatatggtaagcaagatacatttaaattaaaaattattcacttccatgaacacataaacacaacagagaaaagatagtaattgcaagcaagcaaaccatccaaatatatattagtgtttaatccatccatggaatgcaatatccctgtgtcctctctggtgttgagtatatgagtatttgagatttttgtaggagaagactctattcttgcattcttgattctctcagaggcaaggtttttcaagtgtggattctagggcctcttagcccatgtgaaaaaatactagttagtcctgaaatacaaagcaatttaaagttgctttaaactttaaatttttccctttaaaagggaaaaacaccccctacagcccaagtttatgaaggctaaatgcatccctagtgaccgtttttttgctgggtgtgctcaagtatgtgtaggtttatttgacattgccctggaggtagagatgcatctcccatatgccttatcttcgaaaagtgctgttacgtagccatctcccaattctgggagcactcgtgtcaatctgtaatgaaggggcttcgaagcctgccattttgaggtctagcctcactaagcagaatactccattaggaatctttgtagtgtgttcggttttctgtcccactggctcaatttagaaagggcatagaagaatacttccttttttttgttgatacagaaagcgaccccctggttatctgcctgaggacctgtaatgagtctgtggtggatttacttctaattaagttactaagaa

SEQ ID NO: 87444 - DNA, 914 bp, Homo sapiens
gatggagaggcctttgatcataggctgggttgttgtagaacttcctgattgcaaagagcagacaattacttttaagagagggtgttgggggtgtggggaagtggggaggtagctatcgaactgtgagatttggttattatctagtatgccatgtccttggatctggctttctgagatgacttttgttcacagtaaaatcttacatgttgtggctaataaaaaaaaaacttgcttcaagactgctgtagagacactgaatctaaactgggcaccaacattgtcacccacagagagagacttgctagaaacaagtgaggaagcatctctagcaattttgtggaggttttctttaagcttctagcaactgttgctagtgtcactagattgctgtttttagaacagttttagggatttccatcttgcttcctacccagctctttctcttaatttttgaaatgccaagagcttagtggtagaagtctgaacaactttttgttttttttaaaagaaggtcttggcttggctcttttttttttttttttttgagctggagccttgctctgtcacccagactagagtgcagtggtgcgatcttggctcactgcaacctctgcctcctgggctcaagtgattctcgtgcctcagcctcctgagtagctgggattacaggcacacaccaccacgcccagctcattttcgtatttttagtagagacagggtttcaccgtgttggctaggctgctctccaactcctgacctcaggcgattcacctgcctctgcstcccaaaatgctaagattacaggcgtgcagtcatgcctggtttacctcttgaatatatatatatttatatctagattttcttctataaacattaattcaactattcttattttaggaaatgtagaaattata

SEQ ID NO: 87445 - DNA, 914 bp, Homo sapiens
gatggagaggcctttgatcataggctgggttgttgtagaacttcctgattgcaaagagcagacaattacttttaagagagggtgttgggggtgtggggaagtggggaggtagctatcgaactgtgagatttggttattatctagtatgccatgtccttggatctggctttctgagatgacttttgttcacagtaaaatcttacatgttgtggctaataaaaaaaaaacttgcttcaagactgctgtagagacactgaatctaaactgggcaccaacattgtcacccacagagagagacttgctagaaacaagtgaggaagcatctctagcaattttgtggaggttttctttaagcttctagcaactgttgctagtgtcactagattgctgtttttagaacagttttagggatttccatcttgcttcctacccagctctttctcttaatttttgaaatgccaagagcttagtggtagaagtctgaacaactttttgttttttttaaaagaaggtcttggcttggctcttttttttttttttttttgagctggagccttgctctgtcacccagactagagtgcagtggtgcgatcttggctcactgcaacctctgcctcctgggctcaagtgattctcgtgcctcagcctcctgagtagctgggattacaggcacacaccaccacgcccagctcattttcgtatttttagtagagacagggtttcaccgtgttggctaggctgctctccaactcctgacctcaggcgattcacctgcctctgcgtcccaaaatgctaagattacaggcgtgcagtcatgcctggtttacctcttgaatatatatatatttatatctagattttcttctataaacattaattcaactattcttattttaggaaatgyagaaattata

SEQ ID NO: 87446 - DNA, 960 bp, Homo sapiens
tccactaatactgaagttctagcttaactactaaagtaaaaactcaacttttttctttctttctttctttcttttttttaagacagagtcttgctctgtcacctaggcaggagttaagtggtgcaatcttggctcaccgcaacctccacttcctaggttcaagcaattctcctgcctcagcctcctgagtagctargacgacagatgtgtgccaccatgcttggctaatgttttgtacctttagtagagatggggttttgccatgttggccaggcttatcctgaactcctggcctcaagtggatccacctccctcagcctcccaaagcgctgggattacaggcatgagccaccacacctggcccaaactcaactatctttctatggctttacaaagagttggttttcctgccatgtatatttcccaggtagttccaccttgtctctattctctaatatgttttatcttgaaatttcaaacatagttcttgctcttcaacatgtcttgcttctattcatcaccaagggctcttcccaaactcactgtatctttgagtccataaataacctgatccccatctcaactctggaaatctgatttcacttcttcctttaaagataatataaaatcaccttttaacttttagttcaaccatatataggcttccatattctccaagcatgtttttctctctctgaacattcctcatgttattatatttataataaaaagattgaaaaatttattaaataattactgtatgccaggtattttctatgcagttgataaattgtaactaatttattcctaacacaaccttcgaatgtaggtcctattattatttcttttttgcagaaaagtagcatgaggcccacagaaacagagtaacttagaattgagcctgagagtatagttccagggccctagctcccactcactgagctctaatgacttccattg

SEQ ID NO: 87447 - DNA, 850 bp, Homo sapiens
tttggaataagccccactatttttaaatccttaaaggtgaaaagagtaagtgtttctctgggctaataatactttactgcttaattgacccacaggttccgcatcccccaattcaaccaaccacggatggaaaatatttggaaaaaataataatacaaaagaaatgaagcaataaaataactattcacatagcatttacattgtagtaggtgttagaagtaatctagagatgacttaaagtatatgagaggatattcataggttacgtgcaaatactatgcctttttatataaggaaattgaacatctgaggattttggtatcttgagggaccttggaaccaatccccctcagacactgagggacacttgtatgcttttttaatggggcaagtatcgatcaatatgcagccactggggccagggagcagtagccattcctgctaaagccagattttcaggcacaaacatcscgaggggtgtctgacaggatcatttccctgtgattcttcaggccaatgtgctgattcatgggcaaacggtctctctaaagtggagcacacctgcattatgtcctgcagtagatgcagctcgtttcaaatgaaacctcagtgaaaatggccttggtgacaatgaacactcagacatcatatcggtgggtgaaagatgctgaaggcaggacatgggatttgagtgattgcactcccagcacgtccatgtttacagagcaacgcaaacgtggctattaacacaatccctatctagagggttttccagaactgttatcttcccatgaatcaatattctatagaagagaaagtaagatacagggaaattaaattacttacccag

SEQ ID NO: 87448 - DNA, 624 bp, Homo sapiens
aattcctaggccctactgccctgtgtgtcctaaagggatcatgttaacaagaaaacccaagtcttggtccctcccatgaggaatccacgggaaactgatagactcgtgaggccatccccttttgctggctctgtttcacacgctgtcacttggcaagtctcacccagtctctcttrgaagcagttgttttgcttcaccttctgcctgaggccttcctgggagaaatcgaccatgaattctagcacccagtccacgcaccagtatctgagaaagacactctcctgccccctgagacacttcctcacccaagtgcctgagcaacatcctcacagctccagccactctcctgcaaatggaactcctgtggagcctgctgtggttcttcccacctgctcaccagcaagattctgggtttaggctcagcccgggacccctgctgcccatgtttacagaatgcctttatacattgtagctgctgaaaatgtaactttgtatcctgttcctcccagtttaagatttgcccagactcagctcagttaattttggttacatccatctgtgctctgcggaaacttcaccagagaccattgtccgctgcatcggggctagctccaatccctgccc

SEQ ID NO: 87449 - DNA, 1249 bp, Homo sapiens
atgtaaaataccttcaccttagccactgggtgacgcatctcagtatctaagaagaatactgtcttaccccttgagaagaggaatttgtgtgcacctgagcatacctggcaggaggactgggcagggagcagggagataaagactacacctgtctgtctcataagagccctcatcagctggcatcctcctcagacctttcacatttctcaacaccacccgtatgaacagacaatgcaggtctctccccaattctatggatgagaaaacggtggcccagagagattacgggacttgccatggccacacaggaagtggaagagctgggactagaactcaggccttgtgactcttgattcagtgccctctccaacttactgcttatccagtggtcccctctggacagctgtaaactatcaagatgaggttgtgtccttagagccaacactgccaggcatccaggcatctctgcatggtacaggcatcagattcactggctttcccaccaccacctaggaaggcagagctttgggccctcatgccctgagattctcagcagcactgctgtcagtgggggacacgtggcatcacactttgggaagaggcacagcactggttctcccactggaccttcctgaggcttaaggagagaaagttgtatgcatgcaaaggagagggactttgcaaagggagtctgggagcccagcacttggcaagttcaaggacttcgggggcaggagatggcaggagtgaggagtggtgtgtctctatctctccctctctcccctccccctttctctctccctctctcaaagacaaaggcatctctctcctttgatgatgaaagatgattccaatattattacaaagaacatagtccagcaaggaaaggcagatcattctctctctctcactacccccaccccagagtgccaccctcggagagtcagaacaggagcctgtccccaagttctaccctctaacagcaggcactacctgagggacccccagaacggggagggggcctgtccttggaagagccacttctcagggccagagtcccaccctcacccaatctgctctttcaacccttggccccscttttcctctgtgtggctctcgttgccaaccaggcacacccaggcagcaccccagtcatggtcctccccgcctcccatacacccaccaggcccaggtgagctgtccttcctgggatccttggccgatttcaaatgtccaattgtggccctct

SEQ ID NO: 87450 - DNA, 904 bp, Homo sapiens
aaaaaagctaactagctgttgctcaattaatatatcttgggaactttccaagaatggtgcttcccagaaaagtctgaaatacatgaattcatattttaattttccccccagacttttcagtttgcattttcaacagtcttgttgaatgcttcccagcctatgtttcttggtcctccttcttctcccctgctattccctgctaagcctctctctgtttatgtgccttcttcacaacacctgcttayagaaaattaacatggaagtcctggaaaacccttccattttaattaacatggaaggtgaggtcaaaaagcattggaaaaaagagaatcagaagactttgcagttttctggagctcacctacctgagattgcctatggactataagacaccttgagtcctccaaaactggctgatgtggatataatttttcacagggctctcaaacattccccggtgaataaataaactctggaaactgcaattctaatcataaaagtctctttctgtaacagtccagaatggctggggcataggctagggcatgggtgcaagaataacagaaatcctctggagagcaaattatttgggtaattccaggtccccgatgttcactgttcccatatacacaacagccctggagtccttcactactgtggaaaaaaaattagtttgcattaaaatataagcaaagtattagactgcaaattcagtcttccaaaggaaatttgggatgtaagcaagatctctacgttttctaaaattacacaatgactgcaaaaaatgaggttataatttggagagtaaaattttgcttgtatcttgaaaatgtaaatgatccttaaattccttccagaaaaagaaaaagtcaaccttattacaatgagtacagtaatcgcaaat

SEQ ID NO: 87451 - DNA, 428 bp, Homo sapiens
gcccccaaacctctcactcaaaatgtataaacacacacaaacaacgagaataggacaatagttaaaagtagactagagagttaaacaaattaattagggattgaaagtgaactaaatgagctgaatctgtcttagcaaagcagggattgctaacaccttaaagatctttgaaatgaataccaaagagagataaamtgatttctacccacagaattccagaaagtctcagatactagaggcaccaagtatcatggaagtagagtgaggtgaggggctgaaaacagggggattgtttgaaaatctgttgaaaataaaatgccgttgtacaatccaagtaccacacttctctacccgacgtgcattgaactaccagatgataaagcctctctctaccttcagttgaaacaggagaagtattggttggtgca

SEQ ID NO: 87452 - DNA, 2176 bp, Homo sapiens
tgtagaaatctaagttgtcctgagttttattgtacttaatatcagacttaatttgtaatttcatgagtaactcagtctgcttcacttattcatcgttttaacattcttttactgaaatctacctttcaacttctccattataataaaagagatattttttagaaagatcttttttgctagagatacttttttctggccaaatccaattatttccctgtgagacatatttaacaactgactacacttttcttctttaaacttactcatcattggccctgcaccctactcttccatgtctctttttgtatctctgattacttttttcaaatcaattacagtatcggtcaaatattaacccaaatttacatcaggtatatctcacaccaacatggcacatgtatacatgtatacatatgtaacaaacctacacgttgtgcacgtataccctagaacttaaagtataataaaaaatatatataatatatataaaaagaaaaaaaaattaacccaaattttaactctgatatctcttaagggtttgccttcttcctctgttatatctatcattctgatgaatgcacaggcaaacagagttttaattactctttgcattcaaatatttatcaagtacatgtgaatatttcccaaatgctttcttcccccagctgtctatatagtaaattcaccaatggcagcaacttaacaggtaaaaacaaagttatctttctgcatgactagaattactctttaacctgtgagctactgtaaaaataaaaactcaaactaattatcttgaaaattactgatggcatttttctctctgtcatcaatccttatacamaaaataattttctttcaataattttctatgattcttgaatactatttatttatatatgtccttgaacgtaatcatctttgtaattctatctttggggtactctagtagtcttcacatatttcaactctagtctttacctatttcaagttatcctataggcaactcaaagtagtgttcattaaatataatttcatgcatcaattccccattcatgaacctggttcttttttcacacatacaaatattttattttactaatttgttccagtccaattcctgtcaaaatttactcttccaatgattctattcaatgtcaaaagattgatttttctttatttgttcatctaaacactctttgtaattttattattgcaattaaagataataaattttggttttgatattgtggcattttgcatctgtgtattttctctcacaatgctggcactagctgaattacttctataagattttcccaagacagaaatcacctacacatatatatactcacacatatgttctacttcagaatttttcactgttgtgcataagtgagttgtttaatactttaacacattacttgtctattaattaaaagtaagcataagataagtatttaatattattgggacaccattcattgcaagaatcagacttcaactgctagcataagtaaatgacgggcaggatatattttaaatatacaaaacgcaatcttatagacattcaaggggaggatacatggtacatttctgtgttataaatgttctgtggaaaataaaaatgagaagtaaagatgaaaataaaatattgggatgactacttatgccttttgtggaatcaagttttctgggttttgctttgcttttcatgtctgccgcattctacttaaagaatggcttccttttcttacatctaagaatacacatagactaaaaatattgacagtcttaactttatttggtttttcagtttaagttctgaccacatacctatgacatatgtctcaaaaaaaaggtaaacagaaatatactttgactgagcccagcctctggattcatttacaagaaccagtcacaaatgactggttcagtcatttgtaatcaaagacagggatatttttgcaatagcagtggtttcttatgcccaagtccctcaagaaatgtttcagagatagggtacaaggaaattttaaagggaagaatatgtgctaggaagatcaaaatgtatctacttagagctgtcttcccagactaatggtataaaaactcaccttaaaatttacttatttccaaatatctgagacattacaaatttgctaagattatttataga

SEQ ID NO: 87453 - DNA, 2176 bp, Homo sapiens
tgtagaaatctaagttgtcctgagttttattgtacttaatatcagacttaatttgtaatttcatgagtaactcagtctgcttcacttattcatcgttttaacattcttttactgaaatctacctttcaacttctccattataataaaagagatattttttagaaagatcttttttgctagagatacttttttctggccaaatccaattatttccctgtgagacatatttaacaactgactacacttttcttctttaaacttactcatcattggccctgcaccctactcttccatgtctctttttgtatctctgattacttttttcaaatcaattacagtatcggtcaaatattaacccaaatttacatcaggtatatctcacaccaacatggcacatgtatacatgtatacatatgtaacaaacctacacgttgtgcacgtataccctagaacttaaagtataataaaaaatatatataatatatataaaaagaaaaaaaaattaacccaaattttaactctgatatctcttaagggtttgccttcttcctctgttatatctatcattctgatgaatgcacaggcaaacagagttttaattactctttgcattcaaatatttatcaagtacatgtgaatatttcccaaatgctttcttcccccagctgtctatatagtaaattcaccaatggcagcaacttaacaggtaaaaacaaagttatctttctgcatgactagaattactctttaacctgtgagctactgtaaaaataaaaactcaaactaattatcttgaaaattactgatggcatttttctctctgtcatcaatccttatacaaaaaataattttctttcaataattttctatgattcttgaatactatttatttatatatgtccttgaacgtaatcatctttgtaattctatctttggggtactctagtagtcttcacatatttcaactctagtctttacctatttcaagttatcctataggcaactcaaagtagtgttcattaaatataatttcatgcatcaattccccattcatgaacctggttcttttttcacacatacaaatattttattttactaatttgttccagtccaattcctgtcaaaatttactcttccaatgattctattcaatgtcaaaagattgatttttctttatttgttcatctaaacactctttgtaattttattattgcaattaaagataataaattttggttttgatattgtggcattttgcatctgtgtattttctctcacaatgctggcactagctgaattacttctataagattttcccaagacagaaatcacctacacatatatatactcacacatatgttctacttcagaatttttcactgttgtgcataagtgagttgtttaatactttaacacattacttgtctattaattaaaagtaagcataagataagtatttaatattattgggacaccattcattgcaagaatcagacttcaactgctagcataagtaaatgacgggcaggatatattttaaatatacaaaacgcaatcttatagacattcaaggggaggatacatggtacatttctgtgttataaatgttctgtggaaaataaaaatgagaagtaaagatgaaaataaaatattgggatgactacttatgccttttgtggaatcaagttttctgggttttgctttgcttttcatgtctgccgcattctacttaaagaatggcttccttttcttacatctaagaatacacatagactaaaaatattgacagtcttaactttatttggtttttcagtttaagttctgaccacatacctatgacatatgtctcaaaaaaaaggtaaacagaaatatactttgactgagcccagcctctggattcatttacaagaaccagtcacaaatgactggttcagtcatttgtaatcaaagacagggatatttttgcaatagcagtggtttcttatgcccaagtccctcaaraaatgtttcagagatagggtacaaggaaattttaaagggaagaatatgtgctaggaagatcaaaatgtatctacttagagctgtcttcccagactaatggtataaaaactcaccttaaaatttacttatttccaaatatctgagacattacaaatttgctaagattatttataga

SEQ ID NO: 87454 - DNA, 584 bp, Homo sapiens
tgtagagctctttaggatctgtgaaatatttttacagctgtgtcccatgtaacctcacagcattcttgggaggtaagtaggactggtttcttggcccctttaagataggtgagtaaatcgaagaacagggtagcaaagtgacttggccatcaccagattgagaactccaagccaggtctcttcacttgtagtctagtgcaccttcctaccccacagtgcaccaggctgggcccatccagggactccagcctcagtccctggagaaaggaaaatggacctgcctctctttacaatgggcttgtgcaacagagaaagtcctggtcctgatggtttgcaagaagtgggtatggctyatttggtttcttgcctgtctctaccactagaaagtgaggaagtgagtggaagaagggacattggtctgttttgtttactgtgtttccccagtgactgaaagagtgcctggcacatagtatgtgctcaataaatatttgataaatgaattagtggatgaacaaatgaatgaagcaacctatctcaggactgaggctcctccatatccagacaacatctaatagtccttctct

SEQ ID NO: 87455 - DNA, 922 bp, Homo sapiens
ccagaatgttctgaatcatggacaatgtacgtttgtattcagaattgtttctgaagcatatatctagttgagaattgattttctaaacagagaaacacaggacagtgaccccaaatgggtgctgagacaaggggagctactgacttagacctaatcaccgtttttayatgtttgttgtaattaaagtctaaaattactgatactgatcttttttctgtaagagaacagaaatctatcaacaaaataatatctacagcacctgctagttctaaaagttgagcatatttctagtagacaaggaagcagtagtttctccaagaatatggctctctttggcatccacatttaaaaagttcccttgccaagagcctgaagagttggtctttagctttttactttatggatgaattctgggaatttggtgaaaatattaatcatatcacgattccaccaaaataagtgatttggttatatttaaaacttcacaagaacttacgactgtgtgtatttgaaggttacctatgtacagacacaaacatatgtagtatactcaatgggacagggtagagatgtcagctgaataaacattcttatccaaataataaaatactagcctgtcaaattttatcagatgtctatgcttttgcatcagctcccaatcatccctacaccaccatttctcaaaacgtcacacattaaaatataagccatttgtactgcaatgtgatgtcgtaacagctttaagactcagcttgaaccaattacttgctatgtgacctccagctaatttcctctctgtccgtcagttccctcatctacgaaaagtagatgatgctcttccctctatcttataaggactgttttgcagattaaagtttgatgatggtaaagtgcttactctagtctctgcacactccagaga

SEQ ID NO: 87456 - DNA, 922 bp, Homo sapiens
ccagaatgttctgaatcatggacaatgtacgtttgtattcagaattgtttctgaagcatatatctagttgagaattgattttctaaacagagaaacacaggacagtgaccccaaatgggtgctgagacaaggggagctactgacttagacctaatcaccgtttttatatgtttgttgtaattaaagtctaaaattactgatactgatcttttttctgtaagagaacagaaatctatcaacaaaataatatctacagcacctgctagttctaaaagttgagcatatttctagtagacaaggaagcagtagtttctccaagaatatggctctctttggcatccacatttaaaaagttcccttgccaagagcctgaagagttggtctttagctttttactttatggatgaattctgggaatttggtgaaaatattaatcatatcacgattccaccaaaataagtgatttggttatatttaaaacttcacaagaacttacgactgtgtgtatttgaaggttacctatgtacagacacaaacatatgtagtatactcaatgggacagggtagagatgtcagctgaataaacattcttatccaaataataaaatactagcctgtcaaattttatcagatgtctatgcttttgcatcagctcccaatcatccctacaccaccatttctcaaaacgtcacacattaaaatataagccatttgtactgcaatgtratgtcgtaacagctttaagactcagcttgaaccaattacttgctatgtgacctccagctaatttcctctctgtccgtcagttccctcatctacgaaaagtagatgatgctcttccctctatcttataaggactgttttgcagattaaagtttgatgatggtaaagtgcttactctagtctctgcacactccagaga

SEQ ID NO: 87457 - DNA, 557 bp, Homo sapiens
cctcaactctgatcttgtaacctaaccatcagcagggaaggctgatgtagcaaagagaggtgaggctctgcattgcccactgtactttctctctctgagcccacatggcagctcatggtccttctcttactactatcaattaattcgagttagcatctgaaatgacatctacttgccatcctaaaatctaaatttttggttctcacctctggctacaaatcagaatcattgaagagcytttacaaaatacaggtgtcgaactctacccatatggattctgatttcattgttctgggataagaacgaggcattgatgtattttaaaagctctccaggtgattctaatgcgtaagcaggattgagggccactggatgagatgatcactacaggggcctaatagggaccggctattgacatgaagatggaagaaatgattgggccggttgagccaagctgtggtggcaagaatattagatggacttctgcataatccagggttcaggaagtgtggccatttttccctgtttgcaccctctcctatgtccattaactaccc

SEQ ID NO: 87458 - DNA, 839 bp, Homo sapiens
catgtgaactgccagttccccaatactgcccttcacttctttctatcctatatattaattgttctgttttggactatctgctagtattggcagtgacaaaaatatggtgagagagcaaggaggccttttcagccttattaggaccttgttggacctaagaataatttttcagaatttccagtttaaaarcaaaagttaggactggggctggtgggcatcatcaacatactgttaaaggaatagggtttaggagggagggggcaggcatatgagagggggcttttgttaatccttgcaaatatggctttaaaaattggatatgtggcttactagaaactgcattcccatcattattatagcaatgtctgtgttagaagagaacattcctcagcatttcattaacatgaatcgggcctctgtcaccaggaattgtaggtgaacatcccagcataggcaatgccgcgtccaaaatgacccattctttcaggcccgtggaggggcacagctggcctgttattgcagcctcttattactgttgtcatcaccatcagcatctcaaattgactaattattcaaagtgtgtgaggcacaaagtaatgttcctgcctggaagcttgtgatataacagcaccactggcagaagtgtgttttcagggccgacttttctggatgatagaaatatctcatgaaggcaagaaaatgtgtcgtggttattaaaggggttcctagtgattcatctcctgaaggtccccaataacttttgagaccctgatatttttgcaaattagcagctgtggccttttctgagctagtgcccagcatgaagctttcaataccgt

SEQ ID NO: 87459 - DNA, 839 bp, Homo sapiens
catgtgaactgccagttccccaatactgcccttcacttctttctatcctatatattaattgttctgttttggactatctgctagtattggcagtgacaaaaatatggtgagagagcaaggaggccttttcagccttattaggaccttgttggacctaagaataatttttcagaatttccagtttaaaaacaaaagttaggactggggctggtgggcatcatcaacatactgttaaaggaatagggtttaggagggagggggcaggcatatgagagggggcttttgttaatccttgcaaatatggctttaaaaattggatatgtggcttactagaaactgcattcccatcattattatagcaatgtctgtgttagaagagaacattcctcagcatttcattaacatgaatcgggcctctgtcaccaggaattgtaggtgaacatcccagcataggcaatgccgcrtccaaaatgacccattctttcaggcccgtggaggggcacagctggcctgttattgcagcctcttattactgttgtcatcaccatcagcatctcaaattgactaattattcaaagtgtgtgaggcacaaagtaatgttcctgcctggaagcttgtgatataacagcaccactggcagaagtgtgttttcagggccgacttttctggatgatagaaatatctcatgaaggcaagaaaatgtgtcgtggttattaaaggggttcctagtgattcatctcctgaaggtccccaataacttttgagaccctgatatttttgcaaattagcagctgtggccttttctgagctagtgcccagcatgaagctttcaataccgt

SEQ ID NO: 87460 - DNA, 839 bp, Homo sapiens
catgtgaactgccagttccccaatactgcccttcacttctttctatcctatatattaattgttctgttttggactatctgctagtattggcagtgacaaaaatatggtgagagagcaaggaggccttttcagccttattaggaccttgttggacctaagaataatttttcagaatttccagtttaaaaacaaaagttaggactggggctggtgggcatcatcaacatactgttaaaggaatagggtttaggagggagggggcaggcatatgagagggggcttttgttaatccttgcaaatatggctttaaaaattggatatgtggcttactagaaactgcattcccatcattattatagcaatgtctgtgttagaagagaacattcctcagcatttcattaacatgaatcgggcctctgtcaccaggaattgtaggtgaacatcccagcataggcaatgccgcgtccaaaatgacccattctttcaggcccgtggaggggcacagctggcctgttattgcagcctcttattactgttgtcatcaccatcagcatctcaaattgactaattattcaaagtgtgtgaggcacaaagtaatgttcctgcctggaagcttgtgatataacagcaccactggcagaagtgtgttttcagggccgacttttctggatgatagaaatatctcatgaaggcaagaaaatrtgtcgtggttattaaaggggttcctagtgattcatctcctgaaggtccccaataacttttgagaccctgatatttttgcaaattagcagctgtggccttttctgagctagtgcccagcatgaagctttcaataccgt

SEQ ID NO: 87461 - DNA, 645 bp, Homo sapiens
aacagaaaggccagatggacattgatggatttcgtgttttcagtgacacagagggtttagtttggtttgttaccatactgtatttatgagaaggtccatgttagccagtctgctctcagtggccctgaaatgcactgtggccctagctacctgtcacaagtagacaggtgtacggattggggaaagatataactagaaggcatatgccaggggcctttggaacatcagaagatatgcctggccccagtagcaattgcctaccatyccactttttaatttctgcatgccttatgtattggaagggaatactgaggtagacttggaagtccttggcgcagaggtgttggctgaaaccatcatagcccatgaggttacccactgaagcacagtgtggagagagagagtgggggctgagcaaggaggggcattccagcagtcaggagtgggagaaaggagaggacccgagaaggccagaaagtgagtagtcatgcgtcctcaggagaactgaagagggttatggaaacagaagggagaggtgtttcaggatggagccacgtgggcagtgcaagcatccaagaggcctgtggagtcaccatctgggatcggtccttaagctgacctgtgagagctcccgttggctcggat

SEQ ID NO: 87462 - DNA, 645 bp, Homo sapiens
ctgcgttactgtggaggaaagaagtggggacacgcacagcatatttattttttctatatccaaagtaaatccatacatcattactttaggaactaaatatgtataatttgccttggatttattacagcatcaaagtgcaactggaaatatacggagtttgaaattagaattgtcaactgttcacatggagatcaatagccttggaaagggtgactgtgggmcctgccaggcaagctcagtgacagcctcacagccagtcaagaatgtcagcaagacaggctgtgggcagagtgatgaaatgcagccccacgtatgagggtgttaggtgatcacattttaaatttaatggtgtaggcttctgccaagggggtactagaggttactccagtgcacaataaaataaagggaatatcttttgagtcttcagtttttagccactttcaactcattgggttttctcagccttaaactaaggtcattagctttcacaagttctccctacaaacaaaacaaatgctgggtgtcaccaccgcattctttccatgggggatgttagacaccactgacccggatgattacgcagacagcacacccaaatagagacatctagattgggaagagccctcaaaagctggctgacaacca

SEQ ID NO: 87463 - DNA, 608 bp, Homo sapiens
tagtttattaatgtgcatgtggctagtcaggtgtcccagcaccatttgttgaagagactattctttccatcacgccattgattttgaaactttctagtggatagcattttagttaattattatatattgctttttgttgtgatttgatacatgtatgtcttatttctacaagtagagaggactccattcaagggaggggactggcttctgtcatgtttctggtattttatgtaagggctaaaatggttcccagagtgagcaaaaaggaatcaaagaggacgcaagcccttgacccaagaaaatcagagtattttatttaaagaacaacttttagttggttggtttttttttgttgttgttttttttttgaratggagtctcactctgtcactcaggccggcgtgcagtggcgtgatctcggctcaccgcaatctctgcctcccaggttcaagcaattctcctgcctcagcctcccaagtagctgggactacaggtgcccaccaccacgcccggctaattttttttttgtatttttagtagagacagagtttcaccatgttagccaggatggtctcgatctcctgacctcataatccgccctcctcagc

SEQ ID NO: 87464 - DNA, 738 bp, Homo sapiens
ccacatttatgatgattattttgaattctttgtcaaccaatttatatacctcaatttatttaggrcaagtttctagagatttattttgtttctttcattcagccatgttttcctgtttcttaatgtgcattgtaacgttgtgctggaatccacatatttggaaaatgtcaacagttccagtctatggaatggcttaggacagagatagaccttcactagtcaagcaggctagaaattcttggggcctctcaaacctttcctatagatgcaaatccttcctggacgtgtgtgtataagttcccaattatacagaattgctaatttccttttacaagcatttataattttttcctccttctgatgtctgctgtggtactccagttctcttgttctcagaggctctcaggcttttaaagtatattggcccagagagaaatttgttccttaggcaaccccttgaaaagtcagaatgtggaacacacataccattcttatctcccccgaccacccccaccaaaggggaagctgttgaactgtgttggcctccatctactgtaccatgaatcatctgttacggcagtgcgccacccagctttctttcattctcaatgactcctaggcatctaaagtatgctgggtgccctcagtgcactggaacagataagacataaaccagcttctcaggcaaaccccccaaagcccaaatgttggatgcacactacttcaacactttccctc

SEQ ID NO: 87465 - DNA, 738 bp, Homo sapiens
ccacatttatgatgattattttgaattctttgtcaaccaatttatatacctcaatttatttaggacaagtttctagagatttattttgtttctttcattcagccatgttttcctgtttcttaatgtgcattgtaacgttgtgctggaatccacatatttggaaaatgtcaacagttccagtctatggaatggcttaggacagaratagaccttcactagtcaagcaggctagaaattcttggggcctctcaaacctttcctatagatgcaaatccttcctggacgtgtgtgtataagttcccaattatacagaattgctaatttccttttacaagcatttataattttttcctccttctgatgtctgctgtggtactccagttctcttgttctcagaggctctcaggcttttaaagtatattggcccagagagaaatttgttccttaggcaaccccttgaaaagtcagaatgtggaacacacataccattcttatctcccccgaccacccccaccaaaggggaagctgttgaactgtgttggcctccatctactgtaccatgaatcatctgttacggcagtgcgccacccagctttctttcattctcaatgactcctaggcatctaaagtatgctgggtgccctcagtgcactggaacagataagacataaaccagcttctcaggcaaaccccccaaagcccaaatgttggatgcacactacttcaacactttccctc

SEQ ID NO: 87466 - DNA, 1381 bp, Homo sapiens
cacgccaggcatttagcttattttctatcactatatcatgcagaaaaagaaagaagaggacctagcaggatgccagtgtccttgttttgataattcatttaatctttctgatattatccctctaaacttcagattcctcatctattaaaaaaaatgaagaaggataatatcttctctgcttactttacactaaaaataaaatcagagactaaatggaaaaaataacttgtatatttttaaaaataacttttctctcttaattctaagtgaacattcacttattttttcattagaaaagaaaggcaggatataatattttaaatcaaacattgagcctcaaaatgcttacagctggcactttgggaacaaattagagcccagaagcaaagataaatggaaagcatttacaagctatatgatctggaaaatgggaagagagtcgatttttgaaaagacaggaagaaacaattgactgaataattagaaaacagaaatgatacattaacagtcttagcacaccacagagaatagggacatggacagattcattagagggctgttttttcttttagcacagcctcagtggctttaacacagacagatgtgaaggggaaaggtcagactgttaagaaaggcagcagagctactgaagaggaagaatacaaacaaaaacaaaattacactgttttacattgcaaattcatagtcacaggattccagatgcaggatccaactgattgtaacagaatggacttgctgggaaggaaaaagactaaaaagagtgaaaatgaaagcaggaggtttaatgattaaaagcatagattttgttgcaggactgcctgggtttgagtatgagctttactaactgtgtgaccttcaataggtgacataatttctctggcctcagttttttcmtctctaaattgagaataattacagtatctttcttattgagtggttatagaaaataactgagtaaatacagttaaatacagactgataatgacaaaacagaaataatacattaacagtctcagcataccacagcgactggttgattcatcagagagttacttttcaacacagcctcagtggacagatgagaagggaagagttagactgttaagaaagacagcagggctactgaatagtaaaatcattaacagaaaccaacttacattattttgcattgcaaattcagtcatatgattgcaagtaaattgcttagaacaatgcctgatacttcttcgaaacaggtgtgttaattcttattgtccatatatgaaagaaatttaaaggtattaaaagccctgtcaaacacgagatggtgaggaaaaaaaaacccctcagattagtaatttctgatatatggcagcatcac

SEQ ID NO: 87467 - DNA, 1004 bp, Homo sapiens
atcattatcaactgaccttgagcagatcttatcgctgttcctaatttcagtttcccaacacttaaagtggacacaatatcatctaagttggaggatgttagtgattcaggtggtccagacaatccttgcctttcctcaaacagtgattaaaatgccttctacttttacaactataatctaattacttccttacaataaccggaccgtgagatacagaccctattattttcattttataaaataaagaaagaataaaatatttacactttatttgtaaggcacttgggaattgcagcatggttggaagtcagraaccagttggaaggcaattgtattagtccaggtaagagaaaattgtgatgtaaactagaaaagcagggggaggtgaaaagattcagaagatatttggaatataaaattggctgaatttaatgattgattagaaatgagagtggtagggagtgcatgggaagagacagtggcttgaataccttcatatttggaggtacctatccctgaaactgggcacccatgaggagcagcagatttacagggtgataagttcattatggacaggctgagtgggaagctatggcatgtccagatggaaatatttgaaaggcaattggatcagatctcaatcttaagagagatatctaggctagaattatagagttggacgttatccttatttagattattaaagctacttcaaaaatatattatgccaaaaattaaagaatatatatatcatgaactttagttgtatgcatttcagtaaagcacttaacccttctgaacactagttactttgccttttaaatgagaaaaataacatgacttaacctgccaaaagagttttggtaagattccaattacataatgagtgtgaaagtaatatgtaaactttaaagtgttacttaaataaaataacattagtttcactgtcattagcagttgattggagataaccttctaagtgcttgctcaagtctcagtgtccc

SEQ ID NO: 87468 - DNA, 1591 bp, Homo sapiens
cccagctacttgggaggctgaggcagaagaatcgcttgaacgattgatagcgccattgcactccagcctgggcaacaagagcaaaactccgtctccaaaaaaaagaaagaaaggagaagaagagattgagattaagaggaagccagtagtgtccgccatggtggcagagcaggacctggtccccaagcagcacactgcacacaagagcaatttgggggcagcctgagcaggtagcagcctctgcaccctcaaaggaacaaagtctcagccccaggaacaaatctcagccccttcagaggcccgctaagaagccacctatcacacaggacttgaaagccatgcattattctgaaagagtagagatgaggaagaaaagcaggctagaagctggtgctgggggatcctggctgctcaaaggaagcagatcccctaatcaatctctacaataacaaattcgttgaggtgatggttctaatagaaacactaaacaacctagaagcttcttccaagcttactaaaattaacaggagcccctaaaagaatctgccattacctcactggcttccgacttcttcaatcaaacctgcatctttccaactgtgcgtgtgggtagagcaaatgcttgtttttggaacacactggtttattttgttgtttgtgtggcaacatgagtttggatctttagaaaaaaaaaacagcttctgtttctataagttatagaaacgtggcagctcaagagagctagtctttgtttacagtacaccatccacactttaatggaaaagagagttttcctggagtttgcttcctggctaaaaacaggacatctcgaaaacatttttcaaaaaataaaattgcattcaaatattatttcgtcaatctacctcttgaattctcagtaaccatagcccccaatcactttaaattttactaatggcaaaaatctactttatagacctagaggggaaaaaataggcatatcttcactttcgaaagtgtgatgtattacagttaatccgaacagcaagctaattgtggggccaatcactccgtttaccaggggagttcacttaacaaaacctcccttccacagaggcttcccagaaccccttttccatagagcgccccattcaccatgctcaaagttcccttatagcttcaatcaaacaggttatgatgattccttaatgcaattcgggtttgaatccggcagcagcaggtatggtgggtaagagcacagattcttgaagccaagacccatggctcagcttcaccacctgctaggtgtgaccttgggtcaattacttatcctttctttgcctcacctgtaaatcagacttgataactaacagtagctacctcatcaggcggctgggaggaagcatttggcacagtacttgtcccagagtaagasctatggaagtgtgcactaccttgtcacctaggagaccataaccctgtgagggcaggaatgatgtgtcttgctcctgctctatcccagagtgcacagagcacaaccttcagtatttgttacaggaccatattctgttcctactctgtgccagacactgtcttaagtgctgaagatgca

SEQ ID NO: 87469 - DNA, 702 bp, Homo sapiens
caacaggcaggagaagagatggaacatccttggggaatgggaaaggctaccatcttgtttgtagcatcataggaaactttgatggttaatttgggagaatactgattagtaaatacaatgcacagattaaggaagtaggaactgcgctagtaaaaagtgctatgaagctgggatactttatatactttgctatacttcctccaaaagggtgttttaacattttaagttataaaattgtagctgagttatgaagttttgctatgcagtgtttgatttggattacccctcccccatcctccttcttccccaaagtgggacacaggtcgttctattgaaataagcaagatcatcacctagtggttaattcctcaaagtgctgacacaagatttggtcccagagagcaaagatgtgcccagtctgcgtcctcatacaatgttaattcattcaacaagcgttgactgggactttatgccaagcactattctggtgcctggggatacagagttgctaacataaaatgataagtttaaaaataaagttaaggaagtaccamcttagaagcttaagcgccctctcaaaatgatgttgcatgtatttatttcccactggttttccgtagatcatagacgaagaagaaactcagtttatgagcaattgccctgttgcagtcactgaaagcactccacggaggaggacccgga

SEQ ID NO: 87470 - DNA, 943 bp, Homo sapiens
tgcatagggtgttatcagggactacagaaggccagtagattaaaagtaagggccaagttggagaagagagttggtggtcagaggtcttagcaaagcatggaaggtttggaatagtctgtatggagaatgagataggaatcagatggaggggaaaaaaatccctcctagatttcatagaaggcccaagtgatgctggcaacttttagcatttgttaagtgcattagtttggttgccgctggcaacaagtaatagaaaatcttctcaaagtagcttaagcactaagttcaatagaatgtgagtgtcataagtaaagtaaatatgcccatcttatttaccaatccagcaccagtttcttggacagtagctggtgcacagggatcgttcacttattcattcaaaatccagtgaatggatgaacaagtgaatgatctctcatagcagagaatgtccccaggctttgttaacccagtgtttcattgacatcatgaaaaattcaggttcggtctatcttttggcgagttggctttgtcttcaggctagttttgcatggttgcaagatagctactacagtctgctcattataaccagacccaaaaatgtccagcagaaggtaaaggagctatatgagctatatattctttgagcttctttttaaaagttaggaaactttttcagaggcctcagcagacctcctaagtcctactggccagaagaaatatatcatatacaacatttaaatcaattactggtggaaaaaattgaatactatgattagcttagacctggggttctcaactggagatgactttgtcyctcactcctccagaggacattgttgacaatgtcttgagacatatttgagtgtcacaattggggaagggggatgctaatggcatctagtagttagaggccatggaaactgctaaaccatcctacaatgca

SEQ ID NO: 87471 - DNA, 783 bp, Homo sapiens
aaggtgttcaaagacagcagcagctctcaggaataagtaaaatatcctcagagggcattttgtatctcactctaccttcagatcagttataatcactccttcctacctgacggatggacacctagccagttctttaccaatttttgtgcatagttgaaagacatctttgccatccataactcaccaagtaaaagagaacttggcagctgctgtccatatgattgatggaaactgtgtctgcattgtaatagcactagaggcacctttcggcacatcaggcacggcaccgagcctgctgctggaatacgttcgaaggtgttgtgactccagcatccctgcactctacttttaacaactacaattttctaagcactgtgctaggmacaaaagatacagcagtgggcaagacatcctagccagtctgcagcttagaatctaatgagcaaattagatgggtaaatggatcgttaccacaccatgtatatgtgacacagtggcattacaaagaaagcaatcagggaaggtttcctcaagaatgtgacattcaatctcattttaaaatatttagctgtattatcaattcacaatttaacttattagatacaggtttatgtatgaggttagaagtgaatttattgtgaattaatgaagtttaagtacagggccctttccttgcataggccccttccgagatcttttcactaattttgcatttgtaattccacattctttttcttaaagagggccccatgaaactgcacaagtctaataagccacaaaacc

SEQ ID NO: 87472 - DNA, 2098 bp, Homo sapiens
aaatttttctgaccttgcccttgccctaggtcattgctcgtatggaagcagaccgtaaaagacatagataacattcacccaacagatattccaccttcttatttgtctacagatctccaaatgagctcggcaaagtgatgacagaaggtggccacctgcttatcccccgaaggtgaactatacttcaactagaacttagactctaagccacttctaacaatctgattcttggtggccagtgtttagtttggggcaggytgtgagtcagggttctggccaatggtatgcaaagggaaacctgctggaggtggggcttctgggaaatagtttcctatttagtaagattaagatagcacccctcattctttctcctttaggaggttgttatgtacagacaagattcttacatatttggtggacatcttccaactataaggttataaaggtttatagaaccctgacttaaatgagatgttaaattaaccactgcttaaactgcctgttttagacttattatgtgagagaattaactctagtattcaagttcaatagtctcttgcttgtagccaaaagcatgttgaatcatgaattcacccttggaagacaccctgttgcctgccctagccttcatactgcttcaccccaggtcatgggaaccaaagatacatcttagggaaaaaatgctgatcctcattgccaaaatggcaggaggactttaaaatgcccagttctactccagtgaaattctagtctattccaagctaaactccaaatgcattttcccaatagaaatattattatatatgttgtgtgggccccgtgatgattttagagcagaaattgtacgatatggtttaaataggcttttgtgggttggcctggaaacctaacattgtttctatggaaaaatgtttcaaatttcatacgactctgttccaaatgaacttttgaatgccacctgttttaaatcggggggttacatatttgtttataattaaaatacttaggcatgaaactgagttatcagctgcaaaaatcacatttggagttctggcttttaaactgataaatgttcctttaccattttagataaaatagctctgaataaaagggggttgtgacctcttgcagtaccaacttgcaatgcaaaattagaactaagatagcctaccagcttccattttaaagtaattttctgttggaggaaggaattactttacaaattaaataggtattgggctatttattaggaaataaccacccattgtgccaaaacctgtcactgcaaccaatgtctctttagggccattgggaaatatttaaagcagtaatttgaataagtatatgaattatttgccctcaaataaagaaaaaaaccctagcagaaatctttgtatgtaatgatagatccaggctgggcactgtggctcatgcctgagcactttgggaggctgaggcaggaagatcacttgaggccaggagttcaaggccagactggcaacatggtgaaaccccatctcaactaaagatataaaaattagctcggtatggtggcacacacctgtaatcccagctactcaggaggctgaggcaggagaatcgcttgaacttgggaggtggaggttgcagtgagctgagatcatgctgttgcattccagcctgggggacacagcaagactctgtctcaaaaacaacaccacaaaaattaaaaataatgatagacccaaatccttagaattctgtgttcgagtcaaccaacaactaaaagttgcccccactaaacatatacatcaaaaaaaatatccatttcttgactcagataaggatatagtaggaaaaatacttcctagttattttggcttttttcttcagctataaaatgaaaataatatcatctaggtcccagagacattgtgacaactacataccaaagcatttcccagcgctgtgtctgaaacccagtaggcactcactgtcagttccattactttacatcttcttctcccgctacaagaatactgccctcatataacatatccatattctcaccaacctacacacataactgacaaccagagtttattcaactggtaaatat

SEQ ID NO: 87473 - DNA, 585 bp, Homo sapiens
tacacaccgacacacacacacacacagaggaatttatgccagcagagaaaacatgtagtctttatttagagtgcaagaagcaacacgtaaacatctcaggaggaagacgggggcggcagttgagagagagaacacaatggaaggagtagagcagccacataaaacccgagaaaaatggagtcagagaggccaaggaaacgaatctcacggcagtggtactgccgaactctcccaaatccaataacgccaaaacaggcaccgctcgctgcctccgctcaggatccggataaccgaaaaattatctcattctcagaaacccatagaggtgggtggcagacgaytctgcagcaaattctcccacatcctcatgaacccagcagctcagctaccaggggcacaaaatgtggggtgccagcaaagatgggaaatgcactgaagctcttcataaggcgcccccgaaactcagagttacaggggtccccacgtgggtctcccggctaaaatcctgaaagcgtcctatcctctcctgactccggtgattcagcctgtcctccagaacctcccccaacagagctcaggctctgg

SEQ ID NO: 87474 - DNA, 975 bp, Homo sapiens
aattttatgtatgaattattttaataaataattattcggtgcctagtatgtctggcattatgctaagtcctgaatttataggtctctaaatctagtggtaatgaagaggtatcaataartaacttcgatgatgatgaggaagaagacaatgatgacaactgtcatttgttgagtattaattatatgcatgcattgtgctatgtaatttacatatattattactaatctttgctacagccatacaagatagtgcttgataagtccattttaaaggaagaaaattgaggcacagatgtgtcatatggttggtagatgtcagagatgaaattcaaatacagatttgtatgaccacaatctgacgtctattacatgatagactactaaacaatggcataagagggaaaagagaaattaatgtgactcttgactactgagaactgaacatctggtttcagataagcactttcagtcgttgatcatacaaaatgtgataacagtgactctaagactttttacatatatgtgtaccatatagtagtccctcatcattttaccagaaagacaagaaggagaatactaaaagtatcagaatattgaccttttcctagcaccttgaagtagcagcttgttccaaagtgatggtgattgagaaatgcctgtgacatcatcttgttctcttaggatccaatgggagtccccaatgactcagccacagccagcacagagaatacggcacattcactccccgttcactcaatttactttctccaataaaaaccaaatgtgtttattatttataggaacaccctccatccaaaaaaaaaaaaaagagcaatatttgtctgaataaaaggatgctccaagttgtgaagtttcctggctatttttgtgtttttaagatcaccaagattaatatgaaaaccctttggaaagatttcaggagtaaagagaacctgaaagttcaagtgtgagaag

SEQ ID NO: 87475 - DNA, 975 bp, Homo sapiens
aattttatgtatgaattattttaataaataattattcggtgcctagtatgtctggcattatgctaagtcctgaatttataggtctctaaatctagtggtaatgaagaggtatcaataaataacttcgatgatgatgaggaagaagacaatgatgacaactgtcatttgttgagtattaattatatgcatgcattgtgctatgtaatttacatatattattactaatctttgctacagccatacaagatagtgcttgataagtccattttaaaggaagaaaattgaggcacagatgtgtcatatggttggtagatgtcagagatgaaattcaaatacagatttgtatgaccacaatctgacgtctattacatgatagactactaaacaatggcataagagggaaaagagaaattaatgtgactcttgactactgagaactgaacatctggtttcagataagcactttcagtsgttgatcatacaaaatgtgataacagtgactctaagactttttacatatatgtgtaccatatagtagtccctcatcattttaccagaaagacaagaaggagaatactaaaagtatcagaatattgaccttttcctagcaccttgaagtagcagcttgttccaaagtgatggtgattgagaaatgcctgtgacatcatcttgttctcttaggatccaatgggagtccccaatgactcagccacagccagcacagagaatacggcacattcactccccgttcactcaatttactttctccaataaaaaccaaatgtgtttattatttataggaacaccctccatccaaaaaaaaaaaaaagagcaatatttgtctgaataaaaggatgctccaagttgtgaagtttcctggctatttttgtgtttttaagatcaccaagattaatatgaaaaccctttggaaagatttcaggagtaaagagaacctgaaagttcaagtgtgagaag

SEQ ID NO: 87476 - DNA, 975 bp, Homo sapiens
aattttatgtatgaattattttaataaataattattcggtgcctagtatgtctggcattatgctaagtcctgaatttataggtctctaaatctagtggtaatgaagaggtatcaataaataacttcgatgatgatgaggaagaagacaatgatgacaactgtcatttgttgagtattaattatatgcatgcattgtgctatgtaatttacatatattattactaatctttgctacagccatacaagatagtgcttgataagtccattttaaaggaagaaaattgaggcacagatgtgtcatatggttggtagatgtcagagatgaaattcaaatacagatttgtatgaccacaatctgacgtctattacatgatagactactaaacaatggcataagagggaaaagagaaattaatgtgactcttgactactgagaactgaacatctggtttcagataagcactttcagtcsttgatcatacaaaatgtgataacagtgactctaagactttttacatatatgtgtaccatatagtagtccctcatcattttaccagaaagacaagaaggagaatactaaaagtatcagaatattgaccttttcctagcaccttgaagtagcagcttgttccaaagtgatggtgattgagaaatgcctgtgacatcatcttgttctcttaggatccaatgggagtccccaatgactcagccacagccagcacagagaatacggcacattcactccccgttcactcaatttactttctccaataaaaaccaaatgtgtttattatttataggaacaccctccatccaaaaaaaaaaaaaagagcaatatttgtctgaataaaaggatgctccaagttgtgaagtttcctggctatttttgtgtttttaagatcaccaagattaatatgaaaaccctttggaaagatttcaggagtaaagagaacctgaaagttcaagtgtgagaag

SEQ ID NO: 87477 - DNA, 1131 bp, Homo sapiens
ctgagttctgtgagtcattttagtgagttgttgagccaaagcagtgttatgagactcctctggagttgtagccggttggtcagaagtgtgggtggcctggggactccacttgtggctggctccatctgaaatggagacaatcttgtagaggactgagtccctaacttgtggggtctacactaactctgcgtggttagtaccagaactgattgcagtatacccatttggggtaaaacagaatatgcgatgagtcagtgggcaggacctgtgggcagaactgtcgctattgctccagaccccacctctcatgtccctcctcccctgccacaatagacacaggcaggctgtcagcacagaatcctgcaatccactgaagacctgggccagatggtgtttgcctgatgttctaataagagaaaaaagccccagctacttctctggtcctttagggaaatgcaaatgtgacacccctctattttttctctttccatggccccttatttcagaaacaggggagggcttcctctgtcaggctggtgatatgctccttctacagcagaartatgctgtggcttttttcttattcttttggccttcggaagaaagactgctgaatgccagtgtcttcaagtggatgcttgtgaggctcttcagaaagagcaagaatggatccagagagccacttggcctcaggatgctcctttggtccatctgtattcaccagggacattctagtgttgtggcttttaaagggtgagttcactaaccctgcattctctcctccatgtctcaattggtgctttcccttgcccttgggcagtttttccaggcagtgtgacacaaacactacattccttatgagaaggaggtggggtgatcaatgaaaactccctgataagttacatgtactctgagcagtgctgtcaggcttaaaggtcacatatttctgcagtatgaaaatcacaaagcacagtggaaacctcatgcataagcaaagcttctcattgcattcaaaagtaatttaaatggctgagagcttatctctatgataaaggctgcacctttttatgtatgttaaagctaagaaagtgcttaaaatcctcccgtgcatttccttcagagctcttgtgg

SEQ ID NO: 87478 - DNA, 706 bp, Homo sapiens
cacacacgcctttccttaataccagggccccttgcagccaacgaccaagcaatctccccctttctattcataaccaaactttttttcaagtctacttttgtattctttaatgcaattaaaaaaatttattattaatattatttttgtttgacaagtcataattgtagacatgtatagcatacaacatgatgttttgatatatgtatacaaggtgacatgattaaatctagcgaattaacatatccatcatcttgcttccctactatttcttatggtgagacatttgaaatttactctcttaatctcttagttattttgaaatataaactacattattattgataatagttgtgcagtagatctcaaaacctttttctcctgtctttgtatcctttgatccacaattcattccctccctctccatgccccactccaggctctggtaactgctgttctactctctgcttctatgagttyacccttattagattccaaatgtaagtgagatcatgtgttatttttctggacctggcttatttcatttagcataatttcttccagattcatccatgttgtcacaattgacaggatctcctcctttttaaaggctaaatagtatcccattgtgtatacttaccacatttttttaaatttactttttatttcgctaggtttgggggttacgggtggtgttttgttacatgaa

SEQ ID NO: 87479 - DNA, 755 bp, Homo sapiens
ctggtcctgaactttgctttgataacagactttttaattactgtttatacatcttcatgattcagttttttttttttttttttttttttagacaggctggattgcccaggctggattgcagtggcccaatctcggctcactgcaacctctgcctctcaggttcaaatgattctctcacctcagcctcccgagtagmtgccacacctagctaatttttcgtatttttagtagagttgggtttcaccacgttggccaggctggtctcaaactcctgacctcaagtgatctgcccaccttggcctcccaaagtgctgggatcacaggcgtgagccactgcaacccagcctcatgattcagtcttggtacgttatacgtttctaggaatatatcattttcctctaggttatccagtttgttgctataattgttcattttagcctcatgatattttgtatgtttgtggtagcaatctttgtccattttgactgggtcatttgttctgtttttgttgttgagttgtaggagatggttatatattctgggtgttaaacgcttatcaaataaataatttgcaaatattttctcacatttagtctgtaggtaggtagtcttcatttttatgatagtgtattttgatgcacaaaagtttttatttttgataaagtctaatttgtctatttttgaatttgttgctttgcctgtgctttttggtgtcatattcataaatatagtttcagctctaaagtttaggtctt

SEQ ID NO: 87480 - DNA, 1244 bp, Homo sapiens
cctgctaaaaaatgaatgtataaattcaggaatttattacatgtgactaactttcttacttcagagtacttttttctttttgctgacacagtcctatttttagccacaaaattgaaattttgtaaaactggaatttgattagttctgtttgacagttaattaggtgggcaaatacagtatataagattaaccatttgcaaaagaacaaagttatgaaaattagatacatctttctgaacagtagaaacctaagtgaattgaaaggagccatagacatttatgattcattttaaggtagtggtttccaaactttgtgttcyatgaactacttatagacttttctttaggatcagttgaaagataaatttaagagtcttacaaattgagatacaaataatcacctttattattgataacactgatagtactggaaaatgtgactttgatgttttgcctaagttgacttgacaacactttatccataagatagacttactcattcaactagatggagtacaaatcacaagtttcccctttaagaaatggtacctttgaagtcacagcaaaaggaaattgtgtgcaattccaaacagaaatgaagtggcatgcccagttccttctttcaaacccaaaaagatgtctctccttcctaactggagtagagaaagtgaagaggttgagagatcgcagagatgttgctctagggaagttctatccacacagaagccagataactaaaggccacactaacctttatttttttgtgtttctaaacatactgagaagaccacaacaatctactattcatatcacttcatgattattggaggaggagtcctagcatctgtttcctgagttgccttctaagaccttccaaggttctgcagatccaccttttgctacacttggccatgtaccctatgctagcatctgccattcacatctgagtctccctccttcccccacctacctcaagtcacctggctatctccaggggtgcagattgtagtctaatccagaaggtttcaaacaatctgtgatgaagcatgtgggcttttttaaattctattttgtacctgattaattttgtgaaatgcaatggaaatgaatgaccagaaaaatgacaatactcaaatgtcacatcaatttcaaaatactagtttctaaacatttattttcaatttctgtcattcactgcttgtgtttcagtactgattatgtgaccttattttaacaagcactgg

SEQ ID NO: 87481 - DNA, 1244 bp, Homo sapiens
cctgctaaaaaatgaatgtataaattcaggaatttattacatgtgactaactttcttacttcagagtacttttttctttttgctgacacagtcctatttttagccacaaaattgaaattttgtaaaactggaatttgattagttctgtttgacagttaattaggtgggcaaatacagtatataagattaaccatttgcaaaagaacaaagttatgaaaattagatacatctttctgaacagtagaaacctaagtgaattgaaaggagccatagacatttatgattcattttaaggtagtggtttccaaactttgtgttctatgaactacttatagacttttctttaggatcagttgaaagataaatttaagagtcttacaaattgagatacaaataatcacctttattattgataacactgatagtactggaaaatgtgactttgatgttttgcctaagttgacttgacaacactttatccataagatagacttactcattcaactagatggagtacaaatcacaagtttcccctttaagaaatggtacctttgaagtcacagcaaaaggaaattgtgtgcaattccaaacagaaatgaagtggcatgcccagttccttctttcaaacccaaaaagatgtctctccttcctaactggagtagagaaagtgaagaggttgagagatcgcagagatgttgctctagggaagttctatccacacagaagccagataactaaaggccacactaacctttatttttttgtgtttctaaacatactgagaagaccacaacaatctactattcatatcacttcatgattattggaggaggagtcctagcatctgtttcctgagttgccttctaagaccttccmaggttctgcagatccaccttttgctacacttggccatgtaccctatgctagcatctgccattcacatctgagtctccctccttcccccacctacctcaagtcacctggctatctccaggggtgcagattgtagtctaatccagaaggtttcaaacaatctgtgatgaagcatgtgggcttttttaaattctattttgtacctgattaattttgtgaaatgcaatggaaatgaatgaccagaaaaatgacaatactcaaatgtcacatcaatttcaaaatactagtttctaaacatttattttcaatttctgtcattcactgcttgtgtttcagtactgattatgtgaccttattttaacaagcactgg

SEQ ID NO: 87482 - DNA, 1244 bp, Homo sapiens
cctgctaaaaaatgaatgtataaattcaggaatttattacatgtgactaactttcttacttcagagtacttttttctttttgctgacacagtcctatttttagccacaaaattgaaattttgtaaaactggaatttgattagttctgtttgacagttaattaggtgggcaaatacagtatataagattaaccatttgcaaaagaacaaagttatgaaaattagatacatctttctgaacagtagaaacctaagtgaattgaaaggagccatagacatttatgattcattttaaggtagtggtttccaaactttgtgttctatgaactacttatagacttttctttaggatcagttgaaagataaatttaagagtcttacaaattgagatacaaataatcacctttattattgataacactgatagtactggaaaatgtgactttgatgttttgcctaagttgacttgacaacactttatccataagatagacttactcattcaactagatggagtacaaatcacaagtttcccctttaagaaatggtacctttgaagtcacagcaaaaggaaattgtgtgcaattccaaacagaaatgaagtggcatgcccagttccttctttcaaacccaaaaagatgtctctccttcctaactggagtagagaaagtgaagaggttgagagatcgcagagatgttgctctagggaagttctatccacacagaagccagataactaaaggccacactaacctttatttttttgtgtttctaaacatactgagaagaccacaacaatctactattcatatcacttcatgattattggaggaggagtcctagcatctgtttcctgagttgccttctaagaccttccaaggttctgcagatccaccttttgctacacttggccatgtaccctatgctagcatctgccattcacatctgagtctccctccttcccccacctacctcaagtcacctggctatctccaggggtgcagattstagtctaatccagaaggtttcaaacaatctgtgatgaagcatgtgggcttttttaaattctattttgtacctgattaattttgtgaaatgcaatggaaatgaatgaccagaaaaatgacaatactcaaatgtcacatcaatttcaaaatactagtttctaaacatttattttcaatttctgtcattcactgcttgtgtttcagtactgattatgtgaccttattttaacaagcactgg

SEQ ID NO: 87483 - DNA, 881 bp, Homo sapiens
ttactaattagtatcactaatgcttttccagaactcttttagtgagaaaaaaattaaaagtgaagtacaattttataatcattctctcttttgatacgggatctggctccataattcttttaaccatcattagccataggtctgcagtctttaacaaatcacaataaaaaaagagcataaactctggaaatagaaacacctgatatttatttcaagcttttctcttagctaagtaacaagataaagtaagtaagtggataaccttagaaaaagtagttacttagataaattttactttatctaagtaaaattttttcttatgtataaaagtggcaaaacagggccgggtatggtggctcacgcctgtaatcccagcaytttgggaggccgaggcaggcagatcatgaggtcaagagatcgagaccatcctggccaacatgatgaaaccctgtatctactaaaaatacaaaaatttgctgggcatagtggcatgtgcctgtagtcccagctactcaggaggctgaggcaggagaatcatttgaacctgggaagcggaggttcagtgagccaagatggcaccactgcactccagtctgggtgacagagcaagactccatctcaaaaaaaaaaaaaaaaaaaaagatgacaaaacaaagcccacctcatagtttggttaataatttaaaaaaaaaaggaagttgtgcatatgaacgtgtgtaatgcctggcacagaaatagtatttctgactaactctcattctatcctatataaaagctctttgaatacttgaagaaggatgcaatgttaccgtatttcttctaatctttaaatttctcaggttcttcaatgatcaccaatataacatggttcctagattcca

SEQ ID NO: 87484 - DNA, 881 bp, Homo sapiens
ttactaattagtatcactaatgcttttccagaactcttttagtgagaaaaaaattaaaagtgaagtacaattttataatcattctctcttttgatacgggatctggctccataattcttttaaccatcattagccataggtctgcagtctttaacaaatcacaataaaaaaagagcataaactctggaaatagaaacacctgatatttatttcaagcttttctcttagctaagtaacaagataaagtaagtaagtggataaccttagaaaaagtagttacttagataaattttactttatctaagtaaaattttttcttatgtataaaagtggcaaaacagggccgggtatggtggctcacgcctgtaatcccagcactttgggaggccgaggcaggcagatcatgaggtcaagagatcgagaccatcctggccaacatgatgaaaccctgtatctactaaaaatacaaaaatttgctgggcatagtggcatgtgcctgtagtcccagctactcaggaggctgaggcaggagaatcatttgaacctgggaagcggaggttcagtgagccaagatggcaccactgcactccagtctgggtgacagagcaagactccatctcaaaaaaaaaaaaaaaaaaaaagatgacaaaacaaagcccacctcatagtttggttaataattwaaaaaaaaaaggaagttgtgcatatgaacgtgtgtaatgcctggcacagaaatagtatttctgactaactctcattctatcctatataaaagctctttgaatacttgaagaaggatgcaatgttaccgtatttcttctaatctttaaatttctcaggttcttcaatgatcaccaatataacatggttcctagattcca

SEQ ID NO: 87485 - DNA, 2453 bp, Homo sapiens
gtctctggaccaataaacacattaatttaacaggtagtcattcattttattgtgttttgttttgttttgtctttaaactgaaatagcccactttacccttaggcagaacagttagaaatgtctttttctctttgtatctaaatttccttttaacatatactcatcagatcatgctatttttgcttccacataagaggatgtcagataaatgaaactattttgtatcccccttcagcctttcttttcaggcataatatcttcaagtcttctttgctgcaaggtgtgcctcctcagttattttatcgtattaccctcttttgcaaatattgtattagctcattgaggcctcattaatagatacataagaatgaaataacaggagattaagatgcaactaagtttctgccgattgcatatcattaggattttttttttttttttttttttgagacggagtctcgctctgtcgcccaggctggagtgcagtggcgcgatcttggctcgctgcaagctccgcctcctgggttcacaccattctcctgcctcaccctcccgagtagctgggactacaggcgcccgccaccatgcccggctaattttttgtatttttagtagagayggggtttcaccgtgttagccaaaatggtcttgatctcctgacctcgtgatccgcccgtctcggcctcccaggtgtgagccacgcgcgcccggccagaaagttgttttaaagtcagaacttgtcaattcaaactagattgtatccagtggagatctgtctgtaataatcctgagtaaatggtcaggattgccttcatttttaattaatatgctcccttatacccaaatgggtggctatgaaaaggttacagaaataggaagtaaaatatttagaacatgcataaataaatagagaaccatttacctcataagaaactgttgctttatcaaagaagacagatgattcaaccaagtcagcagaattttaccaattgattcatttattaaatcacagcattttgtcatcaccaaggtgggaagtgtacacttatgacattgggagacacaacctatgaatgtaagaagtttccaattcacatttcttgtaaaagaagggtagttttattggtagtctttcttatttcatttagcctttaaccatgatgccagacaacacttccttaaatactacctcacccactggatttcttttctaaaagcacataacggccaattgttcaccatttattggtgagttacatctgaaatacctcagtttagtgctttatggtctaaatcagttcttgctttctactcaaccaaagttattagtgcttgctatcattgctactaggaaagccttacttagaatccatgcccttccttgaatgccagagcagtgtctacaagcaagaagccggtacagactatagaaaattgtaactgttggcagcaagattcccactggcatcttgactatagcaagtgagtatctcgagcccaatttacattttttcaactgtactttcttacctgttgcatcattcattcccagctcagagtcatctcatctatgtaatgacctcaaatcagtttcgagtatggaagaaatgccaagacaggtgaaaaaagtgagacttcaaatgtaatttttatttttaattaaaaagtttttgctctcacagtcatactaggtcaaactttgtggtaatcagcatatttttatattcctgcactgtatgtagaagctgtaaatattttccagttgatcttgaatacttctaagagcttgacaccaaggatcacaaaattaccataaattgcaacaatcccactactatctaagtatacccaaacacacacacacacacacacacacacacacacacacacacacacccttctatgttgccaaattccatagtatggccttcctgttaccttctacttgaaacttcagaatcatcactgagttaccctcttctccctcagataccagtaacgtaccaaagcaagttggatctgcctccttaacctgttcaatgcttatttataggatttatttaatatttgaacttatattccttaaatgtgcaaagtgctacacaaattacatatatatatatgaatcactgactattactttgtctatttaagactgatttcccattcataatgattaactctatagtaggtttgcacttcagcagtgtagttggcaaaatacaatatacatatatattaaccttaggatcaaaaactatttattttgaacctagaagcccttgctccattcagactcaaggaattcaaatttagcagattactgaagtataataattctgtccatgactttaataaagttatttatttgccttattctaacaaaatttactaaatttctgttgaagtaaagtttatattttccaaaggaggctgagaatcatcaaggtcaa

SEQ ID NO: 87486 - DNA, 2453 bp, Homo sapiens
gtctctggaccaataaacacattaatttaacaggtagtcattcattttattgtgttttgttttgttttgtctttaaactgaaatagcccactttacccttaggcagaacagttagaaatgtctttttctctttgtatctaaatttccttttaacatatactcatcagatcatgctatttttgcttccacataagaggatgtcagataaatgaaactattttgtatcccccttcagcctttcttttcaggcataatatcttcaagtcttctttgctgcaaggtgtgcctcctcagttattttatcgtattaccctcttttgcaaatattgtattagctcattgaggcctcattaatagatacataagaatgaaataacaggagattaagatgcaactaagtttctgccgattgcatatcattaggattttttttttttttttttttttgagacggagtctcgctctgtcgcccaggctggagtgcagtggcgcgatcttggctcgctgcaagctccgcctcctgggttcacaccattctcctgcctcaccctcccgagtagctgggactacaggcgcccgccaccatgcccggctaattttttgtatttttagtagagatggggtttcaccgtgttagccaaaatggtcttgatctcctgacctcgtgatccgcccgtctcggcctcccaggtgtgagccacscgcgcccggccagaaagttgttttaaagtcagaacttgtcaattcaaactagattgtatccagtggagatctgtctgtaataatcctgagtaaatggtcaggattgccttcatttttaattaatatgctcccttatacccaaatgggtggctatgaaaaggttacagaaataggaagtaaaatatttagaacatgcataaataaatagagaaccatttacctcataagaaactgttgctttatcaaagaagacagatgattcaaccaagtcagcagaattttaccaattgattcatttattaaatcacagcattttgtcatcaccaaggtgggaagtgtacacttatgacattgggagacacaacctatgaatgtaagaagtttccaattcacatttcttgtaaaagaagggtagttttattggtagtctttcttatttcatttagcctttaaccatgatgccagacaacacttccttaaatactacctcacccactggatttcttttctaaaagcacataacggccaattgttcaccatttattggtgagttacatctgaaatacctcagtttagtgctttatggtctaaatcagttcttgctttctactcaaccaaagttattagtgcttgctatcattgctactaggaaagccttacttagaatccatgcccttccttgaatgccagagcagtgtctacaagcaagaagccggtacagactatagaaaattgtaactgttggcagcaagattcccactggcatcttgactatagcaagtgagtatctcgagcccaatttacattttttcaactgtactttcttacctgttgcatcattcattcccagctcagagtcatctcatctatgtaatgacctcaaatcagtttcgagtatggaagaaatgccaagacaggtgaaaaaagtgagacttcaaatgtaatttttatttttaattaaaaagtttttgctctcacagtcatactaggtcaaactttgtggtaatcagcatatttttatattcctgcactgtatgtagaagctgtaaatattttccagttgatcttgaatacttctaagagcttgacaccaaggatcacaaaattaccataaattgcaacaatcccactactatctaagtatacccaaacacacacacacacacacacacacacacacacacacacacacacccttctatgttgccaaattccatagtatggccttcctgttaccttctacttgaaacttcagaatcatcactgagttaccctcttctccctcagataccagtaacgtaccaaagcaagttggatctgcctccttaacctgttcaatgcttatttataggatttatttaatatttgaacttatattccttaaatgtgcaaagtgctacacaaattacatatatatatatgaatcactgactattactttgtctatttaagactgatttcccattcataatgattaactctatagtaggtttgcacttcagcagtgtagttggcaaaatacaatatacatatatattaaccttaggatcaaaaactatttattttgaacctagaagcccttgctccattcagactcaaggaattcaaatttagcagattactgaagtataataattctgtccatgactttaataaagttatttatttgccttattctaacaaaatttactaaatttctgttgaagtaaagtttatattttccaaaggaggctgagaatcatcaaggtcaa

SEQ ID NO: 87487 - DNA, 2131 bp, Homo sapiens
gctcagatcaggcttaggagattgctttaataagagaatcaggtgtataatggccttatgttgtaggtagattctttctgacaaaccacccattttaattcttcttgatccccattatagcttttgattctggggatcatggggctttattgaaatgcccatattgcattggagaccttagaagcacagtcctgtctcaagtttcaatttttgttttctgtatgaggaaatggtttggaattgcttccatgcaattttcaactctgtggaaataaatgtgattgattcagaatttctgttagyttccatgtctttttatttttgtaacagtgttcatttgaaaatttttaatgatctacagacacttctgtattacattgtcataattttgttcatagggtagttcattgttaattaggaagacattttatgaaatcatattgatttatctgtcagatggaagaaccacataacttttggggagatacttttcaacacaagtgtttgtagttaaaactggggaggcaaccacaacttttagaaaaaaatatctagaaaaattatgcatttctaacaaatggttaatatagtgaaaatgaaacttcaaaaatgtgtggactttctactctaaaggagaaagttctctgaacaaatcaattattttgttttatgtctgtgatcctttccaaatttaaagggagaaattgtgagttaaaaaaaatagatatatagaaaattgatctgtttgataagaccagttcagggcaaagctatgaattaggcaattttcttcatttggcaatatttctattgttccttaaatgtttttcctttttgtcagtatgttccttttcccgttaccttccaggcacacttatgccaaggttttactttctaattatgtccctcttccatttaaagcttacttgcatatatccctttgcttcatagccagttaaaataatacaatagttttattaacagataatggcttaatgtattattgataactttcttttttatgggaagttttggagataagcattcctaaaattaattcagataaatttaaaggagatggaggaattagagataacaagaaatatatttttgcacagacagatttttttcccaagcatttctcaaattacatctacttacttttgtataactattctgctaatattaaacacattgaattcatataacagaaatggctcacttgttatttgaaaatgaaattcattaattattagagtggtttacatttctaaagtaatttcatgtgcatttcctcatgtgattatctcaataaccatattaggaagagcacatagtgtcacctttttacaaatgaaggaattgagcctcagacaggtttatagatttgcttaaggtgaccaaccagtgtatagtaaaaatagaaaataaagcaatgtctctggactcctggcctcataattgttccatcattgttagtcaagatatataagagatgaaaatttaattaaatatccttccctttattcagtacacatatattaatcaccagtaatacgcattgactcataagggatacagagaggcagagacatgaccttggtaggagatcccagtctagtggggaaagttaagacatttaaagagatttctgtaatacaagatagaaagcaaaatgtcccagtaaaattgaggaagagatatactaagtgaatccagagaaggactttctagctgtaaagagaaaattgtagtcttcatactggagtgtgcacatggacatgggtttgtaggatgtcaaggatatggacacatagagatgaaagagaaagatagtacacaaaagcagagagaatattgagcacaaagttagagaggaaaagggtcgatgatatagaccttttctgcattttctttccttcatattgatactcccttctgttaacagtacagaagggaatactgatgtggagtactcgtctgttaaaaatacccaaatatttctttgggcagccagctctttccaactctaaacgtatgtgtttgttgagaggttgatctgaccattctgctttaaagaggaccacaattcctggcctgatcagtcagaattacagtggtccaaggatat

SEQ ID NO: 87488 - DNA, 2403 bp, Homo sapiens
tgcatatgaaaataaactttcttctcttaccctagtaggagtgtgctttattaaatttttctctgccctaatatatctgagtgaagcaagtacatactaatcctgatccagaaaattttcagagaaaatctatacgttatcatccattgattgccttaacactgatctttttaggcaaagcaattatggtgaaattgtaactaaatgtaatctgaatagtaaaatcctcaataaaataaaagtaaccttcatacctgttatgtttactctgtaaatcctaaaacatgtgcatctactctagataaatgctgtccatgagattttgaacatccattgtaccatgggtacttattattcttgttctttctcttctttttttttttaagagatgagggcttactatgttgcccaggttggagtgcagtgtcttttcacaggtgcaatcgtgacacactataaccttgaactcctgggctcaagcaatcctcctgccccagcttcctgagtagcaggggctacaggtgcatgccacatgctcagcatacttccttataatagtcatcatcttgctattacatgtattcagtgtcagtctttcctcttcattaatgggccttaactctgggtgaacattaaaaaattctaagaacttttcaaaagcactcatgcccaagccaataaaactgaatcttcatgtgtctgtgcattgggggtggggatatgggagactcggtgtggttattaatttttttaacttccaagatgattctaatgctaagctagagaaaattttaagctagagacaaaactcactgtcccaggttgttaggtctatgaaagacgggatgattagtgtatattgttgtctggaaaataatagtactcaagagtcacgtcactattgtcatgtgcaacacacgattttgtcaacaaagctcacacaggaatttcagaaacctcccatatatcaaagtaaccttggacattggcctctgagcattatttccaatgaaatagaagatgatgtaactgtgacattaattcaggtctttctaagtttaagttttgaccctgtggaggtcagcagctgctgaatactaccttaaacactcttactacaatctccctacccctggagtacacaggaagggtaaactgatgttccccttcccataccttgcctaccttttctggtccatgagcatggaatcatgcatgaataaaacttgttgcattagcaagaagaatgttaaccttttcattccctcatattaaaaggtggtgagacataaaattgctatttccagctagaatataaagacatacggatatctacagtgagtgatattcttggtgcatctaggttataggtctagctctgatagaaacactaagggagatgttgatgaagagcagtatctgcccaccttaataccaaaatcaggaatccatatctgaatttaacttatctttttaaatcaatttacgtattagttattaccacctattggattattgacctctctaaatgtgtcttcctcttccaggcttcaatgggagttctcttcaatcagcactgtgggattcagaaaatagccttgtactttctcaatagagaccactggtgacattagtgacttcaagcacgtatctgctctgcctccttctttctagatgaaagagtccaggctttccaatctgtcttcagaggatagtacctccagcctcttgagcatctcagttctgttctctagacaactacattgaattggaggtatagaattcagaggcaatttaagtggtttctcccagctttatgctttttccaccatactttttttccttagtaaaactttagttcyaattatggaataatttgagtggatcttttttatttctccccaaacccttgatttctccttgaatctcatttgtgtctgtcagttggctgacatttcccaagcatccaagtctgtgctttgtaaattttgccagtttctcggaatcattttacttttcagggctttccctttattttatccttttacagttcctgtctctcctctcttggtaaatatgtcttccaaaccctcctttccctcctactatttcctggaggaattaatgaatatctatatactccctttgttagtcttccagcctcatgcctactcctcacccctgccacagctacatatttcctgaagtaaattggattactcactgcatccaattgtcattgacagacattcaagttcatatcccctcaagcctgttttaatttattagcttgaattttaacttttaggattctatttgacaaagaacatatttaagtccttattgatgataataatcctaataataactcccacttaaagcatgtttcattcatgaagtaca

SEQ ID NO: 87489 - DNA, 1985 bp, Homo sapiens
  misc_feature (1)...(1985): n = A,T,C or G
aannnnnnnnnnnnnnnnnnnnnnnnnnnnnnnnnnnnnnnnnnnnnnnnnnnnnnnnnnnnnnnnnnnnnnnnnnnnnnnnnnnnnnnnnnnnnnnnnnnntgatttatcctacctatttaaaaaaatatatatgtttggctgattggttgtggactttgtttttatggaaattgggaaaattgccattcctcttatgccagaaggttgttagctatcccaagtcataaaggacaggacaccatcagatcctgaagaccctagtctggcccagttctgcatagcctggagagagaacaggctcttctttgaagaaaggacatggggcattgatgactatatttttctggcaggaaaccactgggacttatgctttaaaaatattcgtatcttaacaaagtcgaagatagaraggtacctatttctagtacctccattgtccaaaactatttccagcacctccattgtctaaaagcttctgcacactaaagctaaaattatgttttgccattgctcttgaaataaatgccagagaggatttctgaattgtattccaagattactctactgagctgtttctgaaacaatagctgtcttttcccactctgtttaagcttgcaattttaacaacttcacaatttccaaaggtccaaaatttatcattttaataattctagccatcaagtctcatgtttagttttccaagtcacagctcagaaaatcgtcaagataccagccatgcaaattccaatttccagcttaaaatgaaagtatcataatcaaatccaaggcactctcattcctcttggaggtcccaaaacaagctattcctcttaagtgggagagggcttagaggccccaagaccttgcaaacaagtaggaaggtctaaccagatatttctgaatgaactattactgatacctttgtaaaaactcaagctgtgcctcccatgcataaatagcaaggtagaattctaaaccacacattctagttggttatttggtcagcccccaactcaattatttttctgcataccattccaattgtgacatgttccataagcagcaagtaatactaccttctctatgttctgttacaggcactaaactaaacattttacatttgttatctcatttaatacttacaaaaatcccattagaatatatcattattcccattttgcggatttactagaataaatagttcttcaagcttaaaagtagggtggcagagctgaattttactgtgctttttaactctaaattaccctgcttagtacataatacataccaaatatttgaactgaatacctcccaatccttcttctagttatcctttaaaattgtcagtttatgtatctatcttcatcaagcagcgagaaatttgttgagatcaaggttattgtattctctgtatctaaaacacagaaggtactcaataccagaatgaatgaatgaatgaagtctatgtaaatccataattagttggtattattaatttgcttggggtacataacaaagtaccacaaactgggtggcttaaacaacagtaatttattttctcacagttctggagattggatatccaaaatcgaggtgttggcagaattggttactttgaagactgtaagaggactggccaatcctctaaccttggcttgtagatggccagcttctctctttggctcatcatgttgttttccctctgtgtgtatttctgtgtccaaattatcactcttataaaaatacttgtcatttttggattcagcctcccctgatgacctgactttaacttgatgacctctataaagaccttatttgcaaataaggtcacatgctttcttttctttttctttttcttttttttttttttttttttttttgtgctacagagtcactctgtcacccaggctggagtgcagtggtacaatcttggctcactgcaacctccacctcccaggctcaagctatcctcctgcctttac

SEQ ID NO: 87490 - DNA, 1985 bp, Homo sapiens
  misc_feature (1)...(1985): n = A,T,C or G
aannnnnnnnnnnnnnnnnnnnnnnnnnnnnnnnnnnnnnnnnnnnnnnnnnnnnnnnnnnnnnnnnnnnnnnnnnnnnnnnnnnnnnnnnnnnnnnnnnnntgatttatcctacctatttaaaaaaatatatatgtttggctgattggttgtggactttgtttttatggaaattgggaaaattgccattcctcttatgccagaaggttgttagctatcccaagtcataaaggacaggacaccatcagatcctgaagaccctagtctggcccagttctgcatagcctggagagagaacaggctcttctttgaagaaaggacatggggcattgatgactatatttttctggcaggaaaccactgggacttatgctttaaaaatattcgtatcttaacaaagtcgaagatagaaaggtacctatttctagtacctccattgtccaaaactatttccagcacctccattgtctaaaagcttctgcacactaaagctaaaattatgttttgccattgctcttgaaataaatgccagagaggatttctgaattgtattccaagattactctactgagctgtttctgaaacaatagctgtcttttcccactctgtttaagcttgcaattttaacaacttcacaatttccaaaggtccaaaatttatcattttaataattctagccatcaagtctcatgtttagttttccaagtcacagctcagaaaatcgtcaagataccagccatgcaaattccaatttccagcttaaaatgaaagtatcataatcaaatccaaggcactctcattcctcttggagrtcccaaaacaagctattcctcttaagtgggagagggcttagaggccccaagaccttgcaaacaagtaggaaggtctaaccagatatttctgaatgaactattactgatacctttgtaaaaactcaagctgtgcctcccatgcataaatagcaaggtagaattctaaaccacacattctagttggttatttggtcagcccccaactcaattatttttctgcataccattccaattgtgacatgttccataagcagcaagtaatactaccttctctatgttctgttacaggcactaaactaaacattttacatttgttatctcatttaatacttacaaaaatcccattagaatatatcattattcccattttgcggatttactagaataaatagttcttcaagcttaaaagtagggtggcagagctgaattttactgtgctttttaactctaaattaccctgcttagtacataatacataccaaatatttgaactgaatacctcccaatccttcttctagttatcctttaaaattgtcagtttatgtatctatcttcatcaagcagcgagaaatttgttgagatcaaggttattgtattctctgtatctaaaacacagaaggtactcaataccagaatgaatgaatgaatgaagtctatgtaaatccataattagttggtattattaatttgcttggggtacataacaaagtaccacaaactgggtggcttaaacaacagtaatttattttctcacagttctggagattggatatccaaaatcgaggtgttggcagaattggttactttgaagactgtaagaggactggccaatcctctaaccttggcttgtagatggccagcttctctctttggctcatcatgttgttttccctctgtgtgtatttctgtgtccaaattatcactcttataaaaatacttgtcatttttggattcagcctcccctgatgacctgactttaacttgatgacctctataaagaccttatttgcaaataaggtcacatgctttcttttctttttctttttcttttttttttttttttttttttttgtgctacagagtcactctgtcacccaggctggagtgcagtggtacaatcttggctcactgcaacctccacctcccaggctcaagctatcctcctgcctttac

SEQ ID NO: 87491 - DNA, 1772 bp, Homo sapiens
ttccatgagatagtattttacataataaatacagagtagggtaattatatgcagtttactagggtaccttaatgcagtgtgtgtgaacgggatacctcttttatctgtagcattataccaggtacctaagagataccatgaaggtggaagccatagttcccgtagagttcagatgctcaaacagtgaaaccttatatgcatcaacctgggaacagtaagcttatggttctagggggattgtgtcctgtgtaaaattcagagggtccaaaaggtgaagagatgatggatgtggtcatgatattgggctccaaaactcacggartaaatggccaatggtgaagtaaatggtggtaaaagcagagattctatttcattataaaatatgaaaaaaacatgaaaggcagaatccagactatagaacaacatgtaaggcaggaattaaagtttcaatgaaatgccgccttgatctctaaaagtgctccaaaatctcttttgtagcgtttcaggaaattttgattcattttatttttgaaacagttgacatttgggggagtgggctaagggatgaaaatatgttttaaagtgcttgtttttttaaggacaatattttcaagaactgtacttcaggagcatgtcacagttatgagcctgtaggcaagaacagggttttttttttcctctccttttagggaagaacaacatattgaaggatgattaagacacttgaaaaatgtaacagaaacatacacacacacgcattgcatacacaggatccaatccctgatgccctttgcctctcttcttgttttatttcatttatttatttatttttagacagagtctcactctgttgccaggctggagtgcagtggtgtgatcttggcttactgcaacctctgcctcccagcttcaagtgattctcctgcctcagcctcctgagtagctgggattacaggtgcccgccaccatgccaagctaatttttgtatttttagtagagatggggtttcaccatgttggccaggatggtctcgatctcttgacctcatggtccgcccacctcagcctcccaaagtgctgggattacaggtgtgagccaccgcacccaacccatctcttcttattttttagactatcccgttagttccctttggtcttggacatgtctgtcatgacatgtttccaaggccaatgcccacagctgggagtcatgatcagcttacacgtcctggcttgtaggttcgacgaaacgtcaggagaacatttcttcttcagacaaatgaaaagctgagatgaaacgtttttgattgatggctgtcagagaagcgtaaaaacttcagcttcactgccattccctttgtgacagggaaggggccatcatctcctgaagatgggggtgtcattattaagtctaaatgtcctgctcccgtcatgaagaattgcatcacacagaagcctgcaaagtcagcccgacttgagtcagtcctactcacaccaaagaggatacggaaactggtgaaggataagagacaattgtgatttcacctcttcctgcgccagcgcccggtctcttctccttcattctgaaatgttcgtggactgcctgctacgtgccatgcttcttgctggacttatatccacgcttgtcctgcctttaaagagcttattctgtctctatgggtgggatagggaataaggaaaacgcaaatattctactacacagtggacataacaatcagaaaaccgtcagaggaaaggatgttgaggagggag

SEQ ID NO: 87492 - DNA, 753 bp, Homo sapiens
gtgacgctcaagcccctgtttggttgtaaacttcctttcacaatgttgacacggaaacataaacgtttcaaatacatcaccattggcctcttctttagttctggggatttgcatggcaggtgttacytctgagcagtcttcaagagtttcttctgaagttgtttttggttcctctaataaatcttctggcttctcatcacaccgtatttctggctctttcacagaattttcatttggcatgctggcttcttcttccccctcgtcttccaactcatcatcatcatcttcttcttcttctccttcaacatcctcctcttcctcctcctcctcttcccccaaatcattcacctcacaagctgccgcttctaatcgctcgtctggttctggctgtggctcccaggcaggggcaggggttgctagttctggaggcacctcctgactggccacctcctggagggtggccggctgctcaagtgctgaggctgaaggcttctcttcgtcttctttaggacctagaaagcacatggaagcagaagcatggaagtgaagcatgggaaaccagctacttggtgaacaatctgaatgattcaagttatttctcttaccacctaaaacataagggagatgatgatgaacaataaattacttctactttatatacttaattgacaaagttgtattggatatgaatccacttcattcaacaagtatttagggtaccagccacgtaccaggcaatattcccggcagtga

SEQ ID NO: 87493 - DNA, 858 bp, Homo sapiens
gtgcattaaatttacctctaaatacagctttatttgattgcgatgtacttgatatatatttacatttttatttattccaaagcaccttaaaatatctcttttgtttcttccttgacccatgaattattcagatgtattctatgtatgttccaaatactgggagatttttgagatatacctctgctattgaattctaatttaatcccattagggttaaggagcaatcctaagatagtttaaatacacttaaatgcgttcaaacttattttatggctctaatatgatctattttaaaatatgtttcctgtatacatgaaaagattgtggattcagttgtaggatgtagtgtttcatattgacaattagaacacttttggtcagttgggtcaatttcaccgatagtgttgttcagtgcctcaataaatccgatgactaccttctgacaacttgtcctatctattcttgagagaaatgtattgaaatctctgtctagatttgtagttgtctatttctccttaaagttctatctgtttttgcttatttttattggttccttgcaaacatcaaacaaatttctaaaccagactatccggaaagaaagaaagaattaacmaattagaaacatcaatagtgagagaggtagcaacaatacagatttatttcatggataaaaaaataaagtattaattgttctatttttgttgagatctaaagttagattgtttatttgaaatcttaatttttttacttgtttattggtataaactctctgggaacaccttttgctgcatgtcataaattatgttgtgttttcatttttgtctcaagatacttaccttttgattttttatttgatgc

SEQ ID NO: 87494 - DNA, 858 bp, Homo sapiens
gtgcattaaatttacctctaaatacagctttatttgattgcgatgtacttgatatatatttacatttttatttattccaaagcaccttaaaatatctcttttgtttcttccttgacccatgaattattcagatgtattctatgtatgttccaaatactgggagatttttgagatatacctctgctattgaattctaatttaatcccattagggttaaggagcaatcctaagatagtttaaatacacttaaatgcgttcaaacttattttatggctctaatatgatctattttaaaatatgtttcctgtatacatgaaaagattgtggattcagttgtaggatgtagtgtttcatattgacaattagaacacttttggtcagttgggtcaatttcaccgatagtgttgttcagtgcctcaataaatccgatgactaccttctgacaacttgtcctatctattcttgagagaaatgtattgaaatctctgtctagatttgtagttgtctatttctccttaaagttctatctgtttttgcttatttttattggttccttgcaaacatcaaacaaatttctaaaccagactatccggaaagaaagaaagaattaacaaattagaaacatcaatagtgagagaggtagcaacaatacagatttatttcatggataaaaaaataaagtattaattgttctatttttgttgagatctaaagttagattgtttatttgaaatcttaatttttttacttgtttattggtataaactctctgggaacaccttttgctgcatgtcrtaaattatgttgtgttttcatttttgtctcaagatacttaccttttgattttttatttgatgc

SEQ ID NO: 87495 - DNA, 858 bp, Homo sapiens
gtgcattaaatttacctctaaatacagctttatttgattgcgatgtacttgatatatatttacatttttatttattccaaagcaccttaaaatatctcttttgtttcttccttgacccatgaattattcagatgtattctatgtatgttccaaatactgggagatttttgagatatacctctgctattgaattctaatttaatcccattagggttaaggagcaatcctaagatagtttaaatacacttaaatgcgttcaaacttattttatggctctaatatgatctattttaaaatatgtttcctgtatacatgaaaagattgtggattcagttgtaggatgtagtgtttcatattgacaattagaacacttttggtcagttgggtcaatttcaccgatagtgttgttcagtgcctcaataaatccgatgactaccttctgacaacttgtcctatctattcttgagagaaatgtattgaaatctctgtctagatttgtagttgtctatttctccttaaagttctatctgtttttgcttatttttattggttccttgcaaacatcaaacaaatttctaaaccagactatccggaaagaaagaaagaattaacaaattagaaacatcaatagtgagagaggtagcaacaatacagatttatttcatggataaaaaaataaagtattaattgttctatttttgttgagatctaaagttagattgtttatttgaaatcttaatttttttacttgtttattggtataaactctctgggaacaccttttgctgcatgtcataaattatgytgtgttttcatttttgtctcaagatacttaccttttgattttttatttgatgc

SEQ ID NO: 87496 - DNA, 1217 bp, Homo sapiens
attgaatgtactacatcctgctgcattgtagtcaagaatgattatgttttggatataagaacgttggtagttgtaggtaatatttgttgaggtagaaataaaaagggataagaaaccaatgttgtgtctctctgtgtgtgtgtgtgtagtggggaagagaataaattcatatttagatttttcatattgaagatacctttgtgaaattatacaaatgacatcattatgtcaatagttatgtagatgaattcagtgttcaagatagaggtcatgagtgaaaggataaatttgtcagtagatgtatttatgaacataatagtggattagtcaatatcagtggttatcaaccatggcagtaaaatgggaggattttgaaaacacaatattgatttttgacaattcagggtaaatctcctgatgacaataacccagattttcttgagagactgagaagctgaacaattctgagagactcaggctgggggacaaacaytggagttaagtgtctaagggagaacaaataaattttctgagctttaatacagaatgacacattggtaccctacgcatgagggtaaatcagaaatagactgttctataaggaaccaaagcccaattctgaatcatctcaactattaaattcttttaatccaggatgatttgcttatagccacatgcaagaaacaaacctgtatcttacctgaaataaaatgatagttttgtttttcaagcaatttacattaaaaacattctgacatataatatgaccaaaatatcagatttaacatcaagctacagatagaaaataaacacagaatcatagagtatccagatagtagacttagacacggactttaaaacaaccacacttaatacatttaggataaatattggcacagagtttggcatataggccaaattcagtccttagcttgtttttgtacggcacacaagccaagcatgttttttacaaatatatggccccatcttatatttttctttgtgttattgttattgttgatgttgttgtttattcatttgtttttataattctttaaatatgtaataaaaaacagtattcaaaatatataagaaatcctaaaatataatggaaaaatagagctcaatggaaaaaaaaagccataaaatacaatttacagaagaggaaacacaaatggtctatatatacgcatacatatacgcacacatatacatgc

SEQ ID NO: 87497 - DNA, 725 bp, Homo sapiens
aaagacaaaggcgcctggcattagcactgcttttgtattctcttctggaagtgctttcaaagtcactaagcaagagaatgaaataagaaatataaataagaaatataaatattaggaaaagaaaccagatgatcaatttttgcacatttcataatcttctacctaaggaagaaaaaaacaagaaaatgagtttaaaaatctgttagaggccaggcgcggttgctcacccctgtaatcccagcactttgggaggccaaggcaggcagatcacctgaggtcaggagttcaagaccagcctggccaacatggcaaaacctctactaaaaatacaaaaattagccgggcctggtggcgggcacctgtaatcccagctactcgagaggctgaggcaggagaatcgcttgagccccggaggcggaggttgcagtgagccgagatcacaccactgcagtccagtctgggcaacagagcggactctgtctcaaaaaaaaaaaaaaaaaaaaaaaaaaatatgtyggaaatagtaacaatggccatttaaagaggccatttcatttggttcctgggatgcctctgcacctctttcctgctttatttctcctcttggtaatgggcaaacatctcctcaataaaaaggttagcctgtccccattgaaatctcttagcatgaggactgcagccaagccctatggctcaatttcaagtccccttttaaatggaaacca

SEQ ID NO: 87498 - DNA, 771 bp, Homo sapiens
tgataggtatgatttgccctcaaaactatttgctttacattggtgatactttttaaattcccattacatgcaaggctctggggtaatactataatgaaagaaaccagcttgagttctactctcaactcagtgttcgggctgctaataaaatgtgcacacaagtagctataatacaaatatagataagtgttgggagaagtagaaatgattttttcttcctaggagaattgcatttaagatggaccttaatgtgtgactagaatttagacccgagagagaggagcaaggcattcagagacaggaacagcaagctcaaaggcacagagtccagaaagcttgtgacacttacagataactatgtctttctgtttgtttggagcaaaggatctgaaaggaaaccgatggaaataagttttgatgctggttacascaggattctaaatgagtctgaataaggagctgaagactttgttggttttttttttattatgtatgtatgtatgtatgtatgtatgtatttatttattttttgagacagggtctcactctgtcactcaggctagagtgcagtggcgcagtcatggcttactgtagcctcgacctcctgggctcaagcaatcctcccacctcagcctcccaaatagcctagactacaggtgtgcacggccatacctggctaatttttaaattttttgtagagacagggtcttgctacgttgcccaagctagtctcgaactcctggcctcaaatgaccctccggccttggcctc

SEQ ID NO: 87499 - DNA, 1212 bp, Homo sapiens
  misc_feature (1)...(1212): n = A,T,C or G
atgtagtgtccagcacttccgcgtgtttttaagggggaggatttttcataatatcttgttcacactaatcccacttcttcaaatttcagtagagcaccaagtcttacttgtgttttcttcaaatttcagtagagagcyaagtcttacatgtttaggtcttacgtgtttagagcctcctgtcttgtgcttgcattgaggatatctcaacacaataagaaactagtctatagcttctttatttaatccccagttgtagggaaaaaaagttgtccttgccacaactttctatgaagcccatgaaacccttcttgagccagggcctccagcaatggtctcaaactcacttccagctttcatcactgcgaatcaggaggtccatgccagcccctctcagggctttgaatttcttgtcaatcttacaacctgttaaattatttatctttttttgagagaagttatgtctcagtggtttctctttgtgaattttatatattccttctaaatgcctgaggcagagtagggtatcgaagtgtgtattgtttgtnnnnnnnnnnnnnnnnnnnnnnnnnnnnnnnnnnnnnnnnnnnnnnnnnnnnnnnnnnnnnnnnnnnnnnnnnnnnnnnnnnnnnnnnnnnnnnnnnnnnagtagggtatcgaagtgtgaattgtttgttatatcttgactggacatcaaatatgccttttagaaagaacattctggcagcaggaggaggaccagattgcagggagtgtttctattagaccagtaagagggctgttgcaatagtttacacatgattaaaaagttcccctaagccaaataattgactgttgtagtagaaaaatggggattgattcaggagattattcaatggaagaacaagtaaattgctgtaaagctagatattgaagaaatataggaaaaaatccagacttttaataacattcattgaatgcttatagtgttcacatgtctaagtcaaatgttaaatacgttgtcttttttactataatattagaagcaattttataaagtacattcttggacaaggtgacaaagctgaggcttgcatacccaggattcaaacttaggtggtctgtttccagaatcatcattattaatctcaagattgtactcaagattgtagcaatctgtagtgtagttgagctatccataggaagagacagctgtgaatgtgaatgagtttaaac

SEQ ID NO: 87500 - DNA, 739 bp, Homo sapiens
caaatttctaagtggttccatctgtttttatggggaatttggcttaggctgattttaaaaatgaagaaccaagtaagaaatccgaggctgggcaaggtggctcaggcctgtaatcccaacagtttgagaggccgaggcaggcagattacttgaggtcaggagttcaagaccagcctggtaaacatggcaaaaccctgtctctactaagaatacaaaaaaattagctgggtgtagtggcacactcctgtaattccagctacttaggaggctgaggcagmagaatcgcttgaacccgggatgcagaggttgcagtgagccaaaatctcgccgctgcactccagcctgggtgacagagtaagactctgtcttaaaaaataaagataaataaataaataaataaatccaaacatccttacatttagtatttaggtatactctttgagtggttttaagaaataacaaaaccaatgaagtattaacaacaacaaaaaaaactgaaccagaagatgatgaaaagcctctgcatgtactaccaattcataggatgaaggcacaggttaaactacatagggatggaatcagaaaaacagaaattgcaggaaggatataggacaacccaatttcttcaacaacaacaaaaattgcaaggaaatataaaagaaagaaagggacagaaccaatagattaaagagatttgaagagacctatcacaatcgcaatgtatgtacctaacttggat

SEQ ID NO: 87501 - DNA, 739 bp, Homo sapiens
caaatttctaagtggttccatctgtttttatggggaatttggcttaggctgattttaaaaatgaagaaccaagtaagaaatccgaggctgggcaaggtggctcaggcctgtaatcccaacagtttgagaggccgaggcaggcagattacttgaggtcaggagttcaagaccagcctggtaaacatggcaaaaccctgtctctactaagaatacaaaaaaattagctgggtgtagtggcacactcctgtaattccagctacttaggaggctgaggcagcagaatcgcttgaacccgggatgcagaggttgcagtgagccaaaatckcgccgctgcactccagcctgggtgacagagtaagactctgtcttaaaaaataaagataaataaataaataaataaatccaaacatccttacatttagtatttaggtatactctttgagtggttttaagaaataacaaaaccaatgaagtattaacaacaacaaaaaaaactgaaccagaagatgatgaaaagcctctgcatgtactaccaattcataggatgaaggcacaggttaaactacatagggatggaatcagaaaaacagaaattgcaggaaggatataggacaacccaatttcttcaacaacaacaaaaattgcaaggaaatataaaagaaagaaagggacagaaccaatagattaaagagatttgaagagacctatcacaatcgcaatgtatgtacctaacttggat

SEQ ID NO: 87502 - DNA, 739 bp, Homo sapiens
caaatttctaagtggttccatctgtttttatggggaatttggcttaggctgattttaaaaatgaagaaccaagtaagaaatccgaggctgggcaaggtggctcaggcctgtaatcccaacagtttgagaggccgaggcaggcagattacttgaggtcaggagttcaagaccagcctggtaaacatggcaaaaccctgtctctactaagaatacaaaaaaattagctgggtgtagtggcacactcctgtaattccagctacttaggaggctgaggcagcagaatcgcttgaacccgggatgcagaggttgcagtgagccaaaatctcgccgctgcactccagcctgggtgacagagtaagactctgtcttaaaaaataaagataaataaataaataaataaatccaaacatccttacatttagtatttaggtatactctttgagtggttttaakaaataacaaaaccaatgaagtattaacaacaacaaaaaaaactgaaccagaagatgatgaaaagcctctgcatgtactaccaattcataggatgaaggcacaggttaaactacatagggatggaatcagaaaaacagaaattgcaggaaggatataggacaacccaatttcttcaacaacaacaaaaattgcaaggaaatataaaagaaagaaagggacagaaccaatagattaaagagatttgaagagacctatcacaatcgcaatgtatgtacctaacttggat

SEQ ID NO: 87503 - DNA, 411 bp, Homo sapiens
cccaggctggagtgcagtggcacagtcatagctcactgcagctttgaactcctggactcaagcagtctttccacctcagcctccaaaaatatttagacaatcatatttaaayggtaattttgcaaaatccacttgaaaaagtgttgccagatggcatgtcaaggtcatttgcaagtgtttgttcattttatctgagggaacttttggaagtagagagaaatgaccagttgaaaaaagaggattctgagatctctgttgggaaggtaaactggggtttcttgctgcttaatcttgtttattatagtgattatttcaacatagtttctttaaaaaattactcagtattgtaacaacttaatattgcaccattaaacttggtaaaaatctattaaaatctgaaaaattaatgca

SEQ ID NO: 87504 - DNA, 705 bp, Homo sapiens
tgcatgagggagaggagaactgccttgctgagccccgcctggattaccaacatatgcaatcatgagctacataaatgctggttattttaagctattatattttgcgatggtttgttacttagcgatggttaactgggacacaggctaacttggttcttcaccctgcagaaagcagatttgttaatttcttcatttacttttcttttgctaaatgtatgctgatgaaaattgttgaatatgttttaatttgcaaaggatttgatgggaaaataactgataaagattttttttccacaaatatgtgagtgttttattgagcacaatatcaactggaaccaataaacaattatgcacacagctggcacccagcaatgacacacagctgcactggaacattttgcccygtgcatgtaccagaaaccacggcatcattcaccaacaccatcctgttaagcctctgggagtttcatgaaaaaaaaaaaaaaaaaaaaaaaaaaaaaaaaaaaaagttttggtgtttttgaaaatttgttttttaggggaattttttaagaaattgaaaatggcctcggaatttggctttaaaatttgttttctgggtattcctttttctttctaggccggggaaggtgcttggggggtttttaaacctcatggtggatttactggtttttttcagggggaacaattccaaccaattaaaat

SEQ ID NO: 87505 - DNA, 967 bp, Homo sapiens
gctatccccagaagctacatgtctttagaaagaggaaagaataacactccttcaataacagcaaccctcaggtgggtggtgaaggatctcactctctgattacagtggtgcttcctggaagacctgaaataactgtccgcatggagaagtactcagagaagcagaaagggtcagcagatgaactaaaaaacaactttatgagcagatacctaagagttaacgtttcatgttgtagaagtcaaaactacaactcccgtcaccaacccaacgcccagcctttaaatgttttacctatacttacagcggtgttcctttaaatatgatcaccgataaagaggggtgccttttaggtttagacccgcctcaaattgagtaacaaatcagctctttcacactcaggctgcgttttggttaactgcagcagtgatgttcattatccttcgtgagtaagccctgaggctctttgggcatcagtgctcataaattaatatttatgatgaagattaataaaactgaaatgaaaaaaagggacttaaaattaaaatttaaaaagctcttcaatctctaaatccatttccagtgagagggatggaagaacagttagtaccacgtgtgttcgcaagcatttatcagtagacaaatctcttaattgtaaccattatattgtgaacgatccactaatccttcaatttcattcttcactgtttctcatttaagcaattcttgcattttttctatgcctagttcctcagttaaagaaggaaaataaacttcttgtgaaaaaatttacttttcctttgtattcttatatacccacatgcttttctgtttatcctttttgttaaatatgaaagaaaytgaataaaaagtctgaaaaaggaatttaagagaaacctgtgctatttatttgcccctaaaccaccactacagataatcttctaatttttaaagaccttcaaataataga

SEQ ID NO: 87506 - DNA, 1951 bp, Homo sapiens
atatacacatatgtacacatrcatatatacacatatgtacacatgtatatatagaaatataatttaatgtgtatttaatattccattggtatatttgccactctatgcagtactatcaaactggctcagttaacatggtgtataaatattatttatatcttatggggtacccccactgccctccgtccctccatccccctagctttttgtctttaaaattgttttggcacactagagtccttttattctacataaatattaaaaccatatggtcatgtttcatgaaaacaccttttaggattttgattagaattatttttagttcatagattaatgggagaaatgacaaccttatgattttaactttttccactcgtgagcattatttacagtttatagaatgtcttcaaaagcatttttaatacaattcatttacatatttggttgctattaaaataacattttaacatattatactctcgaatattataaaatagtggcacagagaaattcaattgatttcttcgttttttttgaacagtctcactctgttgcccaggctggagtgcagcagtgctatctcgcctcactgcaacctccgtctcctgggttcaagcaatcctcctgcctcagcctcccaagtagctgggacttacaggtgtgcaccaccatgcctggcaaatttttgtatttttagtagagacagggtttcaccatgttggccaggctggtcttaaactcctgagctcaagtgatccatccacctcagcctcctaaagtgctggaattgcaggcgtgagcccactgtgccctgccaatttcttgcatagtgctcttatgtccaccatccttgctgaaattttactgattaatgtctatgtctattttttggttatttataaagataatattgtcatctctgaataacgaaatgttgtatttaactctttatagttccaatcagtaatctttttcttgaagtaatgggctggctaggactccacgtaaatgtataataataaaattacagttggcatccttgtctcttttctgattttaaatttcatcattagatgtttgatacaggttttatacacatacacacgatcatattaagagagttcttagttggtcaatctttttaaaaaatcaaaattctgtttcagcatacattaagatgggcatgttactttcttaatccttttattgtggtcgacttggtggaagatgtataacacatctaatgttaagccacccatgcttccttggcatgaattcaactttgtcattacatgcattttgaatatattggtgtttttgatttaccaatgttatattttatttatttatgtattttagagacagggtctctctgtcacacaggctggagtgcagtggtgcaatcctagcttactgcagcctcaaactcctgggctcaagtgatcctcgaggtcgcctcagccttttgagtagctgggactatagacacatatcacacacagctaggttgtttattttttatagaaattgggtcttgctatatttcacagtctggtctcaagctcctggctttgaatgatcctcccaccttggcctccaatattatattttagacttttctgtctatgatctcaagagagtagcctaaaagtcccctttcttgaattatcctcatctgtttgtgtataaaggttatactaacctacttagttaggttagtcttctcatccagaaaacagaaatatatggatatatactccacttcattaccaggaactgtaaatttaaaaattaaaataaaccatttttattcatgagatttgcaaattaaagtttaaaagtagcaacatgttggttagaatgtagagcaatgtaaaattttcatatctgctggtacaaatgggaatttttacaaattggaagaataattttccaatatttaacaaagttg

SEQ ID NO: 87507 - DNA, 1707 bp, Homo sapiens
cactgaaagctttggtaatgatcatagcaccttggatgggtattccagaagaaccaccttgtcttcaaaaatgtatcacaccaaaggtaaggatgttaagactcattcttagcacatcagaagtgtcttttgaattattttagtgaaacgatgcaggtttarcagtaactatgtacttttttcctactgtcttctccttcgtaggacaagaaggttctgtttgtctccggtcatcagactgtgcctcaggattgtgttgtgctagacacttctggtccaagatctgtaaacctgtcctgaaagaaggtcaagtgtgtaccaagcataggagaaaaggctctcatggactagaaatattccagcgttgttactgtggagaaggtctgtcttgccggatacagaaagatcaccatcaagccagtaattcttctaggcttcacacttgtcagagacactaaaccagctatccaaatgcagtgaactccttttatataatagatgctatgaaaaccttttatgaccttcatcaactcaatcctaaggatatacaagttctgtggtttcagttaagcattccaataacaccttccaaaaacctggagtgtaagagctttgtttctttatggaactcccctgtgattgcagtaaattactgtattgtaaattctcagtgtggcacttacctgtaaatgcaatgaaacttttaattatttttctaaaggtgctgcactgcctatttttcctcttgttatgtaaatttttgtacacattgattgttatcttgactgacaaatattctatattgaactgaagtaaatcatttcagcttatagttcttaaaagcataaccctttaccccatttaattctagagtctagaacgcaaggatctcttggaatgacaaatgataggtacctaaaatgtaacatgaaaatactagcttattttctgaaatgtactatcttaatgcttaaattatatttccctttaggctgtgatagtttttgaaataaaatttaacatttaatatcatgaaatgttataagtagacatacattttgggattgtgatcttagaggtttgtgtgtgtgtacgtatgtgtgtgttctacaagaacggaagtgtgatatgtttaaagatgatcagagaaaagacagtgtctaaatataagacaatattgatcagctctagaataactttaaagaaagacgtgttctgcattgataaactcaaatgatcatggcagaatgagagtgaatcttacattactactttcaaaaatagtttccaataaattaataatacctacctaaatggtcaatatttttcggacaaggaagaaaatcatccacaaaaataatactccaaagtacttggtgattggcaggaacaggatgtgtgcccataaatacagttaacaaatacatgcagattttgtaccaaacaaaataatttgcagtatcttgagtactactgcatgcaaagcagacttgttctaattattttggttttaaaataatcaataagtagatatcacaaatccttcctcattccactcttcttttctctgctaggtgagtttcatatttcaagttttgtttaacctgaaatctattgattggaatgaggatacggatacagtattttaaagaaaacccacaggaataaaatctaaattttctttgcatttgtacttgccagatttca

SEQ ID NO: 87508 - DNA, 1029 bp, Homo sapiens
atattttatcgaatgttagtatactctacacgctgtcctgcaccttgctttttttactctatgcgtcttgcagatcattttatataatacatagagaggtgactcattctttttaaaggttacattaagtttgtagtatgtcagaatggcaatactataattgttttaaccagtgacgtttaagttgtttccagattttttgatctaacaaataatgtgtcatgagtatagaatttttatgttcatgtactagtatagttataggatgactcatatttgaagcaaagtacaaaacgcatgctttctgtagctactcataaattctggtatgagcaaaatgtcaagatgcttgcttatcaccgaccaagtgatgattaagctcttgctaaactgtatcaaaggagaaaaagggaaatacaggcttatcctaacaatttcacagtgaacagtaatctctggcattcagttaaagctagacttgttctaattactttgattttgaaattattattaaataaaatcacaagccttttctcaccactcccttttcttgttttgctagaagagttgaatatttcaaactttgtctaatctactgataagaatgagcctggcccttcacttttaaattggtgacattatcaaactttatcatactaccaactttcttttacggtcttagagaaaaatagacaatactaccattaggcttataaagtgtcttccactgagttctatgattgcaattttcataccttctaaaatactattctgaggacaatattaaaatataaaagaaataccttatctttaccttaaagaagaagaaaataatctcgtaatttaagcattcaatgtttgtacaaaagtgtgtgtacgtatgtggtcctttatatattgagtgtaagggttgacagcttagaaatagttaatcacatcaaaaatctaggactacaatctaggtaatgctaagaaattttaattccayatacctttatttagtctgccacatccagtgggcactatgct

SEQ ID NO: 87509 - DNA, 777 bp, Homo sapiens
aagacacacaaaacctgtattaaagagagtaattaatttccaaagaaatcattcgtcaaggtgtatcatcatctcccctctgaattgtgagaaatttgaaggaaagacctgactttagtcatctttgtactcactgaagctgccacaaaccacacttcaaggatggatcagttaaaaawaaaaaaaaaaaaaaaaatcaacagatctggctcatgagggctggggtattacatccttgctagcaaagaggatgcctagtgttaaattatctaatgaggtcctctgagcagagagaaaaggataggaggagtactattctatagaaacattagagcaataaatatttattgcctccttagtatgtacatgctgcaaactctactcaactctgggaataccagcagaaaacaaactcttctggaagggaagacagacataaaacaatcacacaaatgaaaagataattacaaagtacaataagtggcataagggtgctataaaagtgtaacagggactctaatttagattaaactttaaactagagcatgaaattagattgctaggttacgtgggttgatataggttatgtaattggttgtaataggttgaccagagtaggccttttggaggaaacagcataacacttatactgaaacttgataaagtgaggcattggccagataagtatgggaagaaccttccagaccaaataagtaacaccatgaggtaggaaagtgctcggcatttcagtggaacagagagaaggctattgtttct

SEQ ID NO: 87510 - DNA, 733 bp, Homo sapiens
ttgtgtaagtcctctcattggtaggatctaaacttgataacaatggggtctgtaaaatgcaatttgcagtcttcctgttcttgccatttatgggcacagtagagaacagagatgctattgagtacaaatggacaatctcttgtagaggaaaagaattaagataattggctgggcgtggtggctcatgcctgtaatcccagtaytttgggaggccaaggtgggtggatcatctgaggtcaagagttctagactagcctggccaacgtggtgaaaacccgtctctactaaaaatacaaaaattagccgggcgtggtggcaggtgcctgtaatcccagctactcgcgaggctgaggcaggagaatggcgtgaacctggcaggcgaagcttgcagtgagccaagatcacaccactgcactccagcctgggcgacagagtgagactctgtcttaaaaaaataaaaaataaataaataaagaattaagataattaaaatttcactatcaaaaatttatttttttcatttaaaaaattcagattttccccaaagcaacaaattaacataggacatactgttctgtgtgttttacatttaatggttaaaatgaaattaaaaggtcatgtaattagttagaaaggatgttaaatgcacgtagcacggtgcggcacgcaagtgctggcttcgaagacaggcaacgtttctaatactagccctggtaattcttagctgtgactt

SEQ ID NO: 87511 - DNA, 733 bp, Homo sapiens
ttgtgtaagtcctctcattggtaggatctaaacttgataacaatggggtctgtaaaatgcaatttgcagtcttcctgttcttgccatttatgggcacagtagagaacagagatgctattgagtacaaatggacaatctcttgtagaggaaaagaattaagataattggctgggcgtggtggctcatgcctgtaatcccagtactttgggaggccaaggtgggtggatcatctgaggtcaagagttctagactagcctggccaacgtggtgaaaacccgtctctactaaaaatacaaaaattagccgggcgtggtggcaggtgcctgtaatcccagctactcgcgaggctgaggcaggagaatggcgtgaacctggcaggcgaagcttgcagtgagccragatcacaccactgcactccagcctgggcgacagagtgagactctgtcttaaaaaaataaaaaataaataaataaagaattaagataattaaaatttcactatcaaaaatttatttttttcatttaaaaaattcagattttccccaaagcaacaaattaacataggacatactgttctgtgtgttttacatttaatggttaaaatgaaattaaaaggtcatgtaattagttagaaaggatgttaaatgcacgtagcacggtgcggcacgcaagtgctggcttcgaagacaggcaacgtttctaatactagccctggtaattcttagctgtgactt

SEQ ID NO: 87512 - DNA, 733 bp, Homo sapiens
ttgtgtaagtcctctcattggtaggatctaaacttgataacaatggggtctgtaaaatgcaatttgcagtcttcctgttcttgccatttatgggcacagtagagaacagagatgctattgagtacaaatggacaatctcttgtagaggaaaagaattaagataattggctgggcgtggtggctcatgcctgtaatcccagtactttgggaggccaaggtgggtggatcatctgaggtcaagagttctagactagcctggccaacgtggtgaaaacccgtctctactaaaaatacaaaaattagccgggcgtggtggcaggtgcctgtaatcccagctactcgcgaggctgaggcaggagaatggcgtgaacctggcaggcgaagcttgcagtgagccaagatcacaccactgcactccagcctgggcracagagtgagactctgtcttaaaaaaataaaaaataaataaataaagaattaagataattaaaatttcactatcaaaaatttatttttttcatttaaaaaattcagattttccccaaagcaacaaattaacataggacatactgttctgtgtgttttacatttaatggttaaaatgaaattaaaaggtcatgtaattagttagaaaggatgttaaatgcacgtagcacggtgcggcacgcaagtgctggcttcgaagacaggcaacgtttctaatactagccctggtaattcttagctgtgactt

SEQ ID NO: 87513 - DNA, 670 bp, Homo sapiens
tgaacctcactttgacttctcaccacacttcactgttgcctctcaactctcctctacacccacattcagcgacagccaactggtgtgaaccaaacccaatacacatcctcacctctttgccttgactcatgttcttccccagctgcttgtcttatctatctaatccttccatttgtctaagttccttttcctcctctcagtgggatggtcccagcccacagcgacatgcctcccagcagagggtgtcagtacaccccatttggcaatagttccacattctaaaatattttatcacttatactcccaatsattccacagacatttatggaacatccacatgacaatgggcgaggcctctgaatcaaatgaatctgctttttctctcagagccccttagacatgtcacaaatgtatactgcagctgtgtggatgatgtcgtagcagtctgtactgtcatattccacacatggacagcaagttttaaaccactgaaatcaagaatagtataatctcagaacttgcataaagtaataggatgttttgttgttggtagtagtttgtgtttttgttttttttgagatggagtctccctctgtcacccaggctggagtgcagtagtgcaatctcagctcattgcaacctctgcctcccaggttcaagcaattcccct

SEQ ID NO: 87514 - DNA, 1095 bp, Homo sapiens
agtctccgggaaccagttcaattccagcatcctaatacacactgtctggtctccctagttcagcttgccctccctgataacggcccctttggcagagcagcttattcttaatgctaacagtaggtatcacttacagaacacttgctgactgttcagttcccatcaaagaaagccttatgtggcagatcctttgatgatgcttgttttacagacaaacgtttggggcttaggttaagaaacttgagagggggcaaactaataagtggcaaagccgagctttgaacctaccactcttctgcttcagaattcatatccttaactcatgcactcccatttaattatttatgtttattatttcattgtttggtgagcgcttatattgaaaattcattttttttttggtggggggcatgctttctgtcactttgcagaaacaaataaaagttgagctgaaccctcaattaagwtctttccagtgcgatgattcaacacaatattctaaccataaggatactcagaggaaggagtatgccatccagaagtctagtatctttgtaaggcacgatttttgccaggcacaattacaggtgaagggctcattgaactaaagggaggaggggtcctatggtcacatttacctccaagcccttctctgcaccctttccctcccttctttcccctctctccctcccaccctacaagcttaccttggttaggaaagcatattctgagaaaatcaaaaggaaaaggcatgtgtgcgattcaggctgctatgacacacacacacttaactttgttgcctatggattctgctttctaataacttgccctcaacatgaccccagggagtggattagaaagtttttttccccatccccattttttacctgttattcacactgtgagcaggaggacccttttcaccatcgttgttcggctgaacttgcttcgcggtttgttctcggctgggtcaggaactctggtagagggaaaccagtgccctgtctctgccgggctgggactccgcgagtcactcacctgtaggggaggtccgaggcccgcgcgggcgcaggggcggcgcctgtctcctcccag

SEQ ID NO: 87515 - DNA, 1465 bp, Homo sapiens
tagcactttttttcacccagagcagcgtttcgcgcttcagggtgcaccaggaccacctatgtattctgctaaacccaggtaccatcaactgtgagactctgatttagtaggccatgcatacacttcgggtatttatattttttataagctccacagaagaaactggtagacatcaaagtttgaaaatgaacataatgaaacaaaacagaggagataaataataatttagtcattatctactgaattrgatttgggggctttgttttatccaatatctccaatttcaaaaggacaccaaaaaggcttagaaactgttaaatgacagatgctgtggaaatatgaagtacatttacacacacacacacacacacacacacacagatttttaaggatcattgttattttactggtttcctatgtaaagcaactattcataatttttaaacataataggttattttacaagtgtaaacctgagagccctcaaaagaaattcaatctgattcctgcaaaaagttcagcaggcagagttaatttctagtatctttcgtgttcaaacgccagacaaacagaatgactctagatgttcaggttgcatgtttgtcatagcactttaagtaagatcctatatgttcaaaaggtgaggcaggccaggtgcagtgactcacgcctgtaatctcagcactttgggagaccaaggctggtggatcacttgagcccaggagttcaagaccagcctggacaacatggcaaaaccctgtctctgcaaaaaaaaaaaaaaaaattagcccggcattgtgggcatgcctatagtcccagctactcgggaggctgaggtgggaggatcacttgagcctgggaagtcgaggctgcagagagccaagattgcaccactgcactccagcctgattcaaaaaaaaaaaagaaaaaatattaggcagtttatctatttaatctgtggtgtgcggagaccaggaactatcagatttatcattatttgagcaaatggttttattggatcacaatcaaagattttacaatcttatgtaaggacagatgtgacttagtattacttgcagatattaattcgatcatcatgtggctccataactctctggtatgtggctgctggtatggactgacctttgaatgatgactagcaggacctagagtagttacagctctcggttccaggatatcttgctcaaatccatgctccacctccattgtctgtgcttgaagtgggtcatttgcttattgtcagcatcagggcaacattcttttgcatcttttacctgcaagcattggatttgggggctttgttttttgccaatatctccaatttcaaaaggactccaaaaaggcttagaaactgttaaatggcagatgctgtggaaacttttactctgatgactgctttccaactggttttctaaagaaaagtaaagttagaggcttagtgact

SEQ ID NO: 87516 - DNA, 1835 bp, Homo sapiens
tggaatttgtcagatttaatggcatgtacttcaaaaaagctacagcttttagaagagaatggagagatacattggaagcagtaaaaaggaaccagatgctaaagtaagtggttttcaagcaaaaatagcctcctcctgacaggttgtggggggaagctttgttctcacgagagcctctcatgttttgtatagagccagaaagagaagttcagagaagaggctgtggatatagggaagttttctaaaagccacagattatgaaggagtcagaggaagagttaaatagggcagggagagcagtcgatgggtcaggttatrgatgtggaaaacatcagtgtgatggagcatgatttgggagccttcaatttctgactgggactgaggtgaatggggcatgaagggcttggccttggcagttgcacacgtggcatgcacaacctcagggtagctggtcttgccttggctactgataacataatgtgattgagatcttacaaatgactggcagttcctttgattctttctatcctacccatcgaggtgaactgagtcacctatcagggtcttgaaaaagagtcaggcacattttttttttctatagacatagaaatatctttcttagtgccatcaatcatccatctctccactcccacctctcccacgactgagccaagacccaagacagtcccttggccatgcattctctgttggaatggtttccattggtgatgaaagtgatgctaggggcctttgttggaatctaccaaaaatgactattctaggaaaagtcagatagtaaaattctagtttcccagaactagcagaatgtgcccccctgacagtggggcagttcccttccagtgtccagccacccttcctggcctctttgcacacctctgctcctgttttcaggagaacacaggccctggttcatattatttctcctcctccaagattataagaagtggcagcttatttccacaaatttatttactctaagtttcactctgtcaaagcagggtctaaatattattagtccaataataccatcttgctgagtgagacaaagtttctgttgctttgggaatcaacacattctcatgtgctgagtgccttcagtgtgctgggcactgtgcttagccttttaatgcgttatttacggtcctcacaaaaaccttgcatgataagtgctcaagttttcttcttatagatgaaaatcagagaggttaagtgtctcaactaccattacagacgagtaagtggaggacctaactaaaaccaaagtccatttgacttcaaagtttgtgccctttttgtgatattagaagaaaagagaagtccagattttgcatgaactagcagtaaactttgtccccttccttgcagggctgaatcccctatgccaggccttggaagccccaagtaggctttgtaaatggagcaatctcattgcataggcctgaagggtctgtgattttattttctccaggctacccatggagtgattgctttctgtaatgtgggacttaagcttttatgggtttgccagtgaatttcagtctcacgaacaatattgttcctgtaaaaaaatatattttgagacaaaatccaccaattccaatgggaagtagtctatatttatcactttaaagaattaatttgttaaaaatgattcttattcaaaagtagtacaatctgatttgacaatatatcctagtcatacagacttgaataatatagagacacaaacacggttttttttttcaagttaggcctaatttagaatgaagactgaatatgtacagaatagttgtatagaaaaatattacttatcc

SEQ ID NO: 87517 - DNA, 1895 bp, Homo sapiens
gtcctttgcccactttttgatggggttgtttgtttttttcttgtaaatttgtttgagttcattgtagattctggatattagctctttgtcagatgagtaggttgcgaaaatttcctcccattttgtaggttgcctgttcactctgatggtagtttcttttgctgtgcagaagctctttagtttaatgagatcccatttgtcaattttggcttttgttgccattgcttttggtgttttagacatgaagtccttgcccatgcctatgtcctgaatggtaatgcctaggttttcttctagggtttttatggttttaggtctaacgtttaagtctttaattatagatctttaagctttcaattataagaactttaattttatatatgtttagagatacagctttcattttcttaaggtgttctggcatcaaaatgtattattttattctaataaatttctggcttgaacattctgacacttaaattatagcatgagttttttctacaaattgatatataaaatttttcatttgtgaagttttaaaaactttcatttcagtatcactttaagttttctctattctctctattatgctcctagcatcccacttacagcgccttcccaatgttctgcttctaacctttcacccctcaccacgaagttctgaatatgcatctctactgaggaagagatagcactcccgcaatgtgtcagaccctgtgctaaaaaagaggcaatatcaatgtcagagagaacaggtatgcaatcatgactcctctaagagcaacactcagaaaggaaagccaaaaagaaagttacagaggtgagcaaagacaaaagtgccgaaacagttccagagggttttgatctccatttagataatttaatgtctggccaacaagcaaactctttcatataatcaacccttcagggataccttattcttaagttatctttctttaaaattgtggactatagataatgttctaaagaccactccttccttttctcctacccattcctcccctttctccacagaatgaggyaaactgttcttctgccttccccctgggcagcaaactgtagcactctagagtcaggtaaaaagtgtgatcaagctttcttacctcctgttgcaaaaataatgtgaagagcaaaatcctggggactattttcaatctgtcaagggaaaaaatgaacaaatataaattctttgttgttatatgatgttttctaacctgaccagacccaaatcatgtctgttttctctcttccatttttcacttttagacataaaatcttctctgctcttatgggaattatataatttttcaagggatagttactaaaaggtgttatacaaaggaaagaatctttcagtgctcaacatccaatttagatttacacctttatagatctgtttcagaagagtggatttgtgtgtttatagttgaattatatataatatatttatagctcagttaagtgataaaggttaccttaaatttttggagaagttgctttattacttcttcagttctcatgttactgtttactctgaccttagtttctgattcaaaggctggaatgaaaattgatgtctagaaaaagaattgtcacataagtctttaaaattatattatattaagggtattcaatatcttgaacataatcttcttatagggcaaaaaaaatccaaggtcattaatttaaaaaatttgttttgtttttgtttgtttttctttgttgtttttgaatattatgtgttcttttaagcagctttatattgtttctagagtaaattaggtaaaacaccatttgaggatgcttataacattttcactggacaattacacccctctttagtgcagtttaagatttcaaaataagtaagaaag

SEQ ID NO: 87518 - DNA, 1895 bp, Homo sapiens
gtcctttgcccactttttgatggggttgtttgtttttttcttgtaaatttgtttgagttcattgtagattctggatattagctctttgtcagatgagtaggttgcgaaaatttcctcccattttgtaggttgcctgttcactctgatggtagtttcttttgctgtgcagaagctctttagtttaatgagatcccatttgtcaattttggcttttgttgccattgcttttggtgttttagacatgaagtccttgcccatgcctatgtcctgaatggtaatgcctaggttttcttctagggtttttatggttttaggtctaacgtttaagtctttaattatagatctttaagctttcaattataagaactttaattttatatatgtttagagatacagctttcattttcttaaggtgttctggcatcaaaatgtattattttattctaataaatttctggcttgaacattctgacacttaaattatagcatgagttttttctacaaattgatatataaaatttttcatttgtgaagttttaaaaactttcatttcagtatcactttaagttttctctattctctctattatgctcctagcatcccacttacagcgccttcccaatgttctgcttctaacctttcacccctcaccacgaagttctgaatatgcatctctactgaggaagagatagcactcccgcaatgtgtcagaccctgtgctaaaaaagaggcaatatcaatgtcagagagaacaggtatgcaatcatgactcctctaagagcaacactcagaaaggaaagccaaaaagaaagttacagaggtgagcaaagacaaaagtgccgaaacagttccagagggttttgatctccatttagataatttaatgtctggccaacaagcaaactctttcatataatcaacccttcagggataccttattcttaagttatctttctttaaaattgtggactatagataatgttctaaagaccactccttccttttctcctacccattcctcccctttctccacagaatgaggcaaactgttcttctgccttccccctgggcagcaaactgtagcactctagagtcaggtamaaagtgtgatcaagctttcttacctcctgttgcaaaaataatgtgaagagcaaaatcctggggactattttcaatctgtcaagggaaaaaatgaacaaatataaattctttgttgttatatgatgttttctaacctgaccagacccaaatcatgtctgttttctctcttccatttttcacttttagacataaaatcttctctgctcttatgggaattatataatttttcaagggatagttactaaaaggtgttatacaaaggaaagaatctttcagtgctcaacatccaatttagatttacacctttatagatctgtttcagaagagtggatttgtgtgtttatagttgaattatatataatatatttatagctcagttaagtgataaaggttaccttaaatttttggagaagttgctttattacttcttcagttctcatgttactgtttactctgaccttagtttctgattcaaaggctggaatgaaaattgatgtctagaaaaagaattgtcacataagtctttaaaattatattatattaagggtattcaatatcttgaacataatcttcttatagggcaaaaaaaatccaaggtcattaatttaaaaaatttgttttgtttttgtttgtttttctttgttgtttttgaatattatgtgttcttttaagcagctttatattgtttctagagtaaattaggtaaaacaccatttgaggatgcttataacattttcactggacaattacacccctctttagtgcagtttaagatttcaaaataagtaagaaag

SEQ ID NO: 87519 - DNA, 608 bp, Homo sapiens
atttgatccttaagtatatttctcttttaaaaagatctctgaaataactctatcaaatataaaattgactccagcatatctgtgtctttctgagaagtaatgttattgacatatctattaactaactaaaacgttcaacttctaaaaagatacagaattaggtctgatgggcttggcctaacatataaagctattgggaataataaatgactctaatctttggggaagatatttaacaattttatgaatacaaactttattaaaactattagctctccctattctaataaatctaagtracataatataatttttttaagaattatatttttatataccaaagtaaggttcttaaacatcatacaagcactatagtgacttaagttactatgctcctaagatatttaaaaatatatatacatataaaacaagagtttattgtgtagtagtatgaaaaaggttagatttcagagaaacatatggagtcatactttacactaattaaaaattaagtctcccaatcaataagattttgatactgaccttcctgggaattccttttttcagacataggaatctgggtcctgtccagctcactaatacgatag

SEQ ID NO: 87520 - DNA, 588 bp, Homo sapiens
  misc_feature (1)...(588): n = A,T,C or G
atccggaattcagttctggacacattacatttgagattgaataagaagcatttcttaaaaatgaggtccatggaccacctgcttctgactcagatgcctgttcacagtatagacccttggcttcaccccagaactaatcatgtgattctgatgcatactgaagtactgagaacaaattctcaccrtaggaaaggattaaagttctgagaacttctgacctcctaacataaacaaaattcctggagctaggggaaatctctgccaggctgtcaccagaaattataacaatgccactgaccaactatgatatccagcataccacaaatctggcaaacacccctactcatttattcacttggcaagtagttttttagctccctctctttactaggcattgttgtggtaaacaagacaaaaattagcaatttattgaggtatttttattttcctgcacagaactacatgaaaagaatggacattaatagtcnnnnnnnnnnnnnnnnnnnnnnnnnnnnnnnnnnnnnnnnnnnnnnnnnnnnnnnnnnnnnnnnnnnnnnnnnnnnnnnnnnnnnnnnnnnnnnnnnnnnt

SEQ ID NO: 87521 - DNA, 672 bp, Homo sapiens
atcgtggctcactgtaaactctgcttcccaggttcaagtgattctcctgcctcagcctcccaagtagctggtatcacagacacgtgtcatcacacctggctaatttttktgtttttagtagagatgggtttctccatgttgaggctggtctcgaactcctgacctcaggtgatccacccgcctcggcctcccaaagtactgggattacaggcgtgcataccgcgcccggccacaggttcctagtttctaaacacctattatggaccaggcccactagacactgggatacaaaagtcaacaagacccggtcctgccctcagggagcctgaagtgtaaggggatggagagaggacccaacttctcatgggctgtgaatggtccgtgggactgggctacgctgggctgggctgtgagagtgaagcagaacccagccagtctcagggagactaggggcctcttccaaaaggaagctgaggcctgaaaaaggaaaaaaaaaccttttcctccaaaagtgactgcatgagggaagggggtgtgtatgaaggcccagaagtgatagtgcttgagaaagggaggccgcatggcacaagcaccaggttaaaagaagaggctggccagccccagagtgaccccataaacttattagagggtttggactccataacaatgaca

SEQ ID NO: 87522 - DNA, 672 bp, Homo sapiens
atcgtggctcactgtaaactctgcttcccaggttcaagtgattctcctgcctcagcctcccaagtagctggtatcacagacacgtgtcatcacacctggctaatttttgtktttttagtagagatgggtttctccatgttgaggctggtctcgaactcctgacctcaggtgatccacccgcctcggcctcccaaagtactgggattacaggcgtgcataccgcgcccggccacaggttcctagtttctaaacacctattatggaccaggcccactagacactgggatacaaaagtcaacaagacccggtcctgccctcagggagcctgaagtgtaaggggatggagagaggacccaacttctcatgggctgtgaatggtccgtgggactgggctacgctgggctgggctgtgagagtgaagcagaacccagccagtctcagggagactaggggcctcttccaaaaggaagctgaggcctgaaaaaggaaaaaaaaaccttttcctccaaaagtgactgcatgagggaagggggtgtgtatgaaggcccagaagtgatagtgcttgagaaagggaggccgcatggcacaagcaccaggttaaaagaagaggctggccagccccagagtgaccccataaacttattagagggtttggactccataacaatgaca

SEQ ID NO: 87523 - DNA, 1059 bp, Homo sapiens
tactgttgttattcaccctgttttacatttagcccatttctagctaatttttgtatatggtactatctgtggttagaggtgttttttgtttttgttgtggtagttgtggcaataatttcttttttacatagtcaaattattccagcaatttgttgaaaaaaatatcctctctccatcgaattacattggcaactctgttctctggtcctcacagatcagttcctcatgatgactgatttttcaggaaatgtgggctttgaacagacttcackcagaaagcctgtgctagagttccagcatagggacctcattcctttatcagggctcagatccttcatcctcttgtaacaggctctggacctacaatggaaatctgctgacatgagattaagagaaggtatctggaatgaaggcacttctccgactccacccattccgctgacagggctccaacaactccagggtcttttaatcaagagattgctaagtcaaagacaatgcctcctcagccaaatgtgaaacacaaaggtttcataatcaaaatgaaattccttcttagcacacaactggagaaagctctaaaggagataagaatcaataataagatttataaaatttggcagcataagctgaggatgatgatatttcccttaatctttatgtttccagatggcactggtgtggcagcagaaatcacatcatggatgagacgctaagaattggcacaagatctgcaccttagatccaaagactatgtgatccaggccctcaaatacatcttttctaatcctcataataattctatgaggttggcaccattgcccattacaaatggggagaggttatgtgcaaagtccaagctcacaccaccacaatggtatagcctgaggatgcaatcccaacaccatttcctgagtcatgctgtgctaggccaaaatttggattcctaaagtcccttaatggtgatcaaatggtccaagttgcaagttaaggagagtaggtcggtaaagacaataaatcactgtactccccagacttctccaactaatcccagttatt

SEQ ID NO: 87524 - DNA, 1059 bp, Homo sapiens
tactgttgttattcaccctgttttacatttagcccatttctagctaatttttgtatatggtactatctgtggttagaggtgttttttgtttttgttgtggtagttgtggcaataatttcttttttacatagtcaaattattccagcaatttgttgaaaaaaatatcctctctccatcgaattacattggcaactctgttctctggtcctcacagatcagttcctcatgatgactgatttttcaggaaatgtgggctttgaacagacttcactcagaaagcctgtgctagagttccagcatagggacctcattcctttatcagggctcagatccttcatcctcttgtaacaggctctggacctacaatggaaatctgctgacatgagattaagagaaggtatctggaatgaaggcacttctccgactccacccattccgctgacagggctccaacaactccagggtcttttaatcaagagattgctaagtcaaagacaatgcctcctcagccaaatgtgaaacacaaaggtttcataatcaaaatgaaattccttcttagcacacaactggagaaagctctaaaggagataagaatcaataataagatttataaaatttggcagcataagctgaggatgatgatatttcccttaatctttatgtttccagatggcactggtgtggcagcagaaatcacatcatggatgagacgctaagaattggcacaagatctgcaccttagatccaaagactatgtgatccaggccctcaaatacatcttttctaatcctcataataattctatgaggttggcaccattgcccattacaaatggggagaggttatgtgcaaagtccaagctcacaycaccacaatggtatagcctgaggatgcaatcccaacaccatttcctgagtcatgctgtgctaggccaaaatttggattcctaaagtcccttaatggtgatcaaatggtccaagttgcaagttaaggagagtaggtcggtaaagacaataaatcactgtactccccagacttctccaactaatcccagttatt

SEQ ID NO: 87525 - DNA, 719 bp, Homo sapiens
aggatcatcattttacagaatgtccttctgtgtggattttcctgattgtttcctcttctttagattcaagctattatagtatttgtttctggttttcctggcagcataaatccttggtaaaggttcccatctcctttgggacttctgctaaaaattcaagctccttttcagtcattgtattaattagggctgggactaagctactataatagagagatcacaacttwggggctcaaagaagataggttttaatttctcttttacataacaatctacaagtgagcagtctgcagtcctggtgaaatgacttttgctccacaaagtcatccagggacccaggctccttctatcttattgctccatcattgtcatcctcaagaattgattcttacaaagtcaaagctctcttactagcactgcattcaaatttcagcctgcaggaaggggcaagagaaagttaagagcatgcaacgccctcttttcaaagtatgagatctggaaattgctcttgtaactttcatttgcatgcacatctagtcaccaaggaggctgagaaaagcaatcaatacctcggaagccaattccccagctgtaatatcgtgaagtgtgtatttggtatttgtcactgtttcctgacatatagctcctaaaatccttggatttggggtatcttgtatactaatgagatgactggtggctgagagcccctagatcacttc

SEQ ID NO: 87526 - DNA, 719 bp, Homo sapiens
aggatcatcattttacagaatgtccttctgtgtggattttcctgattgtttcctcttctttagattcaagctattatagtatttgtttctggttttcctggcagcataaatccttggtaaaggttcccatctcctttgggacttctgctaaaaattcaagctccttttcagtcattgtattaattagggctgggactaagctactataatagagagatcacaactttggggctcaaagaagataggttttaatttctcttttacataacaatctacaagtgagcagtctgcagtcctggtgaaatgacttttgctccacaaagtcatccagggacccaggctccttctatcttattgctccatcattgtcatcctcaagaattgattcttacaaagtcaaagctctcttactagcactgcattsaaatttcagcctgcaggaaggggcaagagaaagttaagagcatgcaacgccctcttttcaaagtatgagatctggaaattgctcttgtaactttcatttgcatgcacatctagtcaccaaggaggctgagaaaagcaatcaatacctcggaagccaattccccagctgtaatatcgtgaagtgtgtatttggtatttgtcactgtttcctgacatatagctcctaaaatccttggatttggggtatcttgtatactaatgagatgactggtggctgagagcccctagatcacttc

SEQ ID NO: 87527 - DNA, 719 bp, Homo sapiens
aggatcatcattttacagaatgtccttctgtgtggattttcctgattgtttcctcttctttagattcaagctattatagtatttgtttctggttttcctggcagcataaatccttggtaaaggttcccatctcctttgggacttctgctaaaaattcaagctccttttcagtcattgtattaattagggctgggactaagctactataatagagagatcacaactttggggctcaaagaagataggttttaatttctcttttacataacaatctacaagtgagcagtctgcagtcctggtgaaatgacttttgctccacaaagtcatccagggacccaggctccttctatcttattgctccatcattgtcatcctcaagaattgattcttacaaagtcaaagctctcttactagcactgcattcaaatttcagcctgcaggaaggggmaagagaaagttaagagcatgcaacgccctcttttcaaagtatgagatctggaaattgctcttgtaactttcatttgcatgcacatctagtcaccaaggaggctgagaaaagcaatcaatacctcggaagccaattccccagctgtaatatcgtgaagtgtgtatttggtatttgtcactgtttcctgacatatagctcctaaaatccttggatttggggtatcttgtatactaatgagatgactggtggctgagagcccctagatcacttc

SEQ ID NO: 87528 - DNA, 489 bp, Homo sapiens
gaagattttgtccctctcatttgtggtctctctttgaactgaggagaagtcgttctgayactggtgggttgggggaggtccctaaatgctggcggcaccttgaccccagcaagtgtcctcactcttgacaccagcacgaaaaggagtcaaggatgactcagaaaatagtgcaagtacagagattgatttcaaagcgaaaagtacacacactcaagaaaggggagtgcaggtgtactcaagagagactcatgcaaatggggtttggggctgcaacttttatgggattctttaaccaagaggtggcatattcatgaagattcctggaagaaggtagagatttctcagaactgtggtgccaccctattttactccaaatacagttttcctggaatggtcatggcactggtgggtgtgtgatttggggtgttaatgagcatataatgagggcctaggtgaaacctagatcaaatccagtgccttgttggatcc

SEQ ID NO: 87529 - DNA, 1032 bp, Homo sapiens
gaaagttataatgtcaaggaatgaaattacagaaaataattaattaagattgaagatttagggacattttctctggggaagtgaaatttttattgaggcttgacagatggataagagataactgtgaggcagatagcaraaaaagagcttgttgatttggacgaagcaaaagcagcaagagcagagcaagtagagtgtcattactgtgtggaaaaagatgaagagttgagtgagaacgaaataattaatacgtggtttgacaaagtaaggagtttggattttatataaatttaagtaaagaggagtgttggagatatgatttgcaatttattaaatttaatcttcctactgcaggagaagactttgacagtaatccttgaaggtgaaagaataatttgctgggttaggggtagttgggtcagatggaaataagcagatttggaggtagaatggacacatggctgattgattgtgtataggcttaactaaagaattaaatatcaagaatgagcctcactgctctgatccatgcaattatcctgaatttcagttttgagcatattttgacctataagcttgaaattcataggagaggttgtagtcaaatagaatttgagaatttggggcatggtatttaaagctgtaggaaagaatatttacacagagaatgtagaatgggaagttaagaaaaaacctggttgaaacttaatatacattaaaaattagacatcaatttaccaggaaggagtgaaatgagacagaaaaggaaaaaagcaaaagtatggaaagaatataaggaaagtgcaatgtcattgaaatgaagaaaatatgaatgtatggcagaggcaggagtcagcatctttaatgattcagaaagttcttggggggtgtgggggaagcgagttctaaatgatactgtgtttgtgaagctggagctcaatggtgaacacagcaaaaacaatctgagggtgatagatgggtaaaaaattatatggtagggaactgaacagtgaaattaaagtgcaactttgt

SEQ ID NO: 87530 - DNA, 1032 bp, Homo sapiens
gaaagttataatgtcaaggaatgaaattacagaaaataattaattaagattgaagatttagggacattttctctggggaagtgaaatttttattgaggcttgacagatggataagagataactgtgaggcagatagcagaaaaagagcttgttgatttggacgaagcaaaagcagcaagagcagagcaagtagagtgtcattactgtgtggaaaaagatgaagagttgagtgagaacgaaataattaatacgtggtttgacaaagtaaggagtttggattttatataartttaagtaaagaggagtgttggagatatgatttgcaatttattaaatttaatcttcctactgcaggagaagactttgacagtaatccttgaaggtgaaagaataatttgctgggttaggggtagttgggtcagatggaaataagcagatttggaggtagaatggacacatggctgattgattgtgtataggcttaactaaagaattaaatatcaagaatgagcctcactgctctgatccatgcaattatcctgaatttcagttttgagcatattttgacctataagcttgaaattcataggagaggttgtagtcaaatagaatttgagaatttggggcatggtatttaaagctgtaggaaagaatatttacacagagaatgtagaatgggaagttaagaaaaaacctggttgaaacttaatatacattaaaaattagacatcaatttaccaggaaggagtgaaatgagacagaaaaggaaaaaagcaaaagtatggaaagaatataaggaaagtgcaatgtcattgaaatgaagaaaatatgaatgtatggcagaggcaggagtcagcatctttaatgattcagaaagttcttggggggtgtgggggaagcgagttctaaatgatactgtgtttgtgaagctggagctcaatggtgaacacagcaaaaacaatctgagggtgatagatgggtaaaaaattatatggtagggaactgaacagtgaaattaaagtgcaactttgt

SEQ ID NO: 87531 - DNA, 1032 bp, Homo sapiens
gaaagttataatgtcaaggaatgaaattacagaaaataattaattaagattgaagatttagggacattttctctggggaagtgaaatttttattgaggcttgacagatggataagagataactgtgaggcagatagcagaaaaagagcttgttgatttggacgaagcaaaagcagcaagagcagagcaagtagagtgtcattactgtgtggaaaaagatgaagagttgagtgagaacgaaataattaatacgtggtttgacaaagtaaggagtttggattttatataaatttaagtaaagaggagtgttggagatatgatttgcaatttattaaatttaatcttcctactgcaggagaagactttgacagtaatccttgaaggtgaaagaataatttgctgggttaggggtagttgggtcagayggaaataagcagatttggaggtagaatggacacatggctgattgattgtgtataggcttaactaaagaattaaatatcaagaatgagcctcactgctctgatccatgcaattatcctgaatttcagttttgagcatattttgacctataagcttgaaattcataggagaggttgtagtcaaatagaatttgagaatttggggcatggtatttaaagctgtaggaaagaatatttacacagagaatgtagaatgggaagttaagaaaaaacctggttgaaacttaatatacattaaaaattagacatcaatttaccaggaaggagtgaaatgagacagaaaaggaaaaaagcaaaagtatggaaagaatataaggaaagtgcaatgtcattgaaatgaagaaaatatgaatgtatggcagaggcaggagtcagcatctttaatgattcagaaagttcttggggggtgtgggggaagcgagttctaaatgatactgtgtttgtgaagctggagctcaatggtgaacacagcaaaaacaatctgagggtgatagatgggtaaaaaattatatggtagggaactgaacagtgaaattaaagtgcaactttgt

SEQ ID NO: 87532 - DNA, 546 bp, Homo sapiens
tatatagagttaaagatatatatatgtatatacatatatttgcaaaagctgatttactttagtgtgccatttataatagaacatagtaattttcagtggttttagcttttcagttttgattatataagagaggaaaactagactatgaccttcatctttagtgttaactacagattccctaaccactcttacaaagggagttcagtcaaattgcctagyttacaaataaatccatgaaggcgtttttaaactgcgttaaacactttgaataaaagtatgattatggagggttatttacagaaaaactccgtgaaactgtgttttcacagtttcctcacaccacaacaaggaggaagtttcctccttcctcacaccacaacaatcgtcaacacagaagatttttatgagcaaatgtattggggtttccccccaccaccaagcagtggacaccaactgggtgtcttccagttcaactctgacactatctacctggaaatactgtcagatcccacaggatgagggctcagtccccaagactacctcccc

SEQ ID NO: 87533 - DNA, 1069 bp, Homo sapiens
taaagtagatagcacccctttaacatcctcaaaatattttcaaagttgctgattgtcacatttgtttaatatcatttagaagatgtcattttctagcttcttcttatcttaatccagcgccatgtctgggtttaataattcattagaagttctttggaacttattgcctgctgagtttactgaagactgattggtaattttatcatttctaagttttctgtatatattttcataagtgtcatctcctgttgattctaatactttcttatttgaaacaacattttctcattttttctgctytgacactgtgcatctatcaatcatttttatccctcagattatatatcattgaaatatgatagcttcttggtcattctacattatatagtacctgtattaaaaggacattaatatttcagataagctttattcttttatcaataatcaccaacccaaatcaggtgtgcattcacaaacaaatgagtcacaattgggtaaaacatgggcattgaagtaagactcacctggaatttgaagtctgcctctattactttctacttgattgaatttaaaccaattttttacaaactcaacttccctaaatttgtttcttcatctataaagttgcaataagtactttctagcattgctgtggggaattgatgagaatacatttgtcaaatgtgcaatagtgtacctgaaagtaaagagatgtcttattaaaattttatttcatttattttcttcttttcttcccccctctcatttcattttcatcaagttgccactaacacgtttttcagtggtttcattataacacatatggcattatctgaggtaccaaaatagttcttatccttattttaagctcaaggtattctcaatttcattgtaccatgtccactttatgttccactgcattgcaaaaactccattttaagaaaaactatttaataaggctaattttgataactccaaaagctccctaaattttcatttgctcattcactaccccattaatataaaagaggcaaagaatgggcagtattgacacatgtaaatcataact

SEQ ID NO: 87534 - DNA, 1069 bp, Homo sapiens
taaagtagatagcacccctttaacatcctcaaaatattttcaaagttgctgattgtcacatttgtttaatatcatttagaagatgtcattttctagcttcttcttatcttaatccagcgccatgtctgggtttaataattcattagaagttctttggaacttattgcctgctgagtttactgaagactgattggtaattttatcatttctaagttttctgtatatattttcataagtgtcatctcctgttgattctaatactttcttatttgaaacaacattttctcattttttctgctttgacactgtgcatctatcaatcatttttatccctcagattatatatcattgaaatatgatagcttcttggtcattctacattatatagtacctgtattaaaaggacattaatatttcagataagctttattcttttatcaataatcaccaacccaaatcaggtgtgcattcacaaacaaatgagtcacaattgggtaaaacatgggcattgaagtaagactcacctggaatttgaagtctgcctctattactttctacttgattgaatttaaaccaattttttacaaactcaacttccctaaatttgtttcttcatctatraagttgcaataagtactttctagcattgctgtggggaattgatgagaatacatttgtcaaatgtgcaatagtgtacctgaaagtaaagagatgtcttattaaaattttatttcatttattttcttcttttcttcccccctctcatttcattttcatcaagttgccactaacacgtttttcagtggtttcattataacacatatggcattatctgaggtaccaaaatagttcttatccttattttaagctcaaggtattctcaatttcattgtaccatgtccactttatgttccactgcattgcaaaaactccattttaagaaaaactatttaataaggctaattttgataactccaaaagctccctaaattttcatttgctcattcactaccccattaatataaaagaggcaaagaatgggcagtattgacacatgtaaatcataact

SEQ ID NO: 87535 - DNA, 535 bp, Homo sapiens
ttcaaggcaggcctactacatagaatatatacagccagaaatatagcaagaccctgtttataaccccccaaaagataaaaatmtaactttaaaaaattttccaaactaggtgaaaaactgcaagataggaaggatttttttaaaaatcagcaacatgaccaatatgttcttatattacaatgattcccatcttgaatggctcacatcattttgaaccatactttattgactcagtggaaagtatttactgcctacctcctgcaggcacagttctagacatttgagatgtaataatgaataaaacataaaataccctgccttcaagagagcttgctttctagcaagagaacatattttataaaaataattataataaatgagtgagttacatagtgtgttagaaggtgacaaatactatgaaaatagagccaataagatcagttgccagcatggggaggcaatttggagttttaaagagcaccatttctgtaggtattatttcaaaggcgatatttgcacaacaacagaagtgagt

SEQ ID NO: 87536 - DNA, 535 bp, Homo sapiens
ttcaaggcaggcctactacatagaatatatacagccagaaatatagcaagaccctgtttataaccccccaaaagataaaaatataactttaaaaaattttccaaactaggtgaaaaactgcaagataggaaggatttttttaaaaatcagcaacatgaccaatatgttcttatattacaatgattcccatcttgaatggctcacatcattttgaaccatactttattgactcagtggaaagtatttactgcctacctcctgcaggcacagttctagacatttgagatgtaataatgaataaaacataaaataccctgccttcaagagagcttgctttctagcaagagaacatattttataaaaataattataataaatgagtgagttacatagtgtgttagaaggtgacaaatactatgaaaatagagccaataagatcagttgccagcatggggaggcaatttggarttttaaagagcaccatttctgtaggtattatttcaaaggcgatatttgcacaacaacagaagtgagt

SEQ ID NO: 87537 - DNA, 1085 bp, Homo sapiens
cctgaagtatgaaagccctgtctagggccatttcctttgtcctccttaaattccttgttctgcagatccaagttccactttcctcggggacctgtccccagtttaatcagagagcatctgctgctagccatgctccaatttcacaactggaatcttccccataaccatcccctgcatgggaagggtgaccaaaggagcaggggcaggtgtggccatgctggatctggcctgagccaaggaaggacataaccttggagcaggggcaaggaggctgggagctggagacctgccatcagctcagccagcactcgaggggagaaatggcagatttattcagccgcaggaagcacccaggaccaaaatcaatactgagccttggggctgtatttctgcttttcattggcttatgcacaactataataactccttgttttaacatagttcttatttctacgagccccacatgttttattttcagtttaatggatcctcaaacctgtgctactggtagtcagaagyagacataactatcaccattttatgctgaggctaggggagcccagaaaggcagataaattggtgaaggtcacagagagagaaagaaagatggacctacttgcagaaagttctaggtgtactccctgccccctgttcatgatgctatgctggcaagaatcaaatcacccactaggttccatccaataaaagaggtgcctataataccttatcatcagcacagatttatttttagctgcaaactcatatatctacctgctacatggcatctccattgtgctgtctcattggcactctctgaattcagtgtgtccaaaattgaacatctgagctgcatcccccctgttaaacctaccctctttcctgtgtccccatgttggggaaaccacttcccaccccgaccaagaccctagtgtcactctgccctccttctcagcccccactttcagtgactcactcatctgtcaatctctctttcactcctttcagctccacccactccccactgctgtacttctagaatctacttcccaccacagtgtcacctgcacaccacgagagcccttata

SEQ ID NO: 87538 - DNA, 570 bp, Homo sapiens
caaaagcctgagtcccagagttgagagatcctttatcccagatcactcattgagtaaatggaagaagagccagggactacttgacgtcaaagctcccactatgacccactacagcactcaggcacagtgctgccacagcccatggaacccacagcatttcccttgatgtccaagacttatgcacttcatagtctgatggaaaatatgtacacacctgatctctgttggctgaataacaagccctctgagacttgaggacaattttcttttccttgctcagaaaggcaatccaggttctttttccttttcttattagctttgtattcatttacaaagagaaatgcaaccgcatgttggcatcaggctccacgcaggctacaaagctctgggataggctggcagggccctcctttcctctcagggtcagtgccagatggctgcctttagaaggactgcacagtgtgggtgcaatgcgggctcaygccttggggaatagaagatggcgactgctgagtcaacagagagtgagcccacaggacgagggtcccgaaagaggctccagctcaccga

SEQ ID NO: 87539 - DNA, 639 bp, Homo sapiens
ctgggctgtccccataaggggctggcagccgaggggccacagcaccaccagcagtgggggaaaggagcgcttcattcccaaagagagatgggagaggcaagtcccagcaccctgtaccccttagggagcagccaaaggagtaaaacccgcaattctttgtctcctatgccccattccttcctagtgacaggaaatcaccgtttgggattgtatagaaggtgttagaaattgtatgcycgccttctgatgctccagcgaggtggcacctggttcagatgacttttcagttcagacctgaagggaaaagaagagcaacagtgaccacaaagagagcgagcgctcccaagccagcaggtcctcagcatgcgtgggtggcagctgacttcatccccacacagctgtgtgctggtgctgctattgtccccattctacagatgggaaaatctgcacagcagaggccgttggcagggggtggcacagccgggcatcaagccggagccgtctggcgcctgagcccacacacaaccgctgtgctgaacagacagatggtgccggaaggcagcatgcaacccgagaaaatgcgtggagaggagtgggctgttgctttccaaccatttttataggctgactatagatgca

SEQ ID NO: 87540 - DNA, 293 bp, Homo sapiens
acctcccccctccctcactcccaytcttgccctgtgagctctgcacacgctggcctcctttcacctttctccataagaggaagcagcctgaggcctcaccagaagcagatgctggctccatgctttgggtacagcctgcggaaccatcagccacataaacctcttttctgtctaagtcactcagcctcaggtgttcctttatagcaacgcaaacacactaagacattccttccaactggccccgggaacaacccctgaaagcctgggtgttttcactctacctctgaagccca

SEQ ID NO: 87541 - DNA, 537 bp, Homo sapiens
ggatttctcccacacttaatggctgtcgtaacatcttttctaaacagccataaaagctgcgaattccttctatcttacggagcaggcatttatatactactttgtytcttctactaggcgataggtgctgtggcagggcctatattggaattagctttgtattatttgtatcacctgtggtgtcctgcaaaaaaaaccagaaatcccccagagagttaagcatttaactcaggcttgaaacatttatgggaaatctattgccatattgttcaggtatacaataagctaggtgttttacacctcttatcttgtttaagttataaaactctaatggctaggcctatcacttgcattttgcaaaagagaaaaatcgaggcttagtaagattgattaaactgttgaaatgactgagcccctaagtgatggaatgggactgaaacccaagtctgcctgcctcttgcccattctgccgatggcctcccaatcacttggatagcctggctctgtattcccttggtgtagctagaagggagacag

SEQ ID NO: 87542 - DNA, 1326 bp, Homo sapiens
ctactcaggaggctgaggcatgagaattgcttgaacctgggaagcagaggttgcagtgagccaagctgcagcctgggtgacagagcaagactctgtctcaaaaaaaaaaaaaataaacataaacataaacgtaaaataaaataaagaatgtgtttaagcactgtaaccttttacagattttaccaccttcctctgtgttcctatatatatttaagtgtctttatttcagcacatgggataggttgtgttgtgactatttattacacattcatcttagtctgttttctactgatatacagaataccacagactagggaatttataaagaaaataagtttatttggcttatagttctggaaactgggaagcctaagagcatggtaccagactccggtgagggtcttattgctgcattgtctcatggtggaaaatggaagtgcaagcaagtacatgaggcagagataaaatgggggccaaacttacccttttctcaggagcccactctcttgataagtaacccaatccattcatgacctaatcaccttttaaaagtcccacctcaatactgttagaatggcaaataaatttcaacatgatttggggaggtagcattgaaacctagcaatgtctgtttatttcattaaaatgtgaatgccttggtattagagggtgacttattcatctttctatcccatcatctaacagaatcgaagaaggcctattttcacaatgaatattggctgaatgattatttgctgggtgaattgagatctgaaggctatacctaaaaattctagcagctgtggttggacagaaaagagtttgaaaaggatcatggaaatggtctatatayttttaagggaggactggttcatatgggacatcctaggcagcagaaggaagcttattgggcagaagttgggaatagtaagagaaggagtgtgttatctgataaaaaatatctattattttgaattgtttcataggtcagccttaacatgtcctatatccttttcttacgcattcacctattagataatgaataatataacagtataaaatgagaccactgcttctatcaaattttatgtttgcttagtgccatctcatatataatgatgaaattgcaagacattcagtattttcctgatccattaaaatctgtgtttatatattaagctgctatgaacaacgcaaatgacctgatgggagactcccccgcccttgctggcctcacatagcttgatacttttggaccctgtggcaaggaaaatgagtttggaagctattgagctagagctgtggtttttaaaatggactaaaaca

SEQ ID NO: 87543 - DNA, 1326 bp, Homo sapiens
ctactcaggaggctgaggcatgagaattgcttgaacctgggaagcagaggttgcagtgagccaagctgcagcctgggtgacagagcaagactctgtctcaaaaaaaaaaaaaataaacataaacataaacgtaaaataaaataaagaatgtgtttaagcactgtaaccttttacagattttaccaccttcctctgtgttcctatatatatttaagtgtctttatttcagcacatgggataggttgtgttgtgactatttattacacattcatcttagtctgttttctactgatatacagaataccacagactagggaatttataaagaaaataagtttatttggcttatagttctggaaactgggaagcctaagagcatggtaccagactccggtgagggtcttattgctgcattgtctcatggtggaaaatggaagtgcaagcaagtacatgaggcagagataaaatgggggccaaacttacccttttctcaggagcccactctcttgataagtaacccaatccattcatgacctaatcaccttttaaaagtcccacctcaatactgttagaatggcaaataaatttcaacatgatttggggaggtagcattgaaacctagcaatgtctgtttatttcattaaaatgtgaatgccttggtattagagggtgacttattcatctttctatcccatcatctaacagaatcgaagaaggcctattttcacaatgaatattggctgaatgattatttgctgggtgaattgagatctgaaggctatacctaaaaattctagcagctgtggttggacagaaaagagtttgaaaaggatcatggaaatggtctatatacttttaagggaggactggttcatatgggacatcctaggcagcagaaggaagcttattgggcagaagttgggaatagtaagagaaggagtgtgttatctgataaaaaatatctattattttgaattgtttcataggtcagccttaacatgtcctatatccttttcttacgcattcacctattagataatgaataatataacagtataaaatgagaccactgcttctatcaaattttatgtttgcttagtgccatctcatatataatgatgaaattgcaagacattcagtattttcctgatccattaaaatctgtgtttatatattaagctgctatgaacaacgcaaatgacctgatgggagacycccccgcccttgctggcctcacatagcttgatacttttggaccctgtggcaaggaaaatgagtttggaagctattgagctagagctgtggtttttaaaatggactaaaaca

SEQ ID NO: 87544 - DNA, 923 bp, Homo sapiens
actcgctgaattagaacgccgcagacgcgccgtgagcacagcccgcgcctgcaggcaaggcagcacatggctgagaccagcatctgccagcctgcacccacccagtaagagcatggcttatcggcgacaggatctgggagactgaatgagcactcctgtactaaaaacccggagcctgttaggtctctcataatgcttccatctccattaaggaaaaaagagccatccactttagagggaaaaaaatataaaaacctctctttccccctttaaaattcattgcacttttttcttttgtaaataacaagcttaatcaattatctttcttttatctacaagtagagtgttcctttttcagggaaaaatgtcatatttttagaggtttgcttttaagttgttagctagatagatatctttcctacagtcctccagtagtaaacttgatgctaaaaacgcacatgcaaaatccaccagacttgtaaggtaagatggggcttgccgattggtgattgaatatgggctggtgcagccaacctgctctcaacaggagccaggggcagccacgccctgcatgttcatctggcaccgggagtgcatcatgaggcaaaaatcattttttaatagaacccagaaagcaatccaaaatcagtaaataaagcaacaaaatgaaggagctggctggcgctttggtgaggattcttgccrcaagtgttcttcaccaacattttagagatggaattcagtatgccggtcagggctaagccagcccactccacaacatgacagaggagcaccctatttccttgactctcagatgccataaattataagatgcaccatctatttattaacagcttttcagaaaaaaaagagactatgttaaaagcacccatcaattacaagctgcattcagctttcagaaa

SEQ ID NO: 87545 - DNA, 1041 bp, Homo sapiens
ggtggcataaacaacaggaatttgttatctcacagttccagagggtagaaggttgagattaagatgtgggtatggttgcttccttctgagggctgggagggagaatctgttccaggcgcctcacctagcttctggtgctttgatggcagtctttggtgtttttgccttgaagatacatcaccctgatttctgccttcatatttacatggccttctctttgtgtctccttcatgattttccctctgtgcatgtttgtgtctacattaaaattttccctttttataaggacatcagtcatactggattaggatccatccttgtgaccttgttttaacttgattatctctataatggccctctttctaagtaaggtcatattctggggtattagagcctaggacttcaatatgtcttatttgggggacacaaattaacccataactctaccactgaggtttattctgctaacacagagccaatagcctgtaccatgccctacttaaggtccttttcctcattctttccatttactctctgttcaaacagcaaatttcctggatgaatttggcctgcagaatgaattgggggagaatgaggatgggatttacattaggcaagaggctgagatggtgtgagtgaactaaaaactcaaaaaacacgtgattctgggcaacttataccgaagctgttctttgactctcatgaaaagacggaacctctgaaagttttcactagagcatattgataaagaggtcacactccgaatttgggccagcttggtaataacccaaatccaccatttcctttggcagattatttaacatttctgcgtctcagtgccctaattttaaaatggaaatattaatattaatatccatttcataagattgytttgaggattaaatgggataatctgttgaaagagcttagtacaatgtctatcacataattagcactcaataaatgttattcagtgttattactgttattttatttttctagtcttattatttttgttgcccaaaagtagacatgagttct

SEQ ID NO: 87546 - DNA, 601 bp, Homo sapiens
ggactaagaaattttgggctgagctaggctataggagaatggtagacagacctgaggattttgctgggctgtgtcagtctgggttatagaagtgggtggaaattacarctaagggacttggagatgaggggaggtaagaagacagatctgatggtattgaggtaggggctgctaagagaagcatcaaacaggagggctagcccaggtttgagctggacactccactgacagttctaaagcagaaaattagggaaggaatagtcaggggcttatcagctatgcagtagcttctagaagtcaacagctggctctgggagggaaaagattgagaaaaacaaaagaaataaataagagcagaaggtataggggaaaaggtaggggtgagagttatcagtctggttagagctgggctaaacatttagtcttaccatcagtttaaaagcacctggaccagttagttgctgtacaggcaaagtcaaagggagaagcctggcctctctctactcagtcaaggttcatgactttaggagactgcaatgaaccaggcataccaggaaaggaaaaggttaactgaggttgaaaaaaaaactttatgtggcac

SEQ ID NO: 87547 - DNA, 601 bp, Homo sapiens
ggactaagaaattttgggctgagctaggctataggagaatggtagacagacctgaggattttgctgggctgtgtcagtctgggttatagaagtgggtggaaattacaactaagggacttggagatgaggggaggtaagaagacagatctgatggtattgaggtaggggctgctaagagaagcatcaaacaggagggctagcccaggtttgagctggacactycactgacagttctaaagcagaaaattagggaaggaatagtcaggggcttatcagctatgcagtagcttctagaagtcaacagctggctctgggagggaaaagattgagaaaaacaaaagaaataaataagagcagaaggtataggggaaaaggtaggggtgagagttatcagtctggttagagctgggctaaacatttagtcttaccatcagtttaaaagcacctggaccagttagttgctgtacaggcaaagtcaaagggagaagcctggcctctctctactcagtcaaggttcatgactttaggagactgcaatgaaccaggcataccaggaaaggaaaaggttaactgaggttgaaaaaaaaactttatgtggcac

SEQ ID NO: 87548 - DNA, 1249 bp, Homo sapiens
ggatatttctcagaaataacagtttcaaactttgtggtatggagaagggagagaagggtcactcaaaagtagccagctgactgagagcttgaaattttatagtttcttcaaatttggacttcgtaattaaaaaaaaaaaattggttgtttctggacaggcacagtggctcatgcctgtaatcctagtgctttgcgtggtcaaggcaggaggattgattgaggccaggagttcaagaccagcctgggcaacacagtgagaccatgtctctacaaaaaattagaaaattagccagacatgttggtgcaaccctgtagtcccagctactctggaggctgaagtggaaggatctcttgagcccccgagttcaaggctgcagtgagctatgatgacaccactacactccagcctgggagacagagcaagaccctgtgtcaaaaataaataaataaataattgattgtttcccttctacctttgattctggcactatgcttgtccacttcttgaaattcactgatagctgggtgtggtggctcgcacctgtaatcccagcactataggaggctgaggcaggtagattgcttgagcttaggagtttgagtgactagcctgggcaacatggcgaaaccccatctctaataaaaatacaaaaaaattagccaggcatgatggtgcatgcctgtagtcccagctactcgggaggctgaggcacgagaatcggttgaactcaggaggcagaggttgcagtgagccgagatcgcaccactgcactccagcctgggtaacagagcaagacgactctgtttcaaaaaaaaaaaggaaagaaaaagaaattcactgatggttaattatttggtcttgatggcagcaaaggagcagtgaggcatatgtttcacatttcttgatgggatcttctctggcccctagcctgctggctttttgaaatgaaagaaatacaagtgccaacaagkgccctgagtgaatgcagcctaacctgcactcatcacgtgcagcagcagctgcagcctctgaaaagggctgatctcaagttgcatgtggccaggaggcagagctgggaggtcagcacagaagctggccctcatcctgtcctaattctgttttgaatggaacatgtgatcactctggcatcccaagggagaagtagcagagggcacaggacttagtgcttccaaagttgataggagtcttgaaggacatcccagcagtgaaaatgctccattaactgcg

SEQ ID NO: 87549 - DNA, 2093 bp, Homo sapiens
atctcaaaaaaaaaaagaaaagaaaagaaaagaaatgtatttctcatagagtgcatgtgacagagagggagaaagagcaagacagtgatgcagcagaacttgcttttacgacaaacccactctcgcaataactaatccactcctgcaataacaatattaagccattcatgaggatagagccctcctgacctaattacctcctgtgaggccccaccttccaagactgttgcattgagattacatttccaacacatgaacttttgggggacacgttcaaaccgtagcatttgtctagcaacttcctaatgttcacaactcagatcctgcctcctagayttccctctgcactcccatgctattttttgaaacctataattccatcgctaaaaccaagtcaaagacaaccatacctttgtttcctcatctgcaggaggtgataaccgatagtattcatagaggcaaaataaattaatgccatgtaagaacagcatgtaaaccatagtatcataaaagtattcactatcattattcaagtaattttcacatagtaggtcaccaatatcggatcattgaataaaacatataccttgttcaatagatatatcagaatttatacatccaaaggtttgttagcctctttcataaaatgagctacaatctcacttcataagttaaaaataaacattcattgaatctaagctacagctttatgcattgaaaacattaccaacttatttacatagcacattaaaattttacaaagcacatttacagggagagaattaatttaattttcttccacactatgtgatacagctctagtgccaatcataaatgacaaacccttaatacatttgcccatctgggctcctctttccaaagtacctaagtatctagtgaggtgcagtggctcatgcctataaatcccaacattttgggagaccgaggcagaaggatcatttgagcccagtagttcaagaccagcctgggcaacatagggagactcccatctctacaaaaaattaaaaaattagccaggcatggtagcacatgcttgtgcttccagctactcgggaagctgaggtaggaggattgcttgagcccaagaggccaggaggttgaggctgcaatgagccatgatcatgccactgcactcagtttaggaaacagagagagaccttgtctaaaaaaaaaaaaaaaacaaaaacaaaaacaaaaaaaacagttctaagttgtagttgaaatctgcagtaactgtttaatcaatgagcttctaatggtctttttattatgattatcaaatgtctatgcaaacatttcttcctctgaacttcaccctcctgaaaaggggcaactgtgaatgactattccctttctataccagttccaatagcacagtggagaggggagggaaaaataaacacacacatttctaactttccagcctactgactggtctgccctttcccctggccaacatcctcaaaaatatgataatgaagtggtttgtgtgattgtgaaagagtgtgtgcgtttccctgggctggagccaagggagagaaagaaggtatccaaacacagctgcagttacctctccccgctcagtcatttcagggaaatggactcagcatatctggaaggaggtcaactgggggacaaaataaaaggctctcttggttggttggttctgcacagatcctgaaagcaggcttcaggcctatactataacaatccctctgactttggcaataaaatgaaggagaaacatcacagaaaataccaaaggaagaaccagtcaaatcccattatcacaaactcccagaaatttgtttaattattttaatattttcaatatagctgactggagtgaacattagttaacatgagtaagtgataaattggatctaaattgtcatttgtatctatagagatgttgctataaagaagtatgtccaagttagattttcacctaggcaggttgggaaaaaaaagatgaaaaaatatgtgcattctaactattttctacaaactatatacatagtagattattccattgttgacacttctgaatcatatggccatggaaattaagg

SEQ ID NO: 87550 - DNA, 2093 bp, Homo sapiens
atctcaaaaaaaaaaagaaaagaaaagaaaagaaatgtatttctcatagagtgcatgtgacagagagggagaaagagcaagacagtgatgcagcagaacttgcttttacgacaaacccactctcgcaataactaatccactcctgcaataacaatattaagccattcatgaggatagagccctcctgacctaattacctcctgtgaggccccaccttccaagactgttgcattgagattacatttccaacacatgaacttttgggggacacgttcaaaccgtagcatttgtctagcaacttcctaatgttcacaactcagatcctgcctcctagatttccctctgcaytcccatgctattttttgaaacctataattccatcgctaaaaccaagtcaaagacaaccatacctttgtttcctcatctgcaggaggtgataaccgatagtattcatagaggcaaaataaattaatgccatgtaagaacagcatgtaaaccatagtatcataaaagtattcactatcattattcaagtaattttcacatagtaggtcaccaatatcggatcattgaataaaacatataccttgttcaatagatatatcagaatttatacatccaaaggtttgttagcctctttcataaaatgagctacaatctcacttcataagttaaaaataaacattcattgaatctaagctacagctttatgcattgaaaacattaccaacttatttacatagcacattaaaattttacaaagcacatttacagggagagaattaatttaattttcttccacactatgtgatacagctctagtgccaatcataaatgacaaacccttaatacatttgcccatctgggctcctctttccaaagtacctaagtatctagtgaggtgcagtggctcatgcctataaatcccaacattttgggagaccgaggcagaaggatcatttgagcccagtagttcaagaccagcctgggcaacatagggagactcccatctctacaaaaaattaaaaaattagccaggcatggtagcacatgcttgtgcttccagctactcgggaagctgaggtaggaggattgcttgagcccaagaggccaggaggttgaggctgcaatgagccatgatcatgccactgcactcagtttaggaaacagagagagaccttgtctaaaaaaaaaaaaaaaacaaaaacaaaaacaaaaaaaacagttctaagttgtagttgaaatctgcagtaactgtttaatcaatgagcttctaatggtctttttattatgattatcaaatgtctatgcaaacatttcttcctctgaacttcaccctcctgaaaaggggcaactgtgaatgactattccctttctataccagttccaatagcacagtggagaggggagggaaaaataaacacacacatttctaactttccagcctactgactggtctgccctttcccctggccaacatcctcaaaaatatgataatgaagtggtttgtgtgattgtgaaagagtgtgtgcgtttccctgggctggagccaagggagagaaagaaggtatccaaacacagctgcagttacctctccccgctcagtcatttcagggaaatggactcagcatatctggaaggaggtcaactgggggacaaaataaaaggctctcttggttggttggttctgcacagatcctgaaagcaggcttcaggcctatactataacaatccctctgactttggcaataaaatgaaggagaaacatcacagaaaataccaaaggaagaaccagtcaaatcccattatcacaaactcccagaaatttgtttaattattttaatattttcaatatagctgactggagtgaacattagttaacatgagtaagtgataaattggatctaaattgtcatttgtatctatagagatgttgctataaagaagtatgtccaagttagattttcacctaggcaggttgggaaaaaaaagatgaaaaaatatgtgcattctaactattttctacaaactatatacatagtagattattccattgttgacacttctgaatcatatggccatggaaattaagg

SEQ ID NO: 87551 - DNA, 2235 bp, Homo sapiens
ttgatcatctcaggttcagagataccatcaataacgcagaagtgggacatttgtttactcagcctttaaaggctatggccaaaactaaagccaaatagagagtttggccaaatactgtacaaagattgaagcaaaatttcagtgcatttctatatgaaatgaatagaaacaaaatgaattgaactacagcataagttaatgagactaaagataaacagtgaatctgtaaatgcaagaggacatacttcatcatttttttagatgagaaaaagcaccgacattataagtgtgtatttctcattctttgaaacagaagtgtaaatacacatgctccaggaatgatcactgctgtaatcctaaacacctagtcttccaatacaaaaattcagcctcccatgtgtaactgacccttgccttgacagatttctgaaactatagttcagaaactattgcaaccagagttgctagggagtaactttgccctttcctgcctagtgatttctttgggggaacaactcataatttacaagatattttcagcaaggcagcccggcctgcaggactgggacccttcctgagcccacctgtaacttcatgacaaatgctttaataatctgcctgtttgctgcttctcgcccttcagtgctttgctctaaagacatttgttttttaaatctatctgaggaaaaagccctggataatgcagctttttccatgattctstccacggcctgcccacaggtcagtattcaagatgccagtgcctcagagcctaattattagatgacatatttcctcccgaggcggcacaagctgtttcttcctttcataaggtaaaaatgtgtggactaatccataatcaaacaaggagggaaaatctctacttagcataagcacagtccagaacaaaagttctaacaccaattagtaacaatatgaatttaaatcagaatagccaatttgccagtatgaaaatcccaaccaggaaaatgtttcttccttttctacaataacagccccctcatgtacaaatagtagagtgccagagagttagagatcctctattggtattttaaaattcttctatgcatagccattgtcttcattgcagcaaccaaccagggtgttgctgggcaggagaatgtgcaaaattatcccagcaggtcatctaatagtgaacatgactatgatatgggggctagctggaacagccataaagctaagatagtactcagtagaaagagcagggggatcggccaggcatggtggctcatgcctgtaatcccagcacattgggagcccaaggcaggtggatcacctgagttcgggggtttgagaccaccagcctggccaacatagtgaaaccccgtctctactaaaaatacctaaattagctgggtgtggtggtgtgcatctctggtcccagctactcaggaggctgaggcaggagaatcgcttgaacccagaaggtggaggttgcagtgagccgagattgcaccattgcactccaaactgggtgagaagagcgaaactctgtctccaaaaaaatgaaagaaagaaagagaaggaaagaaagaaagaaagaaagaaagaaagaaagaaagaaagaagagagagaagagaaagaagagaagagaagagaaggattcatgaagttctagtccacctcttcctcaacacagctgtgaggcaaggagcaagtcatttgccctttctgagcctcagtttcctcattgtaaaatggcaaaagtaatatgtgaaatgtcttgggaattaaagtgccactcaaatgtaggagatgattagtaacagaatcataggacagttttccattgagcccaaaggtacgagcagcacagtccctacctaatttggtgctatggtgcagctatggctaagagtcgatgcaaatggaaccctcatgggtgttaccaactgtatcctcgcaagagtagttttcgtctccctgcaccttaggccttcagaaatgagtttttccaaatattgtttgaaatcacagaaagaattcacaaccagagtatatatacctgcttctttgaataagtgcttcttctcttacaagcactgaatctaagatctgaggctaaagatgggtgaaactcttcctcatactctctagggataaagtagtggcattcttcatgtaaaatggactctctccattggccccatgtagtataatgttcagatttacaaatttgtattttattccct

SEQ ID NO: 87552 - DNA, 2235 bp, Homo sapiens
ttgatcatctcaggttcagagataccatcaataacgcagaagtgggacatttgtttactcagcctttaaaggctatggccaaaactaaagccaaatagagagtttggccaaatactgtacaaagattgaagcaaaatttcagtgcatttctatatgaaatgaatagaaacaaaatgaattgaactacagcataagttaatgagactaaagataaacagtgaatctgtaaatgcaagaggacatacttcatcatttttttagatgagaaaaagcaccgacattataagtgtgtatttctcattctttgaaacagaagtgtaaatacacatgctccaggaatgatcactgctgtaatcctaaacacctagtcttccaatacaaaaattcagcctcccatgtgtaactgacccttgccttgacagatttctgaaactatagttcagaaactattgcaaccagagttgctagggagtaactttgccctttcctgcctagtgatttctttgggggaacaactcataatttacaagatattttcagcaaggcagcccggcctgcaggactgggacccttcctgagcccacctgtaacttcatgacaaatgctttaataatctgcctgtttgctgcttctcgcccttcagtgctttgctctaaagacatttgttttttaaatctatctgaggaaaaagccctggataatgcagctttttccatgattctctccacggcctgcccacaggtcagtattcaagatgccagtgcctcagagcctaattattagatgacatatttcctcccgaggcggcacaagctgtttcttcctttcataaggtaaaaatgtgtggactaatccataatcaaacaaggagggaaaatctctacttagcataagcacagtccagaacaaaagttctaacaccaattagtaacaatatgaatttaaatcagaatagccaatttgccagtatgaaaatcccaaccaggaaaatgtttcttccttttctacaataacagccccctcatgtacaaatagtagagtgccagagagttagagatcctctattggtattttaaaattcttctatgcatagccattgtcttcattgcagcaaccaaccagggtgttgctgggcaggagaatgtgcaaaattatcccagcaggtcatctaatagtgaacatgactatgatatgggggctagctggaacagccataaagctaagatagtactcagtagaaagagcagggggatcggccaggcatggtggctcatgcctgtaatcccagcacattgggagcccaaggcaggtggatcacctgagttcgggggtttgagaccaccagcctggccaacatagtgaaaccccgtctctactaaaaatacctaaattagctgggtgtggtggtgtgcatctctggtcccagctactcaggaggctgaggcaggagaatcgcttgaacccagaaggtggaggttgcagtgagccgagattgcaccattgcactccaaactgggtgagaagagcgaaactctgtctccaaaaaaatgaaagaaagaaagagaaggaaagaaagaaagaaagaaagaaagaaagaaagaaagaaagaagagagagaagagaaagaagagaagagaagagaaggattcatgaagttctagtccacctcttcctcaacacagctgtgaggcaaggagcaagtcatttgccctttctgagcctcagtttcctcattgtaaaatggcaaaagtaatatgtgaaatgtcttgggaattaaagtgccactcaaatgtaggagatgattagtaacagaatcataggacagttttccattgagcccaaaggtacgagcagcacagtccctacctaatttggtgctatggtgcagctatggctaagagtcgatgcaaatggaaccctcatgggtgttaccaactgtatcctcgcaagagtagttttcgtctccctgcaccttaggccttcagaaatgagtttttccaaatattgtttgaaatcacagaaagaattcacaaccagagtatatatacctgcttctttgaataagtgcttcttctcttacaagcastgaatctaagatctgaggctaaagatgggtgaaactcttcctcatactctctagggataaagtagtggcattcttcatgtaaaatggactctctccattggccccatgtagtataatgttcagatttacaaatttgtattttattccct

SEQ ID NO: 87553 - DNA, 779 bp, Homo sapiens
caaagttctctcaaaggcacttttgtccatggatggctgmcaaattattatttctcttggtgtggagggtgggcataagctggggtctcctattctgtcatcttgctgttcatctcttggcatacatttttaaaatacaaaaatgagatcactttatacatacagttttataactgtcttttccatttagccatatgttagggacagctttccatgtcaatgaatataggtctatatattcatataatataaatatcattccatgtactgtattttatttaatcaatccttttttgttaaatttaaggcatttacatgttttctattataaacaatgtatagttgaacatcatatacctttctttagaaaaaaatttccaaaacagaattgcacaacaagctccaagcatgagatcaataaatacttgttgaataatcatcaactatatgactaataatggggacacaactattgtttaactcatttgaaatggttaatcttttagacatatgaagatatattataaaagtgtgtatatacacatatattgcatatagtagctgggactacaggcgcacaccactctgcctggctaatttttctgttttttgtagagacaaagtttcgccacgtgcccagctggtctcaaactcttgagctcaaatgattcgcctgccttggccacccaaagtgctggaattacaggcattagtcactatacctggtctataaaagtatatttttgaagtctttctagtagcttcactgacaaatattt

SEQ ID NO: 87554 - DNA, 1768 bp, Homo sapiens
ggcgctagtatctcaattttatagatgagaaatttgatgcagagagaggttaaggaattgtccaagttcatatagattgtaaattgtacagccaggatttgaacctaggttcttgtggctccagagacttaacatctatagcttacagctttgataggatcaaaaagagaagaattgaattgtacctagttggctgggaagcatcaagttgtctttcccttccctttctcttcatctaacctcatatcccattccctgcctcaccccaatcccttctctcacttccaaagtgaaatacacctagagtgactgtcttagttagtttgggctgctggaacaagttattaggttggtgcaaaagtcattgtagtttttgtaataattagttggtacaaaagtaattgcgtgataacttttgcaccaacctaaatactatagactgagtgacttataaacaacagaaatttatttctcatcattctggaggtrgaagtcagagatcagggtgccagcatgtctgggttctggtgagaaccagcttgctggtttccagactattgtatcctcaaatagcagaaagagggcaaaagagctccctggagtcttttcataggggcactaatcctattcgtgagggctctaacctcatgacttaattaccctcaaaggcctcacctcctaataccatcacacagggagttaggaccttaacatgtgaattttgggaggatataaacatttactccattgcaacaaccaaattatgtgttaaatagacaggtcactttggacagtacaaggcaatgccaattggatggaacaccagaacaacaggcatcaacccagatgccctggaaactgggatttaggatcactatatatatgctttggatttgttttgtccttttctttagtgtttgcagttgtatggagtaagcacatttaaatggatgaaccaaatttgattttatcagcccctatgcaaggatataaagctgtgtgcaatatttacaattaaaaaaagctggaatgtataaccttatgctttcatattctacacgtatgtgtggtaacctttgctaggtaaaaagtatgcatatttatagctttggtagacactgctaaatcacactccaaaagggttttaccagtacctactcctgtcaacatgagtgagagtgcccattcccaatagacttgccaacagagtatgcaataaaagttttagatctttatcttcctgataggtgaaaaatgatatttcaatgtgaagtttatttgcatttctcattttaatttccttttctataaactgtctatttgtagtcttttctactttttttttttctattcagtggatggctttactatttatttatttgagcccttaatatatcccttctgtgatacctcaaactcttgggctgaggtgatcctcctaccccagcctgctgggtagctgggactacaggcatgtgccaccacacccagctaattttttgtattttttgtagagacagggcttcaccatgttgcccaggctggtcttgaactcctgggctcaagtgatctgcctgcctcagcctcccaaagtgctgggattacaggtgtgagccactgtttctggccatttttagtttcttatggttatgtttacttgtttgattatgcttctgtattttgcatcacgtgtacaaagtatattagactgtcagattacactttttaaaaacccacaatggtttcttctgtaactttttaattttat

SEQ ID NO: 87555 - DNA, 1768 bp, Homo sapiens
ggcgctagtatctcaattttatagatgagaaatttgatgcagagagaggttaaggaattgtccaagttcatatagattgtaaattgtacagccaggatttgaacctaggttcttgtggctccagagacttaacatctatagcttacagctttgataggatcaaaaagagaagaattgaattgtacctagttggctgggaagcatcaagttgtctttcccttccctttctcttcatctaacctcatatcccattccctgcctcaccccaatcccttctctcacttccaaagtgaaatacacctagagtgactgtcttagttagtttgggctgctggaacaagttattaggttggtgcaaaagtcattgtagtttttgtaataattagttggtacaaaagtaattgcgtgataacttttgcaccaacctaaatactatagactgagtgacttataaacaacagaaatttatttctcatcattctggaggtagaagtcagagatcagggtgccagcatgtctgggttctggtgagaaccagcttgctggtttccagactattgtatcctcaaatagcagaaagagggcaaaagagctccctggagtcttttcataggggcactaatcctattcgtgagggctctaacctcatgacttaattaccctcaaaggcctcacctcctaataccatcacacagggagttaggaccttaacatgtgaattttgggaggatataaacatttactccattgcaacaaccaaattatgtgttaaatagacaggtcactttggacagtacaaggcaatgccaattggatggaacaccagaacaacaggcatcaacccagatgccctggaaactgggatttaggatcactatatatatgctttggatttgttttgtccttttctttagtgtttgcagttgtatggagtaagcacatttaaatggatgaaccaaatttgattttatcagcccctatgcaaggatataaagctgtgtgcaatatttacaattaaaaaaagctggaatgtataaccttatgctttcatattctacacrtatgtgtggtaacctttgctaggtaaaaagtatgcatatttatagctttggtagacactgctaaatcacactccaaaagggttttaccagtacctactcctgtcaacatgagtgagagtgcccattcccaatagacttgccaacagagtatgcaataaaagttttagatctttatcttcctgataggtgaaaaatgatatttcaatgtgaagtttatttgcatttctcattttaatttccttttctataaactgtctatttgtagtcttttctactttttttttttctattcagtggatggctttactatttatttatttgagcccttaatatatcccttctgtgatacctcaaactcttgggctgaggtgatcctcctaccccagcctgctgggtagctgggactacaggcatgtgccaccacacccagctaattttttgtattttttgtagagacagggcttcaccatgttgcccaggctggtcttgaactcctgggctcaagtgatctgcctgcctcagcctcccaaagtgctgggattacaggtgtgagccactgtttctggccatttttagtttcttatggttatgtttacttgtttgattatgcttctgtattttgcatcacgtgtacaaagtatattagactgtcagattacactttttaaaaacccacaatggtttcttctgtaactttttaattttat

SEQ ID NO: 87556 - DNA, 713 bp, Homo sapiens
atctttggtagtattcccatacaacctgagcccatatttcagaccggtcatagctgtgtgatttaggggacrtcacacagactctactcttaactcctctgtaaaagagaatgagtaatgtgtacctccaaaaattactgtgggaagtcaataaaataacatatgggaaagagttttacaagctgttaagtgttatgtggacattaggtattcaggaaatcagttaaagccacactgaagacattaaaacaaacaatcagatatttgatacatagaaagctgggcaaatgactgttcagcactttaaaggtaggaagaagaggagactagatcagtcagagagaaagagtttagtcattttcatatcatgattcttcccttcccagtggaaagtatatatgagcatgtatgtttatgtaatatagatagatgtggcagtaaattgcctttcactttctctagtcaaaatcaaaaataataatttttaagctaggaaaattcagtaatttgatgagggaatttggctggaaaagtgaaaaacaattcaaggataggtatttataaatatatcagaatattatacatgtatttttgtatgcacatgtgttttatttaggaaggaaataacatgttaacttttgcgtatcttaattttttattcagcattgacttcccacctgttgtttaactttttcattctttgtttttttttt

SEQ ID NO: 87557 - DNA, 839 bp, Homo sapiens
ttgccatttgaccggagaaaatctttgatggatattcatctcacttcttttatgttacacactaatttcaaagtttctcctctattaaatcacattcacaggcacattcccaagaaattcaggtcagaacaggtttctccttagcctgactgacttggtaaaggggcaagcccatggatccttctgctgtcatggtaataagtaattgtgccgatgtaattaatcaagattttttggcctaagagaaaagagatacaagtaaacataaatgaaataaaaactctatgatataaaatttgaagcagaactatctcatgatatgctgattgtttcatcttatctcattcttaacctgtccactaatctgtctaggcttttataatggcctagaatcaatgacaaccaagtagtaatgagcgcccctaaggtgcagattgtggcrtctaagcataacggaagcagcactctccagatatgattgattccaggttttggaaagaaaatatgcaaggcgagtctttgcattttactgtagtagaaaactaaaaactaacaaagacaagtaagatcatttaaaacaaaataggtgccaacttaagggagctcctactggcccaagatgcaacaatttgatcttcaaaatgaataatgattgcaatggaatgaagcacataaaatatataaaaatcttagtttctaattatagtaaaaaatcaaagactaatttaaaaaaaactcatcggtcatcataagagtttactaaagcacaaactgattacttttggattttattattaaggcaaaataagcattcatccagactcttctatatgaactgt

SEQ ID NO: 87558 - DNA, 839 bp, Homo sapiens
ttgccatttgaccggagaaaatctttgatggatattcatctcacttcttttatgttacacactaatttcaaagtttctcctctattaaatcacattcacaggcacattcccaagaaattcaggtcagaacaggtttctccttagcctgactgacttggtaaaggggcaagcccatggatccttctgctgtcatggtaataagtaattgtgccgatgtaattaatcaagattttttggcctaagagaaaagagatacaagtaaacataaatgaaataaaaactctatgatataaaatttgaagcagaactatctcatgatatgctgattgtttcatcttatctcattcttaacctgtccactaatctgtctaggcttttataatggcctagaatcaatgacaaccaagtagtaatgagcgcccctaaggtgcagattgtggcgtctaagcataayggaagcagcactctccagatatgattgattccaggttttggaaagaaaatatgcaaggcgagtctttgcattttactgtagtagaaaactaaaaactaacaaagacaagtaagatcatttaaaacaaaataggtgccaacttaagggagctcctactggcccaagatgcaacaatttgatcttcaaaatgaataatgattgcaatggaatgaagcacataaaatatataaaaatcttagtttctaattatagtaaaaaatcaaagactaatttaaaaaaaactcatcggtcatcataagagtttactaaagcacaaactgattacttttggattttattattaaggcaaaataagcattcatccagactcttctatatgaactgt

SEQ ID NO: 87559 - DNA, 1471 bp, Homo sapiens
ggcctcccaaagctctgggattacaggcagaagccactaaatgtgtcatatccccaaatgattgagaatagagttccttaacaattttttttttcttaaacaacattggtggtgatgaggttagtggtatagtgaacatgcgtgaaatgacaggctcagaaaaccttgagtgagagactgattcctgataaacaggattgtttgtgaaagtttcaccataaacttcccaagggaagaccacaagatgctggccaaccatactcctctcaggacaagccgtgtctgatctccactagtaacacatggaaacaggaggtcaagcagacgggaatgttcacacacaaaaagagcactggggaagttggcaaactcatcttttctctcctgcagctcttgcttctgtctttaacacattgattggatcaagcttgagtctctttgatcctcccgacaccctgcttactattgtttatttagcttatgattcttctgcctctaaggtaaatctttatactccatgaatyaataggctacaggggccttaattaaagctgaagaataaaattggtactggaaactaaattcctcccatgtctagaaaagcaggaaatgttattacccgtggaggcctttatattgctttccattgtcacttctgaagttcagtgaaacattagtagtcccatggtagatttcttggacacagattagatgcatagatagccatgtgaagaaaaatggggtcttttaacaagtctcctggatacttaagtgtctctctagaggaatcagcatccagtatactggtgggtgttaatataaagtctgaatgcttcttgaactgcaaaagaaaccacaaatcagggttttaggtcctgtctgaggtacagaaagataaaattgcacaacatgtgggagcatagtatgcaaagattttgatttcacgaatttaactatctgtagaggttttattttattattatactttaagttttagggtacatgtgcacaatgtgcaggtttgttacatatgtataaatgtgccatgttggtgtgctgcacccattaacttgtccttcagcattaggtatatctcctaatgctatccctcccccctccctccaccccacaacagtccccggtgtgtgatgttccccttcctgtgtccatgtgttctcattgttcaattcccacctatgagcgagaacatgtggtgtttggttttttgtccttgcgatagtttgctcagaatgatggtttccagtttcatccatgtccctacaaaggacatgaactcatcatttttatggctgtatagtattccatggtgtatatggtgtatatgtgccacattttcttaatccagtctatcgttgttggacatttaggttggttccaagtctttgctattgtgaatagtgccgctataaacatacgtgtgcatgtgtctttatagcagcatgatttataa

SEQ ID NO: 87560 - DNA, 1471 bp, Homo sapiens
ggcctcccaaagctctgggattacaggcagaagccactaaatgtgtcatatccccaaatgattgagaatagagttccttaacaattttttttttcttaaacaacattggtggtgatgaggttagtggtatagtgaacatgcgtgaaatgacaggctcagaaaaccttgagtgagagactgattcctgataaacaggattgtttgtgaaagtttcaccataaacttcccaagggaagaccacaagatgctggccaaccatactcctctcaggacaagccgtgtctgatctccactagtaacacatggaaacaggaggtcaagcagacgggaatgttcacacacaaaaagagcactggggaagttggcaaactcatcttttctctcctgcagctcttgcttctgtctttaacacattgattggatcaagcttgagtctctttgatcctcccgacaccctgcttactattgtttatttagcttatgattcttctgcctctaaggtaaatctttatactccatgaatcaataggctacaggggccttaattaaagctgaagaataaaattggtactggaaactaaattcctcccatgtctagaaaagcaggaaatgttattacccgtggaggcctttatattgctttccattgtcacttctgaagttcagtgaaacattagtagtcccatggtagatttcttggacacagattagatgcatagatagccatgtgaagaaaaatggggtcttttaacaagtctcctggatacttaagtgtctctctagaggaatcagcatccagtatactggtgggtgttaatataaagtctgaatgcttcttgaactgcaaaagaaaccacaaatcagggttttaggtcctgtctgaggtacagaaagataaaattgcacaacatgtgggagcatagtatgcaaagattttgatttcwcgaatttaactatctgtagaggttttattttattattatactttaagttttagggtacatgtgcacaatgtgcaggtttgttacatatgtataaatgtgccatgttggtgtgctgcacccattaacttgtccttcagcattaggtatatctcctaatgctatccctcccccctccctccaccccacaacagtccccggtgtgtgatgttccccttcctgtgtccatgtgttctcattgttcaattcccacctatgagcgagaacatgtggtgtttggttttttgtccttgcgatagtttgctcagaatgatggtttccagtttcatccatgtccctacaaaggacatgaactcatcatttttatggctgtatagtattccatggtgtatatggtgtatatgtgccacattttcttaatccagtctatcgttgttggacatttaggttggttccaagtctttgctattgtgaatagtgccgctataaacatacgtgtgcatgtgtctttatagcagcatgatttataa

SEQ ID NO: 87561 - DNA, 1471 bp, Homo sapiens
ggcctcccaaagctctgggattacaggcagaagccactaaatgtgtcatatccccaaatgattgagaatagagttccttaacaattttttttttcttaaacaacattggtggtgatgaggttagtggtatagtgaacatgcgtgaaatgacaggctcagaaaaccttgagtgagagactgattcctgataaacaggattgtttgtgaaagtttcaccataaacttcccaagggaagaccacaagatgctggccaaccatactcctctcaggacaagccgtgtctgatctccactagtaacacatggaaacaggaggtcaagcagacgggaatgttcacacacaaaaagagcactggggaagttggcaaactcatcttttctctcctgcagctcttgcttctgtctttaacacattgattggatcaagcttgagtctctttgatcctcccgacaccctgcttactattgtttatttagcttatgattcttctgcctctaaggtaaatctttatactccatgaatcaataggctacaggggccttaattaaagctgaagaataaaattggtactggaaactaaattcctcccatgtctagaaaagcaggaaatgttattacccgtggaggcctttatattgctttccattgtcacttctgaagttcagtgaaacattagtagtcccatggtagatttcttggacacagattagatgcatagatagccatgtgaagaaaaatggggtcttttaacaagtctcctggatacttaagtgtctctctagaggaatcagcatccagtatactggtgggtgttaatataaagtctgaatgcttcttgaactgcaaaagaaaccacaaatcagggttttaggtcctgtctgaggtacagaaagataaaattgcacaacatgtgggagcatagtatgcaaagattttgatttcacgaatttaactatctgtagaggttttattttattattatactttaagttttagggtacatgtgcacaatgtgcaggtttgttacatatgtataaatgtgccatgttggtgtgctgcacccattaactygtccttcagcattaggtatatctcctaatgctatccctcccccctccctccaccccacaacagtccccggtgtgtgatgttccccttcctgtgtccatgtgttctcattgttcaattcccacctatgagcgagaacatgtggtgtttggttttttgtccttgcgatagtttgctcagaatgatggtttccagtttcatccatgtccctacaaaggacatgaactcatcatttttatggctgtatagtattccatggtgtatatggtgtatatgtgccacattttcttaatccagtctatcgttgttggacatttaggttggttccaagtctttgctattgtgaatagtgccgctataaacatacgtgtgcatgtgtctttatagcagcatgatttataa

SEQ ID NO: 87562 - DNA, 1471 bp, Homo sapiens
ggcctcccaaagctctgggattacaggcagaagccactaaatgtgtcatatccccaaatgattgagaatagagttccttaacaattttttttttcttaaacaacattggtggtgatgaggttagtggtatagtgaacatgcgtgaaatgacaggctcagaaaaccttgagtgagagactgattcctgataaacaggattgtttgtgaaagtttcaccataaacttcccaagggaagaccacaagatgctggccaaccatactcctctcaggacaagccgtgtctgatctccactagtaacacatggaaacaggaggtcaagcagacgggaatgttcacacacaaaaagagcactggggaagttggcaaactcatcttttctctcctgcagctcttgcttctgtctttaacacattgattggatcaagcttgagtctctttgatcctcccgacaccctgcttactattgtttatttagcttatgattcttctgcctctaaggtaaatctttatactccatgaatcaataggctacaggggccttaattaaagctgaagaataaaattggtactggaaactaaattcctcccatgtctagaaaagcaggaaatgttattacccgtggaggcctttatattgctttccattgtcacttctgaagttcagtgaaacattagtagtcccatggtagatttcttggacacagattagatgcatagatagccatgtgaagaaaaatggggtcttttaacaagtctcctggatacttaagtgtctctctagaggaatcagcatccagtatactggtgggtgttaatataaagtctgaatgcttcttgaactgcaaaagaaaccacaaatcagggttttaggtcctgtctgaggtacagaaagataaaattgcacaacatgtgggagcatagtatgcaaagattttgatttcacgaatttaactatctgtagaggttttattttattattatactttaagttttagggtacatgtgcacaatgtgcaggtttgttacatatgtataaatgtgccatgttggtgtgctgcacccattaacttgtccttcagcattaggtatatctcctaatgctatccctcccccctcccyccaccccacaacagtccccggtgtgtgatgttccccttcctgtgtccatgtgttctcattgttcaattcccacctatgagcgagaacatgtggtgtttggttttttgtccttgcgatagtttgctcagaatgatggtttccagtttcatccatgtccctacaaaggacatgaactcatcatttttatggctgtatagtattccatggtgtatatggtgtatatgtgccacattttcttaatccagtctatcgttgttggacatttaggttggttccaagtctttgctattgtgaatagtgccgctataaacatacgtgtgcatgtgtctttatagcagcatgatttataa

SEQ ID NO: 87563 - DNA, 1224 bp, Homo sapiens
aattccattttatctttacagagttaatgaaacaatacataaaacatgcttagagttgtgcctggaacatagcaggtgttcaataaatatcattctcctcctcatttaccactgaactatttctgctgtcaccacttcagcctgccctaggctgtcacttcccattactctctgtggtgaaaactggggcaatattggcttcttttcttttcctgctaacaaacagattttaccaaatccttttaaaatgaacctgcagaagtgcagagtggaagtttctgcaaataatttttatgggaaaaaattatttctctctcaatataaacacagcctgggtctggcaaactaaaacaataaaatgggagcagcctatttcgggctgtgctaacaaccaaatctcaacgggagattttaagtccaggtgattgccacatgataagttttgcagatgatcagaaatattagtataatcatgctgtcatggctttctctatgtcttgcaggtaagaggttggcctttaagcccaagtcacggaaaactagtgataaacatcctatggctggccagatatgaaatagttctctttgcatctcagtgactctttcctacacatacatacacagacacagacacacatatatgcacacacacacatattatctatgcgtactaacctacagacaaaactatgtatgaaaacaattgaagaatgttgcttcctgttttgtattggttgcccgcaaagataaatctagctcctttccttgtttatcaacaccatgctcatccctcaacatcactyccatatcccctgctgtcagaattaacaccttgtcctgggctcccaacactaggtacaggaataactaattagccctaattctttctgcaaagtgcaataaatacttgtttgtttatatgctgggctcttctgcaagaatgaaactaggacaaggtcttctttatctttgtaatttccccagggtctagtgcggtgcctggcacttggtaggtgttcagaaaatgtttgtggaatttaaatgaaagtcaagtaaaggatacagagcaaataaacacaatcacttcttcaaatgattggaagaccccatgttgttagagccctccaggttcaaacacatggaagcttcatggggagaccaggtttcttgtctgacagtgtattttcaacaggccctgtggcaaagaaatctttcttgatatta

SEQ ID NO: 87564 - DNA, 1015 bp, Homo sapiens
ggttggtggagtatctgcaaaactgacccagttttcttgaggtggaggtggggaatgccctgaccacactgcatcaccagcagaagaacctataaggagaatgggtaaacatgctgactcatgtttgaggaaaaaagttactaggaagttttctttccaactcttactctgaagaaatctaacaatttccaaaatggaatcttttctgttcaattagaaattatacctcatttaaatatcttcaattattttgtgctctccttgtcaataaaatgtatgtaatatatacataatattctgggaaataattattcattttacctttagagaatctggtatccataaacttgtctaaacatcacagatacacataaatgcaattaccacttttcaaagcaatgtatccacttacaaatttccatagttggtttttgcttctatttaacttaaacttacaattaaaaactatctgggaggcaactcctgaaggaatattatcaagtttccttcaatttacaaccctaaataattgttactttcaaaaaatctctaagccaggttctgtggcacaagcctataatccccacctactcaggaggctgaggcaggaggatcatttgaacccaggagtgcaagaccagcctgggcaacacaatgacactctaatcaatcaatctctaaatacctgattgtgcttcaccaaagggagaccaaaatggcccaggtcccgcragaggcctctcactattcccaccgctgggatgacggctgtgcttcctccatgtgtgtggagaagttggtggggattgctgtggtgaaactactggggatgcaggttcctagaaaagaatattattttaaaattttaactttaaggagacattttaattattaagctaccaataagagccttagtgaagcatttgcacagggcatcaactgctaatatttacatgcatgtgattacctgtgcatctgcagatgtacgaggctgaaccgtatcatggcttacgga

SEQ ID NO: 87565 - DNA, 1117 bp, Homo sapiens
tgcatgtactaatacccccaatccttctagtaataggattattgtttctcctcttgttacttggagaccacaacagtttagatgagctgcgctgattttatcagcacctcctgccagtcaaatcctgcmtttgacttcaatttcctggagaaatgtatttttttgggtatctcacttttactttaaaaatgaaaccgtatcttacaggtatacacatcttacatgtcctcattgataaacaacttgaaagatgctgcaggataagctatgggtcttaagttggccagcattcagagaaagattttctaacttattagcattttataaagaaaacaattactgagatttttttcatgaatatacggaagaattaaaaaaaaaactagaaaacccagaagtttttaaagaagaattttaaaaaactttattttgaaaataagttacaagttatttgtcagagtttaagggatttttccttgtgtgtaattgtcgtggttaaattacaactatacacttatatttatggtacaacttcttgatagaaatgctcactgaagggaaaaaatccaacagcaatagtatatatagtaattttaaaacttttacaccttttgagggatgtagtaagtcttacgctttagaatactttgaaatatttttgaaaattattaaaatacatgaaattattataaaacatccctgctggttaataacatttccattagtgattactatcagtctttgtgagtcccatttaaaatttcggtccagagggtgagtttggcattcgtaattgtgtcttgcacagaacacactaccaccgtctctttcaactaccactactaccactgtctctcctactagcactgtttctactgttgggttattactgacatctattgagtacttgctatgggttgagccattttatcctcctccaccctagaacaattgagatactagaggataagggacttgtttaagatcatgtagtgtaacgtggtcagaaagtgcacccagagctgtcctactccaaattttgtgttattttgccctttgagtcttttgttgaaaattccaacagtgagcccttgtattattgccttcaaaagcagta

SEQ ID NO: 87566 - DNA, 1117 bp, Homo sapiens
tgcatgtactaatacccccaatccttctagtaataggattattgtttctcctcttgttacttggagaccacaacagtttagatgagctgcgctgattttatcagcacctcctgccagtcaaatcctgcctttgacttcaatttcctggagaaatgtatttttttgggtatctcacttttactttaaaaatgaaaccgtatcttacaggtatacacatcttacatgtcctcattgataaacaacttgaaagatgctgcaggataagctatgggtcttaagttggccagcattcagagaaagattttctaacttattagcattttataaagaaaacaattactgagatttttttcatgaatatacggaagaattaaaaaaaaaactagaaaacccagaagtttttaaagaagaattttaaaaaactttattttgaaaataagttacaagttatttgtcagagtttaagggatttttccttgtgtgtaattgtcgtggttaaattacaactatacacttatatttatggtacaacttcttgatagaaatgctcactgaagggaaaaaatccaacagcaatagtatatatagtaattttaaaacttttacaccttttgagggatgtagtaagtcttacgctttagaatactttgaaatatttttgaaaattattaaaatacatgaaattattataaaacatccctgctggttaataacatttccattagtgattactatcagtctttgtgagtcccatttaaaatttcggtccagagggtgagtttggcattcgtaattgtgtcttgcacagaacacactaccaccgtctctttcaactaccactactaccactgtctctcctactagcactgtttctactgttgggttattactgacatctattgagtacttgctatgggttgagccattttatcctcctccaccytagaacaattgagatactagaggataagggacttgtttaagatcatgtagtgtaacgtggtcagaaagtgcacccagagctgtcctactccaaattttgtgttattttgccctttgagtcttttgttgaaaattccaacagtgagcccttgtattattgccttcaaaagcagta

SEQ ID NO: 87567 - DNA, 1072 bp, Homo sapiens
ttttyttgtgatgtgtttggttttggctcagggtaattagatttataaaatgaggtgggaagtatcctctcctcttttattttttggagtggtttttgaagaattgggataattttgctttaattgtttagtagagtccaccagtggatctgtcttggcctggccttttctttgtggatagttttttgattactaattcaatttctttatttattatggatctatttagattttttatttcttcttgagtcagcagagggtctcctctgttcttgggtgtatcagtggattatacccaagccctcagctcctcctgggtgtccttcctgtgctgtcggtgcccagagtccggaggggaccgaggtgttaggggactggtgtatcagcactgccctgagcgcacacacacctggccgggttgcgacagcacctgggctcggcttcaactttggttcgaaattggagtgggcactgggagttgggagaggccagggagcgggagtgggcacttccaaactgcaggggcaggggtgcttcccgggcccccgacagtgcagggatgcttgggtctggagctgtgattgggtagctgcagatgtgcccaggagcgcagggctcctggccctccaacctggtagggggcggggctcctgcctgttcccagcccccactggctccgcagagtgggcagcccctgccatgcctcccccgctgcagccagtgtcttcgcagtggctgccatcactgctgcctaagttgtcttttgaaatccacccatttttttatcaaaggaaattagtggtatcccaactttgtactgatgagagtttgtggtttcttaatttcttgggagtgggcagtgctccttctctgcttctacctttgaaactggagagacgcacttgggaaacaaatgatgactattgattatcagcccaaattgttgtttttttctattgttcattaattctttaaagatgtaagtccttattgttcaataaattatcgtctacaatggtgcatgataacacttcggacattgggggaacaaacatacaagatgtttatgtaa

SEQ ID NO: 87568 - DNA, 697 bp, Homo sapiens
ttggatcttgtttctgggaattttttttttttcagtcaactgaaacaacttttgaaaatatatttggtcctctgttcacttcctttcttgttgatacgatttttactgagaaaaatgcagcattttattggcccttcagaaagcttaaaatttccccaattggctcctttaagaattgttctccctggatgctaccgggcaacgagtaggagggttgctgcagtgaggcttgaagcccaagtggagcctttgcaggtgcagattttggtggtagtagcatatatatatatttaaattgttctcccatttacttctgctcctctttcctctttgtcatcttcagtaccacatgaaacgatctagaaggggctggacgcagtggctcacacctgtaatcccagcactttaggaggccgaggcgggcagatcccttgagcccagaagttcaagaccagcctgggtaacatagtgaaacactgtctctacaaaaaataaaagaaagaaaaaaacgattagccgaycatggtggctagctgggcatggtggcacatgcctgtagtcccagctatgtgggaggacggattgaaccttggtagtctaggctacagggagctgtgatcatgccactgcactcgagcctaggtgacagagtgagaccctgtctcaaaaaaaaaaaaaaaaaaaaggagttggggtt

SEQ ID NO: 87569 - DNA, 747 bp, Homo sapiens
ggaacggtgctcttctttcttaccctggctcaccgtttttacattggtttctgaatggacctcaggcgccctgggacttgtgctcttgctggaacccacataacgccggaaacagacagaccgacttgcctgtttcacgrtgtccacttccaatgagtcgaaatggaaaattttcccactggcatgtcagtcatttggaaataagtcgtattgataataaaggaaatcaaacacaggagtgtgtgtattcaactgaaataaattcagaaagccctgaaataaacctcatttggtgtgcttacaaatggcatttggggagattccaggtcattcgtccagctgcgaaagctgcatctctgaagcacagtccctgtcctgcaatcagacttacgtatccgacgtggtgtttccgtggaaatgattgtgggaaatggccccttgcttgtctgtatttgctgattagatttcatggtccctttctcgttaggtgcagtgatcaaagttgaccaaccccagaggaaagctgcccaggtcaccactcagggctccgtagaaccacagaatcttgggcgcaaccctgctcaagcacccaaatgtgcatacgaaaacagggtctccgtgtgacgtatgtgaaaactacagtgtgatgagcatgactcgcagacaggttatcgattgggctcccctcaaaatcagttaggaacatgaaagcacaccgatgcccaggtcctggctgcaggaataaga

SEQ ID NO: 87570 - DNA, 747 bp, Homo sapiens
ggaacggtgctcttctttcttaccctggctcaccgtttttacattggtttctgaatggacctcaggcgccctgggacttgtgctcttgctggaacccacataacgccggaaacagacagaccgacttgcctgtttcacggtgtccamttccaatgagtcgaaatggaaaattttcccactggcatgtcagtcatttggaaataagtcgtattgataataaaggaaatcaaacacaggagtgtgtgtattcaactgaaataaattcagaaagccctgaaataaacctcatttggtgtgcttacaaatggcatttggggagattccaggtcattcgtccagctgcgaaagctgcatctctgaagcacagtccctgtcctgcaatcagacttacgtatccgacgtggtgtttccgtggaaatgattgtgggaaatggccccttgcttgtctgtatttgctgattagatttcatggtccctttctcgttaggtgcagtgatcaaagttgaccaaccccagaggaaagctgcccaggtcaccactcagggctccgtagaaccacagaatcttgggcgcaaccctgctcaagcacccaaatgtgcatacgaaaacagggtctccgtgtgacgtatgtgaaaactacagtgtgatgagcatgactcgcagacaggttatcgattgggctcccctcaaaatcagttaggaacatgaaagcacaccgatgcccaggtcctggctgcaggaataaga

SEQ ID NO: 87571 - DNA, 747 bp, Homo sapiens
ggaacggtgctcttctttcttaccctggctcaccgtttttacattggtttctgaatggacctcaggcgccctgggacttgtgctcttgctggaacccacataacgccggaaacagacagaccgacttgcctgtttcacggtgtccacttccaatgagtcgaaatggaaaattttcccactggcatgtcagtcatttggaaataagtcgtattgataataaaggaaatcaaacacaggagtgtgtgtattcaactgaaataaattcagaaagccctgaaataaacctcatttggtgtgcttacaaatggcatttggggagattccrggtcattcgtccagctgcgaaagctgcatctctgaagcacagtccctgtcctgcaatcagacttacgtatccgacgtggtgtttccgtggaaatgattgtgggaaatggccccttgcttgtctgtatttgctgattagatttcatggtccctttctcgttaggtgcagtgatcaaagttgaccaaccccagaggaaagctgcccaggtcaccactcagggctccgtagaaccacagaatcttgggcgcaaccctgctcaagcacccaaatgtgcatacgaaaacagggtctccgtgtgacgtatgtgaaaactacagtgtgatgagcatgactcgcagacaggttatcgattgggctcccctcaaaatcagttaggaacatgaaagcacaccgatgcccaggtcctggctgcaggaataaga

SEQ ID NO: 87572 - DNA, 1777 bp, Homo sapiens
ttttgacacatcctcttggtgttttcagagctttttgaatatgtggaataatatcattgctttgagcagattttcagccattagttcttcagttattgctgctgtccctcgctcatttctcttcctggaaatagaattgtctagatagatagagaattggtccaaaagtaattgtggtttttgcctttaaaggtaatggcaaaaactgcaattacttttgcaccaaccatacgtatgtacacaaacacatatgcaatatgtgtgtattgcatatatactcaatgcaaacacacagacacacatatacaaagcatccttttactgtgtcttcacatatatatttatgcaattttttgtatttttcattattttatatctctgcacttcaacctgaaaattttccactgacttgtattcttactttttttttttttttttgaaacagagccttgctctgtcacccaggctggagtacagtggtgtgatctcgactcaactgcaacstctgcttcccaggttcaagcaattctcctgcctcagccttctgagtagctgagattacaggtgccctctaccacatccagttaaattttttttttttttttgtatttttggtagagatagaatatcaccatgttggccagcctggtcttgaactcctggtctcaagtgattcgcctgccttggcctctcaaagtgttgggattacaggcgtgagccaccgtgcccagcccactgacctgtgttttaattcttggatcctctactctgctctggtcactttgctattaatcccatctattgtgatattgacttcacatattgtatcaagtactagaattcaattatttaatatttttacataagacaggagagtctattcaaaaatgaaaagggtcagacatgtttcagatgccccagccttcttgggatatgggctttttcatgctaacatctgtctcttaatgaatccaaaatgaaggagtgtttgcttttaaaagaatacatttcagtgaaggtcttgatcaaagagagataattaaaaaaacactaaagaaacatcaaaaagatctaattgtagggtatctgggggatgataacacatccaggaaactttttctcagagacctgtgatagaaccttaaatgtacttttctttgttttgctctcatatgtgagcaacttagaagaaacatgtatttgtttgtattaatcctacatgactagggttgacagatttagcaaataaaagtataggacactcagttaaatgtgagttttagataaacaacatccagtttattgtggcattatctatctcatactatttgggattaaatacactaaaaagttcttcatggtttttctgaaagccaaattgaacttggcctcctatattcatctaataacactatgaatcactgaaaacattttttctttaaagatatttttcttggtgaaagtatttattacgtcactgaattttattttactaggtgtagtaggtgtaataacggcatcccaaagatgtccatgtccttatccctagaacctgggattatgttacactttacggcaaataagaactaagacagcagatagaatagttggctaatatgctgactttaaaaccgggagattaacttagatcatgtgaatgagaccaacgtaatccaagaatccttaaatgtggaaaagaaaggcagaacagtcagtgtctgggtgatgcgatgtgggaacgactcaacagccattgctggatttgaagatgaaggaa

SEQ ID NO: 87573 - DNA, 701 bp, Homo sapiens
  misc_feature (1)...(701): n = A,T,C or G
atagctgctaggcttcaccccacgctgagactggatgaaaaggtgtgcttggtcactttataaaggttccagccacagctgcaattcttgtcatattacagtgatgacattatgacatgttttctgatgcatcattccaatgcctctcaccatgcagaacacacccactcactcagttaattaggaacccaatggtaaggcagagctccctatggatttgtggctgtccgggtgctctctggactccaggggcttgtctgggtgtgggtcagattggrttgtgggtacagatagggctggcatgagcaagtatgccccctttggccactagtctcagggcatgtggctgggggctgacttgtccgtactttgctgctttggagctttttttctcttcctaaaatgctgggagagtctaagaccctcctggggaccaaataaatccagccctggacatattcaatatctggcaataggactggctttttggtagtgaggtaagggaggaaaatgggctacattcaaggttagctgaccagctggcccttgcgtantcgatggggtgctataatttgagtgaaacatgtctcattctttcattttttttttttttttgagagacagagtctcacttttttgtgcaggctggagtgcagtggcatgattacagctcacaacagcttgagctgtcaggctcaaga

SEQ ID NO: 87574 - DNA, 894 bp, Homo sapiens
ggagatgatcacacttatctcagaagaaagagctatgtgaaaagtatcaggatttgccaagaaaaacatcctgggcccccattggaccaggcctagtccttctgcccctgctggctggctggagctccggcccatcaccaggcaccctcctgcccctcttagggttggcagagggttcacgcacctctgagtgccagccagagaagcaacttgcgatgtcctgggtctcccagcacctcttcccagcttcccctgaccacaggctgaaggtgtcttagcaaggacaaggcagatgaatcctcaagttgaaaacagatctggacggagggcaggatggggtggacataatcactacttttatttgtcctcgcactgaggatcatactccggtctctcacatggatccctggggagccagtccacggagcacagccgagaggcagtccaggcttagtcagagccacagaccstgggtgaggctcctgctcttcggctgcagagagctgcctcctggcctctgaagccgatccacctgggccaccctgcggtcacaactccagaagacaggaggcaggaagaggaagtctctactctccttatccacagcgttgtctgtgctgctggcctgtccctgttcccaaataagagcagatgcctggcaatgcctcaataaatatccctgctgattcagtctgaacttaattcatttccgcacccccggcgtgaatggtaccctgtgcagggcagagacgaatgaggcactgtaatcagtgccaagagattcaggccagaagctttggtaaactgggccccctggctctcccctgcggtgaccccagctgctccgtgtcttagcgcagtgcccagcttcagaacaagtggctaaaaagaaaa

SEQ ID NO: 87575 - DNA, 781 bp, Homo sapiens
tcttgtatgtatcgcatgataaagcaggaagcatggacaggatgaccgaacaggggctgttgctggaagttgtattagaggaaagctcttggaaagttctggcttcggaaattttcttcttgtttggtcccaaaacttctgatcttattttgaggagaagtctgacttaaaactttaataaattagaatagggatcatcatttttgtagtctaaagggttgtcaaaaataactatcagttaatccaaattaacagttgagcacatttcaaaacatttcagaaagcattcctgagcacattccaagcatagggctgcaataagtatttgaagactcataaacctgtgttcaagacacatgaacctttctctctggtagggaagatatttattcagtcatttattcactcattcattcatttattagacaaatggttagtgggagcctaccctgtagcaggtacagtgttaaaagccagagactatgtaaacaagagggaatacggctattagcctcatggagtatacatgcaaatgggtctatrtatgtaaatcactatattgcaaggcctattggtagagttatgtgtaaaagggatggggcattgtcagaaaaccatggaagtcttcacgagatggtaaggattgaactgcatcttgagagatgaattagaataagcaaaggggagctaggattgggaatggaaagtcatcctacatcaagagaataatatgtgcaaatatgtaaagccagatagctaataaaaaataatgaatgcttat

SEQ ID NO: 87576 - DNA, 1184 bp, Homo sapiens
catttaatatagtagcctcttaaaaaaaaaaaaacctgctaggatttaaaaataaaaatcagaggcctatctccactttaaatctgtcctgtaaaagttttataaatcaaatgaaaggtgacattgccagaaacttaccattaacttgcactactagggtagggaggacttagggatgtttcctgtgtcgtatgtgcttttctttctttcatatgatcaattctgttggtattttcagtatctcatttctcaaagctaaagagatatacattctggatacttgggaggggaataaattaaagttttcacactgtgtactgtgttttactgattggttggatattgcttatgaaaattccatagtggtatttttttggattcttaatgtgtaacttaaacatactttgaagtggaggagagtcataagacagaacatttggcaggaattgtccttatgaaacaagaaaaagaaaatgaaaagtattattaagcttctgtgtttgtctaaaaatgtggcatatggatggcatttaaaactttgaatgaattatacctaaatctgggacagggaggtgacagtggaacaggctaccaatcagaactagatgacttttaaggctcctcctattatgagacttcaatttccaaagagaagaactagcagagaaattgtatttcagtaattttaagctccttctgtcttgtagagtcttgttatagttgtrtaaatcaaaaacacagaataaggaacatatttaactttttttcattataaaatggttagaggaccctaccccctctagattccctgatttccccaggcctgcagcatacagtaagatgggtccctgtgccaggcctcaatactgccagggaataaaaccagagggagaggaccctcagtgtcatatcaggaagcccagtgccagaggacagacaggttcaaaactggcttttcctctgggcctgggttggtgctataggccaagggtcattttatacttgggtataaatcaatcccagtttgggaaaagattatttttaagcttaaaaggctgacatgtgccattatatgtagtatgtaatatatgtaacatcttccaattcttttaaaataaaattaatatttataatggatatttaatgattgttatttttaaaaaccagcttataattcctcgtta

SEQ ID NO: 87577 - DNA, 1606 bp, Homo sapiens
gcatataaatggaccagtacagttcaaacctgtgttgttcgagaatcaactgtgcttaaaacgaaaagaaacacagattgacatttgattttgagttagcacgagtttatgcttgaaatatttttgtaacataatcttagaagttacgtactatcggccgggcacggtggctcatgcctgtaatcccagcactttggragtccgaggcaggtggatcatgaggtcaggagttcgagaccagcctgaccaacatggtgaaaccccatctttactaaaaatacaaaaattagtcgggcgtggtgcccgcgcctgtaatcccagctactcaggaggctgaggcaggagaatcgcttgaacccgggaggtggaggttgcagtgagccgagagcacaccactgcactccagcctggatgactagagcgagactccgtctcaaaaaataaaaataaaaaagaagttacgtactatcacttctgacatatcctatttgtccaacagaccaccacccatcatgagaaaggtcagaagggtatcaaaccaggaaacaggcaccactgaaggctattttggaggtcggagatgtaaatatctcaaagtcctgcaatggagaggggggacatccgagttcaaaccgagacctatctgactccagaaactgttgtctttttaatttattcaaaccaagatggaatgtggattatgatctttttagatctagatctttttcttataattaagctacaagaaaaatagaactaatttttctaagagtcacatatctatacttttaacaggtgagtgggtcttacctttcaagtgattctggatgtccacaaacaacttcagtgtgcaacctgcagcttagctgctggtcgctttcaagtagagaaactcaaatttttcatgcatgtgatttacacctatttgtttttagtaagaaagaatcaaaacggtctggataagaggaacccatcctaaaccttaagacagaaattctcaaattttatgtggatagatttcattatataatatgaaaaaaaaaccccacattcctaaagctattccagcaatctcaacagaaaagtctttaactgttggggagctgtcaagtttatagtggcaaatacaagtttttcaaaattctaattttcacttgaaagcttgaattttattattgacagtagtcaatcagttgttttctctgaagtggtggactcacttttgttattaaaaaaagcaagttggttggatacagtggttaaaatttttgtgaaatcttgtcccttgagtggtgtctaattaatattctaggttaagaaatggaaaatagaaataaagcacttctgcagcatatcaaaagagaataattgtctcaagaaaaagcatttttttttgttttagtgtaaactgaactagttccttttttcatggaacataatattttccagaaggatgactagtttttcagatttggatatttggtaaacctttttttttttttaatttacagacaagatctcactctgtcacccaggttggagtgcagtggcgtgatcttgcttcactgcagcctcctcctcctggtatcaagcaattctcccacct

SEQ ID NO: 87578 - DNA, 1606 bp, Homo sapiens
gcatataaatggaccagtacagttcaaacctgtgttgttcgagaatcaactgtgcttaaaacgaaaagaaacacagattgacatttgattttgagttagcacgagtttatgcttgaaatatttttgtaacataatcttagaagttacgtactatcggccgggcacggtggctcatgcctgtaatcccagcactttgggagtccgaggcaggtggatcatgaggtcaggagttcgagaccagcctgaccaacatggtgaaaccccatctttactaaaaatacaaaaattagtcgggcgtggtgcccgcgcctgtaatcccagctactcaggaggctgaggcaggagaatcgcttgaacccrggaggtggaggttgcagtgagccgagagcacaccactgcactccagcctggatgactagagcgagactccgtctcaaaaaataaaaataaaaaagaagttacgtactatcacttctgacatatcctatttgtccaacagaccaccacccatcatgagaaaggtcagaagggtatcaaaccaggaaacaggcaccactgaaggctattttggaggtcggagatgtaaatatctcaaagtcctgcaatggagaggggggacatccgagttcaaaccgagacctatctgactccagaaactgttgtctttttaatttattcaaaccaagatggaatgtggattatgatctttttagatctagatctttttcttataattaagctacaagaaaaatagaactaatttttctaagagtcacatatctatacttttaacaggtgagtgggtcttacctttcaagtgattctggatgtccacaaacaacttcagtgtgcaacctgcagcttagctgctggtcgctttcaagtagagaaactcaaatttttcatgcatgtgatttacacctatttgtttttagtaagaaagaatcaaaacggtctggataagaggaacccatcctaaaccttaagacagaaattctcaaattttatgtggatagatttcattatataatatgaaaaaaaaaccccacattcctaaagctattccagcaatctcaacagaaaagtctttaactgttggggagctgtcaagtttatagtggcaaatacaagtttttcaaaattctaattttcacttgaaagcttgaattttattattgacagtagtcaatcagttgttttctctgaagtggtggactcacttttgttattaaaaaaagcaagttggttggatacagtggttaaaatttttgtgaaatcttgtcccttgagtggtgtctaattaatattctaggttaagaaatggaaaatagaaataaagcacttctgcagcatatcaaaagagaataattgtctcaagaaaaagcatttttttttgttttagtgtaaactgaactagttccttttttcatggaacataatattttccagaaggatgactagtttttcagatttggatatttggtaaacctttttttttttttaatttacagacaagatctcactctgtcacccaggttggagtgcagtggcgtgatcttgcttcactgcagcctcctcctcctggtatcaagcaattctcccacct

SEQ ID NO: 87579 - DNA, 1998 bp, Homo sapiens
tgcatgtatcaacacaccttttggtctctgcctctcaacgccagtgcactacattcatgccaaagaaaaataggaaactctcttgagcgctttatcccatgataccagcattctttaaaaaaaaaaaaaaaaaaggcttacctagagaataaacgtaatgcagcaactgaggagtcaagttgttgattgcagaggtaaattattttgtgaagattcactaagggtataatatcagcagaggttgttgaaaggggcaataagacggaaatgtgtaaggcaaactgcagctgaggccaacatgacactttcaagaaagattttaaagtgagaatttacctatttgagagtgagacgaaaatactgactggaactgaaaaataatttatgaattgcctttttttttgagacagagtctcactctgttatccaggctggagtgcagtggcgcaatctcagctccacctcctgggttcaagcgattctcctgcctcagcctcctaagtagctgggactacagacgtgcaccaccacacccggctaatttttgtgtttttagtagagacggggtttcaccatgttggccaggctggtcttaaactcctgacctcaagtgatccacccgccttggcctcccaaagtgctgagattacaagcgtgagccactgtgcccggcctgagttgcattttttaaaagattcacattttagccaagtacaaggcaagctagttgttactatgccatagccatataccagaaaattttatagaggcaatcacgacattccatgcaaggttaagaaatgccagaaaagactttatttcatgggcaatcaagatggtaacaattcttatgggaaaaatgtctaagcctagaataaaatatctgaaataaattgagtcaaatgaccagctttataaagactgaaagtgaaatcaacttaattcagagtgttcaacacctcaaaaatagaagtaagtttaatacaatttaagaaacttttggccaggaacagtgggtcatacctgtaatctcagcattatgggaggctgaggcaagagggattgcttggtgccaggaattcaagaaccagcccaggcaacaaagcaagaccctatctctacaaaaaataaaaaatacagccagttgtaagggtgtgcacctgtagtcctagcttctcaggaggctaaagtaggaggatcacttaagcccaggagttcaaggctgcagtgatctatgatgatgccactgcactccagcctgggcaacaggacaagactctgtctcagaaaagaaacattttaataatattgtatgaccttgccaaatgcactgtggtcaaatggggaccaatgaagtaatagtatctcaacatacgtgaggttttctttaatttatatagattgaaacctttttccccaaataggactacaaaattggttttaggatcaggtgagtgtcacatttggtattaagatgaaaatatgtatatgtacaatgcttctagatacagtttagtgagctaatttactgtggtccaagcacttttctagatgctagatatttacagattttactaaagtgaaccgaggcaccttcgagttatactttcttactttagagaagtgtctcaggccctacatggaaaaacctacggagtgatcccaccatcttgatcacagctggattgaaggaggtgtctgatccaagagttgccaatgtgggctcaccagcagtctgtaagagggccctggaatgagtgccgtgaccagccagtaagaaggaaagcaacaactaacaacyttagcacattctctttggggaatttctatgaaaaggcaaaaaaaaaggacgcaccaaagaagtgagtattcagaagccgtgactaacagaagcaatgaggatgcagaaatcatgagcaagaaggggcccatgaggtcaagaaagcaattcatcaaaggcaggaatcctgttaaaaacttaagacacttcttagggaa

SEQ ID NO: 87580 - DNA, 776 bp, Homo sapiens
catactaagcatattttttatttgtttgtttttcaggttagggacagtatttttcttattataatctgactcttcaattattatagtaattatcaatctctcagttattattttataaaactttattgaataaatgaattagtaaatttaacacattgataaattggtatcattcattattcactaaaatttatagatattaaaaaagaaaaatctcagatataatcattaaatcggtaggatcatatgtgtaatggtggcacggagtatatgaatgtatctttttatgatgtgttttccaaagtaggcctgaaacaaaraataagttgcttatctattacttttaatttctaatataaagtatacacacacttaaatttcaatagagaatttcagattacatgtattattctaccaatttacctttccaatttcttcctgttttgtccataactaaagatatgggtgatgtttacaactgagaattctatatgaatctcactttttctaactaaagccataaaagatacattcatataaaatgttacataataatcgagacagtttgattgcatattcttttcaaattccatatgcacgcacactttctattactgctaatgagagctttgcatgtgttttgatggtgactagcatttggtaattttaggaaaatgcacatattgttaagttctctttttctcttcttttttggtcctctgttggttgttgagggaacaaattcatggaatattacaatctgcagccttccaaaa

SEQ ID NO: 87581 - DNA, 776 bp, Homo sapiens
catactaagcatattttttatttgtttgtttttcaggttagggacagtatttttcttattataatctgactcttcaattattatagtaattatcaatctctcagttattattttataaaactttattgaataaatgaattagtaaatttaacacattgataaattggtatcattcattattcactaaaatttatagatattaaaaaagaaaaatctcagatataatcattaaatcggtaggatcatatgtgtaatggtggcacggagtatatgaatgtatctttttatgatgtgttttccaaagtaggcctgaaacaaagaataagttgcttatctattacttttaatttctaatataaagtatacacacacttaaatttcaatagagaayttcagattacatgtattattctaccaatttacctttccaatttcttcctgttttgtccataactaaagatatgggtgatgtttacaactgagaattctatatgaatctcactttttctaactaaagccataaaagatacattcatataaaatgttacataataatcgagacagtttgattgcatattcttttcaaattccatatgcacgcacactttctattactgctaatgagagctttgcatgtgttttgatggtgactagcatttggtaattttaggaaaatgcacatattgttaagttctctttttctcttcttttttggtcctctgttggttgttgagggaacaaattcatggaatattacaatctgcagccttccaaaa

SEQ ID NO: 87582 - DNA, 1152 bp, Homo sapiens
cattaaaactgacttacaaggcaggcctcgatgtagtttgtcaactcaaatgttaaacaatgaattagaggccttacgcaatacaataaaaagacaaaacagaaaagcctaaaaacaaaygaataattaaatggttttgcaaataaaataattttgtgtagaaaaaaacccaagataatgtacagaaataaaaacaatctgaaagcagacattgagctactgacattgttagctaccaaaggagttaagtaaggttgttgcgggcgtagcgtcaacaaaactcaatattctgtaaccaacaatgattaatatggcaacattaattaatgctaagattctgaggaataaatcaaataaatgaggttaaagaacactctagagaaaagtacaatatatttaaggatataaatgtcacttaactaaatggagaggtacattatgttccttgatagaaaaactatatatatatataaaagttaaattctttccactaaggtatttttcaatcataattttgaatgctttaaaaaactataattttatgagccagtttgagtatttttgtggatgaacaaactctagttaaaaagttttaaagaaagctaaagaagaaaaatttaacctaccaagtatcaagatggtaaaaatataagagcatgattttgatgaagaaacaaacaagtagaacaataaaactattgagctcagaaactagtatcaacataagaatttgaaatatgatagagaaaaattttgcaatatgcaggaaaattatgaactataaaaaattacaacaaaatatattaaaaacatacaaagaagtactaaagagtggagttcctcagtgttgcgttttatattagaaggattttgagaatgaatgtactaccttggatgttgttgagttggcaaattacattatttcttcagaagtttagagtatcacagaggatgaaatttccagcatgattaaacattgaaaaaaaatttgcacattgctcttttccgagagaatctaaatactgaagggatttcctaccttctgcaaatcatgtgcaagcatttctttgaaaatcagaaattttatgttgtgtctttttcctttaatatgactccattccatttatcttacagaattttatcataatatgc

SEQ ID NO: 87583 - DNA, 1152 bp, Homo sapiens
cattaaaactgacttacaaggcaggcctcgatgtagtttgtcaactcaaatgttaaacaatgaattagaggccttacgcaatacaataaaaagacaaaacagaaaagcctaaaaacaaatgaataattaaatggttttgcaaataaaataattttgtgtagaaaaaaacccaagataatgtacagaaataaaaacaatctgaaagcagacattgagctactgacattgttagctaccaaaggagttaagtaaggttgttgcgggcgtagcgtcaacaaaactcaatattctgtaaccaacaatgattaatatggcaacattaattaatgctaagattctgaggaataaatcaaataaatgaggttaaagaacactctagagaaaagtacaatatatttaaggatataaatgtcacttaactaaatggagaggtacattatgttccttgatagaaaaactatatatatatataaaagttaaattctttccactaaggtatttttcaatcataattttgaatgctttaaaaaactataattttatgagccagtttgagtatttttgtggatgaacaaactctagttaaaaagttttaaagaaagctaaagaagaaaaatttaacctaccaagtatcaagatggtaaaaatataagagcatgattttgatgaagaaacaaacaagtagaacaataaaactattgagctcagaaactagtatcaacataagaatttgaaatatgatagagaaaaattttgcaatatgcaggaaaattatgaactataaaaaattacaacaaaatatattaaaaacatacaaagaagtactaaagagtggagttcctcagtgttgcgttttatattagaaggattttgagaatgaatgtactaccttggatgttgttgagttggcaaattacattatttcttcagaagtttagagtatcacagaggatgaaatttccagcatgattaaacattgaaaaaaaatttgcacattgctcttttccgagrgaatctaaatactgaagggatttcctaccttctgcaaatcatgtgcaagcatttctttgaaaatcagaaattttatgttgtgtctttttcctttaatatgactccattccatttatcttacagaattttatcataatatgc

SEQ ID NO: 87584 - DNA, 2873 bp, Homo sapiens
tcttcattgaccagccttccttttgttggaatttagtgatttacacagggtcagcactagtaaattttctctgcatgtagatatgataaactccacaagtaacatagtcaatgagcagatgtgaggttagctgcacaacttttgtaaaactaaaaggacattgctcattcatatttccatacaatccatcttaaatgaaattgaaagatgaaccaggctgtggagggattaaggccttagtcacaattttgtgaattctaaagaaaaaatcatcaagaatttacttctgcataactattcatgtgctactcttcgcaaacacttcattaaaaaatccaatactttcaagaaaggttgaacaaatcaaaccatttttacctatgacctccttcccttaaaaatcaccaaaacaaaaatacatcactgtgaatatttgtgtccttttcaaaattcatgttgcaacttaatccccaatgcaatggtattaaaagtgaggcctttagaaggtgattagcccatgaaggctctgcactcaggacaagagtagtgctcccataaaagggtgcgatggagcaagtttggcactttttgcactccagccttgtgaggacacaacattctctctttctgccaggtgatgatgcaggaacaaggcaccatctgtgaagcagggagctctcattggacaccagatccgctggcaccttgatcttgaacttctcagcctccagaattataagcaatagatttctattacttataatttacccaatctaaggaattttgttacagcggtatgaatcaactaagacactaatatatatatatatcttcaattaaataaggaaagagccaaaaaaagcacactgtaaataatgtacttgatagtgtaaactttggcctaaaataagggaggatgttaggagtcatcatagatctccctaaatatctaacaatatgaatatctctcccaaacttagttatatgatatgaatgagccaaatcagaatgtcatttatgaataaaagggaaacaaaagaatttaagcatgtcaacatagatctagatgtgcactacagaatatcagagacttgaacaatgacagatgcacattcagctattgagacaccctactttttccccctgaaactcagatattgttgttttattttgttttgtttcccacagaatcatcctgaaggtaaaaaaagaagcaggagagaacaaaatttagagttaattaggctatcactgaccagagtcagttagataaacacaaataagccttttctgaaaagaaagaattggcattccagcctgaattttaggtatgcaaacctttggagcaaaatatgctgtatgttaacatagagaatttccaaaaagcaaaggggaataagtccaacaatgggcatagattagagcaaattcatattaaatttcttttgaaatactgaagttcatttttgttccagttcattgtctcgaattcttaccaaatgattttggagagaattgaattgatagaattgattattagaaaaatgagttgaaaacaaactatttagaacctacctctgttttttatgcataaaaaacagtatcagaatataatgaatataaggctaatgaagaatgcatgtgtaagacttgcttcagcaaagctaaggaatgttaagacaaaatttctcctaccaagtctgaggagcaagagattaaaggatctgaggagcaagagattaaaggatctgaggtgcaagagattaaaggagagaatcccttctaggtcttttggctaagatcaagtgtagaatctgcttttwtcagtttaatatctggtacttcctctatcccaggacaatatattaagtggatttttggagcagggagatggttgaaaataatatacatatgcttaatgttgaccgtttgatcctgctaatcagatgttctgcataaaactggtaattgggtaacaattttccataaattgaaatgagaaatgttagaaacacacaaccagttaacagtaagtggcacaacaaaaacagcaaaagcccacatctaagcagcaagctgccatgctggggtgtaacaagctttgcctatgagctccttttcacttaccaactaacacagctgttgccaggtgcttgtttgcaataacgtctctccacttactgctgtccttccttctggacagtttgctttagcatttgctctgcctttatgtaactcagtttataatactgggcaaaaacaaggactctgtcagaaagtcaaagtggaagcagttttaggactagtgcagtaaacagtagagaatggctcctaataagtgggcacagcaaagcctctcctagtgaaagtcactgtccaaaaacattttctatttgcctgcacttggtgcacacatgtttttcagtatctaggtgagatcgtgatgttccgtgaatcatattcagaatatcaatgtaagttttctgacatttttgcttttagtttggtaaaacaacataaaatttagaatcctaaccattttcaagtgtacaattcagtgacaccaaacacactcacaatgctgcacaatcaccaccaccatccatctccagaacactttcacatcccaaacaaaagcccccaccaaggaatgataactcccctttcccctttcccttggcccctgcaacctccattctgcttctgtctctaggaattcacccaatctaggtgctgatagaaggcaaaccatacaaaacagacgcttttgtgcataacttattttacccagcacaatgttctcaaaattcatcagtattgtagcatgtatcagaacatcactacttttaaaaggaaaaagtattcattgcatg

SEQ ID NO: 87585 - DNA, 2873 bp, Homo sapiens
tcttcattgaccagccttccttttgttggaatttagtgatttacacagggtcagcactagtaaattttctctgcatgtagatatgataaactccacaagtaacatagtcaatgagcagatgtgaggttagctgcacaacttttgtaaaactaaaaggacattgctcattcatatttccatacaatccatcttaaatgaaattgaaagatgaaccaggctgtggagggattaaggccttagtcacaattttgtgaattctaaagaaaaaatcatcaagaatttacttctgcataactattcatgtgctactcttcgcaaacacttcattaaaaaatccaatactttcaagaaaggttgaacaaatcaaaccatttttacctatgacctccttcccttaaaaatcaccaaaacaaaaatacatcactgtgaatatttgtgtccttttcaaaattcatgttgcaacttaatccccaatgcaatggtattaaaagtgaggcctttagaaggtgattagcccatgaaggctctgcactcaggacaagagtagtgctcccataaaagggtgcgatggagcaagtttggcactttttgcactccagccttgtgaggacacaacattctctctttctgccaggtgatgatgcaggaacaaggcaccatctgtgaagcagggagctctcattggacaccagatccgctggcaccttgatcttgaacttctcagcctccagaattataagcaatagatttctattacttataatttacccaatctaaggaattttgttacagcggtatgaatcaactaagacactaatatatatatatatcttcaattaaataaggaaagagccaaaaaaagcacactgtaaataatgtacttgatagtgtaaactttggcctaaaataagggaggatgttaggagtcatcatagatctccctaaatatctaacaatatgaatatctctcccaaacttagttatatgatatgaatgagccaaatcagaatgtcatttatgaataaaagggaaacaaaagaatttaagcatgtcaacatagatctagatgtgcactacagaatatcagagacttgaacaatgacagatgcacattcagctattgagacaccctactttttccccctgaaactcagatattgttgttttattttgttttgtttcccacagaatcatcctgaaggtaaaaaaagaagcaggagagaacaaaatttagagttaattaggctatcactgaccagagtcagttagataaacacaaataagccttttctgaaaagaaagaattggcattccagcctgaattttaggtatgcaaacctttggagcaaaatatgctgtatgttaacatagagaatttccaaaaagcaaaggggaataagtccaacaatgggcatagattagagcaaattcatattaaatttcttttgaaatactgaagttcatttttgttccagttcattgtctcgaattcttaccaaatgattttggagagaattgaattgatagaattgattattagaaaaatgagttgaaaacaaactatttagaacctacctctgttttttatgcataaaaaacagtatcagaatataatgaatataaggctaatgaagaatgcatgtgtaagacttgcttcagcaaagctaaggaatgttaagacaaaatttctcctaccaagtctgaggagcaagagattaaaggatctgaggagcaagagattaaaggatctgaggtgcaagagattaaaggagagaatcccttctaggtcttttggctaagatcaagtgtagaatctgcttttatcagtttaatatctggtacttcctctatcccaggacaatatattaagtggatttttggagcagggagatggttgaaaataatatacatatgcttaatgttgaccgtttgatcctgctaatcagatgttctgcataaaactggtaattgggtaacaattttccataaattgaaatgagaaatgttagaaacacacaaccagttaacagtaagtggcacaacaaaaacagcaaaagcccacatctaagcagcaagctgccatgctggggtgtaacaagctttgcctatgagctccttttcacttaccaactaacacagctgttgccaggtgcttgtttgcaataacgtctctccacttactgctgtccttccttctggacagtttgctttagcatttgctctgcctttatgtaactcagtttataatactgggcaaaaacaaggactctgtcagaaagtcawagtggaagcagttttaggactagtgcagtaaacagtagagaatggctcctaataagtgggcacagcaaagcctctcctagtgaaagtcactgtccaaaaacattttctatttgcctgcacttggtgcacacatgtttttcagtatctaggtgagatcgtgatgttccgtgaatcatattcagaatatcaatgtaagttttctgacatttttgcttttagtttggtaaaacaacataaaatttagaatcctaaccattttcaagtgtacaattcagtgacaccaaacacactcacaatgctgcacaatcaccaccaccatccatctccagaacactttcacatcccaaacaaaagcccccaccaaggaatgataactcccctttcccctttcccttggcccctgcaacctccattctgcttctgtctctaggaattcacccaatctaggtgctgatagaaggcaaaccatacaaaacagacgcttttgtgcataacttattttacccagcacaatgttctcaaaattcatcagtattgtagcatgtatcagaacatcactacttttaaaaggaaaaagtattcattgcatg

SEQ ID NO: 87586 - DNA, 684 bp, Homo sapiens
tggcagccaggatcacagaccaggtggagtagggaaaatagtcagactatggatattgttttgatgagagaagcaactgcatatcctacatttggatctggagaagaagacaaactgacgagtcaagrttgaggttgaggttgcaggcatgaacaagtaagaatgaaatttctatgcctgaaattgggaaaagctgctgctggagcaagtaagggggtagaagagggagtgttggggtaaaatcagggttttttgtttgctcctgtgaggtttgggtgtcaagtagtgggagtttcaagcaagttaaatatttgagggcagtacctcagggagatgtctgagattgagatatggattctgctgtcagtaagtatttctccaacagaagtttggtattggggagaaaaggaaaaacctggatcagggaagcagggggggagccacagttcaacttcatctcattgcaaaacaaaaaagacacaatgggaggtgtacatgggaagtaaagtagattaagacattcttcttgatttcacagtcctttttttaaactacatttaccttcaaataatattttaagtgttcaataaccttgtaataatttttgctaagtgcagcatttccaactgtcatgtttaccagtgaataacctaagtatataagtgggactgagtttgaatattt

SEQ ID NO: 87587 - DNA, 684 bp, Homo sapiens
tggcagccaggatcacagaccaggtggagtagggaaaatagtcagactatggatattgttttgatgagagaagcaactgcatatcctacatttggatctggagaagaagacaaactgacgagtcaagattgaggttgaggttgcaggcatgaacaagtaagaatgaaatttctatgcctgaaatygggaaaagctgctgctggagcaagtaagggggtagaagagggagtgttggggtaaaatcagggttttttgtttgctcctgtgaggtttgggtgtcaagtagtgggagtttcaagcaagttaaatatttgagggcagtacctcagggagatgtctgagattgagatatggattctgctgtcagtaagtatttctccaacagaagtttggtattggggagaaaaggaaaaacctggatcagggaagcagggggggagccacagttcaacttcatctcattgcaaaacaaaaaagacacaatgggaggtgtacatgggaagtaaagtagattaagacattcttcttgatttcacagtcctttttttaaactacatttaccttcaaataatattttaagtgttcaataaccttgtaataatttttgctaagtgcagcatttccaactgtcatgtttaccagtgaataacctaagtatataagtgggactgagtttgaatattt

SEQ ID NO: 87588 - DNA, 1313 bp, Homo sapiens
aatgccctactatgttatgcaaaatgctttaagtgttgtgatgacaaaaacgttctgagttgcacataatgacaatagaatttaaactaacatatgcaaagtcaakggagtttattggaaagacctctgaagggttgcaccgaagccagaataaaggattcagactagctcaggaatacagctgggactggggtatcttccgacccagaagcaccaaatagtgcattaatcctttcccagggaaccagaaaaaaatttctcttctcacagtaatttatttctttttttttttctctatctgcttcattcttctttctaactgcagacattcttctgctcataagtttataggatagaccctgaccaccgataatcacttagttttacactctatggtataaatactcagaaagacataactccctatttctctctgctcccatccaaatttctatttagactcttaaatgagtcactgaattaagtaacccctaagtaggcttgaagatagtgaactgccaataataaatataatttaagagatttcatgaaaaatatatgacaaaatttccatgacatccttacggatgtgatgataaaataagaaataagatattatattaaaaccacagggtttacatcattgaaaagtacaatagtttgcacattcctaactggaatagcaaagacttatgaaaaatgaaaacagtagaaaaacaagaaaaatattattaaatatatgtgggcggtatagcggagcatatcggatactctgggatgcagacacagagatgaagttaggaggtgcaagaagtttttgagaagataacacctgagaaagacaaaaggaggaggaagcaggactggggaggacaaagctcagatcacaatgtagatttgaccaaatctcagccaaactaaagggaagctctgcagcaaagattgcctgttagaggaagccagcactggatagaaatgaccagggcctagcacccctgccatgcttagttactgactgcgggctgccagagatgagtgtagccttggcttgaaagctgagacaagccctgaaagcatttgcagcaacaaatggtctgctgactgcactccctgcagctgactagcaaattccttctccaggagagatttaagtgatacaagtccactttaacagtatataaaagtagaatgacaggaaagtggataaaagccggcatttctaccaacagaaaaagcattttcattttcttgcacctttaccaacatggaatattatgatatgtgggtgtggtatcattctttagatgttcaag

SEQ ID NO: 87589 - DNA, 653 bp, Homo sapiens
tctactaaaaatacaaaaaaattagctgggcatggtggcatgcgcctgtagtcccagctacttgagaggctgaggcaggagaatcgctggaacccaggaggcagaggttgcagtgagccgaggtcatgccactgctctccagcctgggcaacagagtgagactgtctcaaaaataaataaataaatgtcacaatttctagataaatatcctgatttatttcctagaatatatattccacatcatttatgaatattatttagcaacacttgaaaaataaagtcaactygtccttttctttcagtgaattatgcaagattttggcttatacacatggcaaactcttgtttaaagtcaatttattaattaaagcacctattctgctgaatgaattgctctgttgatattattgacagtttatattctgcctacttaattactgtgttccaaaataataaatttcttttggcataccaaggccaaggtaaaattatgaaacagatagattcttccatgctcctcttcttccttccttgttagaatttggctcaaggagaacagaaatacaaagggaacacagactgcaaggagagctgtctactcaacaatggatctgatccctaaatggtagtaaccagaacccaggtagaccaat

SEQ ID NO: 87590 - DNA, 653 bp, Homo sapiens
tctactaaaaatacaaaaaaattagctgggcatggtggcatgcgcctgtagtcccagctacttgagaggctgaggcaggagaatcgctggaacccaggaggcagaggttgcagtgagccgaggtcatgccactgctctccagcctgggcaacagagtgagactgtctcaaaaataaataaataaatgtcacaatttctagataaatatcctgatttatttcctagaatatatattccacatcatttatgaatattatttagcaacacttgaaaaataaagtcaacttgtccttttctttcagtgaattatgcaagattttggcttatacacatggcaaactcttgtttaaagtcaatttattaattaaagcacctattctgctgaatgaattgctctgttgatattattgacagtttatattctgcctacttaattactgtgttccaaaataataaatttcttttggcataccaaggccaaggtaaaattatgaaacagatagattcttccatgctcctcttcttccttccttgttagaatttggctcaaggagaacagaaatacaaagggaacacagactgcaaggagagctgyctactcaacaatggatctgatccctaaatggtagtaaccagaacccaggtagaccaat

SEQ ID NO: 87591 - DNA, 747 bp, Homo sapiens
cttgggattgagggaacacaattcaaccccaaataggtattcatagttgaaagctgacttgatttctggcaaattacatcttcatgrggaaagagaccttgactagaatcagttgaaaattttgtcgagaaataggagacagaggtcacctatgcctcttgccaggggttgacgtcatagtgagagggttgtcaattttagagacgttagatgaatttagtctggatgcgaaattgttagttcctagcacgttatgaggatggctcccagaaagacatgcaatttcccttttctgataaagtcagggtagaaaaatgaatgagaaataaattgcagtagtgtttgctgcttggggtataaactggcacaccactttggaaaactgtttgatatttgctcctaaagtcttacatatggctcccccaggacaccgcaatcccctcctagatgtacacccaggagaagtgagtgcatttgtcctccaaaagatgtgtgcaagactgcttacaattgtcaagaacccacatttctatcagaaaccaataaatgtatggtggcatattcatacggcagaatagtccccagcaacaaaaataaaagaacaaaccactggctcaacaacaatgtgggtggacctcacagacataacatcgagcaggagaggccagacacaaaggagtagggactgtgtgactccttccccacacacttcaagagtaggcagcactgatccaaggtgacagaccc

SEQ ID NO: 87592 - DNA, 747 bp, Homo sapiens
cttgggattgagggaacacaattcaaccccaaataggtattcatagttgaaagctgacttgatttctggcaaattacatcttcatggggaaagagaccttgactagaatcagttgaaaattttgtcgagaaataggagacagaggtcacctatgcctcttgccaggggttgacgtcatagtgagagggttgtcaattttagagaygttagatgaatttagtctggatgcgaaattgttagttcctagcacgttatgaggatggctcccagaaagacatgcaatttcccttttctgataaagtcagggtagaaaaatgaatgagaaataaattgcagtagtgtttgctgcttggggtataaactggcacaccactttggaaaactgtttgatatttgctcctaaagtcttacatatggctcccccaggacaccgcaatcccctcctagatgtacacccaggagaagtgagtgcatttgtcctccaaaagatgtgtgcaagactgcttacaattgtcaagaacccacatttctatcagaaaccaataaatgtatggtggcatattcatacggcagaatagtccccagcaacaaaaataaaagaacaaaccactggctcaacaacaatgtgggtggacctcacagacataacatcgagcaggagaggccagacacaaaggagtagggactgtgtgactccttccccacacacttcaagagtaggcagcactgatccaaggtgacagaccc

SEQ ID NO: 87593 - DNA, 747 bp, Homo sapiens
cttgggattgagggaacacaattcaaccccaaataggtattcatagttgaaagctgacttgatttctggcaaattacatcttcatggggaaagagaccttgactagaatcagttgaaaattttgtcgagaaataggagacagaggtcacctatgcctcttgccaggggttgacgtcatagtgagagggttgtcaattttagagacgttagatgaatttagtctggatgcgaaattgttagttcctagcaygttatgaggatggctcccagaaagacatgcaatttcccttttctgataaagtcagggtagaaaaatgaatgagaaataaattgcagtagtgtttgctgcttggggtataaactggcacaccactttggaaaactgtttgatatttgctcctaaagtcttacatatggctcccccaggacaccgcaatcccctcctagatgtacacccaggagaagtgagtgcatttgtcctccaaaagatgtgtgcaagactgcttacaattgtcaagaacccacatttctatcagaaaccaataaatgtatggtggcatattcatacggcagaatagtccccagcaacaaaaataaaagaacaaaccactggctcaacaacaatgtgggtggacctcacagacataacatcgagcaggagaggccagacacaaaggagtagggactgtgtgactccttccccacacacttcaagagtaggcagcactgatccaaggtgacagaccc

SEQ ID NO: 87594 - DNA, 747 bp, Homo sapiens
cttgggattgagggaacacaattcaaccccaaataggtattcatagttgaaagctgacttgatttctggcaaattacatcttcatggggaaagagaccttgactagaatcagttgaaaattttgtcgagaaataggagacagaggtcacctatgcctcttgccaggggttgacgtcatagtgagagggttgtcaattttagagacgttagatgaatttagtctggatgcgaaattgttagttcctagcacgttatgaggatggctcccagaaagacatgcaatttcccttttctgataaagtcagggtagaaaaatgaatgagaaataaattgcagtagtgtttgctgcttggggtataaactggcayaccactttggaaaactgtttgatatttgctcctaaagtcttacatatggctcccccaggacaccgcaatcccctcctagatgtacacccaggagaagtgagtgcatttgtcctccaaaagatgtgtgcaagactgcttacaattgtcaagaacccacatttctatcagaaaccaataaatgtatggtggcatattcatacggcagaatagtccccagcaacaaaaataaaagaacaaaccactggctcaacaacaatgtgggtggacctcacagacataacatcgagcaggagaggccagacacaaaggagtagggactgtgtgactccttccccacacacttcaagagtaggcagcactgatccaaggtgacagaccc

SEQ ID NO: 87595 - DNA, 747 bp, Homo sapiens
cttgggattgagggaacacaattcaaccccaaataggtattcatagttgaaagctgacttgatttctggcaaattacatcttcatggggaaagagaccttgactagaatcagttgaaaattttgtcgagaaataggagacagaggtcacctatgcctcttgccaggggttgacgtcatagtgagagggttgtcaattttagagacgttagatgaatttagtctggatgcgaaattgttagttcctagcacgttatgaggatggctcccagaaagacatgcaatttcccttttctgataaagtcagggtagaaaaatgaatgagaaataaattgcagtagtgtttgctgcttggggtataaactggcacaccactttggaaaactgtttgatatttgctcctaaagtcttacatatggctcccccaggacaccgcaatcccctcctagatgtacacccaggagaagtgagtgcatttgtcctccaaaagatgtgtgcaagactgcttwcaattgtcaagaacccacatttctatcagaaaccaataaatgtatggtggcatattcatacggcagaatagtccccagcaacaaaaataaaagaacaaaccactggctcaacaacaatgtgggtggacctcacagacataacatcgagcaggagaggccagacacaaaggagtagggactgtgtgactccttccccacacacttcaagagtaggcagcactgatccaaggtgacagaccc

SEQ ID NO: 87596 - DNA, 619 bp, Homo sapiens
acaacagagagccaatcactaatcaatgtcatctctgtaagcctatgagaattcctgccaaacaactctgtgtcagcccactccttgttcccatttgcctttaaaaacctgcttgcagctgaggctgacagagctcatgttcaaggcatcttgagtctgagtcttccaggcagctgtcctcactttgrctcaagtaaactctttgaattattttttgtgcctcagcctcttccttttaggtcaacatatccatcatgaaattaagggaattagaacaatttctcatgtcattggaacttgcagaagaagaaatagattgagactaggcttccattgcttcagatggcatatgcccaggaccagctgtgctttaggtattttggaggcagggctggagtgagaagatgtggaaaacataacatgaagcctggtttggttgctgtctgtgatctatttctttcctttctcctctttctgctcctggggacacaagaggtttgatgccagaagcttttctactgaattatctgcccttatctgatcactaacagaattgggcttttcctttctttagcaaggtttctcagcttcagcactatgacctttagggccagatggc

SEQ ID NO: 87597 - DNA, 619 bp, Homo sapiens
acaacagagagccaatcactaatcaatgtcatctctgtaagcctatgagaattcctgccaaacaactctgtgtcagcccactccttgttcccatttgcctttaaaaacctgcttgcagctgaggctgacagagctcatgttcaaggcatcttgagtctgagtcttccaggcagctgtcctcactttggctcaagtaaactctttgaattattttttgtgcctcagcctcttccttttaggtcaacatatccatcatgaaattaagggaattagaacaatttctcatgtcattggaacttgcagaagaagaaatagattgagactaggcttccattgcttcagatggcatatgcccaggaccagctgtgctttaggtattttggaggcagggctggagtgagaagatgtggaaaacataacatgaagcctggtttggttgctgtctgtgatctatttctttcctttctcctctttctgctcctggggacacaagaggtttgatkccagaagcttttctactgaattatctgcccttatctgatcactaacagaattgggcttttcctttctttagcaaggtttctcagcttcagcactatgacctttagggccagatggc

SEQ ID NO: 87598 - DNA, 619 bp, Homo sapiens
acaacagagagccaatcactaatcaatgtcatctctgtaagcctatgagaattcctgccaaacaactctgtgtcagcccactccttgttcccatttgcctttaaaaacctgcttgcagctgaggctgacagagctcatgttcaaggcatcttgagtctgagtcttccaggcagctgtcctcactttggctcaagtaaactctttgaattattttttgtgcctcagcctcttccttttaggtcaacatatccatcatgaaattaagggaattagaacaatttctcatgtcattggaacttgcagaagaagaaatagattgagactaggcttccattgcttcagatggcatatgcccaggaccagctgtgctttaggtattttggaggcagggctggagtgagaagatgtggaaaacataacatgaagcctggtttggttgctgtctgtgatctatttctttcctttctcctctttctgctcctggggacacaagaggtttgatgccagaagcttttctactgaattatytgcccttatctgatcactaacagaattgggcttttcctttctttagcaaggtttctcagcttcagcactatgacctttagggccagatggc

SEQ ID NO: 87599 - DNA, 781 bp, Homo sapiens
aaaaagaatcagaaatacaaagagttttattttactcacctctatcctgctctgcttggttgcctgagctaagcatttaatgaacttagaatgagaattgtgcagtcgtacttcagaagtattcttttctgaatgaggctgtccacatttctgagtagctacatgcagctagttacatgggagcattttctactacaaaagtcataatacaacaagctagtgacctccagctgggctttagctgaaaagacgagctgtgtggctgggtaacgtttctcaatctcaattgatgttaagaatcaccatctaagagcatttttataaagcaaagaatccaaggcccaacatctagagatgctgatgtggtagatctaaggtggggcaagtgcccaygtgagtctcatatttgagaaaggtggaaagcactggtcagtgaagatgagactgggtaatcctataagaagctgacaatattaataataatacacacaaaagttacaaatgttaggtgaaaatattcatacagtaaaattactatcattgagaattccttcatcccaaaataccataatgtaaatgaaaacacctgccaaaacaaaagaagacaggcacaatgtactaataggagaatgtagagcaggagtctcttactggaggggtagaaattagcatgacttcagaaaatgatgggcattaccaaggctgaacatggacataatttgacactgcagttttacttaggtatgagaccaaatgaaatgcttgcacagctataccagaa

SEQ ID NO: 87600 - DNA, 946 bp, Homo sapiens
acaatatcctctggcccaagacgtcctttttgagacagacctcatcagggacatgtgtccttggccctgccttccctagacaatggggtcacctcaaccggatatcattaccaatgaaaaaaccttaaaatcagtgctcacccaggtctaacacagggsagagtggtcatttggcatcccttgaaacagggattcttttgtcttggtccagtgcttttctagaggagaaggctgggtgctgcctgagagagaagggagaaaggtggtccctgtcagcggttcttatctttctctaagacaggagactctgggaatcagccctgcctccctacagacagaatagtgaccaggtgtcactcaagcatgttcacactgatggtttagcaaagtatttttttcaacgacatcagaacgtcctgaaagacttgtgatgattgcgctacacaaacatcttgccagctttccgtgattatggactattgcccacaaaatggtttagaggcccaggggatgggaccacaaattgcttaatccaatactgatgagaaaatgatgttctgctcagagacgaggctgaaaacagaccctctgctttctctatgccctggtgagtctcaggttacaccagtaaataacccctcttctttattaaagaaccacgcagaagtgctcaggaaattactgtttaatcatgtaatatccagattgctcaaacaataatctagagagagaatttttatggcgcatttaatattttgttatttcaagaacatgctgccttgtgtatagcagaatgtctgcaaacatttgtggactcattgattacagaattaagctatttacatttttaaaagaaacatcaagaattaggcttaccactgctttaaaagatatacatcaatgtttttctgactgtgaaaaatttaaagttctagaaattatcctg

SEQ ID NO: 87601 - DNA, 946 bp, Homo sapiens
acaatatcctctggcccaagacgtcctttttgagacagacctcatcagggacatgtgtccttggccctgccttccctagacaatggggtcacctcaaccggatatcattaccaatgaaaaaaccttaaaatcagtgctcacccaggtctaacacagggcagagtggtcatttggcatcccttgaaacagggattcttttgtcttggtccagtgcttttctagaggagaaggctgggtgctgcctgagagagaagggagaaaggtggtccctgtcagyggttcttatctttctctaagacaggagactctgggaatcagccctgcctccctacagacagaatagtgaccaggtgtcactcaagcatgttcacactgatggtttagcaaagtatttttttcaacgacatcagaacgtcctgaaagacttgtgatgattgcgctacacaaacatcttgccagctttccgtgattatggactattgcccacaaaatggtttagaggcccaggggatgggaccacaaattgcttaatccaatactgatgagaaaatgatgttctgctcagagacgaggctgaaaacagaccctctgctttctctatgccctggtgagtctcaggttacaccagtaaataacccctcttctttattaaagaaccacgcagaagtgctcaggaaattactgtttaatcatgtaatatccagattgctcaaacaataatctagagagagaatttttatggcgcatttaatattttgttatttcaagaacatgctgccttgtgtatagcagaatgtctgcaaacatttgtggactcattgattacagaattaagctatttacatttttaaaagaaacatcaagaattaggcttaccactgctttaaaagatatacatcaatgtttttctgactgtgaaaaatttaaagttctagaaattatcctg

SEQ ID NO: 87602 - DNA, 946 bp, Homo sapiens
acaatatcctctggcccaagacgtcctttttgagacagacctcatcagggacatgtgtccttggccctgccttccctagacaatggggtcacctcaaccggatatcattaccaatgaaaaaaccttaaaatcagtgctcacccaggtctaacacagggcagagtggtcatttggcatcccttgaaacagggattcttttgtcttggtccagtgcttttctagaggagaaggctgggtgctgcctgagagagaagggagaaaggtggtccctgtcagcggttcttatctttctctaagacaggagactctgggaatcagccctgcctccctacagacagaatagtgaccaggtgtcactcaagcatgttcacactgatggtttagcaaagtatttttttcaacgacatcagaacgtcctgaaagacttgtgatgattgcgctacacaaacatcttgccagctttccgtgattatggactattgcccacaaaatggtttagwggcccaggggatgggaccacaaattgcttaatccaatactgatgagaaaatgatgttctgctcagagacgaggctgaaaacagaccctctgctttctctatgccctggtgagtctcaggttacaccagtaaataacccctcttctttattaaagaaccacgcagaagtgctcaggaaattactgtttaatcatgtaatatccagattgctcaaacaataatctagagagagaatttttatggcgcatttaatattttgttatttcaagaacatgctgccttgtgtatagcagaatgtctgcaaacatttgtggactcattgattacagaattaagctatttacatttttaaaagaaacatcaagaattaggcttaccactgctttaaaagatatacatcaatgtttttctgactgtgaaaaatttaaagttctagaaattatcctg

SEQ ID NO: 87603 - DNA, 946 bp, Homo sapiens
acaatatcctctggcccaagacgtcctttttgagacagacctcatcagggacatgtgtccttggccctgccttccctagacaatggggtcacctcaaccggatatcattaccaatgaaaaaaccttaaaatcagtgctcacccaggtctaacacagggcagagtggtcatttggcatcccttgaaacagggattcttttgtcttggtccagtgcttttctagaggagaaggctgggtgctgcctgagagagaagggagaaaggtggtccctgtcagcggttcttatctttctctaagacaggagactctgggaatcagccctgcctccctacagacagaatagtgaccaggtgtcactcaagcatgttcacactgatggtttagcaaagtatttttttcaacgacatcagaacgtcctgaaagacttgtgatgattgcgctacacaaacatcttgccagctttccgtgattatggactattgcccacaaaatggtttagaggcccaggggatgggaccacaaattgcttaatccaatactgatgagaaaatgatgttctgctcagagacgaggctgaaaacagaccctctgctttctctatgccctggtgagtctcaggttacaccagtaaataacccctcttctttattaaagaaccaygcagaagtgctcaggaaattactgtttaatcatgtaatatccagattgctcaaacaataatctagagagagaatttttatggcgcatttaatattttgttatttcaagaacatgctgccttgtgtatagcagaatgtctgcaaacatttgtggactcattgattacagaattaagctatttacatttttaaaagaaacatcaagaattaggcttaccactgctttaaaagatatacatcaatgtttttctgactgtgaaaaatttaaagttctagaaattatcctg

SEQ ID NO: 87604 - DNA, 536 bp, Homo sapiens
gcacttgtatatgttgatggtgtattctcgggtcaccacctcgttgatggcagaacggcccttatcttcttgccatccttctttgcgggagccattctgcctsgtccaagttggaaaggaagagtgcgagggattgtgatacttctttttacatttttagagttttaaaaattttagactcaggactttggccaaactagtcacaataatcagtcttatatgacatttgtctctataacttcattagtgtattcattctgacatttaataatcgataatgccatttccaatcaccatattcatcatgatttaggcagacaaatggtaatttaaagccaacatttagcagtattgttttttagttattctcaagcctgatgtaattatatagttgaagtagaaattgagtttgtggtgatagcagaaatattgtcatcggagccagctatttccaataaaatttgtgtaagcatcaaaggctacattattgtcctttacttcttataattcattgtgtagtacttatacttacttct

SEQ ID NO: 87605 - DNA, 536 bp, Homo sapiens
gcacttgtatatgttgatggtgtattctcgggtcaccacctcgttgatggcagaacggcccttatcttcttgccatccttctttgcgggagccattctgcctggtccaagttggaaaggaagagtgcgagrgattgtgatacttctttttacatttttagagttttaaaaattttagactcaggactttggccaaactagtcacaataatcagtcttatatgacatttgtctctataacttcattagtgtattcattctgacatttaataatcgataatgccatttccaatcaccatattcatcatgatttaggcagacaaatggtaatttaaagccaacatttagcagtattgttttttagttattctcaagcctgatgtaattatatagttgaagtagaaattgagtttgtggtgatagcagaaatattgtcatcggagccagctatttccaataaaatttgtgtaagcatcaaaggctacattattgtcctttacttcttataattcattgtgtagtacttatacttacttct

SEQ ID NO: 87606 - DNA, 536 bp, Homo sapiens
gcacttgtatatgttgatggtgtattctcgggtcaccacctcgttgatggcagaacggcccttatcttcttgccatccttctttgcgggagccattctgcctggtccaagttggaaaggaagagtgcgagggattgtgatacttctttttacatttttagagttttaaaaattttagactcaggactttggccaaactagtcacaataatcagtcttatatgacatttgtctctataacttcattagtgtattcattctgacatttaataatcgataatgccatttccaatcaccatattcatcatgatttaggcagacaaatggtaatttaaagccaacatttagcagtattgttttttagttattctcaagcctgatgtaattatatagttgaagtagaaattgagtttgtggtgatagcagaaatattgtcatyggagccagctatttccaataaaatttgtgtaagcatcaaaggctacattattgtcctttacttcttataattcattgtgtagtacttatacttacttct

SEQ ID NO: 87607 - DNA, 549 bp, Homo sapiens
gtgatccaatatygcttttaatattaagtgtactttctagagtttcttattcctggtgagaaaacatttgtgaacaaaaatatttcttgcttttgactactcctttctactgttgccactgccatcctagcccagattccctaaacctcttatcacttaaagctagttttatcacctccgttcatctcctacatcaacctgtcatatacatcgcagccagattaattttataaaggtcagcattaatcacaatgctgctcaggtcagaaatctttagtggctttccattgcccactaatgtcccaaaacttcagctttttattcacagtcatggaatatcgtttgctgcccagagcaacatcctcttctagtggcaggaagcctcttttctcaaggctctttgctttgaataaccatctcttcctcactctggtccacttgtgtggtaggaaacattttactaccaggctttggggttgcaacatagcacccaggctgagccaaccagtgcattccgtccccattggtcacagttggagatgggcatat

SEQ ID NO: 87608 - DNA, 2321 bp, Homo sapiens
aatgtccagtcaatttattaaagttccaaagtcggtcgcgcgcagtggctcacgcctgtaatcycaacacttcgggaggccgaggcgtgtggatcacgaggtcaggagttggagactagcctgaccaacatggtgaaaccccgtctctactaaaaatacaaaaattagcccaggcatggtggcacgcggctgtgatccccgctactcaggcggctgaggcaggagaattgcttgaacctgggaggcagaggttgcagtgagcagagatggcgccaccgcactccagcctgggagaaagagtgagtgagactccttctcaaaaaaaaaaaaaaaaaaaaagagttgcaaagtcatactcacctttcagctcttgtcggacaattaaggggtctttgcatacttcagccctaataatttgcttcctaacatacatattgcagtggttatctaattttaaatatctttttgtttcaacacctaattttttatttagatctatctgtatgtttacaatatattttgctctatgttcattctttgatttcagaacttcaacctttctgaagcatgttttcagggtttctttttagtttctttggtggaattctgctggtggcattttgttttttgtctctaaatatgttatttagccataggttgatgaatatttttcttggttgagaatttcagaatggcattattattcttaacaaataatattgtttattttacttttcattctttcagatttcaatatgattaaaggtaatttgatttttctagtgctaattgaaatatttttcccttcctgattctttattatttctctaggagatacgtagatgtaggtttatctccattatagcttgcttagcatgcatggaatttttgaatatgcggattagtgtcttacaaaagtctagagaactttcagccaaaataccatcacatattgtcccttcccagttcccttcttctatgagaacactcactaaacacatgctgcactatctcactgtatattccatgtctcttcatgattctgtccacattgtgcattttttaaaaattttctgtaatgcactctgaaatatttatgaactctcaccatggccatgtctaatctgatgagttcatttttgagtttttaatttaaaatactatgtttttatacaaactacttttcaaatttgctacatcaattttttagtctcctaaaaatatattcattttttttaaaattttttgaaagcaaatgtactttataatctaacagtgatatttctactaatgaacctttgtggatctgtttgtactctttttctgctttcctttcaaatggtggaatatcatttccttgtgtacttagatgcctttgaatgacaaatatttatttttctctgaaaattattatggtgcacttttgtgtattagtaagaagaaaatttgccaaagagaatttgaatttttttgtgagtctactaaaggcaccaccattctgggaccacattgtattaattcttggcctaaaggtgtttggacatgtttggactgcacagttaaacaatttttaaattaattgctgtaaatcattaatgattgagtttctttaaatctgtccaatctcaagccatttttatttgccatttccagggaatgtgaaatgggactaatttacctctgattcttctttatactgaggatataaattttggtcctagctttagggtagagctcctgtgtgatgctctatcttggaaaaaactatgtatttctttactgtcctatgtgatgtatgacagtaggaatctgcactcattcattttgctacatgtccgtagggcaaaattggtttcggtgtttaggtatattttgtctgctccctgcattcccatggttttgaccttatattttactttttttgtgtgaacataccaatgcttcaatttttttccagtaatataatcaactatactataagaaagagaaaacttttgataaaacacaaatttcatgttttcctactctaattggcttttacataaaaatacaggtaaaatttatttgtacttttttgctatttctgttttgctattctctgtttgtctatgtcttctccacatagacacaattagggaattttgtacactcttgtgccaactgctttgatagtaacaaaatgtatttctcaaactcctagctataaaactcaagtatccacaatttaaattcttttcccctcacttctattatgtttccagtctcaatagaaatcgatgccaatccagaaatacaagcattattctaatacttctcatgca

SEQ ID NO: 87609 - DNA, 2321 bp, Homo sapiens
aatgtccagtcaatttattaaagttccaaagtcggtcgcgcgcagtggctcacgcctgtaatcccaacacttcgggaggccgaggcgtgtggatcacgaggtcaggagttggagactagcctgaccaacatggwgaaaccccgtctctactaaaaatacaaaaattagcccaggcatggtggcacgcggctgtgatccccgctactcaggcggctgaggcaggagaattgcttgaacctgggaggcagaggttgcagtgagcagagatggcgccaccgcactccagcctgggagaaagagtgagtgagactccttctcaaaaaaaaaaaaaaaaaaaaagagttgcaaagtcatactcacctttcagctcttgtcggacaattaaggggtctttgcatacttcagccctaataatttgcttcctaacatacatattgcagtggttatctaattttaaatatctttttgtttcaacacctaattttttatttagatctatctgtatgtttacaatatattttgctctatgttcattctttgatttcagaacttcaacctttctgaagcatgttttcagggtttctttttagtttctttggtggaattctgctggtggcattttgttttttgtctctaaatatgttatttagccataggttgatgaatatttttcttggttgagaatttcagaatggcattattattcttaacaaataatattgtttattttacttttcattctttcagatttcaatatgattaaaggtaatttgatttttctagtgctaattgaaatatttttcccttcctgattctttattatttctctaggagatacgtagatgtaggtttatctccattatagcttgcttagcatgcatggaatttttgaatatgcggattagtgtcttacaaaagtctagagaactttcagccaaaataccatcacatattgtcccttcccagttcccttcttctatgagaacactcactaaacacatgctgcactatctcactgtatattccatgtctcttcatgattctgtccacattgtgcattttttaaaaattttctgtaatgcactctgaaatatttatgaactctcaccatggccatgtctaatctgatgagttcatttttgagtttttaatttaaaatactatgtttttatacaaactacttttcaaatttgctacatcaattttttagtctcctaaaaatatattcattttttttaaaattttttgaaagcaaatgtactttataatctaacagtgatatttctactaatgaacctttgtggatctgtttgtactctttttctgctttcctttcaaatggtggaatatcatttccttgtgtacttagatgcctttgaatgacaaatatttatttttctctgaaaattattatggtgcacttttgtgtattagtaagaagaaaatttgccaaagagaatttgaatttttttgtgagtctactaaaggcaccaccattctgggaccacattgtattaattcttggcctaaaggtgtttggacatgtttggactgcacagttaaacaatttttaaattaattgctgtaaatcattaatgattgagtttctttaaatctgtccaatctcaagccatttttatttgccatttccagggaatgtgaaatgggactaatttacctctgattcttctttatactgaggatataaattttggtcctagctttagggtagagctcctgtgtgatgctctatcttggaaaaaactatgtatttctttactgtcctatgtgatgtatgacagtaggaatctgcactcattcattttgctacatgtccgtagggcaaaattggtttcggtgtttaggtatattttgtctgctccctgcattcccatggttttgaccttatattttactttttttgtgtgaacataccaatgcttcaatttttttccagtaatataatcaactatactataagaaagagaaaacttttgataaaacacaaatttcatgttttcctactctaattggcttttacataaaaatacaggtaaaatttatttgtacttttttgctatttctgttttgctattctctgtttgtctatgtcttctccacatagacacaattagggaattttgtacactcttgtgccaactgctttgatagtaacaaaatgtatttctcaaactcctagctataaaactcaagtatccacaatttaaattcttttcccctcacttctattatgtttccagtctcaatagaaatcgatgccaatccagaaatacaagcattattctaatacttctcatgca

SEQ ID NO: 87610 - DNA, 586 bp, Homo sapiens
tgcataataacatttcagtcaaagatggattacatatacaaaagtggtcctatgagattataatacatatttttacatacttttctacatttaagtatgtttagatacataaactcttaccactgtgttcttattgcctgcagtattcagtaaagtaatgtagtacacaggtttgtagcctaggagagagaggctataccatatattccagacgtggtaggctgtacaatctakgtgtttgtaatattctctctgacatttgcaaaatgaaattgcctatggatgcatctgttagaacatatccctatcattcagtgatgtgtgactgtactaaaatgctcaatctaagtttcaatgccctccataaaattgttgtactgtgaaatacaaatctctcacccatggcctgaatatgtttgcaaactaagcagattatgggaaggagattgtgctggcatcgctgggatgattttctcacactacatgaataatatctccagacttcgagaatatgagccacttgcatagagttaaagtaggcatctctttgctgggaaatttatcaaatgggaatatgaagtgtttt

SEQ ID NO: 87611 - DNA, 607 bp, Homo sapiens
catgaattaagatgggaagatatttgggggaaacatttacttaaacgctaaataataaaggtacacaaagggcaaattatactagatttctttcccacttgttttctatgtctcatgcaattcaccttgattcccttcagtttctgtttaatgtagaaagtggyattttcattattttaagcttctagcacaatgaaagaatttctctttttcatgaactggatcataaatgaaagggaggaagagtgtcctatatcatatttattgttcaacaaaacactgctccacggcttaaattcagtttaaaaaagagaatttattgaacatctaacacatacataaaaggcagtaaagacaaatgagaagagggcaggatattgaagtatacagactttaatgctgagttttgtatcttagtaagttactccaccttacagaggctcaatttcccctgatttaggaaggcgatgctaatgggtattgcctaggtgtaagtataaaaatgttgtatttaagagaatcccacaagcttggtataaggcagaaaataaatagatgtgacatgaataagtagtttattacatttgtatgctacctgcagactaga

SEQ ID NO: 87612 - DNA, 607 bp, Homo sapiens
catgaattaagatgggaagatatttgggggaaacatttacttaaacgctaaataataaaggtacacaaagggcaaattatactagatttctttcccacttgttttctatgtctcatgcaattcaccttgattcccttcagtttctgtttaatgtagaaagtggtattttcattattttaagcttctagcacaatgaaagaatttctctttttcatgaactggatcataaatgaaagggaggaagagtgtcctatatcatatttattgttcaacaaaacactgctccacggcttaaattcagtttaaaaaagagaatttattgaacatctaacacatacataaaaggcagtaaagacaaatgagaagagggcaggatattgaagtatacagactttaatgctgagttttgtatcttagtaagttactccaccttacagaggctcaatttcccctgatttaggaaggcgatgctaatgggtattgcctaggtgtaagtataaaaatgttgtatttaagagaatcccacaagcttggtataaggcagaaaataaatagatgygacatgaataagtagtttattacatttgtatgctacctgcagactaga

SEQ ID NO: 87613 - DNA, 995 bp, Homo sapiens
acacacacacacacacacacacataaacacaagcatatttaacagggataatatgtgatatggcctacaaagactaaaatatttatcgtctcacttttcacagtaaagtttgctgtcctgttgcggtggaataagtagctaaatttcccaatatgagttgttacctgatactttattaccaagttttataaacaatttagaaagttgattttattattttttagttttagtttttttgagatggagttttgctcttttttgcccaggctggagtgcaatggtgccatctcagctcattgcaacctctgcctcccgggttcaagtgatccttctgcctcagcctcccaggtagctgagattacaggcatgtgccaccatgcctggctaattttgtatttttaatagagacaggatttcaccatgttggccaggctggtctcaagctcctgacctcaggtgatctgacttcaggtgatctcagcctgacctcaggtgatctgacagcctcggcatcccaaagtgctgggatcacaggcatgagtcactgtacctgacatagaaagttgattttaaaagttcttatgcaggggtgggaagtagtatacataaaataaagcctgctcaaatactttatttcgtttgtttctaaataataactatagtaataatatttttatacctaatcttctaatttagtgagataagtttgtagtaaatgaattatattgagactatattctagatacagctttaaaaactggaaggagaaaatgagggaaagatatttaaggtacctaaggaatttcaaaatgaattatatcctacaatgatcaatttcaaagtgaacaaaattttattaggtatcagtttaaaggcattatgagtatgctttgggataccaacactrattagtgtattgattgatttactaaatcagtgtgcatttaatgagcatgtactttgtgacaaggattgttcgaagcgcttagtggcaa

SEQ ID NO: 87614 - DNA, 995 bp, Homo sapiens
acacacacacacacacacacacataaacacaagcatatttaacagggataatatgtgatatggcctacaaagactaaaatatttatcgtctcacttttcacagtaaagtttgctgtcctgttgcggtggaataagtagctaaatttcccaatatgagttgttacctgatactttattaccaagttttataaacaatttagaaagttgattttattattttttagttttagtttttttgagatggagttttgctcttttttgcccaggctggagtgcaatggtgccatctcagctcattgcaacctctgcctcccgggttcaagtgatccttctgcctcagcctcccaggtagctgagattacaggcatgtgccaccatgcctggctaattttgtatttttaatagagacaggatttcaccatgttggccaggctggtctcaagctcctgacctcaggtgatctgacttcaggtgatctcagcctgacctcaggtgatctgacagcctcggcatcccaaagtgctgggatcacaggcatgagtcactgtacctgacatagaaagttgattttaaaagttcttatgcaggggtgggaagtagtatacataaaataaagcctgctcaaatactttatttcgtttgtttctaaataataactatagtaataatatttttatacctaatcttctaatttagtgagataagtttgtagtaaatgaattatattgagactatattctagatacagctttaaaaactggaaggagaaaatgagggaaagatatttaaggtacctaaggaatttcaaaatgaattatatcctacaatgatcaatttcaaagtgaacaaaattttattaggtatcagtttaaaggcattatgagtatgctttgggataccaacactaattagtgtattgattgatttactaaatcagygtgcatttaatgagcatgtactttgtgacaaggattgttcgaagcgcttagtggcaa

SEQ ID NO: 87615 - DNA, 718 bp, Homo sapiens
agttatttttaattttttgtagagacagggtctcacttttttactcaggctggtcctgaactcctgatattaagtgatccttcttcctcagcctcccaaagtgctgggattacaggtatgagccaccacgcctggcygtatcttttgtattttttgataatagccatactaacaggtatgaggtaatatctcattgtagttttggtttatggttttttgataattagtttggtttacagctcctgataattatagacatataaaatggtcaatgggtacatcaaaagatgttaagatcaaaagatgttcttctttttagaaatgtctattcaggtcctttgcccatttttaagttatttgttttcttgttattgagttgagatttttatatactttggatattaagttcttatcaaataagtggtttgcaagtattttcttccattccatatgttgcctttttactatgttaatttcctttgctgtgcagaaaattttagtttgatgtagtttcagttatctgttttttattttgttgcctaaacttttcatgtcctatctaaaaaagaattgccaagaccagtgttttcttagtttgtgccactataacaagatacctgacactgggtaattataagcaacaggcatttgttgatcacacttctggaggcagggaagtcaaaaattaaggcaccaatacatttggtgtctagagagg

SEQ ID NO: 87616 - DNA, 1546 bp, Homo sapiens
ggctttgctgatcttgtctgccctctttcccatgtttgaacctatgttagcaggaaggagacatgtgtctattccctgtatcttcttcttcagcagggtagtccgggcatgatctcaaggtgaaggcagtggtgcaaaagagagaaaccaagatgtgtaagtttttgcttgtatcaagttggctgatgttccattggtcaaagcaagtctcacagctaagtccagaggcaatgtggacgatccctgcagtgggagacatgcaaccttggggccatgagtacagttagtacacaccaagtgaggcaggtatgcaagggcacttcagtggattgcttcatgtactagcaaggggacaagaaagagtcatttccaaacaggaattgtgcagtcttagaacaggattcctcaggccaaatcatttgatcatttttcataatcttgcagaattataattcttatatacaacaggcatccatagtttttgacaaaactttccattaagaaggaaaatcccaaagtgttttatcattttaggagagttacagtaattttgatatccagacaaatgtttttctattatgtgatgtaacactctaatgctttgcaaaatttgcaattattatttacttttaagaatcctattgaaaatactatttgtcttttgcacacattggtcttggagattgttcgtttaaaaaaaccacagcaaacaaaaccaagccatgtgagtctgagggaagctagcaagtgctgccttttcttcctaggaacctgtcactgggaccatgctccatttgccatcagtgcatggctggttctaagccatatgggatttcaaagtcctatatttcttccagcagtggatcttctttcttctttccctcccctggaagactcctaagagttccttgtcagtgcctccacagtgcctccctgaaactgtttccccaaaggcaaggcgttttgctcagcgcctcccagaaactctttccctcaaggcatggcattttgcacaggaaatgcgttcaccatttctttattcattgatattctctagtctgtttcatactctcacattcctgaaaacttgtggttttgcaaagatgttaattcattggttacyacatagcagtcatctttttaatgatttaggatggcttggcttattttgggcttaatggtgctgcagaagtgagtttagggtgattaatatttaaatatatttatctgacttacaaatatgtatttaaaaaaactaaaaactaagaaaatgattaaaaatcactgataatctcaccaactatggataagccagtcaatttttctcactttagcacttatgtgtgtataattagtcaaacttcatgggacaccaatagcaacttttgatctatacaaacagcaatttcatacagttcaatgttatatttgtgatcattccttgtattaggaacaaataggagatatatgtgtgtgtgtatatatacacgtgtgtatatatatgcatgtgtgtgtgtatatatatgcatgtgtgtggggggtgggg

SEQ ID NO: 87617 - DNA, 826 bp, Homo sapiens
cataaccatgattgagtatgcttgtttccaggccaatggagaaagacgaatcataattttctttctcaaggtgtttttgttattttcctggcacctttaatcttgctccccttggcatcctcatgccctcttccttgactttgcactttctggtcactgcctgttttctactagggggactttgcttatctctgttgaaatgatggccaggaattagtaggtaccgtaatgagttaggctgagaaatacaggcattagacttactaaagaggggttagacctacaatgtgagaaataattgacacatgtggagggtattacattcatctagaaagagtgtccctgttagtaccctacagagctgtgagtctctaccggggtaatggatgcacgattcaaatttactttagaagtcaatacaatactttagaagtcaagtcttctctttcaacaaaaagaattgaatacaagaaggcatctttcttgggaaaaaaccacaataatagtatcggattcttcttggaatgtacagaaatttattgccactatacattagactttgtgctgaggactgctgggagacttacgtgatgaattccaccttacagataaaatgaggctcaaggtaattgtcaggtacgtcaagagctacatgatgggcagtggggataacrgccagactgtggcaccacatcattggattctttctcttatttccaacgaaaaatctccatcctcacagacacacagcagcaacaggggagaggcacgctgtggcacgtagtggtcagaacggctttccccaggatgaatggggccactgaga

SEQ ID NO: 87618 - DNA, 546 bp, Homo sapiens
ctgatcagctcctgaggcattctgtgctctgtgtacctgctgtttacctcttgtgatggtttctttcacatcacatgtttttgtcagcctctctctctctcttcagcacccagcatactcctggtgctcaacaaacatctgccgaataaatgaatgatactcttcaaaggcatagtcggtgtcctttcatctttgtatctgcagcacaatatcttgaccatgataggttcatagtaaatattcagagaccgaggagagagaaggtaatgaaagaacactaaaacaaggaagagaaggaagaaaagaaggaacratatattagtcagagagagagagagagagcacatgtaagcctagttcatatatatctgcaatcaaaggctgaagttgtaagaagagaaataaataaaacaaatgtcactaggagtttgtaagatagaagtcataatgactaaggaaatagggatggaagcatggaagatacagcttctggcatgagtcttaaaccatgagagagattttgatggaggtggagaatggaaagta

SEQ ID NO: 87619 - DNA, 543 bp, Homo sapiens
gggaacagaaaaccaaatactgcgtattctcacttataagtgggggctaaacattgggtgtggtgtccataaagatgagaacaatagagaatggggactacttgggtgggggcaagggctgaaaaactacctattgggtactatgctcactacccgggtgatggaaccatatgtaccccaaacctaagyatcgtgcaatatacccatgtaacaaacttgtacgtgtaccccatgaatctaaaataaaagttgaaattataaaaaagatcacaggagaatatacggatattatttggcaaaaaaattataaggaataaaagagtataaaagccattaaaaataaattaattaattcaatcaaacttttgtggagcatttaatgacaagggaaagatcataatgtaaattaatgttgaacaaaagtagggtgctaaattatatatatgtaagcttctatacatacatatgtatgtgtagatcccacttgtgtgatgtatacatgcccatacagacataacttagaaatattgcaagtcttgttcc

SEQ ID NO: 87620 - DNA, 543 bp, Homo sapiens
gggaacagaaaaccaaatactgcgtattctcacttataagtgggggctaaacattgggtgtggtgtccataaagatgagaacaatagagaatggggactacttgggtgggggcaagggctgaaaaactacctattgggtactatgctcactacccgggtgatggaaccatatgtaccccaaacctaagtatcgtgcaatatacccatgtaacaaacttgtacgtgtaccccatgaatctaaaataaaagttgaaattataaaaaagatcacaggagaatatacrgatattatttggcaaaaaaattataaggaataaaagagtataaaagccattaaaaataaattaattaattcaatcaaacttttgtggagcatttaatgacaagggaaagatcataatgtaaattaatgttgaacaaaagtagggtgctaaattatatatatgtaagcttctatacatacatatgtatgtgtagatcccacttgtgtgatgtatacatgcccatacagacataacttagaaatattgcaagtcttgttcc

SEQ ID NO: 87621 - DNA, 705 bp, Homo sapiens
cctaagctcagggttccactcttgcaacacaaccctatgggaattggggctctggtgcaattgcaaatgttactgtggctactgttattgctctgagtaatgaatggtcctttgtttctgattcaggaggctcttctatcagtatccacggaagtgtgtcaggcgaactttttaacctgcaagtgagcttactgctttttaataaaagcagcacattttaattatgattctgatgtatgtgtagatcagaatctataaaaattactaaatacattacttatttctttatagataaaactgctcattaatatactaaataatttagcataagtaatgatgttctttgaaaaggaagtaataattggtaaaagaggttggagattagctgtggatgtcaattttgtggtatttaaaawtgcttttcacagcatggtaatggtacaaaaacagacacatagaccaatgggacagaatagagagcccagaagtaaggccacatatctacaaccatctaatctttgacaaagctgacataaacaagcaatgggtaaaagactccctgttcagtaaaaggtgcggggagaactggccagccagatgcagtagattgaaactggaacccttacttataccatacataaaaatcaactcagggtggattaaagacttaaatgtaaaaaaactctggaagatagcttaggcaat

SEQ ID NO: 87622 - DNA, 749 bp, Homo sapiens
atgagtacatctgttcagatatggtttgatccgctaatgaatccagaaggaggtcaactaaaatcaggacttttgctcagacacccaacatctggcctccatatcagccactgaagtacacctgcatgcaggttccttctgatttccctgagattgagcaacaaataaagataaatctttatgagcccaagtgaagcctgcctcacaagttttccagtctcactacaccagaggaagaaatctgttgtccaccacactagggcaatcactgtacatatttgccattttaaggattcatctacttggggtttcctcactccataaagacataccaagctctgtgatatgcaccaaataatggtaacttagagcactactctataagtrtaggccttcttttacttttagaaacatttggtttgagaaaatgataatcaagattctaaatcccaattctaggagaaggggctactaggttggggcaaatatcaaactatcatgggtgtttctattgtcaataacacattagaaagcgcaaagctgtaagactctttcccagtctcaattgacagtaaaattagacaggtctttcttgttatcaagacaggtctttcttgttattattcaagtccttaaacttataaggtttcataggcaggcagatgtattatgatataaaaatctgtgttaaggaactgaccacatgtgatatagtttatactcaaaaattccttcctgcttcgcattag

SEQ ID NO: 87623 - DNA, 749 bp, Homo sapiens
atgagtacatctgttcagatatggtttgatccgctaatgaatccagaaggaggtcaactaaaatcaggacttttgctcagacacccaacatctggcctccatatcagccactgaagtacacctgcatgcaggttccttctgatttccctgagattgagcaacaaataaagataaatctttatgagcccaagtgaagcctgcctcacaagttttccagtctcactacaccagaggaagaaatctgttgtccaccacactagggcaatcactgtacatatttgccattttaaggattcatctacttggggtttcctcactccataaagacataccaagctctgtgatatgcaccaaataatggtaacttagagcactactctataagtgtaggccttcttttacttttagaaacatttggtttgagaaaatgataatcaagattctaaatcccaattctaggagaaggggctactaggttggggcaaatatcaaactatcatgggtgtttctattgtcaataacacattagaaagcgcaaagctgtaagactctttcccagtctcaattgacagtaaaattwgacaggtctttcttgttatcaagacaggtctttcttgttattattcaagtccttaaacttataaggtttcataggcaggcagatgtattatgatataaaaatctgtgttaaggaactgaccacatgtgatatagtttatactcaaaaattccttcctgcttcgcattag

SEQ ID NO: 87624 - DNA, 749 bp, Homo sapiens
atgagtacatctgttcagatatggtttgatccgctaatgaatccagaaggaggtcaactaaaatcaggacttttgctcagacacccaacatctggcctccatatcagccactgaagtacacctgcatgcaggttccttctgatttccctgagattgagcaacaaataaagataaatctttatgagcccaagtgaagcctgcctcacaagttttccagtctcactacaccagaggaagaaatctgttgtccaccacactagggcaatcactgtacatatttgccattttaaggattcatctacttggggtttcctcactccataaagacataccaagctctgtgatatgcaccaaataatggtaacttagagcactactctataagtgtaggccttcttttacttttagaaacatttggtttgagaaaatgataatcaagattctaaatcccaattctaggagaaggggctactaggttggggcaaatatcaaactatcatgggtgtttctattgtcaataacacattagaaagcgcaaagctgtaagactctttcccagtctcaattgacagtaaaattagacaggtctttcttgttatcaagacaggtctttcttgttattattcaagtccttaaacttataaggtttcataggcrggcagatgtattatgatataaaaatctgtgttaaggaactgaccacatgtgatatagtttatactcaaaaattccttcctgcttcgcattag

SEQ ID NO: 87625 - DNA, 554 bp, Homo sapiens
tttatataggagaaatagattcaaaagagtcatttaatttttaattgtgataatttttttgatgagacggtatcactctgcagcctaggctggaatacagtggcacaatcatagctcactgcaaccttgaactcctgggttcaagggatcctcccacctcagcctgtggagtaaagttaagattacagctgtgtgacactgtgcccagctaatttttttattttatttattttatttttattcagtagaaacgaggtcttactatgtttcccaggctggtcttgaactaccagcctcaagctacactcctaccttgtgctgggattacaagaatgagccaccacccccggccctatgataattttttaaaatggaaacattcattcatttattccactaataattgctgaatgcctaccttgtaacaggcactactataggaacagggacacaaagacagtcaacccagactcagatcttgtcttcttggrgctatgcagtatcaaaattacagagacagcaagttaaatatcaagcatatgtgtatatacata

SEQ ID NO: 87626 - DNA, 685 bp, Homo sapiens
ccttcctgcctcttccagcatccctgagcaagccttggtgctccgtggctggaagacacgtcactcagtcacagggatgtctttcctctgtacacgtctgtctgtgcacaaatttcctcctttaaaaaaataattggccgggcgcggtggctcacgcctgtaatcccagcactttgggaggccgaggcgggtggatcatgaggtcaggagatcgagaccatcctggctaacaaggtgaaaccccgtctctactaaaaatacaaaaaattagccgggcgcggtgcgggcgcctgtagtcccagctactcgggaggctgaggcaggagaatggcgtgaacccgggaagcggagcttgcagtgagccgagattgcgccactgcagtccgcagtccggcctgggagacagagcgagactccgtctcaaaaaaaaaaaaaaaaaaaaaataatcgaggccaggtgtaatggctcatgcctgtaatcccagcactttgggaggcygaagcgggcagatcacctgaggtaaggatttagagaccagcctggccaacatggtgaaaccccatctctactaaaaatacaaaaattagctgcgtgcggtggcaggtgcctgtaatcccagctgctcgggaggctgaggcagaagaatcgcttgaacccgggagacagatgttgcagtgaggcaaa

SEQ ID NO: 87627 - DNA, 981 bp, Homo sapiens
ttttaaaatgatgagattagagagtgtgttcctgggcttcctcccttgtctgagccagggtggacaagtcatcctccctgtaccacagatcctgactataagcggggactggcacctcctttgctcacttaaaccatgctgcattttgggagaaatccctaggtgaattttggcctttgtaatctgtgctatgtggcaattatgcagcaatgcactatatatgcaagttggagcactgctggcaaagactgcagtatatgagctcaagctagaccctagccttgacaacaaccaaccagcagcagcaatctgaccttcggtcaggtacccagtatgaaaaagcagtcagaaatatatcttccctccacaccctacactttcccaccaaactacaaggagtgagagtaccgccacccctcccaagagggcaaacggggaagtccaggaggtctgggttgttggcctagagttataaagcaacatgttggaagagttgaaaaatggagctcaagcctcagaaatggggaaggaaggacagygtcctcctcttagggagaggctgaaaactccaaacagatgactcccaggcactcctccatcccggagtagacctcctgaggccccaattacacaaggacccgtggatttcccatggctgtcattgcctttaagagatttgagcctggaggccacctgccctgcattgccaagggtgagtttgtctctgcagcacagaaggaagaggatgtccaccagacatgtgaatagatgtcatccagacacccaacaaaacaaagaaaataatgatgacaacccaagctgaatggtatgatttaatttctaaattgagatgattttggaaacttaccaaatctccagtgtccaagcattcatctatttgttcaataaatattttttctgtaccaaagacacatcaggctctgtgctaaacactggagatataaaggtaaatgatacaga

SEQ ID NO: 87628 - DNA, 685 bp, Homo sapiens
tgctggtctttggggatgtactgcttgagagctgataaatcagaaagtcttccagaagattttgtggcttgtactttcactttttatgccctgttttgattaacataagttcttaatttcacccagtcacatacactaatattttgatttaatgcagcttaaagattttataatatcagatattatttcacaatagcaattatgtgtattgtttaaaaaatccttctcttgtatatcttctaaaagctttagagttctgcctttgacacttaaatcttgaatacaccagaagttgaattttctgcatgatttgaatatctttataaagacttggttgtcccaacaccatttacttcaaagctttttcattccccagtgatatgccatgccacacctctaatatagcaagtgcyaataaaagcaaatatacactaattttctttctattctgtttgttttttggtctatctgtgtataaataccacactgttctgtttattagcactatatagtgtgttttgatatctgaaggatcaaatcctcccacgttgtactctttctcttttaatagagtttgagctagccttggtcccttgaattttaagattagtttgttgagttctgcacacatccacacaccctgctgcgatattgattgggattgtattaaatctaataatcaatt

SEQ ID NO: 87629 - DNA, 874 bp, Homo sapiens
ttccagcactattcacaatagcaaagacatggaatcaacctaaatgcccatcaatgacagataaagaaaatgtgatacatatacaccatggaatactatgcagccataaaaagaatgaaatcatgtcttttgtgggaacattaatggagcttgaggttattacacttagcaaaataacacacaagaacagaaaacaaaatatctcatgttctcacttgtaagcgggagctaaatgatgagaactcatgaacgcaaagaaggaaacagcagatactggggtctacttgagagtggagggtgggaggagggagaggagcagaaagataactattgggtactgggyttcatacctacgtgatgaaattatctgtacaacaaacccttgtgacatgagttcacctatgtaacaaacccgaacagggttcacatgtaccctgaacctaaaatttaatttaaaaaaaaaaaaagaaaactttgccagaaaagattgcaaagccaaaaaaacctgacctaattatatgtttcattgcttccataattatattactctgtacataataacatttgcaatgaggattttgttcttaattcactctgaagaaacactatcagcattgagattgttaaaagcaccaagctttaaaggaaaccctactgggctcagaacacacccttagaaatatttcgtccttcttaagttgtgggctcaattgtgtcctcccacaactcatatgttgaagtgctaacccctagtgagaatgtgactatatttagttataggtaattgagttaaaatgaggtatttatgctgggctgtaatccaataagattgctgttctttcttctaagaagaggaaagttggccacagacaca

SEQ ID NO: 87630 - DNA, 874 bp, Homo sapiens
ttccagcactattcacaatagcaaagacatggaatcaacctaaatgcccatcaatgacagataaagaaaatgtgatacatatacaccatggaatactatgcagccataaaaagaatgaaatcatgtcttttgtgggaacattaatggagcttgaggttattacacttagcaaaataacacacaagaacagaaaacaaaatatctcatgttctcacttgtaagcgggagctaaatgatgagaactcatgaacgcaaagaaggaaacagcagatactggggtctacttgagagtggagggtgggaggagggagaggagcagaaagataactattgggtactgggcttcatacctacgtgatgaaattatctgtacaacaaacccttgtgacatgagttcacctatgtaacaaacccgaacagggttcacatgtaccctgaacctaaaatttaatttaaaaaaaaaaaaagaaaactttgccagaaaagattgcaaagccaaaaaaacctgacctaattatatgtttcattgcttccataattatattactctgtacataataacatttgcaatgaggattttgttcttaattcactctgaaraaacactatcagcattgagattgttaaaagcaccaagctttaaaggaaaccctactgggctcagaacacacccttagaaatatttcgtccttcttaagttgtgggctcaattgtgtcctcccacaactcatatgttgaagtgctaacccctagtgagaatgtgactatatttagttataggtaattgagttaaaatgaggtatttatgctgggctgtaatccaataagattgctgttctttcttctaagaagaggaaagttggccacagacaca

SEQ ID NO: 87631 - DNA, 629 bp, Homo sapiens
  misc_feature (1)...(629): n = A,T,C or G
tccaaggtttttgatgcagggcactgactctgtgtttgtttttccccttcatcctcagaatccccttaaaaaatggttggtaggcattggtaagaatccacatttcttcccttntgttccctggcttcattccaggatttcacttgtcacactgatgggtgagatgcctttcatattggcataagacactgagcggatgcctcctcttatcttatcaaacagaaacccggcgagtgaatctacccagagctgaagcttcctttgcaacttgggaacaccagggccacagtgactttgtggcttggctttagataaatttgaccatggctgtagaacccagcagctcagaatccattaaaaggagagctgggaggaggtgagtgatagagacaaggggatttygatgttacaattgttgaggggactgtggctggcgggcaacttgctgtgggggcagtgattgaaaacatggattattagctggttacaaatcttcatttgtacagatgagctgttgatttcatataagaggtggaagtaaattctgctttatgtgccctgtaaaaagcttctttgaatttaccttcagtgtcatgccttcagaaaaaaattccaagtttctggcataa

SEQ ID NO: 87632 - DNA, 629 bp, Homo sapiens
  misc_feature (1)...(629): n = A,T,C or G
tccaaggtttttgatgcagggcactgactctgtgtttgtttttccccttcatcctcagaatccccttaaaaaatggttggtaggcattggtaagaatccacatttcttcccttntgttccctggcttcattccaggatttcacttgtcacactgatgggtgagatgcctttcatattggcataagacactgagcggatgcctcctcttatcttatcaaacagaaacccggcgagtgaatctacccagagctgaagcttcctttgcaacttgggaacaccagggccacagtgactttgtggcttggctttagataaatttgaccatggctgtagaacccagcagctcagaatccattaaaaggagagctgggaggaggtgagtgatagagacaaggggattttgatgttacaattgttgaggggactgyggctggcgggcaacttgctgtgggggcagtgattgaaaacatggattattagctggttacaaatcttcatttgtacagatgagctgttgatttcatataagaggtggaagtaaattctgctttatgtgccctgtaaaaagcttctttgaatttaccttcagtgtcatgccttcagaaaaaaattccaagtttctggcataa

SEQ ID NO: 87633 - DNA, 664 bp, Homo sapiens
cttctatagaacaattaagagggggtcttcctccttaccctattggttctccttttctggactttgaaattgagaacttcatggttagtgaaaagattttggctaatatctcctccaaccttcaggttggagaggctttgttagatagccccttaatagggtgagaaggaagaccttccatctcccctccacrttagatgtaacacactctataccatcccaatgtcagaaagagaccgtcattcactttacttcattaattccaaagtccaatttgtgagtctgacaataccaatgtgcagagagaatttagttgtctagtttgtctatggtagcagacataatcagaaacaatgccctgtatttgaataagttcatttgtctgaatttgaataagtttgaaataggaaggccatactttctctctaaagtgctttaaaacatgtggaagtggtcaccccttacataagacagcatatttatatctatctttaagcataagtactccctaagtatttctttatcttatttgtgaggtagatgtattcagaaactcatcatgagatgaagaaaatactctttgtccattaatttactcatgcattacttactaaaaataatttccaggctcctgccatacgccagacagttttgtagacacgaa

SEQ ID NO: 87634 - DNA, 879 bp, Homo sapiens
gtaccccaagaaaattagtctaatttatagttatattcattttatccaaaaataaactacacagtttaggcatcttcctgttgtatctgtctgccatgtttttgcatgactttaaaaattggagtcctccaagaaaggcttgtcattattgagattattcataaaagctatcctaggctttgaaacattccaaaggaaaagttcaaaaaaatattttgagcatctggaactgttttgagaagtggaatactttataagcctcaaggcagtcattcttaacttcattagggctaccaatccttttgagaatttgatatctgttgaacatatggccctgtcaaatgcacataccaacatttaaacacgctacatttatttaagggatttgtaggcttctggaagctcattcatgaactgtctatgggtccttggactccaggtaggaagcctggctttaaaggcatacctatcaagctctaaatccttgaatatagctgctgcatctgcttcattcttcaccacaggaaagtgcctcatatttaataaacattgcttgaaacaatgtctagtaacaaawaagtcatattgttttataatcatattttgaacttcttactgtatatatattcatatagattaataaagtttgtattaagtatctgtcccatcatgttatgggataaaagatcccatttaccctgaggaaaggggactaacagaggaggactatttttgcctgatagagggctggggctatctggaggacttcccagagaaactgggggccgagagaggaaagccgaccatgcccacctgcattttatttaaatttacctccagggggtctttggatttattaaccgttcctggttttgcccc

SEQ ID NO: 87635 - DNA, 741 bp, Homo sapiens
ccaggagcaaaacagataaaggttacttccttagagagttgaatcatcctttctgatctttgctaccaaaccctcttcagcaaatctttctgtccagtttcctcacctccctttcctgctggtcttctcctaagccaattattgcacaacatccagcacaatccttttaatgtgcaggtctaatcatgtcatcctttcggttaatatcatcaatgacttttcattgctctcatacctcccatataactgtgcacaatttggcagagatatccgtcagctggcttcactctcctggatttatctgaattctatgaagtttcctggcccacagtggctttcatgtcacaatatgaaataacctttaggcttacctaagttttgttcaggaagtccctatacccactggaatgagcattgttttattcataaagatacctcttcacagcactttgtaattacgatttgtaattatgcaaaaatgagactcgattaaagtctatttattttcccaactaatrtgtgtatgcttcatgagagcacagcctccatcctctttgtccactattgtaattcaatatctgggaagaaatgcaattgaattgctggattaaatggataaatgatggtgtcaaggaaagaacagactgacctctcctttagaagtgatttttctatactcaaaatttgagttaaagtgtaattagaaatgatgaaaggatccataattacttttgtgagtct

SEQ ID NO: 87636 - DNA, 741 bp, Homo sapiens
ccaggagcaaaacagataaaggttacttccttagagagttgaatcatcctttctgatctttgctaccaaaccctcttcagcaaatctttctgtccagtttcctcacctccctttcctgctggtcttctcctaagccaattattgcacaacatccagcacaatccttttaatgtgcaggtctaatcatgtcatcctttcggttaatatcatcaatgacttttcattgctctcatacctcccatataactgtgcacaatttggcagagatatccgtcagctggcttcactctcctggatttatctgaattctatgaagtttcctggcccacagtggctttcatgtcacaatatgaaataacctttaggcttacctaagttttgttcaggaagtccctatacccactggaatgagcattgttttattcataaagatacctcttcacagcactttgtaattacgatttgtaattatgcaaaaatgagactcgattaaagtctatttattttcccaactaatatgtgtatgctycatgagagcacagcctccatcctctttgtccactattgtaattcaatatctgggaagaaatgcaattgaattgctggattaaatggataaatgatggtgtcaaggaaagaacagactgacctctcctttagaagtgatttttctatactcaaaatttgagttaaagtgtaattagaaatgatgaaaggatccataattacttttgtgagtct

SEQ ID NO: 87637 - DNA, 623 bp, Homo sapiens
agaatattctcagtactgttcaaaaacacaaaaggaagtcaagaaaaataattcacagggcacagggatagayataagactagaactatcaggaaaaacccaatttcacatttttgagaaatcatcttattactattgatgtctttaataattccataaaaatgatgtaacaatatatgaatactaatgaatcaccacttttatctatataaaaatttaatttactcagaaaagtgttatgcggctatttcgtggtgtcaaaccattggtttaggggatgttaatgcttgaccatgtttggcaaatcactgttagctgtagttttcagataggctgtatatgaaaaaccttactcttccactacttgtacagtcatccatttatgggtttacctattttttagttttggtacttttatctttttaaatctgatcaaacttaaagcacactaagttcgccatttttattgagatacaagtgcctggactggcgtatgtgctgtgcacacaagggtgacacgccaggcatgcttcccgccatcagaaagctccattctagttgcaggaggaaggcaagaaagacatctgttgcacaacatggtgactataattaataacaatgca

SEQ ID NO: 87638 - DNA, 623 bp, Homo sapiens
agaatattctcagtactgttcaaaaacacaaaaggaagtcaagaaaaataattcacagggcacagggatagatataagactagaactatcaggaaaaacccaatttcacatttttgagaaatcatcttattactattgatgtctttaataattccataaaaatgatgtaacaatatatgaatactaatgaatcaccacttttatctatataaaaatttaatttactcagaaaagtgttatgcggctatttcgtggtgtcaaaccattggtttaggggatgttaatgcttgaccatgtttggyaaatcactgttagctgtagttttcagataggctgtatatgaaaaaccttactcttccactacttgtacagtcatccatttatgggtttacctattttttagttttggtacttttatctttttaaatctgatcaaacttaaagcacactaagttcgccatttttattgagatacaagtgcctggactggcgtatgtgctgtgcacacaagggtgacacgccaggcatgcttcccgccatcagaaagctccattctagttgcaggaggaaggcaagaaagacatctgttgcacaacatggtgactataattaataacaatgca

SEQ ID NO: 87639 - DNA, 623 bp, Homo sapiens
agaatattctcagtactgttcaaaaacacaaaaggaagtcaagaaaaataattcacagggcacagggatagatataagactagaactatcaggaaaaacccaatttcacatttttgagaaatcatcttattactattgatgtctttaataattccataaaaatgatgtaacaatatatgaatactaatgaatcaccacttttatctatataaaaatttaatttactcagaaaagtgttatgcggctatttcgtggtgtcaaaccattggtttaggggatgttaatgcttgaccatgtttggcaaatcactgttagctgtagttttcagataggctgtatatgaaaaaccttactcttccactacttgtacagtcatccatttatgggtttacctattttttagttttggtacttttatctttttaaatctgatcaaacttaaagcacactaagttcgccatttttattgagatacaagtgcctggactggcgtatgtgctgtgcacrcaagggtgacacgccaggcatgcttcccgccatcagaaagctccattctagttgcaggaggaaggcaagaaagacatctgttgcacaacatggtgactataattaataacaatgca

SEQ ID NO: 87640 - DNA, 737 bp, Homo sapiens
agaaacacagcctgccagtctgtgtctttgcatttcagtgctaatattgcactagctgttgctgtcattcttgcatcaagttcacatgactcagtgacagggcaacaccattgttcaggttgaccaacctgtcactacggccagtggtctgccatgagcgtgtccgcaggtaggtgtgtttgtgtaaaatgactccatgtcatgtttcaaacaggtgtgcctcctctttacctaacaggcgataggctcctgcaaagccatgttggagagaatttctgtaaaccaaattttatttttctattgatttcttctggaaatttaggaattcttcgtgtctgatggattttttaatagagggttgtgcctggcatctcaggattgcgatccgtcctgaatgacaacaacaaaaacatcatttgttcctttgactcaatggctggcttgacgtgattcattcttttgtaaggaaacatatgatcaagccaccttctaatacacatctttcaggagtttggatgctgtttaaagtgagcatggtggctcatgtctaaagtyccaacactttgtgaggccaacaagggaggatcatttgaccccaggaatttaaggttatagtgagctatgattgtgccactgcactgtagcctgggtgtcagtatgagactttgtctctaaaattaaataagtaaataaaaaataaaggggacatgtcttcaaattttcttcttcctaattgc

SEQ ID NO: 87641 - DNA, 547 bp, Homo sapiens
cctctcaggccaaggaactggccctctgaaggtcccactgcccagcttgggagaaaaccacgtccaggtgaccatccatggcaaacctgacctggcacaggcaccctcacctgccaagaaggcctgttccaggccgggtgcggtggctcacgcctgtaatcccactactttgggagaccgaggtgggcagatcacttgaggtcaggagtttgagaccagcctggccaacatagtgaaaccccatctstactgaaaatacaaaaattagccgggcatgatggcgggcgcctgtaatcccagctactcaggaggctgaggcaggagaatcacttgaacccaggagtcagaggtcacccagcccatggagccaagacagaccccgcagtctgaatttgaccctgctgtcccatgcaggctagagtctaaggccctctcaggcccctagtgatgtcccctaagccacagtagtggctgcagggacagcccaaggttttcctctctttgttccagagaaagctctccctgcggggcctcagaaatggatccc

SEQ ID NO: 87642 - DNA, 742 bp, Homo sapiens
aatttaactgaaaaaacattcactgaatactgtgtgccaagttattatggtcttacattggtgtgccagcggggagacactgtcccacagcatgggcatacactatctggcccctaaccatgtataagaccattgatctatgccaaccagacaatacatgttcagaattttgaaaagaataggaaagctagggtcagccactctcatactacaaggaaatcagtaattcactctctgacataagtaagagtaggccaaggactgtttataactaacctcatcactcaggtgtactttctatttcatattattaataacaaattatactcattatcctgtatttataaatataatgtgcatcacatacagagtgaaagaaaaaatgaccaagggaaagaaaaagtagataaattgggagcaaaatgaacattgcttatgcatattgaaatccatgtcagtactagaaaataaagctattccatgccattgtttttgacaataaggcaayattttatgaaaaaatcataggggtagaaatttttccagaccataattgtgagtagtgttatagtaaataggtggaacagaagcagaccacctaacgactagtattttcaactctgcatgctatatatccgaaggacagatattgacctaaactgttaagaaaagttcaaggaaaatgcaactaagaaatatgataaaggatctgggaattatatgatatgatgaatgagtaaaa

SEQ ID NO: 87643 - DNA, 570 bp, Homo sapiens
cattcctttttatggctgcatagtattccacggtatttatgtgtcacattttctttatccaatccacttttgatgtgcacccagagggcataattttaagtgattgcctagtttccattatatagatatattttaaaaaatttatcacttttggtattatttcctcttatacagtgttatagataaygcttcttaaaaacataattaaatttgtaattttaatggaaatagagttgcttgaataagggagaacatataacactaaatgcctaatgttcctgaagatatatttcaccaaagtgtaatttcaacagcagcacatggtgatgctgatttttcaatactttatcaattatgaccattattatcttaaagtagcttccattttattaataaacactttagcaatgttttagttttcttttaaagtgtgagtttatatattttattattaaaaatgtgatttaaaaacagagtccatcacatagaatattctttcatacaataagattttttaaaaggtttgaagaatactgttctggcccacattaccttctattaggctggtgc

SEQ ID NO: 87644 - DNA, 799 bp, Homo sapiens
gcaataagtaagccacatatccgtaatttcagatgatctgttcttccagaggaaaatatttcagagtgcatgtcagatttttcatcacaatctataggctaaactctttcctttcattagaccaatattattaactcatggaagcctttctccctccttttatcttttattgkataatttagtcattttgaagaaaacaacactcatgttttgacctctggcactgtcaatttcctgggaatggcaagaacaggaacaaggccaggcttggaggagcagagcctgagatagcatgcatctgatatatttagtgaacctgtcttactccaatttttgtgcttaaatgctagcttcagaaagagttttcctctgtgagtgctgaaacaggatggctaatttggctgattgattttctggccaattcaaaaaatagtagagggataaggaggaaacgttttatacctcagtagctttgtagactgaatcatggcattttcttaatttcaagaagactgtcattaataaacacgaaaaacctctaacttcttcaaatatatttaacgtgactcagtagtgtgccgagaagatgcaatggaattctaaaacctacgtttgcactttttctgtctgctaatccacataatttctgactggaggtacacttggaatttactttatttggccttctgctgtttgatgtgccagaatctcccacagatacaggataattggtttagcgtttggggatctggccacaaggtggcagagcttctctgctcatgtagaatgtacgaaagga

SEQ ID NO: 87645 - DNA, 799 bp, Homo sapiens
gcaataagtaagccacatatccgtaatttcagatgatctgttcttccagaggaaaatatttcagagtgcatgtcagatttttcatcacaatctataggctaaactctttcctttcattagaccaatattattaactcatggaagcctttctccctccttttatcttttattgtawaatttagtcattttgaagaaaacaacactcatgttttgacctctggcactgtcaatttcctgggaatggcaagaacaggaacaaggccaggcttggaggagcagagcctgagatagcatgcatctgatatatttagtgaacctgtcttactccaatttttgtgcttaaatgctagcttcagaaagagttttcctctgtgagtgctgaaacaggatggctaatttggctgattgattttctggccaattcaaaaaatagtagagggataaggaggaaacgttttatacctcagtagctttgtagactgaatcatggcattttcttaatttcaagaagactgtcattaataaacacgaaaaacctctaacttcttcaaatatatttaacgtgactcagtagtgtgccgagaagatgcaatggaattctaaaacctacgtttgcactttttctgtctgctaatccacataatttctgactggaggtacacttggaatttactttatttggccttctgctgtttgatgtgccagaatctcccacagatacaggataattggtttagcgtttggggatctggccacaaggtggcagagcttctctgctcatgtagaatgtacgaaagga

SEQ ID NO: 87646 - DNA, 799 bp, Homo sapiens
gcaataagtaagccacatatccgtaatttcagatgatctgttcttccagaggaaaatatttcagagtgcatgtcagatttttcatcacaatctataggctaaactctttcctttcattagaccaatattattaactcatggaagcctttctccctccttttatcttttattgtataatttagtcattttgaagaaaacaacactcatgttttgacctctggcactgtcaatttcctgggaatggcaagaacaggaacaaggccaggcttggaggagcagagcctgagatagcatgcatctgatatatttagtgaacctgtcttactccaatttttgtgcttaaatgctagcttcagaaagagttttcctctgtgagtgctgaaacaggatggctaatttggctgattgattttctggccaattcaaaaaatagtagagggataaggaggaaacgttttatacctcagyagctttgtagactgaatcatggcattttcttaatttcaagaagactgtcattaataaacacgaaaaacctctaacttcttcaaatatatttaacgtgactcagtagtgtgccgagaagatgcaatggaattctaaaacctacgtttgcactttttctgtctgctaatccacataatttctgactggaggtacacttggaatttactttatttggccttctgctgtttgatgtgccagaatctcccacagatacaggataattggtttagcgtttggggatctggccacaaggtggcagagcttctctgctcatgtagaatgtacgaaagga

SEQ ID NO: 87647 - DNA, 799 bp, Homo sapiens
gcaataagtaagccacatatccgtaatttcagatgatctgttcttccagaggaaaatatttcagagtgcatgtcagatttttcatcacaatctataggctaaactctttcctttcattagaccaatattattaactcatggaagcctttctccctccttttatcttttattgtataatttagtcattttgaagaaaacaacactcatgttttgacctctggcactgtcaatttcctgggaatggcaagaacaggaacaaggccaggcttggaggagcagagcctgagatagcatgcatctgatatatttagtgaacctgtcttactccaatttttgtgcttaaatgctagcttcagaaagagttttcctctgtgagtgctgaaacaggatggctaatttggctgattgattttctggccaattcaaaaaatagtagagggataaggaggaaacgttttatacctcagtarctttgtagactgaatcatggcattttcttaatttcaagaagactgtcattaataaacacgaaaaacctctaacttcttcaaatatatttaacgtgactcagtagtgtgccgagaagatgcaatggaattctaaaacctacgtttgcactttttctgtctgctaatccacataatttctgactggaggtacacttggaatttactttatttggccttctgctgtttgatgtgccagaatctcccacagatacaggataattggtttagcgtttggggatctggccacaaggtggcagagcttctctgctcatgtagaatgtacgaaagga

SEQ ID NO: 87648 - DNA, 1175 bp, Homo sapiens
tcttgtctgatcagagtacaccgatgcgcagattggtgtcattaaaacatactgttaccagccgggagcaggggctcatgcytgtaatcccagcactttgggaggccaaggtgggtggatcacttgaggccaggaatttgagaccagccaggccaacacagcaaaaccctgtctctactaaaaatacaaaaaaattagccgggcatggtggcacacatctgtaatcccagctattcgggaggctgaggcaggagaattgcttgaacctggaagacaaggttgcagtgagctgagatcatgccactgcactccagcctagacaacacagtgtgactctgtctcaaataaataaataaataaataaataaataaataaataaatgttgttaccttcaaaattaactaggcccacaatgtttccaggaaagtattcttcttctctgtaatcacatctcactgccattttctaaaacttctcacatacctcagacttcctaacccagatcctcctccattcactctcttgggagacatttaatctctgtgtataacaagaaaaaagatcccattagaaggtaataggtgtttcactttctaccttcacactccaaagtatcacttaaatctaaactactgtaatccttttctccttcatttcaataaaattgaaaataactgtttttcctcctaccaaaactttgtccttctacccataatccacattccaatcccatctgtctcctcaaaactttgatccattgtttatacattctttccaaaagcatgtaaatataccctaatttgtataaaccctaccattacctcttcaacatcctcatccagttaacaccatgactcttttctcctctttagaggatccagcaacctctagaaggagatttctatattcaaattttttcttccttgtctcatcacaatgcctcttcccacagcagttgaccttttgctgaaaagaccaaaatcatgatttttgtgttgttaaaaaaatcagtagttcaatagcacagtatggtgactatagttatcaataatttattgtatatttcaaaatagctagatttggaatgttgtcaacacaaggaaataataaatgtttgaagcaatggttaactcaattaccatgatttgataattacatgttgtatgtatgtatc

SEQ ID NO: 87649 - DNA, 1175 bp, Homo sapiens
tcttgtctgatcagagtacaccgatgcgcagattggtgtcattaaaacatactgttaccagccgggagcaggggctcatgcctgtaatcccagcactttgggaggccaaggtgggtggatcacttgaggccaggaatttgagaccagccaggccaacacagcaaaaccctgtctctactaaaaatacaaaaaaattagccgggcatggtggcacacatctgtaatcccagctattcgggaggctgaggcaggagaattgcttgaacctggaagacaaggttgcagtgagctgagatcatgccactgcactccagcctagacaacasagtgtgactctgtctcaaataaataaataaataaataaataaataaataaataaatgttgttaccttcaaaattaactaggcccacaatgtttccaggaaagtattcttcttctctgtaatcacatctcactgccattttctaaaacttctcacatacctcagacttcctaacccagatcctcctccattcactctcttgggagacatttaatctctgtgtataacaagaaaaaagatcccattagaaggtaataggtgtttcactttctaccttcacactccaaagtatcacttaaatctaaactactgtaatccttttctccttcatttcaataaaattgaaaataactgtttttcctcctaccaaaactttgtccttctacccataatccacattccaatcccatctgtctcctcaaaactttgatccattgtttatacattctttccaaaagcatgtaaatataccctaatttgtataaaccctaccattacctcttcaacatcctcatccagttaacaccatgactcttttctcctctttagaggatccagcaacctctagaaggagatttctatattcaaattttttcttccttgtctcatcacaatgcctcttcccacagcagttgaccttttgctgaaaagaccaaaatcatgatttttgtgttgttaaaaaaatcagtagttcaatagcacagtatggtgactatagttatcaataatttattgtatatttcaaaatagctagatttggaatgttgtcaacacaaggaaataataaatgtttgaagcaatggttaactcaattaccatgatttgataattacatgttgtatgtatgtatc

SEQ ID NO: 87650 - DNA, 1175 bp, Homo sapiens
tcttgtctgatcagagtacaccgatgcgcagattggtgtcattaaaacatactgttaccagccgggagcaggggctcatgcctgtaatcccagcactttgggaggccaaggtgggtggatcacttgaggccaggaatttgagaccagccaggccaacacagcaaaaccctgtctctactaaaaatacaaaaaaattagccgggcatggtggcacacatctgtaatcccagctattcgggaggctgaggcaggagaattgcttgaacctggaagacaaggttgcagtgagctgagatcatgccactgcactccagcctagacaacacagtgtgactctgtctcaaataaataaataaataaataaataaataaataaataaatgttgttaccttcaaaattaactaggcccacaatgtttccaggaaagtattcttcttctctgtaatcacatctcactgccattttctaaaacttctcacatacctcagacttcctaacccagatcctcctccattcactctcttgggagacatttaatctctgtgtataacaagaaaaaaratcccattagaaggtaataggtgtttcactttctaccttcacactccaaagtatcacttaaatctaaactactgtaatccttttctccttcatttcaataaaattgaaaataactgtttttcctcctaccaaaactttgtccttctacccataatccacattccaatcccatctgtctcctcaaaactttgatccattgtttatacattctttccaaaagcatgtaaatataccctaatttgtataaaccctaccattacctcttcaacatcctcatccagttaacaccatgactcttttctcctctttagaggatccagcaacctctagaaggagatttctatattcaaattttttcttccttgtctcatcacaatgcctcttcccacagcagttgaccttttgctgaaaagaccaaaatcatgatttttgtgttgttaaaaaaatcagtagttcaatagcacagtatggtgactatagttatcaataatttattgtatatttcaaaatagctagatttggaatgttgtcaacacaaggaaataataaatgtttgaagcaatggttaactcaattaccatgatttgataattacatgttgtatgtatgtatc

SEQ ID NO: 87651 - DNA, 1175 bp, Homo sapiens
tcttgtctgatcagagtacaccgatgcgcagattggtgtcattaaaacatactgttaccagccgggagcaggggctcatgcctgtaatcccagcactttgggaggccaaggtgggtggatcacttgaggccaggaatttgagaccagccaggccaacacagcaaaaccctgtctctactaaaaatacaaaaaaattagccgggcatggtggcacacatctgtaatcccagctattcgggaggctgaggcaggagaattgcttgaacctggaagacaaggttgcagtgagctgagatcatgccactgcactccagcctagacaacacagtgtgactctgtctcaaataaataaataaataaataaataaataaataaataaatgttgttaccttcaaaattaactaggcccacaatgtttccaggaaagtattcttcttctctgtaatcacatctcactgccattttctaaaacttctcacatacctcagacttcctaacccagatcctcctccattcactctcttgggagacatttaatctctgtgtataacaagaaaaaagatcccattagaaggtaataggtgtttcactttctaccttcacactccaaagtatcacttaaatctaaactactgtaatccttttctccttcatttcaataaaattgaaaataactgtttttcctcctaccaaaactttgtccttctacccataatccacattccaatcccatctgtctcctcaaaactttgatccattgtttatacattctttccaaaagcatgtaaatataccctaatttgtataaaccctaccattacctcttcaacatcctcatccagttaacaccatgactcttttctcctctttagaggatccagcaacctctagaaggagatttctatattcaaattttttcttccttgtctcatcacaatgcctcttcccayagcagttgaccttttgctgaaaagaccaaaatcatgatttttgtgttgttaaaaaaatcagtagttcaatagcacagtatggtgactatagttatcaataatttattgtatatttcaaaatagctagatttggaatgttgtcaacacaaggaaataataaatgtttgaagcaatggttaactcaattaccatgatttgataattacatgttgtatgtatgtatc

SEQ ID NO: 87652 - DNA, 1175 bp, Homo sapiens
tcttgtctgatcagagtacaccgatgcgcagattggtgtcattaaaacatactgttaccagccgggagcaggggctcatgcctgtaatcccagcactttgggaggccaaggtgggtggatcacttgaggccaggaatttgagaccagccaggccaacacagcaaaaccctgtctctactaaaaatacaaaaaaattagccgggcatggtggcacacatctgtaatcccagctattcgggaggctgaggcaggagaattgcttgaacctggaagacaaggttgcagtgagctgagatcatgccactgcactccagcctagacaacacagtgtgactctgtctcaaataaataaataaataaataaataaataaataaataaatgttgttaccttcaaaattaactaggcccacaatgtttccaggaaagtattcttcttctctgtaatcacatctcactgccattttctaaaacttctcacatacctcagacttcctaacccagatcctcctccattcactctcttgggagacatttaatctctgtgtataacaagaaaaaagatcccattagaaggtaataggtgtttcactttctaccttcacactccaaagtatcacttaaatctaaactactgtaatccttttctccttcatttcaataaaattgaaaataactgtttttcctcctaccaaaactttgtccttctacccataatccacattccaatcccatctgtctcctcaaaactttgatccattgtttatacattctttccaaaagcatgtaaatataccctaatttgtataaaccctaccattacctcttcaacatcctcatccagttaacaccatgactcttttctcctctttagaggatccagcaacctctagaaggagatttctatattcaaattttttcttccttgtctcatcacaatgcctcttcccacagcagttgaccttttgctgaaaagaccaaaatcatgatttttgtgttgttaaaaaaatcagtagttcartagcacagtatggtgactatagttatcaataatttattgtatatttcaaaatagctagatttggaatgttgtcaacacaaggaaataataaatgtttgaagcaatggttaactcaattaccatgatttgataattacatgttgtatgtatgtatc

SEQ ID NO: 87653 - DNA, 709 bp, Homo sapiens
atggacagaaaagatttgtcctcaagggtacatccaagatttgctttaatctgtcatataatggaaatttgaaacagttattagcacaggttcacagcttctcaaaactaaaaaccattgtggaaaagaggctaagcacaaagatgtaagcactaaatgagtataactgctttgcagacagtttcatgtcagtggacatgtgccatttttcttctttttttttttttttctgcccagtgcagctgccacatattattcaatgcacaactttacagggcatcattcacatcttagtaagacatggagaaagacaatgctgagataaagaaaagcagatttccgagagcatcatcagagcctacaaattcagctctgcctggagctgcaaaagtcaaaatattctttttggggatcaagccagcatgaattgagattctgtcatttacagccaatggattcataattctcatagccaaaagggagagggatacttttggttctctgmtattttatgagctgaatttatggtccacagaagcattttctactcaaaataactagagttatgtaaagacaaataatcattggtctactctcattatgggaaataagagccataataaccctatgtgtgttttatgaatttcaaatgggaaaaattttgaaaactactaaaaattcataactctacattataaacataagaact

SEQ ID NO: 87654 - DNA, 1640 bp, Homo sapiens
gaaaagtcttaaaggattaagttccctggcaccctggatgcctgaagtccagatacacttctgctcttgccaaggttattggagtcagtgcatttctcttcttgcctaagcacatttgagttacatttctgtcacttgtaacatcaatgagacgttaaagagttaattcactaggaaatttttaggaacaccttgctggcttacaagaagcatcaattctacgaattactttctcaggaatttctctaaatatcctgaagagggcactgtttccattcataacttctgtccaaacccacccccattcttttgtttttttttaatttttctttttatttcttttttttctttttttttttatgaaagggagggactgagtaaattgcaggatgtgattctaattggttggaacatcttttgaaatcgtgtttctgtagagaaagaaaaactaccatatttggatagccctggccaactttcaaggctcctaaatctgagttttcagtgaactggacagaaaaaaaaaatgaagaagctactagcaatgattctgtggcttcaactagaccgtgagctgggggttcattgaaaagggagccatgggaggaaaggaattgtccatacaatgtttgggggtagagacaaggttcaatgcgactcatttgggttccctcgggaggaacaggattattggggtaaccagtgaatgcctccttctgaaatgttctctttggacagggttaagtggagagctgaaagtggaacaaaaccctctgttcctgagcatgcaggagggaaaaaactataccatctactgcaattattcaaccacttcagacagactgtattggtacaggcaggatcctgggaaaagtctggaatctctgtttgtgttgctatcaaatggagcagtgaagcaggagggacgattaatggcctcacttgataccaaagcccgtctcagcaccctccacatcacagctgccgtgcatgacctctctgccacctacttctgtgccgtggacacacagtgctcccctgacgccaccagtctgtacccaaacctgcagctggtgggcccactcctcctgcaggaactatgactgtgaggcttcgttcactgtctgtrcatttctttctgcaaggaaaattctgagatgggtgaaaaaagatgctgttttaccttcttaactgtggaatattttttaaaaggaaaatgtgttcaggctgagggaagattcctaaccatgtatttcctgagaatatgaggtctcattctttactgcctcacagtcagaatttgttagtcttccattatggaataattttacatgtagtgcaactgtcacaaataattcctatgaaatatggaatcattatttgttttatatgtgaatgtaacatatggcatttaccaatgaaagaaagaataaatgctttataaaagaatggtctatgtgaggttccttacctagtgtttcctgctaaaatattgactacagtagtcagataatatccgtgtgatctaagtacctgtttatctcaatgtgtggagagtctctgggaaatgtatcctttggctggatttactccaaaactatctgagggtccttgccaaccagaagaatattatatttttt

SEQ ID NO: 87655 - DNA, 1640 bp, Homo sapiens
gaaaagtcttaaaggattaagttccctggcaccctggatgcctgaagtccagatacacttctgctcttgccaaggttattggagtcagtgcatttctcttcttgcctaagcacatttgagttacatttctgtcacttgtaacatcaatgagacgttaaagagttaattcactaggaaatttttaggaacaccttgctggcttacaagaagcatcaattctacgaattactttctcaggaatttctctaaatatcctgaagagggcactgtttccattcataacttctgtccaaacccacccccattcttttgtttttttttaatttttctttttatttcttttttttctttttttttttatgaaagggagggactgagtaaattgcaggatgtgattctaattggttggaacatcttttgaaatcgtgtttctgtagagaaagaaaaactaccatatttggatagccctggccaactttcaaggctcctaaatctgagttttcagtgaactggacagaaaaaaaaaatgaagaagctactagcaatgattctgtggcttcaactagaccgtgagctgggggttcattgaaaagggagccatgggaggaaaggaattgtccatacaatgtttgggggtagagacaaggttcaatgcgactcatttgggttccctcgggaggaacaggattattggggtaaccagtgaatgcctccttctgaaatgttctctttggacagggttaagtggagagctgaaagtggaacaaaaccctctgttcctgagcatgcaggagggaaaaaactataccatctactgcaattattcaaccacttcagacagactgtattggtacaggcaggatcctgggaaaagtctggaatctctgtttgtgttgctatcaaatggagcagtgaagcaggagggacgattaatggcctcacttgataccaaagcccgtctcagcaccctccacatcacagctgccgtgcatgacctctctgccacctacttctgtgccgtggacacacagtgctcccctgacgccaccagtctgtacccaaacctgcagctggtgggcccactcctcctgcaggaactatgactgtgaggcttcgttcactgtctgtacatttctttctgcaaggaaaattctgagatgggtgaaaaaagatgctgttttaycttcttaactgtggaatattttttaaaaggaaaatgtgttcaggctgagggaagattcctaaccatgtatttcctgagaatatgaggtctcattctttactgcctcacagtcagaatttgttagtcttccattatggaataattttacatgtagtgcaactgtcacaaataattcctatgaaatatggaatcattatttgttttatatgtgaatgtaacatatggcatttaccaatgaaagaaagaataaatgctttataaaagaatggtctatgtgaggttccttacctagtgtttcctgctaaaatattgactacagtagtcagataatatccgtgtgatctaagtacctgtttatctcaatgtgtggagagtctctgggaaatgtatcctttggctggatttactccaaaactatctgagggtccttgccaaccagaagaatattatatttttt

SEQ ID NO: 87656 - DNA, 1640 bp, Homo sapiens
gaaaagtcttaaaggattaagttccctggcaccctggatgcctgaagtccagatacacttctgctcttgccaaggttattggagtcagtgcatttctcttcttgcctaagcacatttgagttacatttctgtcacttgtaacatcaatgagacgttaaagagttaattcactaggaaatttttaggaacaccttgctggcttacaagaagcatcaattctacgaattactttctcaggaatttctctaaatatcctgaagagggcactgtttccattcataacttctgtccaaacccacccccattcttttgtttttttttaatttttctttttatttcttttttttctttttttttttatgaaagggagggactgagtaaattgcaggatgtgattctaattggttggaacatcttttgaaatcgtgtttctgtagagaaagaaaaactaccatatttggatagccctggccaactttcaaggctcctaaatctgagttttcagtgaactggacagaaaaaaaaaatgaagaagctactagcaatgattctgtggcttcaactagaccgtgagctgggggttcattgaaaagggagccatgggaggaaaggaattgtccatacaatgtttgggggtagagacaaggttcaatgcgactcatttgggttccctcgggaggaacaggattattggggtaaccagtgaatgcctccttctgaaatgttctctttggacagggttaagtggagagctgaaagtggaacaaaaccctctgttcctgagcatgcaggagggaaaaaactataccatctactgcaattattcaaccacttcagacagactgtattggtacaggcaggatcctgggaaaagtctggaatctctgtttgtgttgctatcaaatggagcagtgaagcaggagggacgattaatggcctcacttgataccaaagcccgtctcagcaccctccacatcacagctgccgtgcatgacctctctgccacctacttctgtgccgtggacacacagtgctcccctgacgccaccagtctgtacccaaacctgcagctggtgggcccactcctcctgcaggaactatgactgtgaggcttcgttcactgtctgtacatttctttctgcaaggaaaattctgagatgggtgaaaaaagatgctgttttaccttcttaactgtggaatattttttaaaaggaaaatgtrttcaggctgagggaagattcctaaccatgtatttcctgagaatatgaggtctcattctttactgcctcacagtcagaatttgttagtcttccattatggaataattttacatgtagtgcaactgtcacaaataattcctatgaaatatggaatcattatttgttttatatgtgaatgtaacatatggcatttaccaatgaaagaaagaataaatgctttataaaagaatggtctatgtgaggttccttacctagtgtttcctgctaaaatattgactacagtagtcagataatatccgtgtgatctaagtacctgtttatctcaatgtgtggagagtctctgggaaatgtatcctttggctggatttactccaaaactatctgagggtccttgccaaccagaagaatattatatttttt

SEQ ID NO: 87657 - DNA, 1640 bp, Homo sapiens
gaaaagtcttaaaggattaagttccctggcaccctggatgcctgaagtccagatacacttctgctcttgccaaggttattggagtcagtgcatttctcttcttgcctaagcacatttgagttacatttctgtcacttgtaacatcaatgagacgttaaagagttaattcactaggaaatttttaggaacaccttgctggcttacaagaagcatcaattctacgaattactttctcaggaatttctctaaatatcctgaagagggcactgtttccattcataacttctgtccaaacccacccccattcttttgtttttttttaatttttctttttatttcttttttttctttttttttttatgaaagggagggactgagtaaattgcaggatgtgattctaattggttggaacatcttttgaaatcgtgtttctgtagagaaagaaaaactaccatatttggatagccctggccaactttcaaggctcctaaatctgagttttcagtgaactggacagaaaaaaaaaatgaagaagctactagcaatgattctgtggcttcaactagaccgtgagctgggggttcattgaaaagggagccatgggaggaaaggaattgtccatacaatgtttgggggtagagacaaggttcaatgcgactcatttgggttccctcgggaggaacaggattattggggtaaccagtgaatgcctccttctgaaatgttctctttggacagggttaagtggagagctgaaagtggaacaaaaccctctgttcctgagcatgcaggagggaaaaaactataccatctactgcaattattcaaccacttcagacagactgtattggtacaggcaggatcctgggaaaagtctggaatctctgtttgtgttgctatcaaatggagcagtgaagcaggagggacgattaatggcctcacttgataccaaagcccgtctcagcaccctccacatcacagctgccgtgcatgacctctctgccacctacttctgtgccgtggacacacagtgctcccctgacgccaccagtctgtacccaaacctgcagctggtgggcccactcctcctgcaggaactatgactgtgaggcttcgttcactgtctgtacatttctttctgcaaggaaaattctgagatgggtgaaaaaagatgctgttttaccttcttaactgtggaatattttttaaaaggaaaatgtgttcaggctgagggaagattcctaaccatgyatttcctgagaatatgaggtctcattctttactgcctcacagtcagaatttgttagtcttccattatggaataattttacatgtagtgcaactgtcacaaataattcctatgaaatatggaatcattatttgttttatatgtgaatgtaacatatggcatttaccaatgaaagaaagaataaatgctttataaaagaatggtctatgtgaggttccttacctagtgtttcctgctaaaatattgactacagtagtcagataatatccgtgtgatctaagtacctgtttatctcaatgtgtggagagtctctgggaaatgtatcctttggctggatttactccaaaactatctgagggtccttgccaaccagaagaatattatatttttt

SEQ ID NO: 87658 - DNA, 591 bp, Homo sapiens
tggatccgggaggcagaggttgcagtgagccaagatcacacactgccctccagcctgggtgacagagcgagactctggctcaaacatacgtgcgtgtgtgtgtgtgtgtgtgtgtrtatgtgtgcgtgtgtatacccatgtacaccatgagaaagtctgagaatcactgctttccagattggacatgggctgtggtagcccgggcactgctagctggctttaggacttgaagaagacaaggtctgctgatctagccccatcatcccgcaccatcatgcttagtgctgtggaaatccacccagtacagtagcccagcctcccagctgccctctcccatcaccccggaccctgtgatctccatgccaccctcacctgccctcccctctgctctccctcctgccaccccgcatcgcggagaagctctcctgaaattaattagtgtggcgtgtttacggtctctctcgcctccatcccgtcagaccccactcttggaacagagggcatggaagacagctttgccacttgttagctgtatcatcttgagaaaggacttctcttctctgagcctcagtttccccttattgaaaacac

SEQ ID NO: 87659 - DNA, 591 bp, Homo sapiens
tggatccgggaggcagaggttgcagtgagccaagatcacacactgccctccagcctgggtgacagagcgagactctggctcaaacatacgtgcgtgtgtgtgtgtgtgtgtgtgtgtatgtgtgcgtgtgtatacccatgtacaccatgagaaagtctgagaatcactgctttccagattggacatgggctgtggtagcccgggcactgctagctggctttaggacttgaagaagacaaggtctgctgatctagccccatcatcccgcaccatcatgcttagtgctgtggaaatccacccagtacagtagcccagcctcccagctgccctytcccatcaccccggaccctgtgatctccatgccaccctcacctgccctcccctctgctctccctcctgccaccccgcatcgcggagaagctctcctgaaattaattagtgtggcgtgtttacggtctctctcgcctccatcccgtcagaccccactcttggaacagagggcatggaagacagctttgccacttgttagctgtatcatcttgagaaaggacttctcttctctgagcctcagtttccccttattgaaaacac

SEQ ID NO: 87660 - DNA, 658 bp, Homo sapiens
ctgcactccagcctaggcgatagagtgagactctgtctcaaacaataaaaataagtttccttaatggctggctttcaggaacataggctatgaggtggagcaatttttggtaaagggggaatgctgaatggattttttatgtaccagcaaacatggtatattagcagttacagtgcaggaccctgtggaatgggccagggaaaaatgttgacattccttttccttttatttggcacccaagaaaacagtttggttgtttggtaccttgggttccagttttgtgctttgcctctggtcttccagaaatgggcaagtatagggctcagaactaaattcccaggggccgtttgtattctagatgatagaactggaaagatgttaggcttttagaaagaaccaaatattgctaaatgcatccaaactcgggataatgaagtcttggcaaagacctcaatcctcgtgacttgaatcaggcatttcaagttaatccaaaagtttgagttaactggtgccttcrgtcaatttaacctcgagtttatcaagcagcttccaagtgacttgacccataaaagaccttgattttgaaagaaaaatatcttgctgacgtctctccaaaagtataaccgaatccatcctaattaaagattgatctggaaga

SEQ ID NO: 87661 - DNA, 1526 bp, Homo sapiens
ctccctgtaattaacataaaagctgaaaggccaaattctttgccctaggctttcaagattttttttttttttttttttgagaccaagtctcactttgtcacccagcggtgcgatctcagctcactgcaacctccgcctcccggattcaaacaattttcctgcataagcctctcaagtagctgggatcgcaggtgcccaccaccattcctggctaatttttgtatttttagtagagatggggtttcaccatgttggccaggctggtcttgaattcctgacttcaggtgatccacccatctcggtctcccaaagtgtcaaaattcacttaaaccccaagaaacaaaccaaaaaaaaaaaaaaaaaaaaaaarggtggcagtttttttctcttctgagacaacgtcgtgctgtcacccaggatggagtgcagtgttggaatctcagctcactcagcctcaacctcccaggctgaagcaatcctcccacctctcagcctcctgagtagctgggaccaccagtgtacaccatcaggcctggctaatttttgcattcttgtagaggccaagtcggggcagggggtttcaccatgttgcccgggctggtgtcagactcctgagctcaagtaatctcccaccttggcctcccaaagcactgggattacaggtatgagcacccggccaaaagagaaggcagtttccaagtgctccttaatttttcgagttaaggaaaaaacacacatatcaccctaatttcccaaatttcctagaggaaaaacggtaaaaggaaagagacatacatagggttcagagcagggcttcgagtcagagctctgagtgtctggcagtaactcccacaggaagctctaatgattcccagggatgctaaaggagcagccacacctaaaactcaccacactgctatgaaaggggctggacgcattggctcatgcctgtaatcccagaactttgggaggccaacctgggaggatcacttgaggccaggagtttaagaccagcctgggcaacacagcgatacccacattactacaaaaaaatgaaagtatcagccaggcatagtggcgcacacctgtggtccaagctcctcgggaagctaaggtgagaggatcgcttgaacccaggattttgaggctgcagtgagttgtgatcataccactacactccagcctgagcaacagagcaagaccctgtctctaaaaaaaaagaaaaaaagaagagagggaaggaactagatcaacccccttcacacatcctgaaagacaggcaggaaggcaccaaacgccaggaaagtgtggtcttaccccgactttccgcagtaggtctcccacaatgttgagggctgatatccgggccgcaggtgtgaggggggtccccccggtggagtcgtccaggcctgggtgtgcaaagggaagagcatgtaactcaccaacctatagtcatgtctgtgcgttaacatcgctagatccaaaaccacgggacaggagggacactgacgcctttcctcggatcc

SEQ ID NO: 87662 - DNA, 545 bp, Homo sapiens
actgcctctgtgcctgcctgtactgctgatgctccagtggataactcagcatcccagcctaggcccaatgccactgaagatggacctgccccctggggacccaggrgtcctaccactcagctgtccccaggagtgcccagaccctcattcttatccaggacctaggagccctacccctggccttccctcatcagccgtaaatgatgatttactgctgttaccatcatcactgccttcagtgaccaagggccttccaaggtgccagctctggaacgaaggatgcccttgggaggtgatgacactcaggtacacgggtgctcaacagattgcttcctcctatcctcagacggtctttgcatgcatgcagccattggcactcccattgtgtggaaggaaaccagcccagggtcacacagctggtcagcagcaacatagctggtctcaaatctaaggtgcctgaccatgcctccatgagggaccgcctccaagggaggttgatcctggctttggggagcctttcctgggctgcacgaataacctccatt

SEQ ID NO: 87663 - DNA, 592 bp, Homo sapiens
aagacaagaggccaggcgcagtggctcatgcctgtaatcccagcactttaggagactgaggtgagcagatygtgaggtcagtagttcaagacccgcctggccaacatggtgaaaccccatctctactaaaaatacaaaaattagctgggcatggaggcgcatacctgtaatcccagctactcaggaggctgaggcaggagaattgcttgaaccgggaggcagaggtttcagtgagccaagatcatgccactgcattccagcctgggtgacagagcaagactccatctcaaaaaaaattaaaagacaaaatgtggacacacacatggccccagcaagcaagattgattactaacttcgtggtggcgtgcacatgcacacgatgttccacaagctcatcatctattcgagtcaagagtattcagttatcagcctcagaaatccagaaggaacctcacatcccaggagcctctggcatttcagggcctttcactccaaggagccgcctccaccgggccttccccagcaggatgtatatggccctgtctgtgtgctaggaggagaagggcgggcccgtgtgctgtctggtgctagg

SEQ ID NO: 87664 - DNA, 536 bp, Homo sapiens
tgatatgaggaacataatccatggtgtgcttagcagcccagagtgtagcagacagttcttgactcatgcagttgggggggtgagactggagacacttgtggaaggtactggctgttgaggctgtgctatagcctctccaaaaccccatagatgaatgtcagacaaatatactgccactatgaagaatattaaaagttagcagaattcataaacactcgcaataggcagcctgaaggtttaaattttagcatcatgacatatgacagtttgaagagctgtagttaaatgcacacaaaagagaattgaaacctgaacaagaaaaaagagactctcagaaatcattagataacttttttaaaagcattgaatgggatgtctagaaatgatccctaaaatgactraaagaaagcagataaattgaagagcagattagatgctcattgaagagattattattgacttcaaagacaaatcttaagaagttacccaaaacaacacaaaaaattaaatgtataatatgaaacagagaggaagca

SEQ ID NO: 87665 - DNA, 536 bp, Homo sapiens
tgatatgaggaacataatccatggtgtgcttagcagcccagagtgtagcagacagttcttgactcatgcagttgggggggtgagactggagacacttgtggaaggtactggctgttgaggctgtgctatagcctctccaaaaccccatagatgaatgtcagacaaatatactgccactatgaagaatattaaaagttagcagaattcataaacactcgcaataggcagcctgaaggtttaaattttagcatcatgacatatgacagtttgaagagctgtagttaaatgcacacaaaagagaattgaaacctgaacaagaaaaaagagactctcagaaatcattagataacttttttaaaagcattgaatgggatgtctagaaatgatccctaaaatgactaaaagaaagcagataaattgaagagcagattaratgctcattgaagagattattattgacttcaaagacaaatcttaagaagttacccaaaacaacacaaaaaattaaatgtataatatgaaacagagaggaagca

SEQ ID NO: 87666 - DNA, 1043 bp, Homo sapiens
cagacaagttcagagcacatttccagttacagggaacagagcacaggcctccaagtgtccatggagcagcgtgcaaattgcagggatgagtagagtaaaacctctacatgcagcacagcattcctggcaaacacaggggaccacagtacacatgctgtggaatacacccaagtatgcatcagacacttgtttggtaaacagtaaatgtgtaagatcaattaccttgagagggccatctgtgctccagacatgtggtttgtgtgaggagacggctaccactcactatcttcagaggaaaacagggctcagggcttgcacacaatggacagatacacatgggtcacccaaaasgtcactgcatacaaacatcactttgttcaacatggattttgtttttatggagtccaaatgcagaccctagttcaccttacagccttgggtttgtctgctttgggagatatatatccagttgatagacagacaagacagatacattttttccctttcttaccacaatgtcaatgcctcatctgaatatcatcattactcaagagtcaagggaagaaccaaacgcttcatataaacagggctgggctgggctagatggggagtgttagtttccagtgttttctgtctccattcagatcattcctatcaaagcccagctggtcacctcaagccaagacacagacataaggatcccaatggccttccagatggctgcttccacctcccatcttggccactaagactctttacacaggaaagtgagtcaccccagtgagaagggttgccagcggaaatagggcatgaaaatcacagataaccatgggatttcttccaagtggtcagtgtaaaataaaccaccaccaccaccaccgaaaacacaaaagaagcaaaaaaagtgcttattcaaaatccaagacaaaatactgtgtgagagtcaggccacggggttgccttttctcaggccacacagctttcccagtccgtttgctcgcatggaaccgtaagatgtgaaggcctgcagagcgtgtgcttgg

SEQ ID NO: 87667 - DNA, 775 bp, Homo sapiens
tcccaagatgaaatacagaatgtgaaatgaagaattgaactgtgatatcgtttggctctgttgacctaaaagttatgatacctcagtagtaagaagcacccaaatctcatctcaaattataatccccataatccacacatattgagagagaaaccaggtgggaggtgattgtatcatgggagtagtttcccctatgctgttctcatgatagtaagtgggttcttatgagatcttatggatttataaggggatcttcccccttggctccttattcttctctctcctgctgccatgtgaagaaggcccttgcttccccttcaccttctgccatatagtaagtttcctgaggcctcccctgccatgcaggattgtgagtaaattaaacctcttttctttaaaaattacccagtcttggatatttctttrtatcagtgtgagaatggactaatacaaaccgtattacaaatgtgtgatgaaaggagatgggagaaaagttaccaacctaagtaactttggaaatgagtgttttttgctttagattgtaggactaaagacagtaagaactgcacataagccttgtactctagttgatacatttgttttccacagggatatgggttagcaaatttgatactaccatacatgtttactggaattcaacaatcaggtaaatggaggcatatggtgggagccagatttctcacaattggagtgggtaggtacacatatgtaaaaggacaaggctagaatgacctatgtggtaatgaagacttga

SEQ ID NO: 87668 - DNA, 1674 bp, Homo sapiens
tttctatctatgtggacttggaaattatctaccttctttttttttttttgagacggagtctcattctgtcacccaggctggagtgcastggcgcaatcagctcactacaacctccgcctcccgggttcaagccaattctcctgtctcagcctcccgagtagctaggattacaggcgcatgccagcacacctggctgatttttgtatttttagtagaaacaggatttcaccgtgttggccagggtggtctcaaactcctgacctcaggtgatccacccaccttggcctcccaaagtgctgggattacaggcgtgagccactgctcccggcctatctagcctctttatgctatggttttctcatctgcaatgagaatgaagatgaaaaaggggtaatgaagatgaaaaagggattatgaagattaaatcaggtaatccatgtaaggtgcttagcgagagagtcaatctatggcagctaatatataactagcaaactcttaatgcatttcatagttgaagacatcaacattaaatatttttgtcttttattaatttttaattctcttttttaaaacagcagtattttataagtcatcaacgatggttaatttgataattaaaataaataagattattactttccttttctgttcatgtaaaaaaatctttccaagtgaaaatatgatcactagaggaagagaaaacatttcctgttattattcttattttatatgtgttttaaagactattctcttactttggttgaaatgcaaaacttcatttgtccatgtctacaagaaatattgggtttatttgtttaagagcttagatctactaaaagatttgagaacttattaaaagaggagtcatttggcaattaataagatatgtaatatacccaagatgctggaaaaagtgacaatgtgctcaaagttaagtaaattttactcccttatcccagaccccagtgcatataaaatcccaagcatgagtgaatgacaaggggaaaaataacagaagactgaagttattatctagaaaattctggccagaaattgacataaatcaaaaatatatttacagtgtttatcatctggatattttttgaaaaaataaaaaaattacagagaaaactcaccaacaaagtcacagggtgtcaaaatctggagagatttgcttaagctagatatctgccccaaagagaaaaaaactactgaggtttaaatagccaaataaggggtaactaacattatgaagatagtgaggacagtcaatgagagattaatttaaataaacacacatgtttagtctgaaaagtcaaggtgcaaaagatgtgatttacattttaacccttgtgaagactacaaattagagtaaccactaagtcaatgccaactcataaaatattggtagctagggggaagggcttgaagtttaaacagagtggtacaagtaggacacaactctactttgcccagcaaataagtgtctagaactttatgtcacctaaaacagatttttgcactcttgataagcatgctgaggacaggaaccctgttttacgcatttctgaaccacttacctgcttcccccagaaccaagacccaagtccaatataaactagttactaacagaaggtctgttaaataagtgaataagtaaaatgatggtgaact

SEQ ID NO: 87669 - DNA, 1674 bp, Homo sapiens
tttctatctatgtggacttggaaattatctaccttctttttttttttttgagacggagtctcattctgtcacccaggctggagtgcactggcgcaatcagctcactacaacctccgcctcccgggttcaagccaattctcctgtctcagcctcccgagtagctaggattacaggcgcatgccagcacacctggctgatttttgtatttttagtagaracaggatttcaccgtgttggccagggtggtctcaaactcctgacctcaggtgatccacccaccttggcctcccaaagtgctgggattacaggcgtgagccactgctcccggcctatctagcctctttatgctatggttttctcatctgcaatgagaatgaagatgaaaaaggggtaatgaagatgaaaaagggattatgaagattaaatcaggtaatccatgtaaggtgcttagcgagagagtcaatctatggcagctaatatataactagcaaactcttaatgcatttcatagttgaagacatcaacattaaatatttttgtcttttattaatttttaattctcttttttaaaacagcagtattttataagtcatcaacgatggttaatttgataattaaaataaataagattattactttccttttctgttcatgtaaaaaaatctttccaagtgaaaatatgatcactagaggaagagaaaacatttcctgttattattcttattttatatgtgttttaaagactattctcttactttggttgaaatgcaaaacttcatttgtccatgtctacaagaaatattgggtttatttgtttaagagcttagatctactaaaagatttgagaacttattaaaagaggagtcatttggcaattaataagatatgtaatatacccaagatgctggaaaaagtgacaatgtgctcaaagttaagtaaattttactcccttatcccagaccccagtgcatataaaatcccaagcatgagtgaatgacaaggggaaaaataacagaagactgaagttattatctagaaaattctggccagaaattgacataaatcaaaaatatatttacagtgtttatcatctggatattttttgaaaaaataaaaaaattacagagaaaactcaccaacaaagtcacagggtgtcaaaatctggagagatttgcttaagctagatatctgccccaaagagaaaaaaactactgaggtttaaatagccaaataaggggtaactaacattatgaagatagtgaggacagtcaatgagagattaatttaaataaacacacatgtttagtctgaaaagtcaaggtgcaaaagatgtgatttacattttaacccttgtgaagactacaaattagagtaaccactaagtcaatgccaactcataaaatattggtagctagggggaagggcttgaagtttaaacagagtggtacaagtaggacacaactctactttgcccagcaaataagtgtctagaactttatgtcacctaaaacagatttttgcactcttgataagcatgctgaggacaggaaccctgttttacgcatttctgaaccacttacctgcttcccccagaaccaagacccaagtccaatataaactagttactaacagaaggtctgttaaataagtgaataagtaaaatgatggtgaact

SEQ ID NO: 87670 - DNA, 1674 bp, Homo sapiens
tttctatctatgtggacttggaaattatctaccttctttttttttttttgagacggagtctcattctgtcacccaggctggagtgcactggcgcaatcagctcactacaacctccgcctcccgggttcaagccaattctcctgtctcagcctcccgagtagctaggattacaggcgcatgccagcacacctggctgatttttgtatttttagtagaaacaggatttcaccrtgttggccagggtggtctcaaactcctgacctcaggtgatccacccaccttggcctcccaaagtgctgggattacaggcgtgagccactgctcccggcctatctagcctctttatgctatggttttctcatctgcaatgagaatgaagatgaaaaaggggtaatgaagatgaaaaagggattatgaagattaaatcaggtaatccatgtaaggtgcttagcgagagagtcaatctatggcagctaatatataactagcaaactcttaatgcatttcatagttgaagacatcaacattaaatatttttgtcttttattaatttttaattctcttttttaaaacagcagtattttataagtcatcaacgatggttaatttgataattaaaataaataagattattactttccttttctgttcatgtaaaaaaatctttccaagtgaaaatatgatcactagaggaagagaaaacatttcctgttattattcttattttatatgtgttttaaagactattctcttactttggttgaaatgcaaaacttcatttgtccatgtctacaagaaatattgggtttatttgtttaagagcttagatctactaaaagatttgagaacttattaaaagaggagtcatttggcaattaataagatatgtaatatacccaagatgctggaaaaagtgacaatgtgctcaaagttaagtaaattttactcccttatcccagaccccagtgcatataaaatcccaagcatgagtgaatgacaaggggaaaaataacagaagactgaagttattatctagaaaattctggccagaaattgacataaatcaaaaatatatttacagtgtttatcatctggatattttttgaaaaaataaaaaaattacagagaaaactcaccaacaaagtcacagggtgtcaaaatctggagagatttgcttaagctagatatctgccccaaagagaaaaaaactactgaggtttaaatagccaaataaggggtaactaacattatgaagatagtgaggacagtcaatgagagattaatttaaataaacacacatgtttagtctgaaaagtcaaggtgcaaaagatgtgatttacattttaacccttgtgaagactacaaattagagtaaccactaagtcaatgccaactcataaaatattggtagctagggggaagggcttgaagtttaaacagagtggtacaagtaggacacaactctactttgcccagcaaataagtgtctagaactttatgtcacctaaaacagatttttgcactcttgataagcatgctgaggacaggaaccctgttttacgcatttctgaaccacttacctgcttcccccagaaccaagacccaagtccaatataaactagttactaacagaaggtctgttaaataagtgaataagtaaaatgatggtgaact

SEQ ID NO: 87671 - DNA, 549 bp, Homo sapiens
ctcaaaaaagcctgctgggctgatctaagatctccgctgccttgtgagctggccaggaggcactcgcctctcagcgtttaagcctcattgttagctgggttccctgcctccataatgaagtgaccatgattggtaaaaaatcagcctgcaaccagaggttggaggtcttggactggtggaggtgaggagagtgctgaccccatggccctgagccatgaggcagccacagctgtggacaaggaaaaaggatcaggatttcctaagacawctgccttggaaggcaagaggagcatcaactgtgatatattgtagttgatatggtttggctgtgtccccacccaaatctcaccttgaattgtaatcatccccatgtgtcaagggtggggccaagtggaagtaactgaatcatgggggcgggtctttcccacactcttcttctgatagtgaataagtctcacaagatctgatagttttataaagggcagttcccccgcacacgtcctcttgcctgccaccttgtaagacagtactttgctcctgctttgcctt

SEQ ID NO: 87672 - DNA, 614 bp, Homo sapiens
ttattatgttggaccattcctatagcttttgccctgtgtttctaccatagtcccctaagagatgagatcactcttgtgaaaagagcttcctgctgttacccaagagagctgtctgctgccatctttgccccagcatgacagtgtggcagcccagcccagagcactgtggctctgcttgtagccttggggagtcccactgcctagaccaggctgggtgaaaatagcctgacttcttggaatggacacagttttcaaaaggagcataaatttagtctgccaattcatgtatatgccatgatggtcaaaattgagggatctgggcaaagattccttttccattcttagccaaatgctttctaggttgggcatcagttgatggtgcaattggargaaattgcccaattattttgttgcttcactaacaaaatgcttactgtctttgcattgtaaaatctttttttcatttataagctccccaagggagcaaaagccatgcacagtggtgtgccaggagccctcatgattgttttgcctgttatcttatttgagcaaatattagtatctcattttgcagcaaggaaactgagggtcagagtagttacatgaattgatcg

SEQ ID NO: 87673 - DNA, 737 bp, Homo sapiens
cacaataatctgccaaatgaagtcaagaaagaaatgtgaccacaagaaaaccaacttgccccactacaatggacagcaatattgtctttgaacatttctcctccaaaagctcttaagctggctaatatacaacaagcatgcacagagcaaagacaagacatgtgcttagggaaattttaagagcaaaaacctatctttagctataaagatattaaaatagtgcttgtgctcattttacttgtacaggaaggtttgaaaagaactctttttttttttttttttttttgagacggagtctcgctctgtcgcccaggctggagtgcagtggtgcgatctaggctcactgcaagctccgcctcccgggttcacgccattctcctgcctcagcctcccgagtagctgggactacaggmgcccgctaccacgcccggctaattttttgtatttttagtagagacggggtttcaccgtgttagccaggatggtctcgatctcctgacctcgtgatccgcccgcctcggcctcccaaagtgctgggattacaggcgtgagccaccgcgcccggccgaaaagaaactctttagagaaatgaaagatcactaataactgcagtttcctgaacaattaaagaattcacaagattacaacctactgaggaaatgacaaatatttctgatttttatggaaggactaaaagggcgcttttatgtatagcatctattctgtaagaatcactg

SEQ ID NO: 87674 - DNA, 725 bp, Homo sapiens
ggcagtggggtccatttgaaacaatgggtgctgataaaccattgtggcaatgcccagagttatcaaggcagatgttggatcttgagacttaaggcgctgtcatggaacttaacaatacgccgtagtcctcaattcatgtctgaagcattaatgctattttcatttatttctgtctttcatatgcagtgggatcttaacaaattgaggcctagagatggacagaaagactcccaggcaccagaaagctatttcttgcagccaccacgttgctgtgattaacaaaatagttggatgcattttccactcaaaagtggctacagggggaactgagtgtgagttgttcactrtcaactaacagcaccattagaattatgttaaagctgagctaagagaagcaagagaaaggatgctactcaagaagaatcttctagtgaaagagtgaaaactttattggtctcaatggcagtggtgaatcaaggacttttttttttttttttttttttgagatggagtctctctctgtcgcccaggctggagtgcaatggtgagatcttggggctcactgcaacccctgcctcctgggttcaagcaattctcctgcctcagcctcctgagtagctgggattacaggcacccgccaccacgcccagctaattttttgtatttttagtaaagacgaggtttcaccatgttggccaggctggtctcgaactcctgacctcggg

SEQ ID NO: 87675 - DNA, 725 bp, Homo sapiens
ggcagtggggtccatttgaaacaatgggtgctgataaaccattgtggcaatgcccagagttatcaaggcagatgttggatcttgagacttaaggcgctgtcatggaacttaacaatacgccgtagtcctcaattcatgtctgaagcattaatgctattttcatttatttctgtctttcatatgcagtgggatcttaacaaattgaggcctagagatggacagaaagactcccaggcaccagaaagctatttcttgcagccaccacgttgctgtgattaacaaaatagttggatgcattttccactcaaaagtggctacagggggaactgagtgtgagttgttcactgtcaactaacagcaccattagaattatgttaaagctgagctaagagaagcaagagaaaggatgctactcaagaagaatcttctagtgaaagagtgaaaactttattggtctcaatggcagtggtgaatcaaggacttttttttttttttttttttttgagatggagtctctctctgtcgcccaggctggagtrcaatggtgagatcttggggctcactgcaacccctgcctcctgggttcaagcaattctcctgcctcagcctcctgagtagctgggattacaggcacccgccaccacgcccagctaattttttgtatttttagtaaagacgaggtttcaccatgttggccaggctggtctcgaactcctgacctcggg

SEQ ID NO: 87676 - DNA, 725 bp, Homo sapiens
ggcagtggggtccatttgaaacaatgggtgctgataaaccattgtggcaatgcccagagttatcaaggcagatgttggatcttgagacttaaggcgctgtcatggaacttaacaatacgccgtagtcctcaattcatgtctgaagcattaatgctattttcatttatttctgtctttcatatgcagtgggatcttaacaaattgaggcctagagatggacagaaagactcccaggcaccagaaagctatttcttgcagccaccacgttgctgtgattaacaaaatagttggatgcattttccactcaaaagtggctacagggggaactgagtgtgagttgttcactgtcaactaacagcaccattagaattatgttaaagctgagctaagagaagcaagagaaaggatgctactcaagaagaatcttctagtgaaagagtgaaaactttattggtctcaatggcagtggtgaatcaaggacttttttttttttttttttttttgagatggagtctctctctgtcgcccaggctggagtgcaatggtgagatcttggggctcactgcaacccctgcctcctgggttcaagcaattctcctgcctcagcctcytgagtagctgggattacaggcacccgccaccacgcccagctaattttttgtatttttagtaaagacgaggtttcaccatgttggccaggctggtctcgaactcctgacctcggg

SEQ ID NO: 87677 - DNA, 712 bp, Homo sapiens
ggcttatctgtgataattgggaggcaggatcatctgttgttgaatagacagaacccactctgctaatgctgctttgtggtcaaactttgagccgtcaatgtaactgaaaagtcactgttggcctggttctctagagtgtctgtaatagtattccccctacgggtgtagacactgcctttagcaggaggataccttgctgaggaggcacggagagagaatgttttagaggttgggatcatggtaatctttattgtagtcacttctcttatccatgtgctgggctattggaaccatactgtcactgaaaagggggagttttctttgggacaaatccatttctttgaataataattttccccctgattataaaagtcatggatttccattgtagaaaatttggaaaatacagaaaagtattatgaaaacaagaattcttaccattttagagatcaaactgaaatcatgttgaatrtataactttacatcctccttttaacgttatattatgtaatgaacatactgtattccagatcattactcttcaaaaactgatttttgacagcaacatactattctaccttttgcctatgctgcatttttaatcatatttaatcatttaatattaatatttaatcatttctctatcaatggacacttagatattgtttcaaattttctttcagaaatgatgctgaaataaacactgttacag

SEQ ID NO: 87678 - DNA, 807 bp, Homo sapiens
ttagtgggaaaggcacaaagatcactcctgcttaaatttctggtttccaggaggggagatccaggcagggatgtatggccaacggagattcctagccagagtgctgagaggactgtgtgaactgcagattcaggaagaggctgagagacccccatgggggtggccggtatgctgaggcttgtatgggagccagatatcccacatcccatggggtggttgcctcctcctgtttccagcctttccagtgaggctgcaggaaagagacacagctaaggcctggagactcgtggcactccgtcagggcatggtaccacagatgagttgtaagcctgcgggacacagcatccaactctgaaagccccttgctcgaataaccctacatcaccgcctgagggcttccatatccttggtctcttcagactgtcatccccaccacaattactccaagaaattactgtcatccccaaatctataactggaaactgaggctcaggaaggagacatgacttccacaaaatcacacagttgggaaactctggagtctgcactcaactggtctgcaaaccgactctcggagacttcaggtgagatgaggtcaggttctcaggccaggtcctgaagtttgacaccttggcgaaatgcactttccttgactcagcaccgcagtgacggcggarcgaagccccgagcagaagggcttttcttcccagctgaagaggcagctcagcctagaccccaggcatggcactggacacccctgctgtggaaacgtgcagatttagatggaggggattcctaacctgggca

SEQ ID NO: 87679 - DNA, 807 bp, Homo sapiens
ttagtgggaaaggcacaaagatcactcctgcttaaatttctggtttccaggaggggagatccaggcagggatgtatggccaacggagattcctagccagagtgctgagaggactgtgtgaactgcagattcaggaagaggctgagagacccccatgggggtggccggtatgctgaggcttgtatgggagccagatatcccacatcccatggggtggttgcctcctcctgtttccagcctttccagtgaggctgcaggaaagagacacagctaaggcctggagactcgtggcactccgtcagggcatggtaccacagatgagttgtaagcctgcgggacacagcatccaactctgaaagccccttgctcgaataaccctacatcaccgcctgagggcttccatatccttggtctcttcagactgtcatccccaccacaattactccaagaaattactgtcatccccaaatctataactggaaactgaggctcaggaaggagacatgacttccacaaaatcacacagttgggaaactctggagtctgcactcaactggtctgcaaaccgactctcggagacttcaggtgagatgaggtcaggttctcaggccaggtcctgaagtttgacaccttggcgaaatgcactttccttgactcagcaccgcagtgacggcggaacsaagccccgagcagaagggcttttcttcccagctgaagaggcagctcagcctagaccccaggcatggcactggacacccctgctgtggaaacgtgcagatttagatggaggggattcctaacctgggca

SEQ ID NO: 87680 - DNA, 589 bp, Homo sapiens
atttaaaaagatcagcaaaatccagtattttagcacttgcataacaatgtatttttaccagaactggctttaagggtacaattaaaattttttattaagcaccttaaggaatttcaaatactacatcaaaaatttcagttcaaagacagttttccaaacaatagtaattaatgtttgtgatatgggaagtgggcagggaagtgctgggtatagaagtgggaggctccaccctcaggcctatgcccacagacagaagtgagaacaggcactcctgtttttacgcccaaatgttgcattttcaaagaccactcaggcccaccacrccccgcctcctgtgcccatataaacctgaggacttagtgggcacacacacaagcggctgaacgttgagaccagcagaccagcagaccagcaatggtggaatgatgtgacagagaaagagagaagaggagggatgtccagatgccaagaggagttcagctggaggcgtttggagaagagtccggctgctgggcggcccgactccaggggaaaatcaccttcccacttcataccccacttgccgctccccatcaatctcactgagagc

SEQ ID NO: 87681 - DNA, 589 bp, Homo sapiens
atttaaaaagatcagcaaaatccagtattttagcacttgcataacaatgtatttttaccagaactggctttaagggtacaattaaaattttttattaagcaccttaaggaatttcaaatactacatcaaaaatttcagttcaaagacagttttccaaacaatagtaattaatgtttgtgatatgggaagtgggcagggaagtgctgggtatagaagtgggaggctccaccctcaggcctatgcccacagacagaagtgagaacaggcactcctgtttttacgcccaaatgttgcattttcaaagaccactcaggcccaccacaccccgcctcctgtgcccrtataaacctgaggacttagtgggcacacacacaagcggctgaacgttgagaccagcagaccagcagaccagcaatggtggaatgatgtgacagagaaagagagaagaggagggatgtccagatgccaagaggagttcagctggaggcgtttggagaagagtccggctgctgggcggcccgactccaggggaaaatcaccttcccacttcataccccacttgccgctccccatcaatctcactgagagc

SEQ ID NO: 87682 - DNA, 1106 bp, Homo sapiens
aattgagtttcttgcttcttcatgggtcccatgtacaaaaaatggcggtgttagcatgatcccatggtggagttttcagccctctgacattaaaaggtgaagcagagtacatgaaaactcgctcggtgcatcctctgtatgctggccagaacctctccatcatgggtggtctcttatcaggcaagaaaggagaggttgatatcagtggtgtagcctttggaagggctggtttctgttaaatccttagggaagaaagcctcatcatggttagcaaaggagggggtataacgatgtgtatctgacccccatcatcccatcctagcaaagctgagaactcagttttgaaagttactctggggtcccctcagccaagagtgggtctgttcagtcagttgggagcttaggatttcattttcatttatcaatgctaatgggaaagagtacactgtcttcatggcagctgaatttgcaagaaactccttggatggggttaatgcagctgtatttttctgggagctctgctttaattggataaagtaagttctggtatgatttcttcctttatcttcagtatctcaaatgttttcatttaaataatctgtgtaacaatttttgatgtcagagtagattcccacacagtcatctattgttaagactttctgattccctttttttcctctggtcattatgaatagggcttatgtaaataatggcatggtagcttttgatyggaaataacatcaaagtagttgtcaaaatacttaggaatgtgatttttggattgtaaggtgagacttgtttagctttggggaaaaaatgcccaacttgtaataggggaggaaaaataattttctatgttttcagaattcttagatgggaccttctgtaaaaactgacggattaaaattagaaaaatagaaaagtttagaaacatgtataccttatggatacatgggagatactcaggaaaaaacgagtaaatctgcaacaggtggctttcaattcaagcataaatactatcttcaacttaaagaaagaagatttgaggtgcagtagtggggatctaactagcaaaagcacagtagacaagggtaaggtttgttata

SEQ ID NO: 87683 - DNA, 1106 bp, Homo sapiens
aattgagtttcttgcttcttcatgggtcccatgtacaaaaaatggcggtgttagcatgatcccatggtggagttttcagccctctgacattaaaaggtgaagcagagtacatgaaaactcgctcggtgcatcctctgtatgctggccagaacctctccatcatgggtggtctcttatcaggcaagaaaggagaggttgatatcagtggtgtagcctttggaagggctggtttctgttaaatccttagggaagaaagcctcatcatggttagcaaaggagggggtataacgatgtgtatctgacccccatcatcccatcctagcaaagctgagaactcagttttgaaagttactctggggtcccctcagccaagagtgggtctgttcagtcagttgggagcttaggatttcattttcatttatcaatgctaatgggaaagagtacactgtcttcatggcagctgaatttgcaagaaactccttggatggggttaatgcagctgtatttttctgggagctctgctttaattggataaagtaagttctggtatgatttcttcctttatcttcagtatctcaaatgttttcatttaaataatctgtgtaacaatttttgatgtcagagtagattcccacacagtcatctattgttaagactttctgattccctttttttcctctggtcattatgaatagggcttatgtaaataatggcatggtagcttttgattggaaataacatcaaagtagttgtcaaaatacttaggaatgtgatttttggattgtaaggtgagacttgtttagctttggggaaaaaatgcccaacttgtaataggggaggaaaaataattttctatgttttcagaattcttagatgggaccytctgtaaaaactgacggattaaaattagaaaaatagaaaagtttagaaacatgtataccttatggatacatgggagatactcaggaaaaaacgagtaaatctgcaacaggtggctttcaattcaagcataaatactatcttcaacttaaagaaagaagatttgaggtgcagtagtggggatctaactagcaaaagcacagtagacaagggtaaggtttgttata

SEQ ID NO: 87684 - DNA, 1106 bp, Homo sapiens
aattgagtttcttgcttcttcatgggtcccatgtacaaaaaatggcggtgttagcatgatcccatggtggagttttcagccctctgacattaaaaggtgaagcagagtacatgaaaactcgctcggtgcatcctctgtatgctggccagaacctctccatcatgggtggtctcttatcaggcaagaaaggagaggttgatatcagtggtgtagcctttggaagggctggtttctgttaaatccttagggaagaaagcctcatcatggttagcaaaggagggggtataacgatgtgtatctgacccccatcatcccatcctagcaaagctgagaactcagttttgaaagttactctggggtcccctcagccaagagtgggtctgttcagtcagttgggagcttaggatttcattttcatttatcaatgctaatgggaaagagtacactgtcttcatggcagctgaatttgcaagaaactccttggatggggttaatgcagctgtatttttctgggagctctgctttaattggataaagtaagttctggtatgatttcttcctttatcttcagtatctcaaatgttttcatttaaataatctgtgtaacaatttttgatgtcagagtagattcccacacagtcatctattgttaagactttctgattccctttttttcctctggtcattatgaatagggcttatgtaaataatggcatggtagcttttgattggaaataacatcaaagtagttgtcaaaatacttaggaatgtgatttttggattgtaaggtgagacttgtttagctttggggaaaaaatgcccaacttgtaataggggaggaaaaataattttctatgttttcagaattcttagatgggaccttctgtaaaaactgacggattaaaattagaaaaatagaaaagtttaraaacatgtataccttatggatacatgggagatactcaggaaaaaacgagtaaatctgcaacaggtggctttcaattcaagcataaatactatcttcaacttaaagaaagaagatttgaggtgcagtagtggggatctaactagcaaaagcacagtagacaagggtaaggtttgttata

SEQ ID NO: 87685 - DNA, 1106 bp, Homo sapiens
aattgagtttcttgcttcttcatgggtcccatgtacaaaaaatggcggtgttagcatgatcccatggtggagttttcagccctctgacattaaaaggtgaagcagagtacatgaaaactcgctcggtgcatcctctgtatgctggccagaacctctccatcatgggtggtctcttatcaggcaagaaaggagaggttgatatcagtggtgtagcctttggaagggctggtttctgttaaatccttagggaagaaagcctcatcatggttagcaaaggagggggtataacgatgtgtatctgacccccatcatcccatcctagcaaagctgagaactcagttttgaaagttactctggggtcccctcagccaagagtgggtctgttcagtcagttgggagcttaggatttcattttcatttatcaatgctaatgggaaagagtacactgtcttcatggcagctgaatttgcaagaaactccttggatggggttaatgcagctgtatttttctgggagctctgctttaattggataaagtaagttctggtatgatttcttcctttatcttcagtatctcaaatgttttcatttaaataatctgtgtaacaatttttgatgtcagagtagattcccacacagtcatctattgttaagactttctgattccctttttttcctctggtcattatgaatagggcttatgtaaataatggcatggtagcttttgattggaaataacatcaaagtagttgtcaaaatacttaggaatgtgatttttggattgtaaggtgagacttgtttagctttggggaaaaaatgcccaacttgtaataggggaggaaaaataattttctatgttttcagaattcttagatgggaccttctgtaaaaactgacggattaaaattagaaaaatagaaaagtttagaaacatgtataccttatggatacatgggagatactcaggaaaaaacgagtaaatctscaacaggtggctttcaattcaagcataaatactatcttcaacttaaagaaagaagatttgaggtgcagtagtggggatctaactagcaaaagcacagtagacaagggtaaggtttgttata

SEQ ID NO: 87686 - DNA, 1106 bp, Homo sapiens
aattgagtttcttgcttcttcatgggtcccatgtacaaaaaatggcggtgttagcatgatcccatggtggagttttcagccctctgacattaaaaggtgaagcagagtacatgaaaactcgctcggtgcatcctctgtatgctggccagaacctctccatcatgggtggtctcttatcaggcaagaaaggagaggttgatatcagtggtgtagcctttggaagggctggtttctgttaaatccttagggaagaaagcctcatcatggttagcaaaggagggggtataacgatgtgtatctgacccccatcatcccatcctagcaaagctgagaactcagttttgaaagttactctggggtcccctcagccaagagtgggtctgttcagtcagttgggagcttaggatttcattttcatttatcaatgctaatgggaaagagtacactgtcttcatggcagctgaatttgcaagaaactccttggatggggttaatgcagctgtatttttctgggagctctgctttaattggataaagtaagttctggtatgatttcttcctttatcttcagtatctcaaatgttttcatttaaataatctgtgtaacaatttttgatgtcagagtagattcccacacagtcatctattgttaagactttctgattccctttttttcctctggtcattatgaatagggcttatgtaaataatggcatggtagcttttgattggaaataacatcaaagtagttgtcaaaatacttaggaatgtgatttttggattgtaaggtgagacttgtttagctttggggaaaaaatgcccaacttgtaataggggaggaaaaataattttctatgttttcagaattcttagatgggaccttctgtaaaaactgacggattaaaattagaaaaatagaaaagtttagaaacatgtataccttatggatacatgggagatactcaggaaaaaacgagtaaatctgcaacaggtggctttcaattcaagcataaatactatcttcaacttaaagaaagaagatttgaggtgcagtagtggggatctaacyagcaaaagcacagtagacaagggtaaggtttgttata

SEQ ID NO: 87687 - DNA, 1465 bp, Homo sapiens
ctttaactttctgcacaggctttctttatctctggttcatggttccttcctcatgttaaactcgttccttcatacacagccacacaaagtccttgccctttcctgaccccagtcctgcacctgatgacttcagttcctctctatgactttgaacttggaataaatttttattttcacttgaaataagtgattaatgattattttcactaatctccctctaaataaatgtaatttgagctaaatctgcatgaggcctaaggaagagaaaaggctccaactttggaaaagaatagtcttcaacaatgtccctggattcagccctaaatctctttggagactacccttaccagtgggagactatcctacagatagatgattcttctctcttggatatgctgaatctcagggaagtgttctctatccacatgagatcagacctgggaccttgaatagattgatttatttttyacaaaagcacagactactgtggggccctgggtgctgagctcagatgtgaaacttctgttttgaggttaccaaaaagtaaagtcacagagtctctgtcctggttttgcctccttaaaaagtagctttaatatgttagaaaagaatctagaaaacataatacatattttattgtaaaagtcattgcttgttcattcttcttttctgtttgtattctacaatactagccattcctcactcttctttgtgggctctttctattctcattttccttactttgtccttatttctgggctttttattcttttcctcttaacctatgcatacatcttagacaatatcatctaatttattacttgaagtatatatctcattagtttcaaacttattctctagctgcctactagatatttccatctctatatttcataggctcctcaactcaacttgtccccaacagagagttcatcatcctcccaataccatgtcctcttttggagacaccatcatctatcttgggaggctcatctccaatggtcaggtgtccttagcaaacacctagaagattaaaaacccttgcttactgaactcttagcctcatgccttacccttctggccttcttgcaaaagtgatatgcatcagagagttggccctctgtattcacaagttccacatccctggattcaaccaaccacagatcaaaaatatttttttcaaaaattgtgtctatactgaacacatacagacttttttccttgtcattattctaaacaatacagtataacaactatttacataacattgtattgtatttggtactatgaattatttacagatgacttaaagtatttgggagtatatgcaaagattatatgcaaatactataacattttttatctgggacttgggcatttgtagattttgttatccttgggaggtcttggaaccaattccccaagatactgagggataactgtagacaaatgtgatcatgctact

SEQ ID NO: 87688 - DNA, 1465 bp, Homo sapiens
ctttaactttctgcacaggctttctttatctctggttcatggttccttcctcatgttaaactcgttccttcatacacagccacacaaagtccttgccctttcctgaccccagtcctgcacctgatgacttcagttcctctctatgactttgaacttggaataaatttttattttcacttgaaataagtgattaatgattattttcactaatctccctctaaataaatgtaatttgagctaaatctgcatgaggcctaaggaagagaaaaggctccaactttggaaaagaatagtcttcaacaatgtccctggattcagccctaaatctctttggagactacccttaccagtgggagactatcctacagatagatgattcttctctcttggatatgctgaatctcagggaagtgttctctatccacatgagatcagacctgggaccttgaatagattgatttatttttcacaaaagcayagactactgtggggccctgggtgctgagctcagatgtgaaacttctgttttgaggttaccaaaaagtaaagtcacagagtctctgtcctggttttgcctccttaaaaagtagctttaatatgttagaaaagaatctagaaaacataatacatattttattgtaaaagtcattgcttgttcattcttcttttctgtttgtattctacaatactagccattcctcactcttctttgtgggctctttctattctcattttccttactttgtccttatttctgggctttttattcttttcctcttaacctatgcatacatcttagacaatatcatctaatttattacttgaagtatatatctcattagtttcaaacttattctctagctgcctactagatatttccatctctatatttcataggctcctcaactcaacttgtccccaacagagagttcatcatcctcccaataccatgtcctcttttggagacaccatcatctatcttgggaggctcatctccaatggtcaggtgtccttagcaaacacctagaagattaaaaacccttgcttactgaactcttagcctcatgccttacccttctggccttcttgcaaaagtgatatgcatcagagagttggccctctgtattcacaagttccacatccctggattcaaccaaccacagatcaaaaatatttttttcaaaaattgtgtctatactgaacacatacagacttttttccttgtcattattctaaacaatacagtataacaactatttacataacattgtattgtatttggtactatgaattatttacagatgacttaaagtatttgggagtatatgcaaagattatatgcaaatactataacattttttatctgggacttgggcatttgtagattttgttatccttgggaggtcttggaaccaattccccaagatactgagggataactgtagacaaatgtgatcatgctact

SEQ ID NO: 87689 - DNA, 1465 bp, Homo sapiens
ctttaactttctgcacaggctttctttatctctggttcatggttccttcctcatgttaaactcgttccttcatacacagccacacaaagtccttgccctttcctgaccccagtcctgcacctgatgacttcagttcctctctatgactttgaacttggaataaatttttattttcacttgaaataagtgattaatgattattttcactaatctccctctaaataaatgtaatttgagctaaatctgcatgaggcctaaggaagagaaaaggctccaactttggaaaagaatagtcttcaacaatgtccctggattcagccctaaatctctttggagactacccttaccagtgggagactatcctacagatagatgattcttctctcttggatatgctgaatctcagggaagtgttctctatccacatgagatcagacctgggaccttgaatagattgatttatttttcacaaaagcacagactactgtggggccctgggtgctgagctcagatgtgaaacttctgttttgaggttaccaaaaagtaaagtcacagagtctctgtcctggttttgcctccttaaaaagtagctttaatatgttagaaaagaatctagaaaacataatacatattttattgtaaaagtcattgcttgttcattcttcttttctgtttgtattctacaatactagccattcctcactcttctttgtgggctctttctattctcattttccttactttgtccttatttctgggctttttattcttttcctcttaacctatgcatacatcttagacaatatcatctaatttattacttgaagtatatatctcattagtttcaaacttattctctagctgcctactagatatttccatctctatatttcataggctcctcaactcaacttgtccccaacagagagttcatcatcctcccaataccatgtcctcttttggagacaccatcatctatcttgggaggctcatctccaatggtcaggtgtccttagcaaacacctagaagattaaaaacycttgcttactgaactcttagcctcatgccttacccttctggccttcttgcaaaagtgatatgcatcagagagttggccctctgtattcacaagttccacatccctggattcaaccaaccacagatcaaaaatatttttttcaaaaattgtgtctatactgaacacatacagacttttttccttgtcattattctaaacaatacagtataacaactatttacataacattgtattgtatttggtactatgaattatttacagatgacttaaagtatttgggagtatatgcaaagattatatgcaaatactataacattttttatctgggacttgggcatttgtagattttgttatccttgggaggtcttggaaccaattccccaagatactgagggataactgtagacaaatgtgatcatgctact

SEQ ID NO: 87690 - DNA, 1465 bp, Homo sapiens
ctttaactttctgcacaggctttctttatctctggttcatggttccttcctcatgttaaactcgttccttcatacacagccacacaaagtccttgccctttcctgaccccagtcctgcacctgatgacttcagttcctctctatgactttgaacttggaataaatttttattttcacttgaaataagtgattaatgattattttcactaatctccctctaaataaatgtaatttgagctaaatctgcatgaggcctaaggaagagaaaaggctccaactttggaaaagaatagtcttcaacaatgtccctggattcagccctaaatctctttggagactacccttaccagtgggagactatcctacagatagatgattcttctctcttggatatgctgaatctcagggaagtgttctctatccacatgagatcagacctgggaccttgaatagattgatttatttttcacaaaagcacagactactgtggggccctgggtgctgagctcagatgtgaaacttctgttttgaggttaccaaaaagtaaagtcacagagtctctgtcctggttttgcctccttaaaaagtagctttaatatgttagaaaagaatctagaaaacataatacatattttattgtaaaagtcattgcttgttcattcttcttttctgtttgtattctacaatactagccattcctcactcttctttgtgggctctttctattctcattttccttactttgtccttatttctgggctttttattcttttcctcttaacctatgcatacatcttagacaatatcatctaatttattacttgaagtatatatctcattagtttcaaacttattctctagctgcctactagatatttccatctctatatttcataggctcctcaactcaacttgtccccaacagagagttcatcatcctcccaataccatgtcctcttttggagacaccatcatctatcttgggaggctcatctccaatggtcaggtgtccttagcaaacacctagaagattaaaaacccttgcttactgaactcttagcctcatgccttacccttctggccttcttgcaaaagtgatatgcatcagagagttggccctctgtattcacaagttccacatccctggattcaaccaaccacagatcaaaaatatttttttcaaaaattgygtctatactgaacacatacagacttttttccttgtcattattctaaacaatacagtataacaactatttacataacattgtattgtatttggtactatgaattatttacagatgacttaaagtatttgggagtatatgcaaagattatatgcaaatactataacattttttatctgggacttgggcatttgtagattttgttatccttgggaggtcttggaaccaattccccaagatactgagggataactgtagacaaatgtgatcatgctact

SEQ ID NO: 87691 - DNA, 605 bp, Homo sapiens
atatattattaattatatattatatawtatatattataatatataatataatatataatatacaatatataatataatataattattataattatataattatatattattatatattattatattatattatatattgtataatatacattataattacataataatgtaattatataatatacatataatatataatatacattatatatactatattatatatacattatatatactatattatatacattatatatactatattatatacattatatatactatattatatacattatataatgcatgtaatgtatacattatataatgcatgtaatgtgtacattatataatgcatgtaatgtgtacattatataatgcatgtaatgtgtacattatataatgcatgtaatgtgtacattttatataatgcacgtaatgtgtacattttatataatgcacgtaatgtgtacattttatataatgcatgtaatgtgtacattatatctaatgcatgtaatgtgtacattatatcaaatgcatgtaatgtgtacattatatcaaatgtatactatatatatagaaaagtaaaattggatccc

SEQ ID NO: 87692 - DNA, 605 bp, Homo sapiens
atatattattaattatatattatatattatatawtataatatataatataatatataatatacaatatataatataatataattattataattatataattatatattattatatattattatattatattatatattgtataatatacattataattacataataatgtaattatataatatacatataatatataatatacattatatatactatattatatatacattatatatactatattatatacattatatatactatattatatacattatatatactatattatatacattatataatgcatgtaatgtatacattatataatgcatgtaatgtgtacattatataatgcatgtaatgtgtacattatataatgcatgtaatgtgtacattatataatgcatgtaatgtgtacattttatataatgcacgtaatgtgtacattttatataatgcacgtaatgtgtacattttatataatgcatgtaatgtgtacattatatctaatgcatgtaatgtgtacattatatcaaatgcatgtaatgtgtacattatatcaaatgtatactatatatatagaaaagtaaaattggatccc

SEQ ID NO: 87693 - DNA, 659 bp, Homo sapiens
cgctgcggtccaggagcgcaggtcctcgttcagggcgaggtaatccttgccatcgtaggcatactgttcatacccgcggaggaggcgwccgtcggaccccaggtcgcagccaatcatccactggagggtatgagaacctggccccaccccttcggtcagccccgcccaccgagcctcgccctcgcccggacccacccgcagggattttggtaaaggcgcctggggttctcccaggtagagggtctgggcgggtcccgcggcctcggggtggatcccagacccggagactcgggagtacccggggcgtccgtggggcatggaggtggggggtcgtgatctgcgccctgggccggggttactcactggcctcgctctggttgtagtagccgcgcagggtctgcaggttcattctgtcagtctgtgcgtgggccttggtgttccgtgtctcctcttcccaatactctggcccctcctgctccacccacggcgcccgcggctccatcctcggacacgccgagtcgctgtcgaaccgcacgaactgcgtgtcgtccacgtagcccatggcgatgaagcggggctccccgcggccgggccgggacacggcggcgctgaaatacctcatggagtgggagcctgggggcgaggagaggttgagaccc

SEQ ID NO: 87694 - DNA, 659 bp, Homo sapiens
cgctgcggtccaggagcgcaggtcctcgttcagggcgaggtaatccttgccatcgtaggcatactgttcatacccgcggaggaggcgtccgtcggaccccaggtcgcagccaatcatccactggagggtrtgagaacctggccccaccccttcggtcagccccgcccaccgagcctcgccctcgcccggacccacccgcagggattttggtaaaggcgcctggggttctcccaggtagagggtctgggcgggtcccgcggcctcggggtggatcccagacccggagactcgggagtacccggggcgtccgtggggcatggaggtggggggtcgtgatctgcgccctgggccggggttactcactggcctcgctctggttgtagtagccgcgcagggtctgcaggttcattctgtcagtctgtgcgtgggccttggtgttccgtgtctcctcttcccaatactctggcccctcctgctccacccacggcgcccgcggctccatcctcggacacgccgagtcgctgtcgaaccgcacgaactgcgtgtcgtccacgtagcccatggcgatgaagcggggctccccgcggccgggccgggacacggcggcgctgaaatacctcatggagtgggagcctgggggcgaggagaggttgagaccc

SEQ ID NO: 87695 - DNA, 718 bp, Homo sapiens
agtttcagctttctacatagggatagccagttttcccagcaccatttattaaatagggaatcctttccccattgcttgtttttctcaggtttgtcaaagatcagatagttgtagatatgyagtgttatttctgagggctctgttctgttccactgatctatatctctgttttggtaccagtaccatgctgttttggttattgtagccttgtagtatagtttgaagtcaggtaacgtgatgcctccagctttgttcttttggcttaggattgacttggtgatgcaggctcttttttggttccatatgaactttaaagtagttttttccaattctgtgaagaaagtcattggtagcttgatggggatggcattgaatctataaattagcttgggcagtgtggccattttcacgatattgattcttcctacccattagcatggaatgttcttccacacaaatattcttgagatttcttcagatctgaaagtcagcctgagtttttagacttgcttcgaaagactttggccctgggaaaaaggaaatcagtactccaggaacaagattttcctcgactttgtctcaacccaaagacgctaaagcagcgcagttttcaaacgtgctttgaaaataaatgggacagtgtgtccacactggattttgcctttccctttttattacagcccgccccttttgtaaaattgttacacatctctctact

SEQ ID NO: 87696 - DNA, 718 bp, Homo sapiens
agtttcagctttctacatagggatagccagttttcccagcaccatttattaaatagggaatcctttccccattgcttgtttttctcaggtttgtcaaagatcagatagttgtagatatgcrgtgttatttctgagggctctgttctgttccactgatctatatctctgttttggtaccagtaccatgctgttttggttattgtagccttgtagtatagtttgaagtcaggtaacgtgatgcctccagctttgttcttttggcttaggattgacttggtgatgcaggctcttttttggttccatatgaactttaaagtagttttttccaattctgtgaagaaagtcattggtagcttgatggggatggcattgaatctataaattagcttgggcagtgtggccattttcacgatattgattcttcctacccattagcatggaatgttcttccacacaaatattcttgagatttcttcagatctgaaagtcagcctgagtttttagacttgcttcgaaagactttggccctgggaaaaaggaaatcagtactccaggaacaagattttcctcgactttgtctcaacccaaagacgctaaagcagcgcagttttcaaacgtgctttgaaaataaatgggacagtgtgtccacactggattttgcctttccctttttattacagcccgccccttttgtaaaattgttacacatctctctact

SEQ ID NO: 87697 - DNA, 718 bp, Homo sapiens
agtttcagctttctacatagggatagccagttttcccagcaccatttattaaatagggaatcctttccccattgcttgtttttctcaggtttgtcaaagatcagatagttgtagatatgcagtgttatttctgagggctctgttctgttccactgatctatatctctgttttggtaccagtaccatgctsttttggttattgtagccttgtagtatagtttgaagtcaggtaacgtgatgcctccagctttgttcttttggcttaggattgacttggtgatgcaggctcttttttggttccatatgaactttaaagtagttttttccaattctgtgaagaaagtcattggtagcttgatggggatggcattgaatctataaattagcttgggcagtgtggccattttcacgatattgattcttcctacccattagcatggaatgttcttccacacaaatattcttgagatttcttcagatctgaaagtcagcctgagtttttagacttgcttcgaaagactttggccctgggaaaaaggaaatcagtactccaggaacaagattttcctcgactttgtctcaacccaaagacgctaaagcagcgcagttttcaaacgtgctttgaaaataaatgggacagtgtgtccacactggattttgcctttccctttttattacagcccgccccttttgtaaaattgttacacatctctctact

SEQ ID NO: 87698 - DNA, 718 bp, Homo sapiens
agtttcagctttctacatagggatagccagttttcccagcaccatttattaaatagggaatcctttccccattgcttgtttttctcaggtttgtcaaagatcagatagttgtagatatgcagtgttatttctgagggctctgttctgttccactgatctatatctctgttttggtaccagtaccatgctgttttggttattgtagccttgtagtatagtttgaagtcaggtaacgtgatgcctccagctttgttcttttggcttaggattgacttggtgatgcaggctcttttttggttccatatgaactttaaagtagttttttccaattctgtgaagaaagtcattggtagcttgatggggatggcattgaatctataaattagcttgggcagtrtggccattttcacgatattgattcttcctacccattagcatggaatgttcttccacacaaatattcttgagatttcttcagatctgaaagtcagcctgagtttttagacttgcttcgaaagactttggccctgggaaaaaggaaatcagtactccaggaacaagattttcctcgactttgtctcaacccaaagacgctaaagcagcgcagttttcaaacgtgctttgaaaataaatgggacagtgtgtccacactggattttgcctttccctttttattacagcccgccccttttgtaaaattgttacacatctctctact

SEQ ID NO: 87699 - DNA, 718 bp, Homo sapiens
agtttcagctttctacatagggatagccagttttcccagcaccatttattaaatagggaatcctttccccattgcttgtttttctcaggtttgtcaaagatcagatagttgtagatatgcagtgttatttctgagggctctgttctgttccactgatctatatctctgttttggtaccagtaccatgctgttttggttattgtagccttgtagtatagtttgaagtcaggtaacgtgatgcctccagctttgttcttttggcttaggattgacttggtgatgcaggctcttttttggttccatatgaactttaaagtagttttttccaattctgtgaagaaagtcattggtagcttgatggggatggcattgaatctataaattagcttgggcagtgtggccattttcacgatattgattcttcctacccattagcatggaatgttcttccacacaaatattcttgagatttcttcagatctgaaagtcagcctgagtttttagacttgcttcgaragactttggccctgggaaaaaggaaatcagtactccaggaacaagattttcctcgactttgtctcaacccaaagacgctaaagcagcgcagttttcaaacgtgctttgaaaataaatgggacagtgtgtccacactggattttgcctttccctttttattacagcccgccccttttgtaaaattgttacacatctctctact

SEQ ID NO: 87700 - DNA, 683 bp, Homo sapiens
tcattgtggtagtggatatgtgggtgtgtaaaacagccaagcagtacaactcaatgagctgtacatttcaaatagatacattgattgtgtgcaaagtatgtcccaataatggtttaaaaatattattctatttgagatttgtactttgattttgtaaaacaaaacaaaacccttgttcttgcacccacgagatgcaccctggcacatctggaggtagaagctcatgttctctgcagcttgacctcgcaggctctgaaataagaataataagccgtatatttacagattcacacacagagaaaaaaaagctttggtaaaaatgttcataaataacaaaactagataaagggcaaaaataaaattagaaataataaaactacatctttcagatattattctcaccttcacctttyctctccccttttctccctctcccttcctttcctcgaaatgtccccccatccttccctcctttctccattctctgcatttgatccccatgtattccagcctcgaggcaaacacacgtcaccgcgtccgcctggggcaggtcagggaagggacgcgaggcagccgtgtctccgcattctgtgagcggcagcgccctgggcctcgctgatcttgtgtcatttcagtgaccttcgctctagtctttgacggggccacactcggggtgtaaatta

SEQ ID NO: 87701 - DNA, 639 bp, Homo sapiens
aataaagatggattttcctaaacccacacccacaggagggctggggagtcttgggtttctggttttgttttgtattgttttttaagaaaacttytggcccagcgaggtggctcacgcctgtaatcccagcactttgggaggttgaggcaggtggatcacgaggtcaggagttcgagaccagcctgaccaacatggtgaaaccccgtctctactaaaaatacaaaaattagctgggtgcggtgttgcatgcttgtaatcccagctacttgggaggctgaggcaggagaattgctgaacccagaaggcggaggttgcagtgagccaagatcacaccactgcactccagcctgggcgacagagcaaaactccgtctcaaaaaaaaaaaaaaaaaaaaatcttctaaacccaagttgtgacatttttttttaatgaatattaacaaaaaaatacattcattgatagtatatgttcataaatgttatatagttgtaaaatagtctgttgggtttgtgatctgtagtttgtgaagtgaaggttcttaactccttgtgggagggaggcacaggcctctggaaatagaatcaaagctgtgaatgctcttcccacaatgtgatcctccccattttgcattcagtttaa

SEQ ID NO: 87702 - DNA, 1590 bp, Homo sapiens
taaaggaaatcaacaaaatgcaatgatggaaaattgcgttgatggacaacctacctagaagggctgtgggtcaggagcagcctgactttactggagtccagcatacggtaggcgcttaacagatatagggtgagtagcagtggggcatgagtcggcttgccttccctgtagaaggttatgaagtccctgcgagacccacagcctgtcagtagactctgggtaccatcattcaatttactttttttcttagaggcctctctgttcttgcttctattcaattagatggagaaaatcccaggaatgctctcggtgactcctttttagctgctggttttcctgcccctttcagggaaagactctggcttaggtaggaatatgaaggcagaccctgaggtgagaagtctggcgaagtctgcctgtttataggggcaagtaagtcatgtggcctcactttctccatccacaaaatgggctctatactgtccatgtcagccacagggtggttgagatgatcctcaggaagccctttcaaagtcagacatgatctataaatgcattaccttctttatcattaaaacctcagttggggcyaggcacggtggctcatacttgtaattccagcactttgggaggccgaggcgggtggatcgcttgaggtcaggagttggagacagcctggccaatgcggtgaaacccccgctctactaaaaattaaaaaaaaatcagctgggcatggtggctcatgcctgtagtctcagctactctggaggctgaggcacgagaatcgcctgaacctgggaggcagaggttgcagtgagtcgagatcacgccactgcactccagcctgggcgatagagtgagattctgtctcaaaaaaaaaaaaaaaaccaaaacctgggttgactagatgttcttttttgcatttttctagaagaaaggaagaaagaaccagtaaggaagctaatatctgtttggcttttgctttttttcttcattaaaatgacaataatgtttacaatgtgatttggtacccgtacaggtaatccgttcaatctcttatcttgtgttcataattgatgtttagagtgatagctctccagctcagaatcctcatagaaaagtaatttaattttcagtgtaccaaagcagaaagaatgaggcaatatacattaaaaaggttttcagaatggtttaattccagaggaactttcttcttaggcctttaataaacctcagttattctcaacaatctctgagtttccatggctggtccatgggatctgaaggtagcattgtgtctccctggctagagtggaaacatataaaaatgatcctggataaccaggagacaacatttccttcgcatgtatccaggcagaacaaggagataaaggaaaagtctgtagctttttgaaaactgttttcccagaaatcggttatttgtgctggttaaaagccttgtacgggagagggagaacaaaaaccctgttcatccataaccatagtttaattcccttatagggccttttaggatctggagagaatattttggatttatttttgtttcccttgggctgacatcatcaagca

SEQ ID NO: 87703 - DNA, 1590 bp, Homo sapiens
taaaggaaatcaacaaaatgcaatgatggaaaattgcgttgatggacaacctacctagaagggctgtgggtcaggagcagcctgactttactggagtccagcatacggtaggcgcttaacagatatagggtgagtagcagtggggcatgagtcggcttgccttccctgtagaaggttatgaagtccctgcgagacccacagcctgtcagtagactctgggtaccatcattcaatttactttttttcttagaggcctctctgttcttgcttctattcaattagatggagaaaatcccaggaatgctctcggtgactcctttttagctgctggttttcctgcccctttcagggaaagactctggcttaggtaggaatatgaaggcagaccctgaggtgagaagtctggcgaagtctgcctgtttataggggcaagtaagtcatgtggcctcactttctccatccacaaaatgggctctatactgtccatgtcagccacagggtggttgagatgatcctcaggaagccctttcaaagtcagacatgatctataaatgcattaccttctttatcattaaaacctcagttggggccaggcacggtggctcatacttgtaattccagcactttgggaggccgaggcgggtggatcgcttgaggtcaggagttggagacagcctggccaatgcggtgaaacccccgctctactaaaaattaaaaaaaaatcagctgggcatggtggctcatgcctgtagtctcagctactctggaggctgaggcacgagaatcgcctgaacctgggaggcagaggttgcagtgagtcgagatcacgccactgcactccagcctgggcgatagagtgagattctgtctcaaaaaaaaaaaaaaaaccaaaacctgggttgactagatgttcttttttgcatttttctagaagaaaggaagaaagaaccagtaaggaagctaatatctgtttggcttttgctttttttcttcattaaaatgacaataatgtttacaatgtgatttggtacccgtacaggtaatccgttcartctcttatcttgtgttcataattgatgtttagagtgatagctctccagctcagaatcctcatagaaaagtaatttaattttcagtgtaccaaagcagaaagaatgaggcaatatacattaaaaaggttttcagaatggtttaattccagaggaactttcttcttaggcctttaataaacctcagttattctcaacaatctctgagtttccatggctggtccatgggatctgaaggtagcattgtgtctccctggctagagtggaaacatataaaaatgatcctggataaccaggagacaacatttccttcgcatgtatccaggcagaacaaggagataaaggaaaagtctgtagctttttgaaaactgttttcccagaaatcggttatttgtgctggttaaaagccttgtacgggagagggagaacaaaaaccctgttcatccataaccatagtttaattcccttatagggccttttaggatctggagagaatattttggatttatttttgtttcccttgggctgacatcatcaagca

SEQ ID NO: 87704 - DNA, 679 bp, Homo sapiens
ccagaatgttctgaatcatggacaatgtacgtttgtattcagaattgtttctgaagcatatatctagttgagaattgattttctaaacagagaaacacaggacagtgaccccaaatgggtgctgagacaaggggagctactgacttagacctaatcaccgtttttayatgtttgttgtaattaaagtctaaaattactgatactgatcttttttctgtaagagaacagaaatctatcaacaaaataatatctacagcacctgctagttctaaaagttgagcatatttctagtagacaaggaagcagtagtttctccaagaatatggctctctttggcatccacatttaaaaagttcccttgccaagagcctgaagagttggtctttagctttttactttatggatgaattctgggaatttggtgaaaatattaatcatatcacgattccaccaaaataagtgatttggttatatttaaaacttcacaagaacttacgactgtgtgtatttgaaggttacctatgtacagacacaaacatatgtagtatactcaatgggacagggtagagatgtcagctgaataaacattcttatccaaataataaaatactagcctgtcaaattttatcagatgtctatgcttttgcatcagctcccaatcatccctacaccaccattt

SEQ ID NO: 87705 - DNA, 1085 bp, Homo sapiens
tttatttggctaaaagtagttatatgtytttacctagatgcaaagaggctggggagcattggagagcaaatagaatatttaatgaagattactatctctgtcacaacatggtaagcaaactagcaactaattcttacctgcagttgctgcatgtagcttctagaagtgttgtcagaccctttggtacaaatgtccgtgtatataacaagaagttcattccctaaaatgactataagcctgaccgctacgtacatcatgcactagggtatcctgaacattcacagttgtgtcacattgtttaaagtgataatttagagtgctctttgttttgtaaatttttaattttcatgggtacatagtaggtatgtttatttatggggtaccatgagatgttttgatacaagcatgaaatgtgaagtaatctagaaggctttttgaattattttgattaatagtaccacatggacaaatggtctctgacacaggtagtagatcctgtgggaggctaagaggatgggtctcaaaagtgggcccagaagtaaattctgatatattatccctcttttgttcaagaagtttcttctttctgccctgaaataagttctttggaagtaggctgtatataagttatttctagttatgaatcactgtattggttctgccaagaatgccagggttaccctccacattgaagttactactataacttatgaacaaagtaagtgagaggaggcaaagatcttccttctatgtgttttgcaggaaaggcttctcagaggagatgtcatctgagctaacttttgaaaatagatactttttatttgtgagcagataatattccagtgcagaaaggagcactgtgaggtataaggggagaaacctgactaaagtcaagaaggcatgaaagtacatgacatttctgggaacaaaggagaacaccaatgggttaaaacatgaggttcttgtgagggaagtggtataaaataaatagagaggtgtgtggttgctctaatgatggtatccaaagaatcacacctaccagtattgactaagcttgactgtgtgatgtaagttgaagcatgata

SEQ ID NO: 87706 - DNA, 1085 bp, Homo sapiens
tttatttggctaaaagtagttatatgtctttacctagatgcaaagaggctggggagcattggagagcaaatagaatatttaatgragattactatctctgtcacaacatggtaagcaaactagcaactaattcttacctgcagttgctgcatgtagcttctagaagtgttgtcagaccctttggtacaaatgtccgtgtatataacaagaagttcattccctaaaatgactataagcctgaccgctacgtacatcatgcactagggtatcctgaacattcacagttgtgtcacattgtttaaagtgataatttagagtgctctttgttttgtaaatttttaattttcatgggtacatagtaggtatgtttatttatggggtaccatgagatgttttgatacaagcatgaaatgtgaagtaatctagaaggctttttgaattattttgattaatagtaccacatggacaaatggtctctgacacaggtagtagatcctgtgggaggctaagaggatgggtctcaaaagtgggcccagaagtaaattctgatatattatccctcttttgttcaagaagtttcttctttctgccctgaaataagttctttggaagtaggctgtatataagttatttctagttatgaatcactgtattggttctgccaagaatgccagggttaccctccacattgaagttactactataacttatgaacaaagtaagtgagaggaggcaaagatcttccttctatgtgttttgcaggaaaggcttctcagaggagatgtcatctgagctaacttttgaaaatagatactttttatttgtgagcagataatattccagtgcagaaaggagcactgtgaggtataaggggagaaacctgactaaagtcaagaaggcatgaaagtacatgacatttctgggaacaaaggagaacaccaatgggttaaaacatgaggttcttgtgagggaagtggtataaaataaatagagaggtgtgtggttgctctaatgatggtatccaaagaatcacacctaccagtattgactaagcttgactgtgtgatgtaagttgaagcatgata

SEQ ID NO: 87707 - DNA, 1085 bp, Homo sapiens
tttatttggctaaaagtagttatatgtctttacctagatgcaaagaggctggggagcattggagagcaaatagaatatttaatgaagattactatctctgtcacaacatggtaagcaaactagcaactaattcttacctgcagttgctgcatgtagcttctagaagtgttgtcagaccctttggtacaaatgtycgtgtatataacaagaagttcattccctaaaatgactataagcctgaccgctacgtacatcatgcactagggtatcctgaacattcacagttgtgtcacattgtttaaagtgataatttagagtgctctttgttttgtaaatttttaattttcatgggtacatagtaggtatgtttatttatggggtaccatgagatgttttgatacaagcatgaaatgtgaagtaatctagaaggctttttgaattattttgattaatagtaccacatggacaaatggtctctgacacaggtagtagatcctgtgggaggctaagaggatgggtctcaaaagtgggcccagaagtaaattctgatatattatccctcttttgttcaagaagtttcttctttctgccctgaaataagttctttggaagtaggctgtatataagttatttctagttatgaatcactgtattggttctgccaagaatgccagggttaccctccacattgaagttactactataacttatgaacaaagtaagtgagaggaggcaaagatcttccttctatgtgttttgcaggaaaggcttctcagaggagatgtcatctgagctaacttttgaaaatagatactttttatttgtgagcagataatattccagtgcagaaaggagcactgtgaggtataaggggagaaacctgactaaagtcaagaaggcatgaaagtacatgacatttctgggaacaaaggagaacaccaatgggttaaaacatgaggttcttgtgagggaagtggtataaaataaatagagaggtgtgtggttgctctaatgatggtatccaaagaatcacacctaccagtattgactaagcttgactgtgtgatgtaagttgaagcatgata

SEQ ID NO: 87708 - DNA, 1085 bp, Homo sapiens
tttatttggctaaaagtagttatatgtctttacctagatgcaaagaggctggggagcattggagagcaaatagaatatttaatgaagattactatctctgtcacaacatggtaagcaaactagcaactaattcttacctgcagttgctgcatgtagcttctagaagtgttgtcagaccctttggtacaaatgtccgtgtatataacaagaagttcattccctaaaatgactataagcctgaccgctacgtacatcatgcactagggtatcctgaacattcacagttgtgtcacattgtttaaagtgataatttagagtgctctttgttttgtaaatttttaattttcatgggtacrtagtaggtatgtttatttatggggtaccatgagatgttttgatacaagcatgaaatgtgaagtaatctagaaggctttttgaattattttgattaatagtaccacatggacaaatggtctctgacacaggtagtagatcctgtgggaggctaagaggatgggtctcaaaagtgggcccagaagtaaattctgatatattatccctcttttgttcaagaagtttcttctttctgccctgaaataagttctttggaagtaggctgtatataagttatttctagttatgaatcactgtattggttctgccaagaatgccagggttaccctccacattgaagttactactataacttatgaacaaagtaagtgagaggaggcaaagatcttccttctatgtgttttgcaggaaaggcttctcagaggagatgtcatctgagctaacttttgaaaatagatactttttatttgtgagcagataatattccagtgcagaaaggagcactgtgaggtataaggggagaaacctgactaaagtcaagaaggcatgaaagtacatgacatttctgggaacaaaggagaacaccaatgggttaaaacatgaggttcttgtgagggaagtggtataaaataaatagagaggtgtgtggttgctctaatgatggtatccaaagaatcacacctaccagtattgactaagcttgactgtgtgatgtaagttgaagcatgata

SEQ ID NO: 87709 - DNA, 1085 bp, Homo sapiens
tttatttggctaaaagtagttatatgtctttacctagatgcaaagaggctggggagcattggagagcaaatagaatatttaatgaagattactatctctgtcacaacatggtaagcaaactagcaactaattcttacctgcagttgctgcatgtagcttctagaagtgttgtcagaccctttggtacaaatgtccgtgtatataacaagaagttcattccctaaaatgactataagcctgaccgctacgtacatcatgcactagggtatcctgaacattcacagttgtgtcacattgtttaaagtgataatttagagtgctctttgttttgtaaatttttaattttcatgggtacatagtaggtatgtttatttatggggtaccatgagatgttttgatacaagcatgaaatgtgaagtaatctagaaggctttttgaattattttgattaatagtaccacatggacaaatggtctctgacacaggtagtagatcctgygggaggctaagaggatgggtctcaaaagtgggcccagaagtaaattctgatatattatccctcttttgttcaagaagtttcttctttctgccctgaaataagttctttggaagtaggctgtatataagttatttctagttatgaatcactgtattggttctgccaagaatgccagggttaccctccacattgaagttactactataacttatgaacaaagtaagtgagaggaggcaaagatcttccttctatgtgttttgcaggaaaggcttctcagaggagatgtcatctgagctaacttttgaaaatagatactttttatttgtgagcagataatattccagtgcagaaaggagcactgtgaggtataaggggagaaacctgactaaagtcaagaaggcatgaaagtacatgacatttctgggaacaaaggagaacaccaatgggttaaaacatgaggttcttgtgagggaagtggtataaaataaatagagaggtgtgtggttgctctaatgatggtatccaaagaatcacacctaccagtattgactaagcttgactgtgtgatgtaagttgaagcatgata

SEQ ID NO: 87710 - DNA, 1085 bp, Homo sapiens
tttatttggctaaaagtagttatatgtctttacctagatgcaaagaggctggggagcattggagagcaaatagaatatttaatgaagattactatctctgtcacaacatggtaagcaaactagcaactaattcttacctgcagttgctgcatgtagcttctagaagtgttgtcagaccctttggtacaaatgtccgtgtatataacaagaagttcattccctaaaatgactataagcctgaccgctacgtacatcatgcactagggtatcctgaacattcacagttgtgtcacattgtttaaagtgataatttagagtgctctttgttttgtaaatttttaattttcatgggtacatagtaggtatgtttatttatggggtaccatgagatgttttgatacaagcatgaaatgtgaagtaatctagaaggctttttgaattattttgattaatagtaccacatggacaaatggtctctgacacaggtagtagatcctgtgggaggctaagaggatgggtctcaaaagtgggcccagaagtaaattctgatatattatccctcttttgttcaagaagtttcttctttctgccctgaaataagttctttggaagtaggctgtatataagttatttctagttatgaatcactgtattggttctgccaagaatgccagggttaccctccacattgaagttactactataacttatgaacaaagtaagtgagaggaggcaaagatcttccttctatgtgttttgcaggaaaggcttctcagaggagatgtcatctgagctaacttttgaaaatagatactttttatttgtgagcagataatattccagtgcagaaaggagcactgtgaggtataaggggagaaacctgactaaagtcaagaaggcatgaaagtacatgacatttctgggaacaaaggagaacaccaatgggttaaaacatgaggttcttgkgagggaagtggtataaaataaatagagaggtgtgtggttgctctaatgatggtatccaaagaatcacacctaccagtattgactaagcttgactgtgtgatgtaagttgaagcatgata

SEQ ID NO: 87711 - DNA, 606 bp, Homo sapiens
tcccacctccacctcccaagtagctgggactacaggtgctcaccaccacgccaggctaagtgtgtgtgtgtgtgtgtgtgtgtgtttgtgtgtgtaaaacsgaggtctcgctgtgttctggaggctggtctccaacttgcactcaagcaatcttcctacctcggcctcccctcacaaagtgctgcaattacaggccagaaccaccatgctcagctggttccttttccttccaggtcctgaggtcgcagcggcgcgtccctccggtacatggcggggaagcggtgcggttccgggagcctgcgacgcctctggggagtccaagcccggctcctagccctttgcccgaggacggaggaggacctggggggcttcccctagctgatggtctcagttctccaggggcggcggagacagcaggaagccccaaaacccgagctgggtttcctgcttggagtcgcagggtgtggcaatgttgaagttcgccgtgcccctgctccctatgggaattagaatccggtccaggacaagcatcgggaaagggggacagtttgtgaccgaggaaactaggactgatccagaacagcgcaggcagagacgcgctgggct

SEQ ID NO: 87712 - DNA, 1245 bp, Homo sapiens
aatatggacttgttcttaacatttgctctttaatcggtctttataggtcattattttttacaacaggctcctaccttatcttctggattctggattcaccactttgaatctattttgtgagcatgcgctctctctctctcgctctctgtctctctctctctcacacacacacacacacacaatgaaaaagyaactgaagacattgtttaagcctggcaggggacttcaatcatcaccttctaagtgttgtcctcgtgtagactttttcctcattggatcgggtttgttctgtgtaaccaacagtgtgtaacaaaagtgatggtgtgctcaagagattagatattaaaagactgttctttccttcctgggtgtactcttgttccctccctccctccccacctccatctttctctctctctctcactgcttcctctgggggaagtcagctactacctagtgaagacactcaggtagcctcctgtcaagtcacagagatctcttaacaaccatctgagagagcttggaagcagaccattgaaccccagacaagctttgcgatgagacggcaaccccagcttccggcttggctacagcctaagacaccctgagccagaaccatccagctaagcccctcgcagattccccacccacgaaaatgctgagatgacacataagtattgctttaagcagctcagtttgggataatttataatatatcactaacatggatttcttaaaaaaaatatctaaaaacctattttcaacttccttaacattaaaattctctgcctactctcatgctcgttcacatttttgtcttacccagtctgtctagtctgctttattattcaccccagatgagttctatatacttgcctagccagaatacttttttttcatctgcttatgccttcatctccattaattttattcatattcttcgttctgggcaaaaatacctattcctttcattttaccgtactacttaaataatgtctattcattaaatcaacatacttcttgaattcttccaggagtaacccggagcactctaaccactttgttgtctcactccatagcagttaaaaattacagtatatagttagcctttcagaccgtattttatactggtccttaaacattcctcagaggcaattctataatacttgtcggctgactgcatgcttaacttaatcaggataaggaaagagcaattctagtttccattaaaattgaagtacatat

SEQ ID NO: 87713 - DNA, 1245 bp, Homo sapiens
aatatggacttgttcttaacatttgctctttaatcggtctttataggtcattattttttacaacaggctcctaccttatcttctggattctggattcaccactttgaatctattttgtgagcatgcgctctctctctctcgctctctgtctctctctctctcacacacacacacacacacaatgaaaaagtaactgaagacattgtttaagcctggcaggggacttcaatcatcaccttctaagtgttgtcctcgtgtagactttttcctcattggatcgggtttgttctgtgtaaccaacagtgtgtaacaaaagtgatggtgtgctcaagagattagatattaaaagactgttctttccttcctgggtgtactcttgttccctccctccctccccacctccatctttctctctcyctctcactgcttcctctgggggaagtcagctactacctagtgaagacactcaggtagcctcctgtcaagtcacagagatctcttaacaaccatctgagagagcttggaagcagaccattgaaccccagacaagctttgcgatgagacggcaaccccagcttccggcttggctacagcctaagacaccctgagccagaaccatccagctaagcccctcgcagattccccacccacgaaaatgctgagatgacacataagtattgctttaagcagctcagtttgggataatttataatatatcactaacatggatttcttaaaaaaaatatctaaaaacctattttcaacttccttaacattaaaattctctgcctactctcatgctcgttcacatttttgtcttacccagtctgtctagtctgctttattattcaccccagatgagttctatatacttgcctagccagaatacttttttttcatctgcttatgccttcatctccattaattttattcatattcttcgttctgggcaaaaatacctattcctttcattttaccgtactacttaaataatgtctattcattaaatcaacatacttcttgaattcttccaggagtaacccggagcactctaaccactttgttgtctcactccatagcagttaaaaattacagtatatagttagcctttcagaccgtattttatactggtccttaaacattcctcagaggcaattctataatacttgtcggctgactgcatgcttaacttaatcaggataaggaaagagcaattctagtttccattaaaattgaagtacatat

SEQ ID NO: 87714 - DNA, 1245 bp, Homo sapiens
aatatggacttgttcttaacatttgctctttaatcggtctttataggtcattattttttacaacaggctcctaccttatcttctggattctggattcaccactttgaatctattttgtgagcatgcgctctctctctctcgctctctgtctctctctctctcacacacacacacacacacaatgaaaaagtaactgaagacattgtttaagcctggcaggggacttcaatcatcaccttctaagtgttgtcctcgtgtagactttttcctcattggatcgggtttgttctgtgtaaccaacagtgtgtaacaaaagtgatggtgtgctcaagagattagatattaaaagactgttctttccttcctgggtgtactcttgttccctccctccctccccacctccatctttctctctctctctcactgcttcctctgggggaagtcagctactacctagtgaagacactcaggtagcctcctgtcaagtcacagagatctcttaacaaccatctgagagagcttggaagcagaccattgaaccccagacaagctttgcgatgagacggcaaccccagcttccggcttggctacagcctaagacaccctgagccagaaccatccagctaagcccctcgcagattccccacccacgaaaatgctgagatgacacataagtattgctttaagcagctcagtttgggataatttataatatatcactaacatggatttcttaaaaaaaatatctaaaaacctattttcaacttccttaacattaaaattctctgcctactctcatgctcgttcacatttttgtcttacccagtctgtctagtctgctttattattcaccccagatgagttctatatacttgcctagccagaatacttttttttcatctgcttatgccttcatctccattaattttattcatattcttcsttctgggcaaaaatacctattcctttcattttaccgtactacttaaataatgtctattcattaaatcaacatacttcttgaattcttccaggagtaacccggagcactctaaccactttgttgtctcactccatagcagttaaaaattacagtatatagttagcctttcagaccgtattttatactggtccttaaacattcctcagaggcaattctataatacttgtcggctgactgcatgcttaacttaatcaggataaggaaagagcaattctagtttccattaaaattgaagtacatat

SEQ ID NO: 87715 - DNA, 1245 bp, Homo sapiens
aatatggacttgttcttaacatttgctctttaatcggtctttataggtcattattttttacaacaggctcctaccttatcttctggattctggattcaccactttgaatctattttgtgagcatgcgctctctctctctcgctctctgtctctctctctctcacacacacacacacacacaatgaaaaagtaactgaagacattgtttaagcctggcaggggacttcaatcatcaccttctaagtgttgtcctcgtgtagactttttcctcattggatcgggtttgttctgtgtaaccaacagtgtgtaacaaaagtgatggtgtgctcaagagattagatattaaaagactgttctttccttcctgggtgtactcttgttccctccctccctccccacctccatctttctctctctctctcactgcttcctctgggggaagtcagctactacctagtgaagacactcaggtagcctcctgtcaagtcacagagatctcttaacaaccatctgagagagcttggaagcagaccattgaaccccagacaagctttgcgatgagacggcaaccccagcttccggcttggctacagcctaagacaccctgagccagaaccatccagctaagcccctcgcagattccccacccacgaaaatgctgagatgacacataagtattgctttaagcagctcagtttgggataatttataatatatcactaacatggatttcttaaaaaaaatatctaaaaacctattttcaacttccttaacattaaaattctctgcctactctcatgctcgttcacatttttgtcttacccagtctgtctagtctgctttattattcaccccagatgagttctatatacttgcctagccagaatacttttttttcatctgcttatgccttcatctccattaattttattcatattcttcgttctgggcaaaaatacctattcctttcattttaccgtactacttaaataatgtctattcattaaatcaacatacttcttgaattcttccaggagtaacccggagcactctaaccactttgttgtctcactccatagcagttaaaaattacagtatatagttagcctttcagaccrtattttatactggtccttaaacattcctcagaggcaattctataatacttgtcggctgactgcatgcttaacttaatcaggataaggaaagagcaattctagtttccattaaaattgaagtacatat

SEQ ID NO: 87716 - DNA, 592 bp, Homo sapiens
cccacagtccattggcctcttgttctgggcctgggagaacccagaataaggatgaaacaagggacgtctttagggcatgccggcccctctgtgctgaaaggaagctccatttttcttccttctggcaagaaccatcaggccagccctcttcctggtctgctggccctggaaaccmtagtaaatgactttttcaggtaataccctccattgccttttttctctcctcttccctttcatccctagttgctaattagtgagatgcttgttacttgcagttttgtgtcccaccctctgcgtggtgcctactggaacactgtccctgcctgctcacccaagttgtgtggtcccctggcccaactgagctgaccagtagatgtgagtgtaggtaggaagaagtacagggacttagttatgaattctgtctagagccaggagaaggaggcaagaaggtgaagaaagagaaaggagatgtgtcaatggggcatgataaaatattaaattcctgaaaggtttgccaggatgtggagttcatttctttcatatccattcccagtcctgcaggtgagtgagtctgcacatggggacaagtgcc

SEQ ID NO: 87717 - DNA, 592 bp, Homo sapiens
cccacagtccattggcctcttgttctgggcctgggagaacccagaataaggatgaaacaagggacgtctttagggcatgccggcccctctgtgctgaaaggaagctccatttttcttccttctggcaagaaccatcaggccagccctcttcctggtctgctggccctggaaacccyagtaaatgactttttcaggtaataccctccattgccttttttctctcctcttccctttcatccctagttgctaattagtgagatgcttgttacttgcagttttgtgtcccaccctctgcgtggtgcctactggaacactgtccctgcctgctcacccaagttgtgtggtcccctggcccaactgagctgaccagtagatgtgagtgtaggtaggaagaagtacagggacttagttatgaattctgtctagagccaggagaaggaggcaagaaggtgaagaaagagaaaggagatgtgtcaatggggcatgataaaatattaaattcctgaaaggtttgccaggatgtggagttcatttctttcatatccattcccagtcctgcaggtgagtgagtctgcacatggggacaagtgcc

SEQ ID NO: 87718 - DNA, 592 bp, Homo sapiens
cccacagtccattggcctcttgttctgggcctgggagaacccagaataaggatgaaacaagggacgtctttagggcatgccggcccctctgtgctgaaaggaagctccatttttcttccttctggcaagaaccatcaggccagccctcttcctggtctgctggccctggaaaccctagtaaatgactttttcaggtaataccctccattgccttttttctctcctcttccctttcatccctagttgctaattagtgagatgcttgttacttgcagttttgtgtcccaccctctgcgtggtgcctactggaacactgtccctgcctgctcacccaagttgtgtggtcccctggcccaactgagctgaccagtagatrtgagtgtaggtaggaagaagtacagggacttagttatgaattctgtctagagccaggagaaggaggcaagaaggtgaagaaagagaaaggagatgtgtcaatggggcatgataaaatattaaattcctgaaaggtttgccaggatgtggagttcatttctttcatatccattcccagtcctgcaggtgagtgagtctgcacatggggacaagtgcc

SEQ ID NO: 87719 - DNA, 1432 bp, Homo sapiens
acagtgttttgccatgttggccaagctggtcttaaactcctgccctcaggtgatccacccgcctcggcttccaaaagtgctgggattacaggtgtgagccactgcacctggcctggactccctttttctagattagatatctattaatgacagcaccaaacaccttagccttaataaaaaaagattatagtattaattgaacttaatgtcagtgaaagtctttactattgtaatgtcagtggaagtctttactatttttgtgcccatttctctccctttcctggacttgtgcagttggtttatttaactaaagcttgggatcattctttgactttgttaaatccagctttggattttaaaaatccatcacaccatgatctatgtgggtgcagtgcttttatctagcacatcagctgtcccttctagcttcatgtcattcatcaatgaagaactattttagggaagttcatgacagctggagagcaaagactttctttcctttggaatgattcttttctaaaagtcattactgctgctcctttggcccctagagtgatggcataactacctttgtctctctgtcttccacagcattaatgcatgaggaagcctcaccactccttccccactaagagatggaatagcttgggaatatgctggagacattctttcccctacactgtagttaggccatacagaagctgttggttactcatgggcatgataggaagaaaccctttctgttcagtccagccaccttgccataagaacaatattggtctagtggcaaacagtgagtgggctggtatgattacatggtacaaaaggctaggtggtgaggactgaacatggtagtatcatggaagggcaaaacccagaggctggaatctgggcaacccctatcttggagaattagcagcaggatctctctcttctgagtctctggaaatcatcatcatcatcagtccagcaattcgatccattctcagtgctstgtaaagcttgcataaaagccaaaatcctgtatgtaaatcctatatgattatcctgagtgttagctcataattgctgttaggtgattatttgaagctttgtatagcttggctgtagtggtgacaggctattgttgaagtctgccattctgattatgggtagcattctcaggggatttcagccatttaaaccaccatttttataggtcaaaacaagtcacctatcagcagtttaatacagtcctgcccaatatgttgcttggtgtctttggagatcatcagaattcatagaggcaaagaatcttagagttgggaggactttctggtaattatctcctacaacctcattctgactcttttttatggcatttctggcaaataaaatttcccttattattttactctctgttcatgccaaatgtgcttgtttttttttttcc

SEQ ID NO: 87720 - DNA, 645 bp, Homo sapiens
cattcaatcatcaaacacacactgaacacttattgtctgtcaggtactataataggtgttgccttacatgtcagtacatttccatagcataataaaaataacatcaacaacaactgttataaagctcgtgtcaggctgggcgtggtggcttatgcctgtaatcccagcactttggaaggctgcagcgggcagatcacctgaggtcaggagttcgagaccagcctggctaacatggcaaaaccccgtctctgctgaaaaatacaaaatttagccaggcatggtggcacacacctgtaatcctagctactcagaaggttgaggcaggagaatcacttgaatctgggaggcagaggtggcagtaagccaagattgcaccattgcactttagcctgggcaacagagtgagattccgtctcaaaaaaaaaaaaaaaaaaraaaaagaaaaagctcctatgtgtaggcacaaatttgtatatgttaatcctcaaagtaacttttgaggtaggcattattattagtcaaattttatgataggaaaatcaaggcaaagaaatgtttaacaactttcctagcgtcacaagttagaaagtagcacagatggaaatcaaacctggctctgaagtccttgatcttaacccccatgca

SEQ ID NO: 87721 - DNA, 641 bp, Homo sapiens
atataatctcagcctaggctggctctgctcatgggagtgaagtggtctgcagcttgagagctcacaccagcacacctcacaatgaagatctggagagaatgacttgtccaccagccactgaacaaaattctcaggctttattttggttggaccaacatggatcaaatatctgtctttggaccaatcacaatgggaygctcctgtagctagaccatgggtggggactagagtggacttggggagatgcaagagagtgaacacaagcatttggactttagtctgtgtgtccttggagcatggtatgtattggtgcatggggtggcttgttcatctttgtggtaatagaactccaggggtggtaatgtccctggatttggcagaatcagggacaggaaggacactgcctggctgacactggctctactgtctcagcagaagccactaagctgggccatagagccaattctagaatctagtccatggaggtacatttgacacatcttggcattgggcaggaaggaggagaggcagagtgaaagggtgacagtaaaggacccagccagtcttcgttggtcaatgttgttctcctatggttttcatcactcttcagagaaaagaggctaagaatcttttaggggatc

SEQ ID NO: 87722 - DNA, 438 bp, Homo sapiens
aagcttcaaaatctgttggcctacattttaaacgtgtactgttagcatcccactagtaccwtaaacagctattggtggtaaccttgttaaggaaagaaaagatggataaagggtgggggcggggggagcggggggtgaaaaaaacagtttgactgataagcacagcttagaaatttggcaaatattggctttttcactgcggagtgttgggagtgtccaagtgttgccagaacacttgaagattttctacttgcctgtgtgtgagctcagtctctccactcttcctaagacactcctcttttgtgacgtgaaagaaactaaatgacaagccaccgaaactccaattaaggataaaatgatacaaggcacaggtgacggctcctgggacgtaagtatacacaggttttctaaatgaaggacttagatacataaataact

SEQ ID NO: 87723 - DNA, 756 bp, Homo sapiens
ctcacgcctgtaatctcggcactttgggaggcagaggtgggaggatcacttgaggccaggagcttaaggctagcctgggcaacatagcgagaccccatctctacaaaaaataaaaaattagctgggcatggtggtatgtgcctgtggtcctagctacttgggaggctgaggtaggggcattgagcctaggagttcaaggctgcagtgagctataatcacaccactgcactccagcctgggtaacagagtgagaccctgtctcaaaaaaaagaaagaaaaagaaaaagaaaaggggtatttattgaacacctactatgtttcaggcactgtgctagatcctaagtgaatatcagcacatgaacaagacaaaggcgaaaagttaccaaacaagtctaagttgatttcggtatatgcatcttcctgacttctggtcccgtgctttgaccacaacccttcaccactagaccagacttccccaaataaacaactacttctgcatgctggggatgggctgtgtgcggcagcatttacgtaggyggtacagacagcagcctttcacttaatgttgcaataacaccaggctaaacaatgtgcactgacttcaaaagtgtggggtcaggtctccttcaagtgccacagggagagtgcaaagtaggaaaagtctatcggatgaggaaacactgtagagggaaagtgaattttttttcaatttgggttaaaattcagatgtggaattctaccctccttttcactttt

SEQ ID NO: 87724 - DNA, 1169 bp, Homo sapiens
tgcattgttgaggtggtctgaatgttctgacattaacagttttccatgaaaacgttttattgtgtttttaatttatttattaagatggattctcagatatttatatttttattttatttttttctaccttgaggtcttttgacatgtggaaagtgaatttgaatgaaaaatttaagcattgtttgcttattgttccaagacattgtcaataaaagcatttaagttgaatgcgaccaaccttgtgctcttttcattctggaagtcttgtaagtttctgaaaggtattattggagaccagtttgtcaagaagggtagctgctggagggggacacaccctctgtctgatcccttatcaaagaggacaaggaaactatagagctgattttagaatattttacaaatacatgccttccattggaatgctaagattttctactgcttctggggacgggaaaccgctgtgtaacagcttttgtgggaatacattttttctgtttcagtactcgcagggggaaatatttaaattttgttgtgctaatattaaattcagatgttttgatcttaaaggaaccctttaagcaaacagaacctagctttgtacagactattttaactttttattctcacaaaatcacgtggagggttattctacttcaaagatgagcaaattgaagaatggttagaataaacaactttcttgatattccgttatcggcattagaatcttcctgctcgttatcgtatccagcaggctgaactgcctcttgatacttggttaaaaaaaattttcaggccgggcgcggtggcccatgcctgtaatcctagcactttgggaggccgaggcaggcggatcacctgaggtcgggagttcgagaccagcctgaccaacatggagaaaccccgtctttactaaaartacaaaattagcctggtgtggtggtgcatgcctgtaatcctagctacttgagaggctgagacaggaaaatcacttgaactcgggaggcggatgttgcagcgaactgagattgcgccattgcactccagcctgggcaacaagattgaaactctgtttaaaaaaaaaagttttcactaatgtgtacatttttttgtactcttttattctcgaaagggaaggagggctattgccctatcccttattaataaatgca

SEQ ID NO: 87725 - DNA, 2147 bp, Homo sapiens
tccctctccccttctctttctccgctcctctctctctctagacaaggatacaaatttctatgtggccttggagaacgtggacaccactatgaaggtgaggggctaaagagggggaccccaaggaactctcccagcctccattccagaatccctccccgacccccaccagggcagggagggggctgggctcggatcagcagtgacctccctgtcagcccaaaccagtggctccgcgttcccgtccctcactgtgactctgacaggtgcacatcaagagacccgagatgacctcgtcctcagtgtgagccctgcggggccccttcaccaccccctccgccctgccccggacacaagggtctgcattgcgtccatttcaagaggtggccccaggacgcgggcagcccaggctcctgctgttcttgggcaagatgagactgttcccccaaatcccatccttctccttccaacttggctgaaacccacctggagacgcagttcacgtccaggytcttccactgtggaatcttgggcaagtcagtaacgagcctcagtttcctcacctgcaaaacgggtacagcattcctgtatgatacgtcacgccgttgttgtgaaaaccacatagacttggtcaattctcggtcctactctgccctcccgtctcagccctcgtgttgccattgcctctctcggatcctccaatcctcacgtccttcacctggtctctggccctggttcttattttctctcaattccctactgcctgtttcttactttgaacctggaggcagcctgcagccccatcccatctcctgccctctcctgatctaactccctgctgcatctcttgctctcattccttagacgtcctccccttttgaccccgttccttcatccatcctgcaccccagtcccccagccctaaatcctccctcctctcctcacatcctggtccctagcaaggtatagatagcctctgtgtcttaggataccccgggtgctgttccctcggtcaccctgttgcccagttccccgtttctcttgctctcattccttgtatcctttccccttttgagcccgtccattcatcggttctgcccccgactcccccagccctaaataccccagctgctgttccccccatcaccctgctgcccaattctttattctccacccctttctctcacccctggagccctgcgggtgggggcagggcatgagttccccagtccccaaggaaaggcagccccctcagtctccctcctcctcattcccttccatctccctcccctctgccttttaaacccatcccctccgattcccctcctcccccctctctccctggtgtcacctggattcctgcagtaattctgagcccttgaaatcctcagtcgccttggcggggaagattggctttggggacaggaagtcggcacatctccaggtcttcatgtgcacaatatagagtttattgtaaaaagcagcagctctctgtcggtctccttttcaccccctcagtggtctctgtttgatcagagaacagggatttccagaggtggcactgtaggaggatcctgggagcacctgtgtctcctggggacaaaggagggggtctgtgggcagcccttgggggccatgaggttcctcacagaaaacacagaggttggggggacccattttattggggagtgactctgggcaggggccccttgggctttgtcatctatgctctccccacccccaccactgccctgaccttgatactgggggcttagggagcaattagacccctggtgttggttcagggagttgggtggtccaggggctagggctgcctggtccagccaccttttgcaaggatgggtaaagctgagcctccccaaagatcttgatcccccacaaggcccccaaaccctgatagcaaactcacacagcagagcctgtctatgctggcaccgggcccttctgttcctgctgttgtgggcagtcaggcctgcctgaggagtcgagagtgatcagaaataacgtgtccccttgggtctttgggtgctggcttgggagaggcccctttgatgctttctctgggcagggatgggccatggccttttgtcacctctgtgtctggccaggggttgggggacaaggaccat

SEQ ID NO: 87726 - DNA, 2147 bp, Homo sapiens
tccctctccccttctctttctccgctcctctctctctctagacaaggatacaaatttctatgtggccttggagaacgtggacaccactatgaaggtgaggggctaaagagggggaccccaaggaactctcccagcctccattccagaatccctccccgacccccaccagggcagggagggggctgggctcggatcagcagtgacctccctgtcagcccaaaccagtggctccgcgttcccgtccctcactgtgactctgacaggtgcacatcaagagacccgagatgacctcgtcctcagtgtgagccctgcggggccccttcaccaccccctccgccctgccccggacacaagggtctgcattgcgtccatttcaagaggtggccccaggacgcgggcagcccaggctcctgctgttcttgggcaagatgagactgttcccccaaatcccatccttctccttccaacttggctgaaacccacctggagacgcagttcacgtccaggttcttccactgtggaatcttgggcaagtcagtaacgagcctcagtttcctcacctgcaaaacgggtacagcattcctgtatgatasgtcacgccgttgttgtgaaaaccacatagacttggtcaattctcggtcctactctgccctcccgtctcagccctcgtgttgccattgcctctctcggatcctccaatcctcacgtccttcacctggtctctggccctggttcttattttctctcaattccctactgcctgtttcttactttgaacctggaggcagcctgcagccccatcccatctcctgccctctcctgatctaactccctgctgcatctcttgctctcattccttagacgtcctccccttttgaccccgttccttcatccatcctgcaccccagtcccccagccctaaatcctccctcctctcctcacatcctggtccctagcaaggtatagatagcctctgtgtcttaggataccccgggtgctgttccctcggtcaccctgttgcccagttccccgtttctcttgctctcattccttgtatcctttccccttttgagcccgtccattcatcggttctgcccccgactcccccagccctaaataccccagctgctgttccccccatcaccctgctgcccaattctttattctccacccctttctctcacccctggagccctgcgggtgggggcagggcatgagttccccagtccccaaggaaaggcagccccctcagtctccctcctcctcattcccttccatctccctcccctctgccttttaaacccatcccctccgattcccctcctcccccctctctccctggtgtcacctggattcctgcagtaattctgagcccttgaaatcctcagtcgccttggcggggaagattggctttggggacaggaagtcggcacatctccaggtcttcatgtgcacaatatagagtttattgtaaaaagcagcagctctctgtcggtctccttttcaccccctcagtggtctctgtttgatcagagaacagggatttccagaggtggcactgtaggaggatcctgggagcacctgtgtctcctggggacaaaggagggggtctgtgggcagcccttgggggccatgaggttcctcacagaaaacacagaggttggggggacccattttattggggagtgactctgggcaggggccccttgggctttgtcatctatgctctccccacccccaccactgccctgaccttgatactgggggcttagggagcaattagacccctggtgttggttcagggagttgggtggtccaggggctagggctgcctggtccagccaccttttgcaaggatgggtaaagctgagcctccccaaagatcttgatcccccacaaggcccccaaaccctgatagcaaactcacacagcagagcctgtctatgctggcaccgggcccttctgttcctgctgttgtgggcagtcaggcctgcctgaggagtcgagagtgatcagaaataacgtgtccccttgggtctttgggtgctggcttgggagaggcccctttgatgctttctctgggcagggatgggccatggccttttgtcacctctgtgtctggccaggggttgggggacaaggaccat

SEQ ID NO: 87727 - DNA, 2147 bp, Homo sapiens
tccctctccccttctctttctccgctcctctctctctctagacaaggatacaaatttctatgtggccttggagaacgtggacaccactatgaaggtgaggggctaaagagggggaccccaaggaactctcccagcctccattccagaatccctccccgacccccaccagggcagggagggggctgggctcggatcagcagtgacctccctgtcagcccaaaccagtggctccgcgttcccgtccctcactgtgactctgacaggtgcacatcaagagacccgagatgacctcgtcctcagtgtgagccctgcggggccccttcaccaccccctccgccctgccccggacacaagggtctgcattgcgtccatttcaagaggtggccccaggacgcgggcagcccaggctcctgctgttcttgggcaagatgagactgttcccccaaatcccatccttctccttccaacttggctgaaacccacctggagacgcagttcacgtccaggttcttccactgtggaatcttgggcaagtcagtaacgagcctcagtttcctcacctgcaaaacgggtacagcattcctgtatgatacstcacgccgttgttgtgaaaaccacatagacttggtcaattctcggtcctactctgccctcccgtctcagccctcgtgttgccattgcctctctcggatcctccaatcctcacgtccttcacctggtctctggccctggttcttattttctctcaattccctactgcctgtttcttactttgaacctggaggcagcctgcagccccatcccatctcctgccctctcctgatctaactccctgctgcatctcttgctctcattccttagacgtcctccccttttgaccccgttccttcatccatcctgcaccccagtcccccagccctaaatcctccctcctctcctcacatcctggtccctagcaaggtatagatagcctctgtgtcttaggataccccgggtgctgttccctcggtcaccctgttgcccagttccccgtttctcttgctctcattccttgtatcctttccccttttgagcccgtccattcatcggttctgcccccgactcccccagccctaaataccccagctgctgttccccccatcaccctgctgcccaattctttattctccacccctttctctcacccctggagccctgcgggtgggggcagggcatgagttccccagtccccaaggaaaggcagccccctcagtctccctcctcctcattcccttccatctccctcccctctgccttttaaacccatcccctccgattcccctcctcccccctctctccctggtgtcacctggattcctgcagtaattctgagcccttgaaatcctcagtcgccttggcggggaagattggctttggggacaggaagtcggcacatctccaggtcttcatgtgcacaatatagagtttattgtaaaaagcagcagctctctgtcggtctccttttcaccccctcagtggtctctgtttgatcagagaacagggatttccagaggtggcactgtaggaggatcctgggagcacctgtgtctcctggggacaaaggagggggtctgtgggcagcccttgggggccatgaggttcctcacagaaaacacagaggttggggggacccattttattggggagtgactctgggcaggggccccttgggctttgtcatctatgctctccccacccccaccactgccctgaccttgatactgggggcttagggagcaattagacccctggtgttggttcagggagttgggtggtccaggggctagggctgcctggtccagccaccttttgcaaggatgggtaaagctgagcctccccaaagatcttgatcccccacaaggcccccaaaccctgatagcaaactcacacagcagagcctgtctatgctggcaccgggcccttctgttcctgctgttgtgggcagtcaggcctgcctgaggagtcgagagtgatcagaaataacgtgtccccttgggtctttgggtgctggcttgggagaggcccctttgatgctttctctgggcagggatgggccatggccttttgtcacctctgtgtctggccaggggttgggggacaaggaccat

SEQ ID NO: 87728 - DNA, 471 bp, Homo sapiens
tccttgttaacaagaaaccttctgccaaatgcctctgaagcacaggcaggtcttggggagccacaaggccacttcctctttgtgcactagtgtcttgggtaggcatagctttcagagctctggggcctccacaaccttgccctgctgtccaggggcagccctcatgcaggggtgtcctaagaacttttcaggaygcacaagttcagcactgtcttccaatgtgtgtttcacgatattttaatggtggttcttttgggaaaaaggaaaggttctgtgatcaattatgggacacattgagctacagatctttttcacaattgctcttaacaagcaggtagaccctgagaacatgagtagcttccccgcaggtaacttgagtgcatgagaacttttgctttacaaccatgccaatctcacctcagcagttggcagtgctgcacggggcagacttccctactcaaaggctgtgaa

SEQ ID NO: 87729 - DNA, 471 bp, Homo sapiens
tccttgttaacaagaaaccttctgccaaatgcctctgaagcacaggcaggtcttggggagccacaaggccacttcctctttgtgcactagtgtcttgggtaggcatagctttcagagctctggggcctccacaaccttgccctgctgtccaggggcagccctcatgcaggggtgtcctaagaacttttcaggatgcacaagttcagcactgtcttccaatgtgtgtttcacgatattttaatggtggttcttttgggaaaaaggaaaggttctgtgatcaattatgggacacattgagctacagatctttttcacaattgctcttaacaagcaggtagaccctgagaacatgagtagcttccccgcaggtaacttgagtgcatgagaacttttgctttacaaccatgccaatctcacctcagcagttggcagtgctgcackgggcagacttccctactcaaaggctgtgaa

SEQ ID NO: 87730 - DNA, 747 bp, Homo sapiens
tgcatgaggacccaaggcaagtttttttcattttggcatagtaccctgcataaaatgataattcatcaaatattaaactttattattactatagtaaaaaataaacggataaaatcaacatgaagaaaagagttaagaatggcaccgtatttacattgtttataaatttttaaaaaataagtytttagagacacagaggtacaaatgttctttagagagttgaaaaactaagacaaaaacacacgtgtaagataagacagccccatcaatgtagatttaagtgacacttgttaccaaatggcttccctgggggacagagagatttccatgagtgagctttatattaaggaattcttatgattatggaattaatgactgtgagataaagatttaaaaagtatgttcaggcaggaggagaagttgaacttcagtgcagtttcagtgcattcctcagccagccccatggaaatcttaaacctcaaatgatcatttagagttgttccaagatgaggtaaggaggctcagccactatacttccatatctaaaactcactggaggcaggtcactttgggaaggaaatatatctttggacttgaagttgaggaattaagtccttcattcttgaaaaaaaatcttgacttcacataacaacgtgatatctgaaggttaaatactacaacctggcctcatttgtatcacgatactattaaccccatctctaggagtgagtttcattcttcaatgcc

SEQ ID NO: 87731 - DNA, 510 bp, Homo sapiens
catgaaccagtccagcctagcacctggcactgcctttccctcagcacactccagtctgtaaaagtctccttatggttgttttggcaaagttgagcttagttaatgctagaccccttctctactgcaatagttactgctgaataaagtctatccttaccactttaactagtgttgggctttgtttctctttcataagctcatggagaagacaatgcagttccatcaagtttctggctcttacactgctaacagtcagctctggggtccctgagagggacagactcacaccacccgcttcatccaggtgccgtcaacgttcctggttcctctttggttcctcctcactgcaagaagtctcactcyacctgaagcctcaaatcagagccccttcacatgcggatacggtgaacagatcttagccatcgtgggatcaggagctcaggagtttgagatcagacttgacaacatagtgagaccttatctcactatgttcctgaagtcagggactag

SEQ ID NO: 87732 - DNA, 823 bp, Homo sapiens
taacaaagaaaaacgagatgaaaatagagctatcttgagatacagaataaaattttaaaaagttaacagatattgagaataagagcaactaaaagcacaatagcaaattttgtttttaattttttttttttttttttttgagatggaatctcactctgttgcccaggctggagtgcagtggcatgatccccactcactgcacctctgcctcccgggttcaagcaattctcctgcctcagcctcccgagtacttgttattactggtgtgcgccactatgcccagctaatttttgtatttttagtacagacagggttttgtcatgttggccaggctggtttcaaactcctgacctcaggtgatctgcccgccttgccctcccaaagtgctgggattacaggcatgagccaccagccaacaacagcaaattaaaatgtgctttagaggtaccaagaagagaaagtatatmattatatcatatacaattatatcagtgatattggggaatagagaatctccttaagagtaaaagagaaaaaacatacaggagaaaatgatcagaaagatggtaactgtggagagaagagagatgatccaatttatagatgatcggaattgagaaagaaccagaacaaaactgccaagtaataaacaaacatagaataaactgataacacccaaatctttacagcaaaaccatccactttgatgcaatgacaaatttttaaagctgcttgctaaaatttttggtttatgagaataaaaaaagttcttcaagaaaataagcttgaaaataaaccatagtgctattatatgtgggatgca

SEQ ID NO: 87733 - DNA, 823 bp, Homo sapiens
taacaaagaaaaacgagatgaaaatagagctatcttgagatacagaataaaattttaaaaagttaacagatattgagaataagagcaactaaaagcacaatagcaaattttgtttttaattttttttttttttttttttgagatggaatctcactctgttgcccaggctggagtgcagtggcatgatccccactcactgcacctctgcctcccgggttcaagcaattctcctgcctcagcctcccgagtacttgttattactggtgtgcgccactatgcccagctaatttttgtatttttagtacagacagggttttgtcatgttggccaggctggtttcaaactcctgacctcaggtgatctgcccgccttgccctcccaaagtgctgggattacaggcatgagccaccagccaacaacagcaaattaaaatgtgctttagaggtaccaagaagagaaagtatataattatatcatatacaattatatcagtgatattggggaatagagaatctccttaagagtaaaagagaaaaaacatacaggagaaaatgatcagaaagatggtaactgtggagagaagagagatgatcyaatttatagatgatcggaattgagaaagaaccagaacaaaactgccaagtaataaacaaacatagaataaactgataacacccaaatctttacagcaaaaccatccactttgatgcaatgacaaatttttaaagctgcttgctaaaatttttggtttatgagaataaaaaaagttcttcaagaaaataagcttgaaaataaaccatagtgctattatatgtgggatgca

SEQ ID NO: 87734 - DNA, 576 bp, Homo sapiens
agccctgccattatgactttgtttgaccttaattacttcctaaagacactacctcccaatacagtcatgtttggggttgggacttcaacatatgaatgttggaggggatatggttctgtttctagcaaatgtatagtagtgggaattgcaaaggttraagttccaaagtatcaagggaatcagaattgggaagcaattctaacctttttgaagtggttacatggcccaagtagaagagcaaataattccaagagacaccaagccacagagcaggtaggatcacgtgagtagggcccaggatagaagagcagtgttagggttgcatgagagtgagggcatataagacaacaacagctaaaagcaatgcatgctcagatcttgggagatgtattaaatgagtagagtgaatttcaagatatctgagttttttttttttaatgattacatgggttctagagtcaaaatgccatggctcatctggtactgtaacttaagataaactgcttagctaaggctcagctttcatacctataattttgttatacttatcttgcaggtttcttgagaaatattgga

SEQ ID NO: 87735 - DNA, 508 bp, Homo sapiens
atattcagagtttaatcaaatatttcctcctcccatctttttgtaaccgtatgcacacactgcaagagagactgcatgcttcctttttgcaaaactctgtgcaaggcatggttcctcctttcaggatgcttgacatctagtaaagtcaggtgtgataagcacctaatctaaaatagaaaacagaattttaagcatcatatatgaaaagtatcacattgcttcaagaaagataaataattttagatagggagatgggaaatatgctaagagtgaggggatgtttggtgagttaagaaygttggaagagtggtaaaggtagacgggaagttagcattggaaggtgtctgaagtctgggtggttagcacctgtagaagaggtagaagaggcattcagtcataggcatcaatatgtggaaggcataaaatgggaaaatgaaagacttttcaagaataacaaggtggctggattctagttgacacatggggaaatgggagatacataagagga

SEQ ID NO: 87736 - DNA, 508 bp, Homo sapiens
atattcagagtttaatcaaatatttcctcctcccatctttttgtaaccgtatgcacacactgcaagagagactgcatgcttcctttttgcaaaactctgtgcaaggcatggttcctcctttcaggatgcttgacatctagtaaagtcaggtgtgataagcacctaatctaaaatagaaaacagaattttaagcatcatatatgaaaagtatcacattgcttcaagaaagataaataattttagatagggagatgggaaatatgctaagagtgaggggatgtttggtgagttaagaatgttggaagagtggtaaaggtagacgggaagttagcattggaaggtgtctgaagtctgggtkgttagcacctgtagaagaggtagaagaggcattcagtcataggcatcaatatgtggaaggcataaaatgggaaaatgaaagacttttcaagaataacaaggtggctggattctagttgacacatggggaaatgggagatacataagagga

SEQ ID NO: 87737 - DNA, 508 bp, Homo sapiens
atattcagagtttaatcaaatatttcctcctcccatctttttgtaaccgtatgcacacactgcaagagagactgcatgcttcctttttgcaaaactctgtgcaaggcatggttcctcctttcaggatgcttgacatctagtaaagtcaggtgtgataagcacctaatctaaaatagaaaacagaattttaagcatcatatatgaaaagtatcacattgcttcaagaaagataaataattttagatagggagatgggaaatatgctaagagtgaggggatgtttggtgagttaagaatgttggaagagtggtaaaggtagacgggaagttagcattggaaggtgtctgaagtctgggtggttagcacctgtagaagaggtagaagaggcattcagtcataggcatcaatatgtggaaggcataaaatgggaaaatgaaagacttttcaagaataacaasgtggctggattctagttgacacatggggaaatgggagatacataagagga

SEQ ID NO: 87738 - DNA, 552 bp, Homo sapiens
tgaagtctacatttttatatcttctgctaatttgatctctccacttgaatagtcaataagcatttcaaccattacatgtcaaagctaaagttttgacagttcacccgtttttttctatttgtagcgttttcaatttcagttaatgactaaaccttccttcctattgctcaagccaaaattttagcattatattggtatctcactttctttcctactcagtatctgattcaccagaaacttctgctggattttaagggcatctagaaaatggctacatcttattactcgcagtgctaccagccttatcaaatcatcatcatcttttacctggagatgtgcaacggyatcccaagaggtcaccctctttacctgtctatagtctaatttcaacagagcaactagaatggtggttttaaaacagaatttgggaatttagttgcactttgatggtgttagtccacaaaatccaatccttttgctaattacaataaaaatttgtgaacaaaacacaaacaaacaagtatataaaaggaaattacccatatctgtggg

SEQ ID NO: 87739 - DNA, 814 bp, Homo sapiens
aatttaagaggaaagatcttacgtgttttttaccacaataaaaaaattttgtaacattcacagaaaaaatttttttttactttatttgtacawataatggaaccttttgatctacagctcaaaggcaaaaagcaatcattccaaattaaattatcttggttaatatggctgtttacaatagggaatatggctcatcacactccaactgaaaaataaagactttctaatctcaatagcctggcctgtaataagaatataaaattataaacgcaaactttcaactcccaagtgaagcatgaattccagagccactgtatattgagagtggggagaagtgtatgcttaagggtaagattcatattttatattttatctccctggaggaacagcgtctctcctcaaagagagagccatcacagtgtaaagcataatacaatggcaatcaaaggggcatccacagataaccatgttcattacattgcctttaattgctttagcctaaaagacagcagcccaaaagtatagatccatggcagatcattgtacttaaacagtcaaatatgtatccttcatattttaaaatatagccactggcccaccaaataggagttctactgtccacttctctcacactgccttctacacagtataaaacctttcatcttgacataattagaagaatcttccaaacaagtaaaactatgacttgctcacatgcctacttttcccacatgaccgtggcaaaatcagatattgtcagacaacttgaggacctcaattcaccatagaattttcataaaatggttaagaggta

SEQ ID NO: 87740 - DNA, 814 bp, Homo sapiens
aatttaagaggaaagatcttacgtgttttttaccacaataaaaaaattttgtaacattcacagaaaaaatttttttttactttatttgtacatataatggaaccttttgatctacagctcaaaggcaaaaagcaatcattccaaattaaattatcttggttaawatggctgtttacaatagggaatatggctcatcacactccaactgaaaaataaagactttctaatctcaatagcctggcctgtaataagaatataaaattataaacgcaaactttcaactcccaagtgaagcatgaattccagagccactgtatattgagagtggggagaagtgtatgcttaagggtaagattcatattttatattttatctccctggaggaacagcgtctctcctcaaagagagagccatcacagtgtaaagcataatacaatggcaatcaaaggggcatccacagataaccatgttcattacattgcctttaattgctttagcctaaaagacagcagcccaaaagtatagatccatggcagatcattgtacttaaacagtcaaatatgtatccttcatattttaaaatatagccactggcccaccaaataggagttctactgtccacttctctcacactgccttctacacagtataaaacctttcatcttgacataattagaagaatcttccaaacaagtaaaactatgacttgctcacatgcctacttttcccacatgaccgtggcaaaatcagatattgtcagacaacttgaggacctcaattcaccatagaattttcataaaatggttaagaggta

SEQ ID NO: 87741 - DNA, 814 bp, Homo sapiens
aatttaagaggaaagatcttacgtgttttttaccacaataaaaaaattttgtaacattcacagaaaaaatttttttttactttatttgtacatataatggaaccttttgatctacagctcaaaggcaaaaagcaatcattccaaattaaattatcttggttaatatggctgtttacaatagggaatatggctcatcacactccaactgaaaaataaagactttctaatctcaatagcctggcctgtaataagaatataaaattataaacgcaaactttcaactcccaagtgaagcatgaattccagagccactgtatattgagagtggggagaagtgtatgcttaagggtaagattcatattttatattttatmtccctggaggaacagcgtctctcctcaaagagagagccatcacagtgtaaagcataatacaatggcaatcaaaggggcatccacagataaccatgttcattacattgcctttaattgctttagcctaaaagacagcagcccaaaagtatagatccatggcagatcattgtacttaaacagtcaaatatgtatccttcatattttaaaatatagccactggcccaccaaataggagttctactgtccacttctctcacactgccttctacacagtataaaacctttcatcttgacataattagaagaatcttccaaacaagtaaaactatgacttgctcacatgcctacttttcccacatgaccgtggcaaaatcagatattgtcagacaacttgaggacctcaattcaccatagaattttcataaaatggttaagaggta

SEQ ID NO: 87742 - DNA, 814 bp, Homo sapiens
aatttaagaggaaagatcttacgtgttttttaccacaataaaaaaattttgtaacattcacagaaaaaatttttttttactttatttgtacatataatggaaccttttgatctacagctcaaaggcaaaaagcaatcattccaaattaaattatcttggttaatatggctgtttacaatagggaatatggctcatcacactccaactgaaaaataaagactttctaatctcaatagcctggcctgtaataagaatataaaattataaacgcaaactttcaactcccaagtgaagcatgaattccagagccactgtatattgagagtggggagaagtgtatgcttaagggtaagattcatattttatattttatctccctggaggaacagcgtctctcctcaaagagaragccatcacagtgtaaagcataatacaatggcaatcaaaggggcatccacagataaccatgttcattacattgcctttaattgctttagcctaaaagacagcagcccaaaagtatagatccatggcagatcattgtacttaaacagtcaaatatgtatccttcatattttaaaatatagccactggcccaccaaataggagttctactgtccacttctctcacactgccttctacacagtataaaacctttcatcttgacataattagaagaatcttccaaacaagtaaaactatgacttgctcacatgcctacttttcccacatgaccgtggcaaaatcagatattgtcagacaacttgaggacctcaattcaccatagaattttcataaaatggttaagaggta

SEQ ID NO: 87743 - DNA, 814 bp, Homo sapiens
aatttaagaggaaagatcttacgtgttttttaccacaataaaaaaattttgtaacattcacagaaaaaatttttttttactttatttgtacatataatggaaccttttgatctacagctcaaaggcaaaaagcaatcattccaaattaaattatcttggttaatatggctgtttacaatagggaatatggctcatcacactccaactgaaaaataaagactttctaatctcaatagcctggcctgtaataagaatataaaattataaacgcaaactttcaactcccaagtgaagcatgaattccagagccactgtatattgagagtggggagaagtgtatgcttaagggtaagattcatattttatattttatctccctggaggaacagcgtctctcctcaaagagagagccatcacagtgtaaagcataatacaatggcaatcaaaggggcatccacagataaccatgttcattacattgcctttaattgctttagcctaaaagacagcagcccaaaagtatagatccatggcagatcattgtacttaaacagtcaaatatgtatccttcatattttaaaatatagccactggcccaccaaataggagttctactgtccacttctctcacactgccttctacacagtataaaacctttcatcttgacataattagaagaatcttccaaacaagtaaaactatgacttgctcacatgcctacttttcccacatgaccrtggcaaaatcagatattgtcagacaacttgaggacctcaattcaccatagaattttcataaaatggttaagaggta

SEQ ID NO: 87744 - DNA, 540 bp, Homo sapiens
ttttaatgagtgttttccagtacttcaaacacaggttaagaaagtgctctagaatatayttcatgactcatgtgttacaggataagactttaatttaaagctaacatattccgtacattttttccaggtacaaacagtatttccaccgctctctggctttattaaaaggtggctttctttcagagaattaagggacgtcttcaatttttagctctatcttcttttcattgatgtctatttccaggtccacattttactttgcctctgttgctgcattgcattccacatctgtattttcccatgtcataggctactcctagaatgccttttcttacctcaaataaagccaactaccagttatttccctctctttctaactgctctcaaaaatacactccatcaatgaattatctctgactagctagaaggcagggtgacctcttccaattccctttgttagatattctcaaacggtccttggtaacagaaagtgcagttatcactatacctttccacatataaacatattcattatttaaa

SEQ ID NO: 87745 - DNA, 540 bp, Homo sapiens
ttttaatgagtgttttccagtacttcaaacacaggttaagaaagtgctctagaatatatttcatgactcatgtgttacaggataagactttaatttaaagctaacatattccgtacattttttccaggtacaaacagtatttmcaccgctctctggctttattaaaaggtggctttctttcagagaattaagggacgtcttcaatttttagctctatcttcttttcattgatgtctatttccaggtccacattttactttgcctctgttgctgcattgcattccacatctgtattttcccatgtcataggctactcctagaatgccttttcttacctcaaataaagccaactaccagttatttccctctctttctaactgctctcaaaaatacactccatcaatgaattatctctgactagctagaaggcagggtgacctcttccaattccctttgttagatattctcaaacggtccttggtaacagaaagtgcagttatcactatacctttccacatataaacatattcattatttaaa

SEQ ID NO: 87746 - DNA, 501 bp, Homo sapiens
ctcacctttcaaaattattttgtcagaagtcatagagctttttgtttcttcatgcattttttttctgttaatccagtaaagaagaaaaagttttgacatggtgttagttgttacccctccagagtatttagagaccacttttaatcaaagtaaaaggaaaatataatatggagtaatttgcccttgccccatccctcaagttggagccaggccagactacatgtttctattatcagagatatttttagtcacaggttgtatggttgtctagggtcaagmaatgtccccatgatcatttgcctccaccattcctaagctatgatatagactcataaacatgtagacagggaatgtctctgcaaagagagaaaccatccagagtacagggatgtcagaaagaaagaacacggatgaaagagcccaagaagaggctcaaatatacaacctctgctatgtaagtctcagggaaggacgattcctgttgagttaaggagtaactca

SEQ ID NO: 87747 - DNA, 637 bp, Homo sapiens
aggaaactgcagagtggtgtggtggccgccatattgaagcattactgacacacctgctttaatatgccaggtactgatcctgggatataagggagagcagatctgggagcctttatgcagatccttgagttggaagtgtgacttgaaagtgaggtagatttccaaaacctggtaggtcttgcagcatgaggaaagaagcacacagagacacacmtagacccaagcgaacatttccaagtcctcagtggaagtgaagatcagtcccaagaagaggatataggtggccccaaaaatacagctacaaagtttggtttgtctttgctgttgttcattcaatcattctttttttcttttttcatcctttctttcttcttacttttcttccttattttctttttttggatatcatttttgttcacaaagatagccatgtaaagtcactgaaaatgaagtgggttttttttttttcaaataaaaattcaattgcaaatacaaagcatatattttaacttaaagaattttttgggaactttctgtcttccaccttgccaccaaaaagcaagctttttttgcacagcatgttttttcaggatacagtttgataacatttcattaaaatacagaaaactgtttccaa

SEQ ID NO: 87748 - DNA, 1726 bp, Homo sapiens
gatcctcctgcctcagcctcccaaagtgctgagattacagtcatgagccaccatgcctggcacgatagaggtagttattgctaccaggtgggccatttttttctaggcagcttcagagttattaagtatatatgtattaaaaatatatgtattaaaatatatgtattaaatatggatttaatatatgtattaaaatatatgtattaaaaatacatatatgtattaaaaattcatatatgtatacatataaaatatatatgtattatatattataatatatattttaaacacaaaacacattaagaatttgtacttttaattctaattcaaattcacaattatcagtgtatacgtaacctagtccatctgaactgtatattttctttatcccgcacagagaatcccagttcttaggtatgttacagacgctataatcaaaataccatgagaaaatcaaactrtcataagcaaaagaccaatcagtctctttgctttatcctgcattacccggaaagcaatctaagaagagcaatataatattagcaatgatatgcatatagaaataggttataaattgttttgaagaaagctgtttttcatgcctgtaccaaaatatatcatgtgccccataaatatatacacatattatgtacccgcaaaaataaaaaaataaaaataagtaaataaaaagaaaggtctttttgactttagggcatacagcaccaggaacgtacagattactatatttttaaaactcttaggaaactttctattttgtagctatacagtcaacagaatattcacatatgtcagagtcctggaagctatcttgaaaaacaaatataaaattgacagagctgtgagacagaagtcatcaggaactatgataattttttgtaccctctctaagaaaataacgactagctacatgcggattttttcacattgcagggaaatagacttctattttgtttaagctgtgctactttttgttagtatattatatacagtagaaactaattctattggatacaaaagataagaaaatcaaatggaatttaataacaatagataaaagaggaattattggctaagataaagataaaccaaagaattattgaaagacagtttgatctgtaatgtagaatttgagatatgtgtgattttctaattttttttttttttttttttttgagacagagtctctctcttgtggcccaggctggagtgcagtgacacaatctcagctcattgcaacctccacctcccaggttcaagtgattttcctgcctcagcctctcgagtagctgggactacaggtgtgtgccatcacgcccagctaattttttatattttcagtagagacggggtttaaccatgttgtccggggtggtctcgatctctagacctcgtgatctggccgtgacggcctcccaaagtgctgggattacaggcatgagtcagcatgcctggccctaattcttaatgtatttaaattagaaattgacaaacaataaggaaaaaacaataagggaaaaaagaagtctttgaaatgttagaaattgttaaactttcctagttgccttttatattgattttaatgtttattttatatatatttttattttatttaaattatgttttataattctaagtaatctttagattttatgttaaaattgagtgaagataaatcctcattttcaacgaatatccctaaaaacta

SEQ ID NO: 87749 - DNA, 526 bp, Homo sapiens
tgaattaaaaaaaatgaaggtatatgtaaaaacactgacctttaaatctctgggaagcaggtgattttaaatattatgtgtcrcataaagatcactgctaaagaaagaatgaaagagttaaacatcttttatttaagtgtaggggaaaattgtaaatcttttagtaaatggggtttttaagagaaacataaaggcagaaacttaatgaactacccattctgaaccaaggatactataaataatccattaaaggtgattgctattattttggatctataaacttgaaatggggtctatctttcataagggaggcagaaatatccttttatacatgccactctgactccacaatttttcttagagttttacgtcatgatgaggcttttagaaaacttgctcatttgaggcacagtgatttttcttgttgagctcatcatatagttattgcatttaacatgtctttgtaacccatgaggttacaaatcaattactcctgcacaatttcttcaataatttgaaatgctgc

SEQ ID NO: 87750 - DNA, 526 bp, Homo sapiens
tgaattaaaaaaaatgaaggtatatgtaaaaacactgacctttaaatctctgggaagcaggtgattttaaatattatgtgtcacataaagatcactgctaamgaaagaatgaaagagttaaacatcttttatttaagtgtaggggaaaattgtaaatcttttagtaaatggggtttttaagagaaacataaaggcagaaacttaatgaactacccattctgaaccaaggatactataaataatccattaaaggtgattgctattattttggatctataaacttgaaatggggtctatctttcataagggaggcagaaatatccttttatacatgccactctgactccacaatttttcttagagttttacgtcatgatgaggcttttagaaaacttgctcatttgaggcacagtgatttttcttgttgagctcatcatatagttattgcatttaacatgtctttgtaacccatgaggttacaaatcaattactcctgcacaatttcttcaataatttgaaatgctgc

SEQ ID NO: 87751 - DNA, 526 bp, Homo sapiens
tgaattaaaaaaaatgaaggtatatgtaaaaacactgacctttaaatctctgggaagcaggtgattttaaatattatgtgtcacataaagatcactgctaaagaaagaatgaaagagttaaacatcytttatttaagtgtaggggaaaattgtaaatcttttagtaaatggggtttttaagagaaacataaaggcagaaacttaatgaactacccattctgaaccaaggatactataaataatccattaaaggtgattgctattattttggatctataaacttgaaatggggtctatctttcataagggaggcagaaatatccttttatacatgccactctgactccacaatttttcttagagttttacgtcatgatgaggcttttagaaaacttgctcatttgaggcacagtgatttttcttgttgagctcatcatatagttattgcatttaacatgtctttgtaacccatgaggttacaaatcaattactcctgcacaatttcttcaataatttgaaatgctgc

SEQ ID NO: 87752 - DNA, 526 bp, Homo sapiens
tgaattaaaaaaaatgaaggtatatgtaaaaacactgacctttaaatctctgggaagcaggtgattttaaatattatgtgtcacataaagatcactgctaaagaaagaatgaaagagttaaacatcttttatttaagtgtaggggaaaattgtaaatcttttagtaaatggggtttttaagagaaacataaaggcagaaacttaatgaactacccattctgaaccaaggatactataaataatccattaaaggtgattgctattattttggatctataaacttgaaatggggtctatctttcataagggaggcagaaatatccttttatacatgccactctgactmcacaatttttcttagagttttacgtcatgatgaggcttttagaaaacttgctcatttgaggcacagtgatttttcttgttgagctcatcatatagttattgcatttaacatgtctttgtaacccatgaggttacaaatcaattactcctgcacaatttcttcaataatttgaaatgctgc

SEQ ID NO: 87753 - DNA, 379 bp, Homo sapiens
ccagtacctcaaacattatgtggtttataatagagactttataattatttatttaatgggtaggtcatgaatgaataaataactagaaacatgaacgacataaatgaatgagtaccagatatgtaatttttgaaatcttctaaaaagctcaattggttttgcttattttgattgatacaaaattaactttggtagttgagtagaawaatgatcacatctgatcttttcagggccacagatactggttgatcgcttaaaattcacatagctcatgaaggagaggagggagctaacatggcaaatattagcggtcagcatcaagcccttgcccaacgacctcttcaccctcatgtctcctaacaaatgaggatgttgcagc

SEQ ID NO: 87754 - DNA, 825 bp, Homo sapiens
aatcgcttgaacccaagaggcggaagttgcagtgagccacaatcacaccactgcactccagcctggtgacagagtgagacttccctctcaaaaaaagagaaggtaagttaatttgcctgagcacatcaagtccacgaaaggtttttaaagtgccagatcattcaaagtaaatgtcatagaattgacatagaatgtgtgtattttaatttgagtcatcatagaaagtttggcttttaaattggaatttcataattgacaaatatttttaaagtaaaaatggagggtcaggtgagaaagttaattatttgaggcagagaacatatgagcaattttattttcttttaatttttagtttttgtggttacatagtaggggtatttttctatgaggtgcatgagatgttttgatacaggctgcagtgtgaaataatcacatcatgaagaaaggctacccaytgcttaagcatttatctttgtgttatgaaatatccagttacactcctttagttctccagcaggcgtataaaatcatggtcagcatcatgagccgttttaagtggtaaaagatatacaccttaaaatacaatttgagaattatcatctttaagtttctaaagaggaattgtgtcatgtgggtgaaatgcctcatagccacatgctctgcttctattctactctttgtgtcctactgtttcccacgcagtagccagaatgattatttttgaaataaaagtcagattgtgatactcccctgattaagacttttgcctgacttttcatcatatcaagaataaaatccaactctgttatttggtcctcaggatcc

SEQ ID NO: 87755 - DNA, 548 bp, Homo sapiens
ggttaaaaatttttatgccacaaaattaaacactttaaccatttaatgtgtacaattcattggcgtttaatatatttgcaatattttgccactaccaccactctctagatccaaagtattttgtcacttcaaaaggaagctttatacccattagacagtcatctcgcattctcccatcctccatctcctgcaacctggcattatctgttggcatcattctatagcctagtagataatgtttttttaaaggcaaataggtacataacttcaacaaagtgttttatttttcyttatttttacatctcctatttgttcctaaatgaaaattctgtgatgtataagaattagttattatttcctagttgctctgttattacatatattcagcagtgttgtgatttatattgttacagtttctgtccaattttgtattgaagtctgtcccttgagaattgcaataaaccaagctctgatggaggtgaggaagtgaaattcagatgtgtgtgtcaggtaaaatacaatgaaatgtaaaataaaaccaaaatgca

SEQ ID NO: 87756 - DNA, 548 bp, Homo sapiens
ggttaaaaatttttatgccacaaaattaaacactttaaccatttaatgtgtacaattcattggcgtttaatatatttgcaatattttgccactaccaccactctctagatccaaagtattttgtcacttcaaaaggaagctttatacccattagacagtcatctcgcattctcccatcctccatctcctgcaacctggcattatctgttggcatcattctatagcctagtagataatgtttttttaaaggcaaataggtacataacttcaacaaagtgttttatttttccttatttttacatctcctatttgttcctaaatgaaaattctgtgatgtataagaattagttattatttcctagttgctctgttattamatatattcagcagtgttgtgatttatattgttacagtttctgtccaattttgtattgaagtctgtcccttgagaattgcaataaaccaagctctgatggaggtgaggaagtgaaattcagatgtgtgtgtcaggtaaaatacaatgaaatgtaaaataaaaccaaaatgca

SEQ ID NO: 87757 - DNA, 548 bp, Homo sapiens
ggttaaaaatttttatgccacaaaattaaacactttaaccatttaatgtgtacaattcattggcgtttaatatatttgcaatattttgccactaccaccactctctagatccaaagtattttgtcacttcaaaaggaagctttatacccattagacagtcatctcgcattctcccatcctccatctcctgcaacctggcattatctgttggcatcattctatagcctagtagataatgtttttttaaaggcaaataggtacataacttcaacaaagtgttttatttttccttatttttacatctcctatttgttcctaaatgaaaattctgtgatgtataagaattagttattatttcctagttgctctgttattacatatattcagcagtgttgtgatttatattgttacagtttctgtccaattttgtattgaagtctgtcccttkagaattgcaataaaccaagctctgatggaggtgaggaagtgaaattcagatgtgtgtgtcaggtaaaatacaatgaaatgtaaaataaaaccaaaatgca

SEQ ID NO: 87758 - DNA, 550 bp, Homo sapiens
gtgcctgtgcctctgctggccgcccactcatagatgtcagagccacaggacggccccgcagaatccctgcgcygaccctgccgggggctggctttggtgcacatgcaactcgtcatcgtggtccccatggggcacctctgctcttctcgaggcagcttgggccttcgcttgcccccacgtctgcagagctgagcacctgccacctctccccaggaaaggcaaccaaatgccaccaacttaaggcacccactgaaggcactaactgaaggccaccaacggaaggccggttgccctgccagccagatcgcgtactgcttaggaagaaccaatcaggccttgagttccctccacgtgctgcccttccatttgtgatgtggaagtccaggcactggctcacaaaaccgcgccccccagtgatgccgccccacctttcatttattggtagctggtagcaactttcaggtttcctcactgtgaattatgaatatgaattatgattaaattactgtatgctaatgtacctcatgcactatctgacagtcaaagtccc

SEQ ID NO: 87759 - DNA, 725 bp, Homo sapiens
ggatcctgtcatggtgtccagaaaacaaagaaccgggagcacagggaccggaaaatcggggaagcatttcttcctatttctgtcccagttcctacctggaaggatttatgatcctgttcacctttcaagatgcacaattaaacatgcctatattgtcatatgttatatattttgcacagaaagagaatttattatacatagtgttaacattgtatgcatagatattataatttcttaaatgcttggaaacaacaaatgtcaaattatggttgattgtattaggtccacacatatatgatgaaataaaaatgcagagaaaaaataaataccaaatgaaatggcccttcctaccttaaaaatggggaagataattagatcaaatgcaataaaattgaattgattaggttgagtcagtgctaacctaattagccccygattcctgaggtagcaaaaagtctcggtggaaaaactttcccccattctcacccttcctcagtcatcctgggagcgccattgtgttctgtgggctttattcagccctccctagtgaaaatggacttggtctcaaacaggtaacccaactgatcacaagacaaacagcctagattctgaacatcagctcctgtcttcacactgcggacaccacctgaatcccgtcaaagcccacattgattctcaacatccaccagcaagacgtattccagggcagcctctcaaaactgcct

SEQ ID NO: 87760 - DNA, 1112 bp, Homo sapiens
ctattttggtgcccatttggcatatgggtgaaaacttgtcaccggacatatagctagtaagtggcaaatccaggattcaaacccaggtctgaattattctaaagcccatgtatgtatccagcaacacatggcgatgagctgtgttctttaataatgtattggctactacaaaattggagtgtgatcaggtaacccttacatcaggaaaaatggggtatgcacattgctcagcatatacacaaatcaagactcatattacaaggctgctagctctcttgtcagggataacattttaatttgaaatgaagtggaagaatgtttcatatcagctactccggttaacactgctttttacttcagataaagatatcccttctgtcaggcaccctgaagtttttctgtaaaaagttgtgttcatttgtttcaaactgcccatacatccatggtctcatttcattttccctatagcccgctgagttaagaggggcaggtattattaactccatttcacaggtgaaagaactgagccctagagaggttaactaagttgcttaaggtcacacagcaaattagtggtacgacggggattggaaagcctaacgcctgacatccagcgtggtatgttttccatcatgtagtgctccatcacctgtcactcccaccattcytgaggggcttggagttgatggggcatgctatcaatttctcagggtaaaactgtcctatctgggtaggaaaatgcacacacacacacacacacatatactagacacactgtaattgcatctgccaaaatggttttataacaatccagtcaaggatacagaaaactcccaggctgcctttcagaaacaaagcccaaaggatcaatttcatcatgaaataggatttcctcagctgtaggtggatgggtaggtggggaggtggatgaactgcattaacaatggaacagtggactgcagggtaaaagctcatttgacattcactgctattaagcagtggcaatgtaaacctggggtagcaaagagcaatacccaggaaaaaatacgaagaaaagtttcaacttaacccttctgtaactttctatttataagtctcagggtattaagtct

SEQ ID NO: 87761 - DNA, 1112 bp, Homo sapiens
ctattttggtgcccatttggcatatgggtgaaaacttgtcaccggacatatagctagtaagtggcaaatccaggattcaaacccaggtctgaattattctaaagcccatgtatgtatccagcaacacatggcgatgagctgtgttctttaataatgtattggctactacaaaattggagtgtgatcaggtaacccttacatcaggaaaaatggggtatgcacattgctcagcatatacacaaatcaagactcatattacaaggctgctagctctcttgtcagggataacattttaatttgaaatgaagtggaagaatgtttcatatcagctactccggttaacactgctttttacttcagataaagatatcccttctgtcaggcaccctgaagtttttctgtaaaaagttgtgttcatttgtttcaaactgcccatacatccatggtctcatttcattttccctatagcccgctgagttaagaggggcaggtattattaactccatttcacaggtgaaagaactgagccctagagaggttaactaagttgcttaaggtcacacagcaaattagtggtacgacggggattggaaagcctaacgcctgacatccagcgtggtatgttttccatcatgtagtgctccatcacctgtcactcccaccattcctgaggggcttggagttgatggggcatgctatcaatttctcagggtaaaactgtcctatctgggtaggaaaatgcacacacacacacacacacatatactagacacactgtaattgcatctgccaaaatggttttataacaatccagtcaaggatrcagaaaactcccaggctgcctttcagaaacaaagcccaaaggatcaatttcatcatgaaataggatttcctcagctgtaggtggatgggtaggtggggaggtggatgaactgcattaacaatggaacagtggactgcagggtaaaagctcatttgacattcactgctattaagcagtggcaatgtaaacctggggtagcaaagagcaatacccaggaaaaaatacgaagaaaagtttcaacttaacccttctgtaactttctatttataagtctcagggtattaagtct

SEQ ID NO: 87762 - DNA, 692 bp, Homo sapiens
ttcagaatccattcccttactttgtccagcttctagaggaagcccacattcctcacctcatggtgccttcccacatcttcaaagccagcaacatcaggtcaagtcctgctcacaccacaacactcagacctctgcatccctcatcacaccttctctcactctgactcgcttgcctccctctttcatttataaggacccttgtgaatacattggacctacctgaataataccagataatccccctatcccaaaatttttaacctaatcacatctgcaaagyccatttggtcatgtaaggtaacattcacaggtgttggggattagaattaatacctctttgggggatcattattccacctaccaaagtgggttagggaccacacacccgccctaagtgcagacggaagcagcaatggcctaggatgtgtaacatacatacatacatataaacatatatacagacatacatatataacatatattacacatatatacatgcacacacatatccattacatagatgatatcatacatatatacaatatatacatactatgatagtaaatgttttatttgtaaaaaaaaaaatcaagcaggattatattagtctcatttcttatactttgctatgcttttgtgtgggcaaaaagccgtatggatcatgtactggggaccacaggtaagtacataca

SEQ ID NO: 87763 - DNA, 792 bp, Homo sapiens
ctgcctgaggctctgagcctggggcctgcccacgctttgttataaggaagattagcaaatactagaaaggtgagaaagcttccccctggctaatgagaagggttgaaagaaatgaaagggaataacttcccaagcttgccagaaacaccaaggtagggcagttttttttaaccctgctttgaggtctagaatcctytgttgaaatgaaatcttattaacaatagaagcaataatgatgatgctgataagaaacagctggttgtattaggatacaccaggcattcaaatacaagtaaactcagtacttagaagtattaactcatttactcctcattaacaaacttgtgagacacagaaaggtcaagtaatgggccccaaatctctctgctagtaacagccaaaaccctggtcctataaccccagagtccctgtttttaatgaccacccagactgcccctcaagattccagttactaaggccgggcgcgatggctcacgcctgtaatcccagaactttggaggctgaggctggtgaatcatgaggtcaggagatggagaccatcctggctaacatggtgaaaccctgtctctactaaaaatacaaaaaaattagccgggcgtggtggcgggtgcctatagtcccagctgctcgggatgctgaggcagaagaatggcctgaacccaggaggcggagcttgcagtgagccaagatcgccaagcctgggtgacagagcgagactccatcagaaaaaaaaaaaaaagaattccagttactagcaactgacaatagagt

SEQ ID NO: 87764 - DNA, 792 bp, Homo sapiens
ctgcctgaggctctgagcctggggcctgcccacgctttgttataaggaagattagcaaatactagaaaggtgagaaagcttccccctggctaatgagaagggttgaaagaaatgaaagggaataacttcccaagcttgccagaaacaccaaggtagggcagttttttttaaccctgctttgaggtctagaatcctttgttgaaatgaaatcttattaacaatagaagcaataatgatgatgctgataagaaacagctggttgtattaggatacaccaggcattcaaatacaagtaaactcagtacttagaagtattaactcatttactcctcattaacaaacttgtgagacacagaaaggtcaagtaatgggccccaaatctctctgctagtaacagccaaaaccctggtcctrtaaccccagagtccctgtttttaatgaccacccagactgcccctcaagattccagttactaaggccgggcgcgatggctcacgcctgtaatcccagaactttggaggctgaggctggtgaatcatgaggtcaggagatggagaccatcctggctaacatggtgaaaccctgtctctactaaaaatacaaaaaaattagccgggcgtggtggcgggtgcctatagtcccagctgctcgggatgctgaggcagaagaatggcctgaacccaggaggcggagcttgcagtgagccaagatcgccaagcctgggtgacagagcgagactccatcagaaaaaaaaaaaaaagaattccagttactagcaactgacaatagagt

SEQ ID NO: 87765 - DNA, 596 bp, Homo sapiens
atgagaatctaatcctgccgctaatctcacaggaggcagagctcaggcagtaatgggagtgatgggggagcggctgtaaagacagatgaagctttgctcaattgcccactgctcacttgttgctgtgtggccaggttcctaacaggccatggactggtccatgacgcaggggctggggacccctgtcctaaaccaygtttgcttctgccccctcaccctttcccagagtgaatggtaattactgtgtacgatatttaaaaaatggacgatgtccccttaacagtattttctgcctgagtccagagctactagtagtagtgactgctgactaaaggatgaagctggagtaaaacctttcctgtgctgtgacccacatctccccattgctgaagaagagaaatgtaaaaatgctttctggaagaagaatttcacaaggttatgttttccctcagctttccatgatcacagtaatcgaaaaataacactcttagtttacagatttcaatttggcagtatctggcaatgttaattatataaatgagaagagagagataagaggtgggaaacaggaagtgaatgccaggaaaatgaggatc

SEQ ID NO: 87766 - DNA, 596 bp, Homo sapiens
atgagaatctaatcctgccgctaatctcacaggaggcagagctcaggcagtaatgggagtgatgggggagcggctgtaaagacagatgaagctttgctcaattgcccactgctcacttgttgctgtgtggccaggttcctaacaggccatggactggtccatgacgcaggggctggggacccctgtcctaaaccatgtttgcttctgccccctcaccctttcccagagtgaatggtaattactgtgtacgatatttwaaaaatggacgatgtccccttaacagtattttctgcctgagtccagagctactagtagtagtgactgctgactaaaggatgaagctggagtaaaacctttcctgtgctgtgacccacatctccccattgctgaagaagagaaatgtaaaaatgctttctggaagaagaatttcacaaggttatgttttccctcagctttccatgatcacagtaatcgaaaaataacactcttagtttacagatttcaatttggcagtatctggcaatgttaattatataaatgagaagagagagataagaggtgggaaacaggaagtgaatgccaggaaaatgaggatc

SEQ ID NO: 87767 - DNA, 596 bp, Homo sapiens
atgagaatctaatcctgccgctaatctcacaggaggcagagctcaggcagtaatgggagtgatgggggagcggctgtaaagacagatgaagctttgctcaattgcccactgctcacttgttgctgtgtggccaggttcctaacaggccatggactggtccatgacgcaggggctggggacccctgtcctaaaccatgtttgcttctgccccctcaccctttcccagagtgaatggtaattactgtgtacgatatttaaaaaatggacgatgtccccttaacagtattttctgcctgagtccagagctactagtagtagtgactgctgactaaaggatgaagctggagtaaaacmtttcctgtgctgtgacccacatctccccattgctgaagaagagaaatgtaaaaatgctttctggaagaagaatttcacaaggttatgttttccctcagctttccatgatcacagtaatcgaaaaataacactcttagtttacagatttcaatttggcagtatctggcaatgttaattatataaatgagaagagagagataagaggtgggaaacaggaagtgaatgccaggaaaatgaggatc

SEQ ID NO: 87768 - DNA, 539 bp, Homo sapiens
gattgattatttgagaagttaacctcattttagcagatttttgtggggttttttttttttttttagctcaaaatgtttatctaacagataaatcaaatggagctttctgtacatacctcattacaattctaatttattttcccaamagaatcttcacaattatgtaaaaattggcacggtcctgctagtgacacttcctattctttcataccataaagcctgagcttataaacaagctgcagagagaggcattttcattacatacatcactgcattgtggcggtatctccagaatggcttaaatgcatcatgtacttttacccaaatggtctctgaacaagagtgttggaagagatgtcagttcttgggccctgacaatgttgtttcctagcctaaaaagtctgagaaatgtggaatattcctacctccttctgtgagaagtcagaaaatgaagagacgtattcatctttaagccaaccttccaaatttacctgagcatagagcaccaccccttcaccaccaccctcttttctttcctt

SEQ ID NO: 87769 - DNA, 1077 bp, Homo sapiens
cacctgaaatatggtagtgtgcctgaggaagtgaacatttaattttattcctttttaattaattcaaatttaaattaaatttaaatagctacacgtggttagtggtttccatgcagaagcagaagaagacagctcctgttcttctatttcattcatattctgtgtgtccccttgtaggacttggcatatttgcagttacatagtgtttaaaattatttgtttaatgtccatctttcccactaaattattgagattttaagtagagtaactaggtctgtcttgatcccacaaaagcccatgcttgacaccacaagcccccatgcttgacacatagtgtctattcaaagagctgctgacttaccatttaaataaagcttttaattatcttaaacatataatatcagatattaataagttggttaagtgaataccaaaggttcatgttagaagactggaatactgtttacaaggtgtgaactttctggaaaagtccagaaaatgccaccagaaattataaaaatcagtggtaaaatgtggttgccacagatttttcataaacacaaacatacatacacacacacattctcaaaacacagctgccttcagcaaaagagtcttctattttgctctaaaatctgttgtggttgtgaaaatgatgwcacttctctgcaaaagaaaaatttcaatgcaaaacaaactcacaatttagctcaggatgtatgaaaaagttgacacaaagaagctgtcctttcctggtttaaatgacacattttatctttagattttggtagctaatttttaaaaaaatcctttaaaacgtattaccttttccagggacaaatgctctataatgttattctctgccatctttgaaaatgaaataaacatttattaaaataataccatacacgacatagatatttttaatacccccattggaaatggtggcatagagaagtggacagtgtgtataaagctacgaattccagagaacactggttataattcagtgggaaatacagttagtttgtcattgtttggctgatttgttcatccatccatttatctctctctcca

SEQ ID NO: 87770 - DNA, 1077 bp, Homo sapiens
cacctgaaatatggtagtgtgcctgaggaagtgaacatttaattttattcctttttaattaattcaaatttaaattaaatttaaatagctacacgtggttagtggtttccatgcagaagcagaagaagacagctcctgttcttctatttcattcatattctgtgtgtccccttgtaggacttggcatatttgcagttacatagtgtttaaaattatttgtttaatgtccatctttcccactaaattattgagattttaagtagagtaactaggtctgtcttgatcccacaaaagcccatgcttgacaccacaagcccccatgcttgacacatagtgtctattcaaagagctgctgacttaccatttaaataaagcttttaattatcttaaacatataatatcagatattaataagttggttaagtgaataccaaaggttcatgttagaagactggaatactgtttacaaggtgtgaactttctggaaaagtccagaaaatgccaccagaaattataaaaatcagtggtaaaatgtggttgccacagatttttcataaacacaaacatacatacacacacacattctcaaaacacagctgccttcagcaaaagagtcttctattttgctctaaaatctgttgtggttgtgaaaatgatgacacttctctgcaaaagaaaaatttcaatgcaaaacaaactcacaatttagctcaggatgtatgaaaaagttgacacaaagaagctgtcctttcctggtttaaatgacacattttatctttagattttggtagctaatttttaaaaaaatcctttaaaacgtattaccttttccagggacaaatgctctataatgttattctctgccatctttgaaaatgaaataaacatttattaaaataataccatacacgacayagatatttttaatacccccattggaaatggtggcatagagaagtggacagtgtgtataaagctacgaattccagagaacactggttataattcagtgggaaatacagttagtttgtcattgtttggctgatttgttcatccatccatttatctctctctcca

SEQ ID NO: 87771 - DNA, 437 bp, Homo sapiens
ggatccccgcccccacctgcccccaatgcacacacagacccaccgggggccacctgcctcccccatcctctcccacacacattccagaagtcagggccccctcgaggagcacccgctgcagggatgcagggccacaggcctccgctctctcctaaggcagggtctggggtcacccctgcctcatcgtaattccccatgttaccttgatttctcatttattttttccactttttttcttctcaaaggtggttttttggggggagaagcaggggactccgcagcgggcccctgccttccacaygcccccaccatttttctttgccggtttgcatgagtggaaggtctaaatgtggctttttttttttttttcctgggaatttttttggggaaaagggagggatgggtctagggagtgggaaatgcgggagggagggtgg

SEQ ID NO: 87772 - DNA, 1536 bp, Homo sapiens
catctttaaaatggggggaaaatatagctcaactcctaatggtgccatgagaatactttgtcacctgccaggcaaaagcttattcctttcacagaaatccagggtttacaatgtgagacccctccccactccgccgcatgtgtctgcttgcttttttctgtcttagggttgcccttcatgagctaggaaatgtctgagtggatgaaaacctaaacgagatgatcactggtggtgcccattggtgcagcctttgcctaaatggctacttacgtagccacatttcctcgtctgtgttcaggtgaggactggttcctgggcagactgcctgggtttgcatcacgggtgtccatcttgtcgaagcycatgtggtcacccaagtgtgactgagccaggcttgcccacggggtgctctgggccccattttcggcagcaggcagcgtcccctggaggcctggccctccccgggagcatggggagtagcgcctatgggcaagcagcctgcagcctccatccctgcccgggggctcccccgccccagcctcacagcttctccaaaagtgtttgtctccttgccgcatcctctaggcctgagctcagacggtggaaaagaagagctggaaggagagttgcctttcagtctctctgccttctgaggtctcctgagacatagagcctgggcctgcctccctttctaggaggcgccgaggggtggtaagaataggggatgagtgagatgtgaattaggatccccacagcaagccctgcctcgtaactttctgatgggttttcaatgtgtggtgaagcagatgcctgctgggcccccttcctgagttgagtttgacctcctgcctcctgtctgtctccttgggcagccaggccaccccgctccattaacctgtgccaccccatccctttacctgtcgcaagcccagccctgaaggcctcaaaggcctggtcttccagccagtccagggcctgaagggatggcagtgtccctggtggacctcccctggtgtggcctagtgcacatcccagccctgcctcctgccccgcctgcacgccatgagtgctgaagtcatgcctggcaggggctgctggcccaggcccagagtaaacacactgcgctgagctcgctggtgtgctgctggatgctgatgagcttgaggagtgtgggaagtgagcatggggctgagtagagatgctgcaggcctgcacctccccgcagctgccctgcatgctccagcctcaggcagccacacagggaaagggtcacccactgtcagggcagacctttaccatggctgggtgacacgggctggctgtggaaaggtgtttggtggttcccgctgttggatttgcacaggcccagatgctcacagcaaaaccaacacctagatggtgcttacaggagccagcgggtattcaaagagctgttcagatcttaagttgcttcattctcacagtggaccattgaggtagctgtacgttagtcccattttccagatgagaaaactgaggacctgagtggtcataagc

SEQ ID NO: 87773 - DNA, 603 bp, Homo sapiens
gaacagttagacattaaaacatgttttggttgggtgcagtggctcacgcctgtaatcccagcactttgggaagctgaggtgggtggactgcttgagctcagaagtcggaggccagcctgggcaacatggwgaaaccccgtctctacaaaaaatacaaaattagccaggcatggtggtgtgcacctgtattcccagttactcaagaggctggggatgaaaggattgcttgagcctcagaggttgaggctgcagtgagccatgagtgtgccactgcactccagggtgggtgacagaacaagatcttgtctcaaaaaatatatgtaaagaaaaaattctccaatgacatgggaagttgctcagaatataagctgaactgaaagaatacagaacactatacatgtaaatatatctatagtccataaaatcatattaatattcatgtatccaaaatgaaaatatctacaagtgagcatatgataatgtgaatagtagtgggcctttgtgatatgaccgtagatgtttttattgttatctttccccattgctctgagtttcttcaatgagcactgttaccagcatgttctacctatcagctgtgtgact

SEQ ID NO: 87774 - DNA, 2519 bp, Homo sapiens
tttaaaagttacttcttctgaaaagataattctcttccacattacacagtaaaataaatgaattcattttggcygactgctgttttgggttatttccccattttgctgttttgggttatttccccaatttccttagatgtgtacaaaaaaattagtgctgatgatatttttaatcttaaccctcatctgcttttttgatagatttttttcccagattttttctgttaacccaagcccacacagccagcaaaactcccaagaactcttgcaaccaatttttccttttcaattgtataaagctttgaaagttattgattctgcaaatgtgaaaaattaacttatcaaaaaatagcacacataaaatgggaactggccaaagaaacacaaagaatattgttttaactggaagttctatcattaactgctacaactactgtattcctgatatggctttttgcaatatatttatcactatatgggaacgatttaatctgctccatagagagagcagtaggagctctcagtggcctcaaaatatgatggttcttaccaaaaacaacgaatctaaatttcttgcagatagtaggcctaacttttttttttctaaaaggaaataactctcctctaaaagtcaaatttgtttttaaaactgtggtgtctttaaccactttccccccccccagtttttcacttgacaccttgtcatgagttacagtggcttgcatcaatcattctgggttcacacagaaaatattttgtggtggttgactatcacatgcgagaaactaagtgccctttgcgggtgactgcgcaggtacctctgatttcttgccaaatcattcagaatgccgcaaatccattaaatctctccacagggaggaaaaagttcccgcattctagagagagaatttatgagttcatttcaatcaccacaaatgaaagccacccttaatattcattagagattttacagtggcaatatgcattatctattcatatgcccctctaaaaggccaatttcccttgaaaccttgcatggctccaagccactctttgtagaaacaatggcctatgtccaagtggaatcaggggaggcaaatggatgacatttccttatccattggtagtaattccactaagccactatggtggctatgagtttctgagctttaaaaattaaaggacagatttggaatgtgcagtcgtgtcattgtatcacttctctgctgtcatctgtgaccatatgtcctaaattgaatagagcttttcggttggcatcacaagagatgacttttgaaactgacatttctttcatttggagaaatgtatatgttggagacataatcctatgagcctgagagcttttcattaatctctgtctttctaccaccatagttcacgccaccatcatctttcatctatttttcccttcaaatctattttcttcactgtatgtagagtgatctttccaaaatatcaactcaagcctcatatcctcaacaaatcaacaagaaatatcaaaataagcccttggcttaaaacagttcttgcttagcttcctcattgcttttagggaagacacagcaaaacagcataacctgtaagaccatatgtggtctgactccttcctcaggcttaccttatcccacatctccgtgttttctctcccagctattatgaattctcattgtccttattatcagttagttaactcttctcttccatcacatttgaactctatcatcactacccatgaaagcattttctgactcctcgcctattattggccttcacagaaccatgtaacaatcatagctcttatcaaagctggcatttcatgtttatttatgtgattaaatatatttttgtttctaattagactataaggttcacaataatctgtttctacccaacagtttatcctccttaactggcatgatgtaaatactcaaaacaaattgttgagtaaatgaataaatcagttcttgattttaacgtatcttgtgccctggataaaaaatcctttctatgagtgagacatgggcttccactggggttgggcttgaggtgagctgcaataaagccatatttctaatccaattattcatcactatggttgtatttaatagctgggaaccatgagatgcataaagatcttacactgaatattcataagggtttttagagtgaattcaaccacttgctttacaacttcccaggaaggagagggaacatgaatttctttccttcatttttcattctttctgaaaaaggtggttatgactgagcgatatattatgactttgaaataaaatatcatgaaatgcatatgtgatgtggctactataaaatatatgagaagagttttaaaaaggtaacatcattttacatatgcaagacactgtcaatacagtcacaattcgggaggtcagaaaagggcaacggtgatgccagcatgtgcactccagcctcttcttctttttgtctgttttccccagtctctcacaggcatggggtca

SEQ ID NO: 87775 - DNA, 2519 bp, Homo sapiens
tttaaaagttacttcttctgaaaagataattctcttccacattacacagtaaaataaatgaattcattttggccgactgctgttttgggttatttccccattttgctgttttgggttatttccccaatttccttagatgtgtacaaaaaaattagtgctgatgatatttttaatcttaaccytcatctgcttttttgatagatttttttcccagattttttctgttaacccaagcccacacagccagcaaaactcccaagaactcttgcaaccaatttttccttttcaattgtataaagctttgaaagttattgattctgcaaatgtgaaaaattaacttatcaaaaaatagcacacataaaatgggaactggccaaagaaacacaaagaatattgttttaactggaagttctatcattaactgctacaactactgtattcctgatatggctttttgcaatatatttatcactatatgggaacgatttaatctgctccatagagagagcagtaggagctctcagtggcctcaaaatatgatggttcttaccaaaaacaacgaatctaaatttcttgcagatagtaggcctaacttttttttttctaaaaggaaataactctcctctaaaagtcaaatttgtttttaaaactgtggtgtctttaaccactttccccccccccagtttttcacttgacaccttgtcatgagttacagtggcttgcatcaatcattctgggttcacacagaaaatattttgtggtggttgactatcacatgcgagaaactaagtgccctttgcgggtgactgcgcaggtacctctgatttcttgccaaatcattcagaatgccgcaaatccattaaatctctccacagggaggaaaaagttcccgcattctagagagagaatttatgagttcatttcaatcaccacaaatgaaagccacccttaatattcattagagattttacagtggcaatatgcattatctattcatatgcccctctaaaaggccaatttcccttgaaaccttgcatggctccaagccactctttgtagaaacaatggcctatgtccaagtggaatcaggggaggcaaatggatgacatttccttatccattggtagtaattccactaagccactatggtggctatgagtttctgagctttaaaaattaaaggacagatttggaatgtgcagtcgtgtcattgtatcacttctctgctgtcatctgtgaccatatgtcctaaattgaatagagcttttcggttggcatcacaagagatgacttttgaaactgacatttctttcatttggagaaatgtatatgttggagacataatcctatgagcctgagagcttttcattaatctctgtctttctaccaccatagttcacgccaccatcatctttcatctatttttcccttcaaatctattttcttcactgtatgtagagtgatctttccaaaatatcaactcaagcctcatatcctcaacaaatcaacaagaaatatcaaaataagcccttggcttaaaacagttcttgcttagcttcctcattgcttttagggaagacacagcaaaacagcataacctgtaagaccatatgtggtctgactccttcctcaggcttaccttatcccacatctccgtgttttctctcccagctattatgaattctcattgtccttattatcagttagttaactcttctcttccatcacatttgaactctatcatcactacccatgaaagcattttctgactcctcgcctattattggccttcacagaaccatgtaacaatcatagctcttatcaaagctggcatttcatgtttatttatgtgattaaatatatttttgtttctaattagactataaggttcacaataatctgtttctacccaacagtttatcctccttaactggcatgatgtaaatactcaaaacaaattgttgagtaaatgaataaatcagttcttgattttaacgtatcttgtgccctggataaaaaatcctttctatgagtgagacatgggcttccactggggttgggcttgaggtgagctgcaataaagccatatttctaatccaattattcatcactatggttgtatttaatagctgggaaccatgagatgcataaagatcttacactgaatattcataagggtttttagagtgaattcaaccacttgctttacaacttcccaggaaggagagggaacatgaatttctttccttcatttttcattctttctgaaaaaggtggttatgactgagcgatatattatgactttgaaataaaatatcatgaaatgcatatgtgatgtggctactataaaatatatgagaagagttttaaaaaggtaacatcattttacatatgcaagacactgtcaatacagtcacaattcgggaggtcagaaaagggcaacggtgatgccagcatgtgcactccagcctcttcttctttttgtctgttttccccagtctctcacaggcatggggtca

SEQ ID NO: 87776 - DNA, 2519 bp, Homo sapiens
tttaaaagttacttcttctgaaaagataattctcttccacattacacagtaaaataaatgaattcattttggccgactgctgttttgggttatttccccattttgctgttttgggttatttccccaatttccttagatgtgtacaaaaaaattagtgctgatgatatttttaatcttaaccctcatctgcttttttgatagatttttttcccagattttttctgttaacccaagcccacacagccagcaaaactcccaagaactcttgcaaccaatttttccttttcaattgyataaagctttgaaagttattgattctgcaaatgtgaaaaattaacttatcaaaaaatagcacacataaaatgggaactggccaaagaaacacaaagaatattgttttaactggaagttctatcattaactgctacaactactgtattcctgatatggctttttgcaatatatttatcactatatgggaacgatttaatctgctccatagagagagcagtaggagctctcagtggcctcaaaatatgatggttcttaccaaaaacaacgaatctaaatttcttgcagatagtaggcctaacttttttttttctaaaaggaaataactctcctctaaaagtcaaatttgtttttaaaactgtggtgtctttaaccactttccccccccccagtttttcacttgacaccttgtcatgagttacagtggcttgcatcaatcattctgggttcacacagaaaatattttgtggtggttgactatcacatgcgagaaactaagtgccctttgcgggtgactgcgcaggtacctctgatttcttgccaaatcattcagaatgccgcaaatccattaaatctctccacagggaggaaaaagttcccgcattctagagagagaatttatgagttcatttcaatcaccacaaatgaaagccacccttaatattcattagagattttacagtggcaatatgcattatctattcatatgcccctctaaaaggccaatttcccttgaaaccttgcatggctccaagccactctttgtagaaacaatggcctatgtccaagtggaatcaggggaggcaaatggatgacatttccttatccattggtagtaattccactaagccactatggtggctatgagtttctgagctttaaaaattaaaggacagatttggaatgtgcagtcgtgtcattgtatcacttctctgctgtcatctgtgaccatatgtcctaaattgaatagagcttttcggttggcatcacaagagatgacttttgaaactgacatttctttcatttggagaaatgtatatgttggagacataatcctatgagcctgagagcttttcattaatctctgtctttctaccaccatagttcacgccaccatcatctttcatctatttttcccttcaaatctattttcttcactgtatgtagagtgatctttccaaaatatcaactcaagcctcatatcctcaacaaatcaacaagaaatatcaaaataagcccttggcttaaaacagttcttgcttagcttcctcattgcttttagggaagacacagcaaaacagcataacctgtaagaccatatgtggtctgactccttcctcaggcttaccttatcccacatctccgtgttttctctcccagctattatgaattctcattgtccttattatcagttagttaactcttctcttccatcacatttgaactctatcatcactacccatgaaagcattttctgactcctcgcctattattggccttcacagaaccatgtaacaatcatagctcttatcaaagctggcatttcatgtttatttatgtgattaaatatatttttgtttctaattagactataaggttcacaataatctgtttctacccaacagtttatcctccttaactggcatgatgtaaatactcaaaacaaattgttgagtaaatgaataaatcagttcttgattttaacgtatcttgtgccctggataaaaaatcctttctatgagtgagacatgggcttccactggggttgggcttgaggtgagctgcaataaagccatatttctaatccaattattcatcactatggttgtatttaatagctgggaaccatgagatgcataaagatcttacactgaatattcataagggtttttagagtgaattcaaccacttgctttacaacttcccaggaaggagagggaacatgaatttctttccttcatttttcattctttctgaaaaaggtggttatgactgagcgatatattatgactttgaaataaaatatcatgaaatgcatatgtgatgtggctactataaaatatatgagaagagttttaaaaaggtaacatcattttacatatgcaagacactgtcaatacagtcacaattcgggaggtcagaaaagggcaacggtgatgccagcatgtgcactccagcctcttcttctttttgtctgttttccccagtctctcacaggcatggggtca

SEQ ID NO: 87777 - DNA, 2519 bp, Homo sapiens
tttaaaagttacttcttctgaaaagataattctcttccacattacacagtaaaataaatgaattcattttggccgactgctgttttgggttatttccccattttgctgttttgggttatttccccaatttccttagatgtgtacaaaaaaattagtgctgatgatatttttaatcttaaccctcatctgcttttttgatagatttttttcccagattttttctgttaacccaagcccacacagccagcaaaactcccaagaactcttgcaaccaatttttccttttcaattgtataaagctttgaaagttattgattctgcaaatgtgaaaaattaacttatcaaaaaatagcacacataaaatgggaactggccaaagaaacacaaagaatattgttttaactggaagttctatcattaactgctacaactactgtattcctgatatggctttttgcaatatatttatcactatatgggaacgatttaatctgctccatagagagagcagtaggagctctcagtggcctcaaaatatgatggttcttaccaaaaacaacgaatctaaatttcttgcagatrgtaggcctaacttttttttttctaaaaggaaataactctcctctaaaagtcaaatttgtttttaaaactgtggtgtctttaaccactttccccccccccagtttttcacttgacaccttgtcatgagttacagtggcttgcatcaatcattctgggttcacacagaaaatattttgtggtggttgactatcacatgcgagaaactaagtgccctttgcgggtgactgcgcaggtacctctgatttcttgccaaatcattcagaatgccgcaaatccattaaatctctccacagggaggaaaaagttcccgcattctagagagagaatttatgagttcatttcaatcaccacaaatgaaagccacccttaatattcattagagattttacagtggcaatatgcattatctattcatatgcccctctaaaaggccaatttcccttgaaaccttgcatggctccaagccactctttgtagaaacaatggcctatgtccaagtggaatcaggggaggcaaatggatgacatttccttatccattggtagtaattccactaagccactatggtggctatgagtttctgagctttaaaaattaaaggacagatttggaatgtgcagtcgtgtcattgtatcacttctctgctgtcatctgtgaccatatgtcctaaattgaatagagcttttcggttggcatcacaagagatgacttttgaaactgacatttctttcatttggagaaatgtatatgttggagacataatcctatgagcctgagagcttttcattaatctctgtctttctaccaccatagttcacgccaccatcatctttcatctatttttcccttcaaatctattttcttcactgtatgtagagtgatctttccaaaatatcaactcaagcctcatatcctcaacaaatcaacaagaaatatcaaaataagcccttggcttaaaacagttcttgcttagcttcctcattgcttttagggaagacacagcaaaacagcataacctgtaagaccatatgtggtctgactccttcctcaggcttaccttatcccacatctccgtgttttctctcccagctattatgaattctcattgtccttattatcagttagttaactcttctcttccatcacatttgaactctatcatcactacccatgaaagcattttctgactcctcgcctattattggccttcacagaaccatgtaacaatcatagctcttatcaaagctggcatttcatgtttatttatgtgattaaatatatttttgtttctaattagactataaggttcacaataatctgtttctacccaacagtttatcctccttaactggcatgatgtaaatactcaaaacaaattgttgagtaaatgaataaatcagttcttgattttaacgtatcttgtgccctggataaaaaatcctttctatgagtgagacatgggcttccactggggttgggcttgaggtgagctgcaataaagccatatttctaatccaattattcatcactatggttgtatttaatagctgggaaccatgagatgcataaagatcttacactgaatattcataagggtttttagagtgaattcaaccacttgctttacaacttcccaggaaggagagggaacatgaatttctttccttcatttttcattctttctgaaaaaggtggttatgactgagcgatatattatgactttgaaataaaatatcatgaaatgcatatgtgatgtggctactataaaatatatgagaagagttttaaaaaggtaacatcattttacatatgcaagacactgtcaatacagtcacaattcgggaggtcagaaaagggcaacggtgatgccagcatgtgcactccagcctcttcttctttttgtctgttttccccagtctctcacaggcatggggtca

SEQ ID NO: 87778 - DNA, 2519 bp, Homo sapiens
tttaaaagttacttcttctgaaaagataattctcttccacattacacagtaaaataaatgaattcattttggccgactgctgttttgggttatttccccattttgctgttttgggttatttccccaatttccttagatgtgtacaaaaaaattagtgctgatgatatttttaatcttaaccctcatctgcttttttgatagatttttttcccagattttttctgttaacccaagcccacacagccagcaaaactcccaagaactcttgcaaccaatttttccttttcaattgtataaagctttgaaagttattgattctgcaaatgtgaaaaattaacttatcaaaaaatagcacacataaaatgggaactggccaaagaaacacaaagaatattgttttaactggaagttctatcattaactgctacaactactgtattcctgatatggctttttgcaatatatttatcactatatgggaacgatttaatctgctccatagagagagcagtaggagctctcagtggcctcaaaatatgatggttcttaccaaaaacaacgaatctaaatttcttgcagatagtaggcctaacttttttttttctaaaaggaaataactctcctctaaaagtcaaatttgtttttaaaactgtggtgtctttaaccactttycccccccccagtttttcacttgacaccttgtcatgagttacagtggcttgcatcaatcattctgggttcacacagaaaatattttgtggtggttgactatcacatgcgagaaactaagtgccctttgcgggtgactgcgcaggtacctctgatttcttgccaaatcattcagaatgccgcaaatccattaaatctctccacagggaggaaaaagttcccgcattctagagagagaatttatgagttcatttcaatcaccacaaatgaaagccacccttaatattcattagagattttacagtggcaatatgcattatctattcatatgcccctctaaaaggccaatttcccttgaaaccttgcatggctccaagccactctttgtagaaacaatggcctatgtccaagtggaatcaggggaggcaaatggatgacatttccttatccattggtagtaattccactaagccactatggtggctatgagtttctgagctttaaaaattaaaggacagatttggaatgtgcagtcgtgtcattgtatcacttctctgctgtcatctgtgaccatatgtcctaaattgaatagagcttttcggttggcatcacaagagatgacttttgaaactgacatttctttcatttggagaaatgtatatgttggagacataatcctatgagcctgagagcttttcattaatctctgtctttctaccaccatagttcacgccaccatcatctttcatctatttttcccttcaaatctattttcttcactgtatgtagagtgatctttccaaaatatcaactcaagcctcatatcctcaacaaatcaacaagaaatatcaaaataagcccttggcttaaaacagttcttgcttagcttcctcattgcttttagggaagacacagcaaaacagcataacctgtaagaccatatgtggtctgactccttcctcaggcttaccttatcccacatctccgtgttttctctcccagctattatgaattctcattgtccttattatcagttagttaactcttctcttccatcacatttgaactctatcatcactacccatgaaagcattttctgactcctcgcctattattggccttcacagaaccatgtaacaatcatagctcttatcaaagctggcatttcatgtttatttatgtgattaaatatatttttgtttctaattagactataaggttcacaataatctgtttctacccaacagtttatcctccttaactggcatgatgtaaatactcaaaacaaattgttgagtaaatgaataaatcagttcttgattttaacgtatcttgtgccctggataaaaaatcctttctatgagtgagacatgggcttccactggggttgggcttgaggtgagctgcaataaagccatatttctaatccaattattcatcactatggttgtatttaatagctgggaaccatgagatgcataaagatcttacactgaatattcataagggtttttagagtgaattcaaccacttgctttacaacttcccaggaaggagagggaacatgaatttctttccttcatttttcattctttctgaaaaaggtggttatgactgagcgatatattatgactttgaaataaaatatcatgaaatgcatatgtgatgtggctactataaaatatatgagaagagttttaaaaaggtaacatcattttacatatgcaagacactgtcaatacagtcacaattcgggaggtcagaaaagggcaacggtgatgccagcatgtgcactccagcctcttcttctttttgtctgttttccccagtctctcacaggcatggggtca

SEQ ID NO: 87779 - DNA, 2519 bp, Homo sapiens
tttaaaagttacttcttctgaaaagataattctcttccacattacacagtaaaataaatgaattcattttggccgactgctgttttgggttatttccccattttgctgttttgggttatttccccaatttccttagatgtgtacaaaaaaattagtgctgatgatatttttaatcttaaccctcatctgcttttttgatagatttttttcccagattttttctgttaacccaagcccacacagccagcaaaactcccaagaactcttgcaaccaatttttccttttcaattgtataaagctttgaaagttattgattctgcaaatgtgaaaaattaacttatcaaaaaatagcacacataaaatgggaactggccaaagaaacacaaagaatattgttttaactggaagttctatcattaactgctacaactactgtattcctgatatggctttttgcaatatatttatcactatatgggaacgatttaatctgctccatagagagagcagtaggagctctcagtggcctcaaaatatgatggttcttaccaaaaacaacgaatctaaatttcttgcagatagtaggcctaacttttttttttctaaaaggaaataactctcctctaaaagtcaaatttgtttttaaaactgtggtgtctttaaccactttccccccccccagtttttcacttgacaccttgtcatgagttacagtggcttgcatcaatcattctgggttcacacagaaaatattttgtggtggttgactatcacatgcgagaaactaagtgccctttgcgggtgactgcgcaggtacctctgatttcttgccaaatcattcagaatgccgcaartccattaaatctctccacagggaggaaaaagttcccgcattctagagagagaatttatgagttcatttcaatcaccacaaatgaaagccacccttaatattcattagagattttacagtggcaatatgcattatctattcatatgcccctctaaaaggccaatttcccttgaaaccttgcatggctccaagccactctttgtagaaacaatggcctatgtccaagtggaatcaggggaggcaaatggatgacatttccttatccattggtagtaattccactaagccactatggtggctatgagtttctgagctttaaaaattaaaggacagatttggaatgtgcagtcgtgtcattgtatcacttctctgctgtcatctgtgaccatatgtcctaaattgaatagagcttttcggttggcatcacaagagatgacttttgaaactgacatttctttcatttggagaaatgtatatgttggagacataatcctatgagcctgagagcttttcattaatctctgtctttctaccaccatagttcacgccaccatcatctttcatctatttttcccttcaaatctattttcttcactgtatgtagagtgatctttccaaaatatcaactcaagcctcatatcctcaacaaatcaacaagaaatatcaaaataagcccttggcttaaaacagttcttgcttagcttcctcattgcttttagggaagacacagcaaaacagcataacctgtaagaccatatgtggtctgactccttcctcaggcttaccttatcccacatctccgtgttttctctcccagctattatgaattctcattgtccttattatcagttagttaactcttctcttccatcacatttgaactctatcatcactacccatgaaagcattttctgactcctcgcctattattggccttcacagaaccatgtaacaatcatagctcttatcaaagctggcatttcatgtttatttatgtgattaaatatatttttgtttctaattagactataaggttcacaataatctgtttctacccaacagtttatcctccttaactggcatgatgtaaatactcaaaacaaattgttgagtaaatgaataaatcagttcttgattttaacgtatcttgtgccctggataaaaaatcctttctatgagtgagacatgggcttccactggggttgggcttgaggtgagctgcaataaagccatatttctaatccaattattcatcactatggttgtatttaatagctgggaaccatgagatgcataaagatcttacactgaatattcataagggtttttagagtgaattcaaccacttgctttacaacttcccaggaaggagagggaacatgaatttctttccttcatttttcattctttctgaaaaaggtggttatgactgagcgatatattatgactttgaaataaaatatcatgaaatgcatatgtgatgtggctactataaaatatatgagaagagttttaaaaaggtaacatcattttacatatgcaagacactgtcaatacagtcacaattcgggaggtcagaaaagggcaacggtgatgccagcatgtgcactccagcctcttcttctttttgtctgttttccccagtctctcacaggcatggggtca

SEQ ID NO: 87780 - DNA, 776 bp, Homo sapiens
aaacatatgcagataatgttagccactgatacaatacatacattccaaagtcttcatggcttaatccagttgtaggttatttctcacttacccaacacccaaaagtatgtatctgaccagcaggcagcttctcgccaatcattcaggaaccatcttctagctcagctctcttttaccgtggttgccaacaggagagtgtggggaagaacatggagtatatcacaccagagggatttatgggtggggcttgggagtggtgcgtgtcacttccaagcacatgccacgtctctgagtccagacacagaccacacaggacagggcaagggaggctgagaaatgtcatcaagatatgacccagaaggaagagaaaaccaggtttggtgaacatctagacatctctggcaaagaagtttggctgtcaatattcttatytaaaaggcaataatttttttttttttttttttttttggtagggacagagtttcactcttgttgcccaggctggagtacagtggtgcaactgtggctcaccacaacctccacctcctgggttcaagcaattctcctgtctcagcctccggaatagctgggattacaggcatgtgccaccacagctggctaattttgtatttttagtaggacggtttttctccattttggtcaggctggtctcaaactcctaacttcaggtgatctgcctgccttggcctcccaaagtgctgggattacaggtgtgagccaccgcgcccggctggcaataatttttttaaccacct

SEQ ID NO: 87781 - DNA, 965 bp, Homo sapiens
tcaccccagaataatactcccacgtctccactacttgacctctctaccattcaactcaactttgatgtctaatttttgccttgaaactgcataaattcagtcttcaaaagtttattgttctgtaggacaaccagaaatttacactcagttaagaaacataagacgcagttgtcttttagcgtgtccattcttctgaatgtatatcactcataataataataaccaatacctcaaagcaaataaagtattttatgatgtggcttagtggttttatttatgcctcctcaggaagccaagagaccacaacacaaatctgaaaaacaattagcctgtttctgattaaacatgtattgcttaaagctgtagcaagtgaacaagtgaaaaagtttactgctaattcatacaagcagtattttttgctgggccctttaaataatgaaagctatgcaaatagtggcaaaggataaaagaaattaaacacaatttaatttcttcattttgaaatgcaatcagtaactgttttcattcatactcctttggattttcttatctatcctgtgcaccaaggaaataaaatgtatctagaaaggtcaattgataaatgcttattagcttaaagcatgtttaagctaaaatcttaatcctagaattatttgtttagtggaaattcaaaagggcaagtcatattatcaaaaatcatgtggctaatcattagtgttttatctttaaaactacttttaaactaacgagcatttctcacagtttgcaagttgattcagtaatgtacctttggccttcatgagccactcacttatgaccctccaaatctcctagcttctaagtctgcagycagagaacacatatacagaaggagccttaggtgttatgctcacagtgtaactccttatatattcaatttaaaatacaaaagtgcctcataaacaaatctaatttataaagtcttg

SEQ ID NO: 87782 - DNA, 683 bp, Homo sapiens
atctatttctcatttcagttccaygtttttgtctcagatattttgacactctatttttaggcatgtaaacataaataattattatgtcttcttgaagaactgaccctctttatccctaataagtttccttgctttgaagtcagctctgtcttagattaacataactactttctttattttgactaggggtatctttctccatccctttacttttagtctgtatattaaagtctgtattagtctgctcagcctgccataacaaaataccacaggctggagttaggcattctgctttccccaggtcaattaggtgctgataaaacaccaatgtgttgggccctggaaaataatttctcttgaggccaggtaggtcttgcaagaacagaatcgttgacataagcaagtttaactatgacttgattttatttgcattattaattaatttgtctgttaggctgaacgtccaaagaacattttttcaagttcactatctttactaggctttatcatgatgttggtatacctgggttgtttggtttcttcatcaatttcccattgttatataacaagttgccacaaatttagcaactcgaaacaagacaaatttattatcttatgtcaatgaaaagagtcaaactctgtaaaatatttgaatagatttattcttagccaaatatgagtgt

SEQ ID NO: 87783 - DNA, 1065 bp, Homo sapiens
ttgtttatactcatagagtcactgtaagtcaggggcttattgtcaggaactacttaacactttgcttaggatattggatttaaagaaaggaattttggggaatccatgctatagaaataaaagtatcagtaagtaagagggggaaacatacaaatttaaaatgtgcacataagaaacttaatagtaactcctccctgctgggggcatgggaagggagaaatgaaggaacaattatttttcatttggtaccattctctgtatggcttggattttcttgctattatttttatttgttaaaatctgggcagtgcaataatggggcacttctatttcttccgttttctgtattttccatttccctctattttctgtattagaaatacactacttagccggacatggtggctcatgcctgtaatcccagcactttgggaggtcaaggcgggcagatcacctgaggtcagaagttcgagaccagcctggccaacatggtgaaatcctgtctctatttaaaaaaaataaataaattagccaggcatggtggtgggcacctgtaatcccagctactcgggaggctgaggaagaagaatcacttgaactggggaggtggaggttgcagtgagccgagatggcaccaacggactccagcctgggygacacagtgagattcttcctcaaaaaaaaaaaaaaaaaaaaagaaaagaaaagaaaaagaaatacactacttaaaaataaaaggaaatgttatattggcatgtctagagaattgctcctttctcctcctccagggaggaaaacagaggaccttatatttagcaatccagcatcactctcctgacattccctctagtagagaatcatgcctaactaaagagctcagagctcacagatagatcacctctgaagccatgtccaggcaagggtcaacaagaatgaaaacacagggtaacacacaaagcattcagtccacaaatcacaggcatcagtctgacttctagtcatacttttgcaaaaagaattccaagagttccagtatctagtctaaatcttataaaagatttatgc

SEQ ID NO: 87784 - DNA, 606 bp, Homo sapiens
agacagagtcttgctctgtcacccaggctggagtgcaatggcgcgatctcagctcactgcaacctctgcctcccgagttcaagtgattttcctgcctcagcctcctgagtagctgggattacaggcatgcgccaccacgcccggcttgtatttttagtagagacggggtatccccatgttggtcaggctggtcttgaactcctgacctcaggtgattcacccacttgggcttcccaaagtgctgggattacaggcgggagccaacatgcccggccaagaatgggctttagtatctgacatttggccagagtgatcaggcatttgctctcatcttagagcttccagataatcacataatttgtaaaatgacatttataaagagacaatatgtttcatacctgtcatggatactgagagagagagagagagagagagagagaatacgactgcttcccaaactcgtggttgccagcgtgactctgggccaggcctgcctgagcctgggctcctttgggagtctagaagtagatgcrgcaatggtggccccctcctggaagccaccccacagccatccctaccaatcacaagaaggcttacaacgctctg

SEQ ID NO: 87785 - DNA, 543 bp, Homo sapiens
cgataatcacaagctgggcatggggcagttctcttttcccacttgggaccaaagccaccagactttctggtgtctgaagtacacattgatctgctctctgtctacaggtgaaccacagatgagcctgctgaccagcaggctgggctactgtgctctcatgctctctctctcccacatggacatttgtaaatagctcccaggtgggtcaatttcggaaggcactcatttgggatctggctgacggctcctggctgcattattagagtatgttctgaaggtaagttcttggccragatgggacctcacaacaagcactgcttgaaagctgtccactgaacggtccagggaaaggatgacccacagatggtgtcaggaatgttaatcaggtaaaattcacagcagtcgtttggcgaaagagtttgctgtctaagattccttctggttgaggtgtctccggagcatgaccagagctgccccgacagctgcatccacatcctgcccaaaggacatgggcaaagggaaagccctctgcacctcctgctt

SEQ ID NO: 87786 - DNA, 822 bp, Homo sapiens
tttatttcagcatgaagatactaataagttacttatcttcagacatttttctgcagcagtatctggcatatgtgcaaagcattcaagattagcattcgatctacaagtatattcagtgttatcctcacaaattgaagttaaccctttagatgcgtttcaaaatccaattgtttgtttgaaataatcacgcgctgttgccacagattacttttttctatttttaacagtattatttatcttggaaaaaaattatcttaacaagattatgttcctgcatgctctttcctaccactttttgtcttcctcggtgtgtgctgcaaggatttagcagacagcatagtctaggatcagctgttttatttctagttctattagttcaaactcagatagctcacacatctgttttacttctaaaatcactgcccaggaaaagtgtccagctccttctacccaaacataaactttactataaataactaagaacctaacaaataactgtttgggggaaatggaagtgtgtttaaaaatctgaattcttccaaactataggycttagtaattttcgtttttagagttttccctgacagcctagatcagcttccctcagaagttgtccctagagtgaacagactgaaacgcctgccggaaatccaggtattaacttcatattacttgctaattataaaacactgtttcacatactgacattattcacttccaacccttttatctaaaacaagtatttgcttcccaatcatagtttgacagcagagtgtatctgacataagacagtgaaatgatctttaatagacagcagttcaa

SEQ ID NO: 87787 - DNA, 566 bp, Homo sapiens
cataagatcttaaatacatgtttggctagaattgcaaatatatcttaatagttttgctcagccttcataactgtgtgattttgatgatgaccaccattccaccatctattattttattctgcacaatactcaactgtacacataagtctgtttagtagacataaatcatggtggctgtagagtttatgatttccccagcaggcatgtatgtggttccccagctgcttctaataccagaatgctgcccatttctagctagccttgtagaygcaggacctaggctgatccaactgccatggctttcctctggccacagtaaatggttcaagaagtggctatacaaatcaaggcaggccaattgattcctttctttggattttcccaacaaactggggaacacaatgaaaaacgtgagaccagaatggtttatggccccatttccctgttggcacacaacgatagaaatgagagacagatgggcagtcacacagagcatcctgatgatgttctctggccaggtccattcctgcccttttcaaggtttgggcatgtgaagcagtaaacaa

SEQ ID NO: 87788 - DNA, 877 bp, Homo sapiens
ttctcttgagtgtgttcgaggatgggagacttgaatgcatgtgtcaaaagatgtccatggagaagcaggtaataaagatgcaagaaaaacgagttgctagatctccaaacagggagagagggctgagatctagttttggttggtaaaggaatatagtacttctctagcattaaagaaaggataaactacatggacatctagaggaaacttcaagtgaagaagtgatccatgttggatttttgtctttgtttgtttaattaaataataatactgttaagtttttacatagtgcttcctacatgttttcagtgctttatataggttaactggtttaattctcacaactcttgttgtgaagtatgtattgttcttatcctcattttgaaaatgattgcgtgcaaaggccaagtagtttttccaaaatcacccaggtagtgcttttaaccactacacaatgctgacagttcaatcagcatctctggaggtgtgaggcctgagcatcagtttgggttgctttttgtttttgttttttgggtcttttttttttttttttttttttttattgatcattcttgggtgtttctcgcagagggggatttggcagggtcacaggacaatagtggagggaaggtcagcagataaacaagtgaacaaaggtctctggttttcctaggcagaggaccctgcggccttccgcagtgtttgtgtccctgggtacttgagattagggagtggtgatgactcttaaggagcatgctgccttcaagcatctgtttaacaaagcacatcttgcaccgcccttratccattcaaccctgagtggatacagcacatgtttcagagaacacagggttgggggtaaggtcaccgatcaaca

SEQ ID NO: 87789 - DNA, 565 bp, Homo sapiens
catatcttgcataaattcttggatgctgaggcagcctccactgctaaacataccaccacataatactaaataagttactgctaatgtccaatcatgtccacactgagagtaacatgtgtcatgtcaacgtgcatgatggatagraactaacagaagcagcttcatttctcacactctaggccagctgcacttacatcttataatatctatgtatcatacagaattgagtgccatcaacaaaatgttggcagcaggatgaaagtggaagagctgggctacttgctcatataatatatttaagttatttttatgggaatgaaatctatattgtccatttttagtttaaagaaataaatgaactttgttatatgacatttgattaattgaaactctacaaacgaaatcttcatatccctattacaagaagaattacattacctaatacctgtaatgaagtcttgaagtaatatgaaatagagaaatctgaaatgtgaaaactgtcaggtttaaatttaataataatttatcaaatatcaattatgaatcaatttaatttactcatgta

SEQ ID NO: 87790 - DNA, 565 bp, Homo sapiens
catatcttgcataaattcttggatgctgaggcagcctccactgctaaacataccaccacataatactaaataagttactgctaatgtccaatcatgtccacactgagagtaacatgtgtcatgtcaacgtgcatgatggataggaactaacagaagcagcttcatttctcacactctaggccagctgcacttacatcttataatatctatgtatcatacagaattgagtgccatcaacaaaatgttggcagcaggatgaaagtggaagagctgggctacttgctcatataatatatttaagttatttttatgggaatgaaatctatattgtccatttttagtttaaagaaataaatgaactttgttatatgacatttgattaattgaaactctacaaacgaaatcttcatatccctattacaagaagaattacattacctaatacctgtaatgaagtcttgaagtaatatgaaatagagaaatctgaaatgtgaaawctgtcaggtttaaatttaataataatttatcaaatatcaattatgaatcaatttaatttactcatgta

SEQ ID NO: 87791 - DNA, 541 bp, Homo sapiens
gtaaaagagatgaaaacagaaggtaaaaatgataatttaatgaggcaaagaggtgaacttgagaattgccctaaagaaagcttaaaaaaaaacagaataaataatcctgggaggctgacaagaacaaagccttagagtcccayagcatgggctcactaattagatatgtgacctagtgcaagatacctattctgccctacttggctccttcctatttaaatgagcttgctaataagacctacctcataaggttgcttgctgtgaaaattaaataagacaatgtgcaaaaagcccttaggacaatgtctggtaagtgttcaataactgttagctattaaaagcagaaaatgtcattatggctgcatatctggatggcggtggagaaggtaaattaaacaaaggtaagttaaaacaaaacgtgggcaatgataggtctgctgaggcattaatactagaactgacacattgtaggtgcttagtaaatattgaatgagtgaatgaatcagtcaatcaatcaatcagtgaatgaatcaatgaaagg

SEQ ID NO: 87792 - DNA, 541 bp, Homo sapiens
gtaaaagagatgaaaacagaaggtaaaaatgataatttaatgaggcaaagaggtgaacttgagaattgccctaaagaaagcttaaaaaaaaacagaataaataatcctgggaggctgacaagaacaaagccttagagtcccacagcatgggctcactaattagatatgtgacctagtgcaagatacctattctgccctacttggctccttcctatttaaatgagcttgctaataagacctacctcataaggttgcttgctgtgaaaattaaataagacaatgtgcaaaaagcccttaggacaatgtctggtaagtgttcaataactgttagctattaaaagcagaaaatgtcattatggctgcatatytggatggcggtggagaaggtaaattaaacaaaggtaagttaaaacaaaacgtgggcaatgataggtctgctgaggcattaatactagaactgacacattgtaggtgcttagtaaatattgaatgagtgaatgaatcagtcaatcaatcaatcagtgaatgaatcaatgaaagg

SEQ ID NO: 87793 - DNA, 541 bp, Homo sapiens
gtaaaagagatgaaaacagaaggtaaaaatgataatttaatgaggcaaagaggtgaacttgagaattgccctaaagaaagcttaaaaaaaaacagaataaataatcctgggaggctgacaagaacaaagccttagagtcccacagcatgggctcactaattagatatgtgacctagtgcaagatacctattctgccctacttggctccttcctatttaaatgagcttgctaataagacctacctcataaggttgcttgctgtgaaaattaaataagacaatgtgcaaaaagcccttaggacaatgtctggtaagtgttcaataactgttagctattaaaagcagaaaatgtcattatggctgcatatctggatggcggtggagaaggtaaattaaacaaaggtaagttaaaacaaaacgtgggcaatgataggtctgctgaggcattaatactagaactgacacmttgtaggtgcttagtaaatattgaatgagtgaatgaatcagtcaatcaatcaatcagtgaatgaatcaatgaaagg

SEQ ID NO: 87794 - DNA, 603 bp, Homo sapiens
aagattaacacctggtccgaattcttttttttttttttttttctttttgagaccaagtctcgctctgtcacccaggctggagtgcagtggcatgatctcggctcacggcaacctccgcctcctgggttcaagcaatactcttgtcttgccgtcctgattagttgggactacaggtgcccgccaccacacctggctgattttatttttggtagagacggggtttcaccatgttagccaggatggtctcaatctccagacytcgtgatctgcctgccttggcctcccaaagtgctgggattacaggtgtgagccaccgcacccagctacctggtctgaattcttatcacagacccaggaattcctgagattataaccctgactatactttcttccaacactgctctctaggaactattaagttggaagatgtatacggaatattaactggttcatgatatgcgaagcagaagatatttgattatcggaattatttattgtgaaacccctgtttgatgggacagttacactgggattaatggggttggcacatattcccagaagagttgtggacaagcatgtttgtgtgtttgtgtattgtctgga

SEQ ID NO: 87795 - DNA, 662 bp, Homo sapiens
aaatgcctcacctattttcagcagagccatggatacaagtaatcacaaggcagaagatattttccctttgcttctgaactgcttttggtggcaatgatacaaatacaaattgtggttgatgtttgcataagggcacagacatgcttggtccaagctgaagtaaagattccaagttgtgggccgtcctgcccacattctgcatcatgatgtcaaaatrgcatctgatgttctttgcattttcattgaagtaattatcacaaaattgttctcttacttcagcatttacactattagaattgagtgattaaaggattgtgtgattttttttttggcattcgatattcttcatttcctttgcagttagaaactcattggctcctgtaactaacacagttgataaagttgttagtttacgtaaagtcttgaaataataattttaattttcaagaaaagactccaaaatttttgtttactttaaaaatactccattgagtgaagtttacttgttttttattcatagtttttttttttcactaggaaacaaatattttattccttttttctgttgctcagaggacagatcgtgatacagaaaacagcagtctagccacagaggctgggtttggttgatttccacaggcacatggaggacaggaatggtg

SEQ ID NO: 87796 - DNA, 662 bp, Homo sapiens
aaatgcctcacctattttcagcagagccatggatacaagtaatcacaaggcagaagatattttccctttgcttctgaactgcttttggtggcaatgatacaaatacaaattgtggttgatgtttgcataagggcacagacatgcttggtccaagctgaagtaaagattccaagttgtgggccgtcctgcccacattctgcatcatgatgtcaaaatagcatctgatgttctttgcattttcattgaagtaattatcacaaaattgttctcttacttcagcatttacactattagaattgagtgattaaaggattgtgtgattttttttttggcattcgatattcttcatttcctttgcagttagaaactcattggctcctgtaactaacacagttgataaagttgttagtttaygtaaagtcttgaaataataattttaattttcaagaaaagactccaaaatttttgtttactttaaaaatactccattgagtgaagtttacttgttttttattcatagtttttttttttcactaggaaacaaatattttattccttttttctgttgctcagaggacagatcgtgatacagaaaacagcagtctagccacagaggctgggtttggttgatttccacaggcacatggaggacaggaatggtg

SEQ ID NO: 87797 - DNA, 1378 bp, Homo sapiens
tcatttcctgggtcagctgttgtccagtctctgaggaaccctcaggttgatggcagagagcagccaatgaccagatctggggccaccaagcctcaactcccccagttctggtcccagtcctgctataacctagttgtgtgaacacagacaagacaattggtctctctgatactcaggtatctcccctgaaaactgagagcaaaagaatgtcttccttggrgcattgttgtattgagtgagttcatgtatattctccaatgacccttggagaatatttgatgaatgtgaaatgtcactggacttactctaaagagtaatgctctgattcttttttgcttctcattcctgcataaatggttgtctattcatcatctgaactcacatgctttgtcaagcctaacccacctgcataatggcagaatcatcctagtcaaagtgacaatttatagaaagtaggtgttttgggccttcttttgcccctgcaggctgaagtaccaggccaccccatgcaaatgatcggtcttctctctctttccaacctgcaccacaggtatcatggtcctcctctccatttatggccttcaccacaacccaaaagtgtggcccaacctagaggtatgtggtccttgagaggaggaaatggggtgatctctcaagaccaataccttctcctgcttccacctctgggagtactgtaccctcatgggtggcaagtaggtgctggatccttaactatcctggctctggtgctctctctgcaggtgtttgacccttcccgttttgcaccgggttctgctcaacacagccacgctttcctgcccttctcaggaggatcaaggtgagacgtcctgtgtggtaattggaatagagaaatgagggaagtctctggtcaaccctctgatctttgtgagcccgatgttcatatgtggcatcttcagggtgtgctcttaaatattggtatttgtgggaaagtcaggcacctggtgtgggcgtctctgtgtacaaaaggaaggtggcattcagagcaccccatggagactttgctccctctgcttcttcaaatgggcagcctgaattcactgtcagtgcatgttccaaacttcagtatattcatgtattttcctcactttaaggatatgaattctcaaaattagatattctccagtaaattcaacttcagctgtttgcttttctcagttgtcaggaatagtaaactgtagatttctctctccccacacatcctcaatgcagcacactaccttccctatttaattcactagtctgtcgtagagatgaatcattgaaatctttgcatctgtttataatacagatgacctgcaagtcctacctttcaagccatataagggagaggttaagg

SEQ ID NO: 87798 - DNA, 1804 bp, Homo sapiens
tgcatatatacaaccagttctgcacactgttcaataggcttttggagcttttgaatttctttcttacactcttacaccattgatttagtctcatccattctgtggttaaaaaaattatgtgaaggccgggcgtggtggctcacgcctgtaatcccagcactttgggaggctgaggcgggcggatcacgaggtcaggagatcgagaccatcctggctaacacggtgaaaccccgtctctactaaaaatacaaaaaattagcctggcgtggttgtgggcgcctgtagtcccagctactcgggaggctgagacaggagaatggcrtgaacctgggaggtggagcttgcagtgagccgagatagcgccactgcactccgcctgggtgacagaacgagactctgtctcaaaattaaataaataaataaataaataaataaataaataaataaataaataaataaattgtggctagtgtcctgtattttgaaaatgaggagagttttgtttcaaatccctgttcctctagtggctttctgacccttgaagcttcttaacttccttgaacttcaatactttcccatctctgaagagggctccatggtggttaacgtgcagcagtgttggaatgattagagaaacgtagcctagaaggggtctaggacatagaaagcactcaaatgataactgctatcgtcttatactaccagatgctgtgctacttctgtgaaatattgctagtagcattttaagttggaaaatattttgagacagcaaaatagcaatatgtctgagagctttaagagtatttctgattcaaaaaccccagttgtgggaattactctaaagaaataatgcagaagaaaaaagttgcctttctgagtaaaatcagttatttcggtattaaatacactggaatgcccagtttgaaattcatcgtaattattattttgtatccttagtaactatcaaatctatcacaatgcctgataaagactaaatgtttgtaaagtgaatgaatagctaaatattgggaaaaatttatcaacttcataagaatattatctagctgtttgaagataggagagatatgcaatattgtgaaaaagtttactttttatcaaataaaatggacattcactgtgattgcaactatgtaaatatatatgcattcaaagactaggagagatagttaaaatgaaatatatactaggttgataaaataagaaatgacttatttttaatctttaaaaatgtattcaatgctattggatttccacatatacacagataatttaaacagagagatataagacaaccgcctgcagtataaagacaacaatctagtgaaataaaatttctacttttaatattactaaaattaataacttctgactgacacaaatcagtgttacactgttttagatttttattgataatcatgccattctactcttctttttttgaaaatagataatagataaaataagtcctgagaaattggtagagtggactagtccagggcatatggaagaaagaaaggtgaatctgcacttgccccggtttgaggtggaggacggttacgatctagaggcggtcctggctgccatggggatgggcgatgccttcagtgagcacaaagccgactactcgggaatgtcgtcaggctccgggttgtacgcccagaagttcctgcacagttcctttgtggcagtaactgaggaaggcaccgaggctgcagctgccaccggcataggctttactgtcacatccgccccaggtcatgaaaatgttcactgcaatcatccc

SEQ ID NO: 87799 - DNA, 1267 bp, Homo sapiens
agctgggattacaggttccggctaccaaacctggctagtttttgtatgtttagtagagacagggtttcaccatgttggtgaggctggtctcgattctcccgcctcagcctcccaaagtgctgggattacaggcttgagccaccgtgcctggctttttttttttttttttttttttgtggcaataaggtctcattgtcttgcccaggctagccttatgctcctagcctcaagtgatcctcctccctcagcctcccaaagtgctgggattacaggtgggcgccactgtgcctgttcccgttgggaggtcttttccaccctctttttctgggtgcctcctctggctcagccgcaccctgcaggatgacacaaggggatggggaggcactcttggttccatcgacgggtcccctctgaccccctgacctcgctccccggacccccaggctccatcgcctacctcttcttcaccaaccggcacgaggtcaggaagatgacgctggaccggagcgagtacaccagcctcatccccaacctgaggaacgtggtcgctctggacacggaggtggccagcaatagaatctactggtctgacctgtcccagagaatgatctgcaggtgagcgtcgcccctgcctgcagccttggcccgcaggtgagatgagggctcctggcgctgatgcccttctctcctcctgcctcagcacccagcttgacagagcccacggcgtctcttcctatgacaccgtcatcagcagggacatccaggcccccgacgggctggctgtggactggatccacagcaacatctactggaccgactctgtcctgggcactgtctctgttgcggataccaagggcgtgaagaggaaaacgttattcagggagaacggctccaagccaagggccatcgtggtggatcctgttcatgggtgcgtatccacgacgctgagggctgcagagggaatggagggagcaggaaggrgcttcaggaactggttagtgggctgggcatggtggctcaaagcacctgtaatcccagcactttgggaggccaaggtgggtggatcatcaagaccagcctgaccaacatggtgaaacctcgtctctactaaaaatacaaaaattagccgggtgtggtggtgggcacctgtaatcccagctgctcgggaggctgaggcaggagaatcacttgaacctgggagatggaggttgcagtgagccaagacagccccactgcactccagcctgggtgacagagtgagactccg

SEQ ID NO: 87800 - DNA, 692 bp, Homo sapiens
agtgccttggtcccgatgatgattctccaaaatgtaatctctgctgacagaacaagagtctgcaaattgggagtctggaaagggaagakaagggctttgtccctggccccaaagactcagggagaggtttactggccaggtagaaagggcgtccaggtgaagggaccctggttcagtgatctccaacctgcacgtctcatttgtgaggaagccgtagggtgtggacttttcttgtttctgaccttgagtgattagaaaatagcagcttttatatgtcacaaatggactttagataagcatgaagatgacgaagactgtggaatatgtagctaagagtcttactaaaatcctctctagtgtatttatatatttaagcgtttggtagtacttttttagccatcagcgttctctatattaggttgatacagaagttattgaggtttttgccattgaaagtaatacgtcacttcatgcagaggtggaattggcgctctgagcttgcttgtcaaattcacaggcattcacttttctttcataaacatttaggactctgtatttaggagaggaatcactgtgaatgtagacctcgggttggtcattttcctagtaagatagaccagactgactggaaaagtcaccctcttgggctatcctgcgtatgtggctcggcattgcttccgtcaggataatgc

SEQ ID NO: 87801 - DNA, 692 bp, Homo sapiens
agtgccttggtcccgatgatgattctccaaaatgtaatctctgctgacagaacaagagtctgcaaattgggagtctggaaagggaagagaagggctttgtccctggccccaaagactcagggagaggtttactggccaggtagaaagggcgtccaggtgaagggaccctggttcagtgatctccaacctgcacgtctcatttgtgaggaagccgtagggtgtggactttycttgtttctgaccttgagtgattagaaaatagcagcttttatatgtcacaaatggactttagataagcatgaagatgacgaagactgtggaatatgtagctaagagtcttactaaaatcctctctagtgtatttatatatttaagcgtttggtagtacttttttagccatcagcgttctctatattaggttgatacagaagttattgaggtttttgccattgaaagtaatacgtcacttcatgcagaggtggaattggcgctctgagcttgcttgtcaaattcacaggcattcacttttctttcataaacatttaggactctgtatttaggagaggaatcactgtgaatgtagacctcgggttggtcattttcctagtaagatagaccagactgactggaaaagtcaccctcttgggctatcctgcgtatgtggctcggcattgcttccgtcaggataatgc

SEQ ID NO: 87802 - DNA, 692 bp, Homo sapiens
agtgccttggtcccgatgatgattctccaaaatgtaatctctgctgacagaacaagagtctgcaaattgggagtctggaaagggaagagaagggctttgtccctggccccaaagactcagggagaggtttactggccaggtagaaagggcgtccaggtgaagggaccctggttcagtgatctccaacctgcacgtctcatttgtgaggaagccgtagggtgtggacttttcttgtttctgaccttgagtgattagaaaatagcagcttttatatgtcacaaatggactttagataagcatgaagatgacgaagactgtggaatatgtagctaagagtcttactaaaatcctctctagtgtatttatatatttaagcgtttggtagtacttttttagccatcagcgttctctatattaggttgatacagaagttattgaggtttttgccattgaaagtaatacgtcacttcatgcagaggtggaattggcgctctgagcttgcttgtcaaattcacaggcattcacttttctttcataaacatttaggactctgtatttaggagaggaatcactgtgaatgtagacctcgggttggtcattttcctagtaagatagaccagactgactggaaaagtcaccctcttgggctatcctgcrtatgtggctcggcattgcttccgtcaggataatgc

SEQ ID NO: 87803 - DNA, 760 bp, Homo sapiens
  misc_feature (1)...(760): n = A,T,C or G
ccnattctcctcccttttgcccccaccaaaatgaagtttttagtgtaaatgtcatgtagattttaaccaaaggttgattggagggtctgagtttctcagctaaatgaaggcatgaggactgtatccctcctgaagggtgtgatcagttccatgagaaagaagctgcgagctgtggggcatccaagataatgtaatctgccccggggtcctgtgagggactggccgacaaggcaggctgaatgcagccttgcccactgagctgggttctctctngctttaggtcctctctggaggtgaagagggaagtccgctgattgtttttctcttggtgcaacttcgcaccacccttacatatcccagtgtatatggtagccaaggacagtactgtttgagcctcccccattaagtgtcaacattgaatcaatgcaatcccatgcaaasaaagctgagcatgggattgtgccggtttagccagctaaagtgtggtctctgatgctgatcatgactatgaaaagggaaaatggaggagaatgatgacgaaggaggaggaggaggaaaaggtgacttgcctctagctgatgtggattatttctcttttttaatttccatgtctgcgtagcttcatcatagatctcaacttaaggacaatgaaangtcgtttattgagtacttagtatgtgctggttgcagagccnanagtcttttttttttttttttttttcctccttttttaaaaaagagagtctcactctgtcaccca

SEQ ID NO: 87804 - DNA, 669 bp, Homo sapiens
gccctctggcttcagggaagaacgatggatttgtgagggtcaggactggtagcaggtgggctcctagaatagtcccggcaagagatcatggaggccagagccagggatggatatagactaagacatgcctgtagactgagtgtcgaggagcaagtagatcaaattctagcatgagactgggagaaagagatgttctccagccaatggatttatgaaatgaatgaactttttccctttcctcccaagcattgcctggatcaccttgttaatatggtttcttattaaacgtgctggaaaaaagaggctctaagtgcgtatgcttttaaagcaacactattagcaaatggccactggcttcatttttcctgtgcatatatttttgtgtattccgggaggattttcttttctttttctttttaatcctcctcctcaagggaaacattcttctcacaatagcttcctggtagaaagttctaactaatgactttratcgtgtgcatgtattgcagaaatggacagggcaattctcagcccattcatcttacagacctcaagtgaacaggcacaaaacaacaggctccaccctccttcccccctctatctcatactttacctcaatttatgacttggcttacaatccgttgcagaaagcctagctccccagcttct

SEQ ID NO: 87805 - DNA, 669 bp, Homo sapiens
gccctctggcttcagggaagaacgatggatttgtgagggtcaggactggtagcaggtgggctcctagaatagtcccggcaagagatcatggaggccagagccagggatggatatagactaagacatgcctgtagactgagtgtcgaggagcaagtagatcaaattctagcatgagactgggagaaagagatgttctccagccaatggatttatgaaatgaatgaactttttccctttcctcccaagcattgcctggatcaccttgttaatatggtttcttattaaacgtgctggaaaaaagaggctctaagtgcgtatgcttttaaagcaacactattagcaaatggccactggcttcatttttcctgtgcatatatttttgtgtattccgggaggattttcttttctttttctttttaatcctcctcctcaagggaaacattcttctcacaatagcttcctggtagaaagttctaactaatgactttgatcgtgtgmatgtattgcagaaatggacagggcaattctcagcccattcatcttacagacctcaagtgaacaggcacaaaacaacaggctccaccctccttcccccctctatctcatactttacctcaatttatgacttggcttacaatccgttgcagaaagcctagctccccagcttct

SEQ ID NO: 87806 - DNA, 669 bp, Homo sapiens
gccctctggcttcagggaagaacgatggatttgtgagggtcaggactggtagcaggtgggctcctagaatagtcccggcaagagatcatggaggccagagccagggatggatatagactaagacatgcctgtagactgagtgtcgaggagcaagtagatcaaattctagcatgagactgggagaaagagatgttctccagccaatggatttatgaaatgaatgaactttttccctttcctcccaagcattgcctggatcaccttgttaatatggtttcttattaaacgtgctggaaaaaagaggctctaagtgcgtatgcttttaaagcaacactattagcaaatggccactggcttcatttttcctgtgcatatatttttgtgtattccgggaggattttcttttctttttctttttaatcctcctcctcaagggaaacattcttctcacaatagcttcctggtagaaagttctaactaatgactttgatcgtgtgcatgtattgcagaaatggacaggrcaattctcagcccattcatcttacagacctcaagtgaacaggcacaaaacaacaggctccaccctccttcccccctctatctcatactttacctcaatttatgacttggcttacaatccgttgcagaaagcctagctccccagcttct

SEQ ID NO: 87807 - DNA, 2040 bp, Homo sapiens
tacagctccctccctaatcttgctagaaggtagggctaatgcattgtcaattcagaaatagggggtgttcctgagtctggggacactctagtgaaattctatgtgtaaaataatttgtacaagtttatatttttagctaaattaaaatactcacattcccattattttttagaggttgtaagctaagtaataacattctagaaactctctgttttttgaaagggcatcaccactgttgaaggcgctaatgggagatcctaagtttcaggctctgctacagacgtcaggtcccctaggagttgggctgcctttgctctcctctccgcgactcggtacctggtgtatagttggctaaaaagaagttgttggggctgggtgcagcacctcacacctgtaatttcaacacgtagggaggctgaggcaggaggatctcctgaagcccagaattcaagaccaggctgggcagcatagcactacccatctctactataaatttaaaaattaactgggtgtggtggtgcacatctctagtctcagctgcttgggactactagaaaggtaaggcaagagaatcccctgagcccaggagttggaggttgctgcagctatgttcgcaccactgtattccagtctgggcaacagagcaagaccccatttccaaaaaataaatgaaataaataaatacataataaataaacagtagtggttgaaagaaagggaaggaagaaatgctgttttaggaaatcaataggataatttttttttttttttgaagcggagtctcactctgttgcccaggctggagtgcagtggcacagtctcggctcactgtaagctccgcctcccgagttcacgccattctcctgcctcagcctcccgagtagttgggactacaggcgcccgccaccacactcagctaattttttgtatttttagtagagacagggtttcactgtgttagccaggatggtctcgatctcctgacctcgtgatctgcctgccttggcctcccaaagtgctgggattacaggcgtgaactactgtgcctggccaggataatctttaagaagaagataacattagctattcttctcacttcctacgtagaattccataccctgtgtctttggcctggaaagggtattggtagcaattgtcttcggctttccctgccatgtgtatgcattcccacggccacacaagcacacacacacttttgtggttttttttttaattatataagcaagtaggatgtttgtcttagtttttttgggctgctataacaaaatgccatggactgaataatatataaacaacggaaatgtatttctcacaattccggaggctgagaagtccaagaggaaggcactggcagattcagtgtctggtgaggatttgtttttgatctcataggtgtccatcttgctattttctcaactagcagaggcaactctctggggtatcttttaaaagggcactaatggccaggmgtggtggctcacacctgtaatcccagcactttgggaggccgaggcaggtgtctcggtggatcacttgaggtcaggaggtcgagaccagcctggctgacatggtgaaaccctgtctctactaaaactaaaaacttagccaggctcggtggcttgtgcttgtaatcccagccacttggaagggtgaggcagaattgcttgaacctgggaggcagtggttgcagtgagctgagatggtgccactgcactcctgtctgggagacagagggaggagactccatcaacactaataataataaagtaaataaaagggcactaaccctactcaggaagccttcactctcatgacataattacctcccaaagtccgcacttcctaatgttaccactctggaggttagaatttcaacatataaattttggggggacacattcagaccacaataatgttttataatgttcattttgctttaacaagagacacatgtcagatagtagacatgatctgagaagacacaaaacccagcgtggtgattttggcagccttgccatg

SEQ ID NO: 87808 - DNA, 2040 bp, Homo sapiens
tacagctccctccctaatcttgctagaaggtagggctaatgcattgtcaattcagaaatagggggtgttcctgagtctggggacactctagtgaaattctatgtgtaaaataatttgtacaagtttatatttttagctaaattaaaatactcacattcccattattttttagaggttgtaagctaagtaataacattctagaaactctctgttttttgaaagggcatcaccactgttgaaggcgctaatgggagatcctaagtttcaggctctgctacagacgtcaggtcccctaggagttgggctgcctttgctctcctctccgcgactcggtacctggtgtatagttggctaaaaagaagttgttggggctgggtgcagcacctcacacctgtaatttcaacacgtagggaggctgaggcaggaggatctcctgaagcccagaattcaagaccaggctgggcagcatagcactacccatctctactataaatttaaaaattaactgggtgtggtggtgcacatctctagtctcagctgcttgggactactagaaaggtaaggcaagagaatcccctgagcccaggagttggaggttgctgcagctatgttcgcaccactgtattccagtctgggcaacagagcaagaccccatttccaaaaaataaatgaaataaataaatacataataaataaacagtagtggttgaaagaaagggaaggaagaaatgctgttttaggaaatcaataggataatttttttttttttttgaagcggagtctcactctgttgcccaggctggagtgcagtggcacagtctcggctcactgtaagctccgcctcccgagttcacgccattctcctgcctcagcctcccgagtagttgggactacaggcgcccgccaccacactcagctaattttttgtatttttagtagagacagggtttcactgtgttagccaggatggtctcgatctcctgacctcgtgatctgcctgccttggcctcccaaagtgctgggattacaggcgtgaactactgtgcctggccaggataatctttaagaagaagataacattagctattcttctcacttcctacgtagaattccataccctgtgtctttggcctggaaagggtattggtagcaattgtcttcggctttccctgccatgtgtatgcattcccacggccacacaagcacacacacacttttgtggttttttttttaattatataagcaagtaggatgtttgtcttagtttttttgggctgctataacaaaatgccatggactgaataatatataaacaacggaaatgtatttctcacaattccggaggctgagaagtccaagaggaaggcactggcagattcagtgtctggtgaggatttgtttttgatctcataggtgtccatcttgctattttctcaactagcagaggcaactctctggggtatcttttaaaagggcactaatggccaggagtggtggctcacacctgtaatcccagcactttgggaggccgaggcaggtgtctcggtggatcacttgaggtcaggaggtcgagaccagcctggctgacatggtgaaaccctgtctctactaaaactaaaaacttagccaggctcggtggcttgtgcttgtaatcccagccacttggaagggtgaggcagaattgcttgaacctgggaggcagtggttgcagtgagctgagatggtgccactgcactcctgtctgggagacagagggaggagactccatcaacactaataataataaagtaaataaaagggcactaaccctactcaggaagccttcactctcatgacataattacctcccaaagtccgcacttcctaatgttaccactctggaggttagaatttcaacatataaattttggggggacacattcagaycacaataatgttttataatgttcattttgctttaacaagagacacatgtcagatagtagacatgatctgagaagacacaaaacccagcgtggtgattttggcagccttgccatg

SEQ ID NO: 87809 - DNA, 926 bp, Homo sapiens
caggttccaaacctgcactaaaacttgttgctgcatctcacctaatcgtgtagtgagccaggtgagctcatctgtgaaatgcagacctttctggacgtaccacctcgtggggtgaagggaaagaaatgatacaggtgtacatcagggtataagctgtcctagagtctggattctttttatccagaagccattctttcagcctgtgcctttttgtaaataccataccccatctatttccacaaaggatttggggcattagggaggtaaagggggaatatgttctagaagaagggcgctcacctcagtaaattgatgggtgggccacaaaaatcatgtcacaagatcttgttgatgtgcatgcattcattcattcaacaaatattattgagcatctaacataagccgggtgctttgctaggkacagaatgctgtacaaggtccctgtcctcatggggaccgtatgttgggaagacagatgataggcatggaaatgaagagacaaaccactccgacttcagcccaggaaggagctttaatttgagtaattgttttcactaattcatcttcacagaaagaaataatatgatcaccttcggttagtaaacaaaacaaataggcaaacaggtttacaggctgaggtgggctggatcacttgaggccgggagtttgaaaccagcctagctaacacggtgaaacccttctctactaaaaatacaaaaatattatctgggtgtggtggagctttcctgtagtcccagctactctagaggctgaagcatgagaatcacttgaacccaggaggtggaggttgccatgagcagagatcgtgccactgtactccagcctgggtgatggagcaaggctctgtcttggggcggggggcagggcaggggaggggggaaagaagagaaacagctttacttacg

SEQ ID NO: 87810 - DNA, 699 bp, Homo sapiens
agattaggaaccagccattgcttagctggaccatctgctttagagtctcacaggctgcattcaaggtgtccactgggctggggtcaacttcttaccgacaaagctggtgccccaaaagaatggggtcttatcctgttgggtgtcatgaagccaacacacaaaaccgaaagtagtgtcaagcagtacaggctttattcaatggccatggaattgagaagcaggagcatggctcacaaattcacaaatcagcttctccactaatgaggggtgrggaagttaaaatatagactttgttgttggtgctgttttaatgaagaggctggacattaaaatcaaggggaggaataatcatgtcttctcttgaaatgggcagtgaacttcccggaaccagagtgttgccttcctttttatccttttatggctgcttctgatcattgtcatggtgattgtcaactgtcttggcgctggtgagggggctgtttagcatggaaataggattataatgacacctgaggtctttttgaagtccttgggtcggctatcttgcttctaacaaatctcagctggtctggttacagagggaactttttatcacaggtgtcctgtttcttaaagataagcagtgttattacagggtagaaattcacctatgtcaagtaggcattataccaggtaacaatctcaagactcagcagggaa

SEQ ID NO: 87811 - DNA, 699 bp, Homo sapiens
agattaggaaccagccattgcttagctggaccatctgctttagagtctcacaggctgcattcaaggtgtccactgggctggggtcaacttcttaccgacaaagctggtgccccaaaagaatggggtcttatcctgttgggtgtcatgaagccaacacacaaaaccgaaagtagtgtcaagcagtacaggctttattcaatggccatggaattgagaagcaggagcatggctcacaaattcacaaatcagcttctccactaatgaggggtggggaagttaaaatatagactttgttgttgktgctgttttaatgaagaggctggacattaaaatcaaggggaggaataatcatgtcttctcttgaaatgggcagtgaacttcccggaaccagagtgttgccttcctttttatccttttatggctgcttctgatcattgtcatggtgattgtcaactgtcttggcgctggtgagggggctgtttagcatggaaataggattataatgacacctgaggtctttttgaagtccttgggtcggctatcttgcttctaacaaatctcagctggtctggttacagagggaactttttatcacaggtgtcctgtttcttaaagataagcagtgttattacagggtagaaattcacctatgtcaagtaggcattataccaggtaacaatctcaagactcagcagggaa

SEQ ID NO: 87812 - DNA, 798 bp, Homo sapiens
  misc_feature (1)...(798): n = A,T,C or G
aaaaaaaaaaaaaaatttaaatagttataggactcagacgttttaaatttcctcttgtgcagttaagaaggttgatttatcagnaatgtgtcagttcatctaaattttcaaatgngttgctgtggaatttttcataattancccctatctttttttttttttctttttttctgagacggggtctcactctgtcgccaggctgaagtgmagtggcacgatcctgctcactgcaacatctgcctcccaggttcaagcaattctcctgcctcagcctcctgagtagctgggactacaggtgcccggctaatttttgtatttttagagagatgggtttcaccatgttggccagtgtggtctcgaactcctgacctcaggtgatccacccactttgcctcccaaagtgttgcgattacaggcgtgagccaacatgcccagcccaaggaggtgacatcttgaggggacacttcggggtggacaggttgagtctctgtcacctaggaagtgcctccccttttaccactgtattatctgcggttagcacagtgcaaacatggaggcctctttctgtccctatccagccctggctctgggagtggtgggctcgcgacttaggcctgtctgcctgatttcctgaagagccccccctccatgcgcctgaaggcccgacccagcagccctggcttttccgtgcttacctgcagcgccttctccttctaccctccggagctgcaacttcggttcctgcggaatgggctggccgctggcaccggccagggtgacttcggccccaacagtgac

SEQ ID NO: 87813 - DNA, 798 bp, Homo sapiens
  misc_feature (1)...(798): n = A,T,C or G
aaaaaaaaaaaaaaatttaaatagttataggactcagacgttttaaatttcctcttgtgcagttaagaaggttgatttatcagnaatgtgtcagttcatctaaattttcaaatgngttgctgtggaatttttcataattancccctatctttttttttttttctttttttctgagacggggtctcactctgtcgccaggctgaagtgaagtggcacgatcctgctcactgcaacatctgcctcccaggttcaagcaattctcctgcctcagcctcctgagtagctgggactacaggtgcccggctaatttttgtatttttagagagatgggtttcaccatgttggccagtgtggtctcgaactcctgacctcaggtgatccacccactttgcctcccaaagtgttgcgattacaggcgtgagccaacatgcccagcccaaggaggtgacatcttgaggggacacttcggggtggacaggttgagtctctgtcacctaggaagtgcctccccttttaccactgtattatctgcggttagcacagtgcaaacatggaggcctctttctgtccctatccagccctggctctgggagtggtgggctcgcgacttaggcctgtctgcctgatttcctgmagagccccccctccatgcgcctgaaggcccgacccagcagccctggcttttccgtgcttacctgcagcgccttctccttctaccctccggagctgcaacttcggttcctgcggaatgggctggccgctggcaccggccagggtgacttcggccccaacagtgac

SEQ ID NO: 87814 - DNA, 656 bp, Homo sapiens
tcctcccttcctagactcttatctcttcgaaggaaagatctgtttctttgaattcctaacacatttcatagttcctgacataaaattttgggattaaatatgggtggatgaatgaatggatgaatggatagggagagaaaaacaagactcagtaggctactgaagttgtctggcctggggctgctgaactagaactaactcaccccatgctcccaccgttgagtcaacttggagagaaaaaatgagggaagtaatctcaagcagttattatatgacatctgtgctacttgataggagtcgctactgagaggagaagaagcttcctccattttaaccaaggttgttgcagatcaaccttcctcctggtatgaggagagaagagattattattctgtagagatccagtaaggtgggtaaatcgggatgatacagaaaagaatctttgaaatatgacacacatgggaaccaaccagaatttagccaattactaattagctgagaaatctgggacaagttacgtggtttcactgagtatctggctcttcatctacaaattaaattcataatatctgctttgcagcatgatcagaggagctctaaggagcatatgttcagtgcctggcacagaragatactcaataaatattttcatttaa

SEQ ID NO: 87815 - DNA, 656 bp, Homo sapiens
tcctcccttcctagactcttatctcttcgaaggaaagatctgtttctttgaattcctaacacatttcatagttcctgacataaaattttgggattaaatatgggtggatgaatgaatggatgaatggatagggagagaaaaacaagactcagtaggctactgaagttgtctggcctggggctgctgaactagaactaactcaccccatgctcccaccgttgagtcaacttggagagaaaaaatgagggaagtaatctcaagcagttattatatgacatctgtgctacttgataggagtcgctactgagaggagaagaagcttcctccattttaaccaaggttgttgcagatcaaccttcctcctggtatgaggagagaagagattattattctgtagagatccagtaaggtgggtaaatcgggatgatacagaaaagaatctttgaaatatgacacacatgggaaccaaccagaatttagccaattactaattagctgagaaatctgggacaagttacgtggtttcactgagtatctggctcttcatctacaaattaaattcataatatctgctttgcagcatgatcagaggagctctaaggagcatatgttcagtgcctggcacagagaratactcaataaatattttcatttaa

SEQ ID NO: 87816 - DNA, 924 bp, Homo sapiens
agagttatatacacaggcatggacaattttagatttggaaggatcctaaggagccacataatatgttcctctgggagctgggcgtggtggctcatgcctgtaaccccaacgagtcgggaggctgaggtgggaggattgtttaaggctgggagtttgagaatatggtcctctggttccggatttgcttgtgggattttgtgttttagaaggtgagaatgtgcacatgtaagaaagaggtggctattcagcaccaaaatgctcgtacacactcacgctcagcacagcatagaaacaacagacaaacatttcaccctaaacctggctgtttctttctcctattcttcactacctgcctgtgtctgaggcagtcccctcaaacctccagcgttgcctatgggtcttctttcttgacagaacttccctcttttcaaactgaaaggggagtcttccaaaggaagcagtgactgcacattaatcttggaggcaaaaaaagtggacgaagtcctgcttcatgcaaagaagacccatttaccactgagccagacaggycatccagtgcccctgttctgtggaagagaacgaaggattaaaattaaatttagccgtcaagtagcccattaactgtggatttaggaggccagctgaaaaggaattggaaatttccaactgtaagcagataggaggattttgtttcctgacactccagtttaaaagtcacctcaagaatgactacatctgatttttgtgcccagacaaggacactaaggatgatcaatgcccatggacttttgaggtgcctactactatatcatagctgccttgaaaatggagtttgggagggagtaaggagggacagagtggcagccacatggagggagtgagtgtctgaaaggagataagtcctcagtctacctactcttggca

SEQ ID NO: 87817 - DNA, 924 bp, Homo sapiens
agagttatatacacaggcatggacaattttagatttggaaggatcctaaggagccacataatatgttcctctgggagctgggcgtggtggctcatgcctgtaaccccaacgagtcgggaggctgaggtgggaggattgtttaaggctgggagtttgagaatatggtcctctggttccggatttgcttgtgggattttgtgttttagaaggtgagaatgtgcacatgtaagaaagaggtggctattcagcaccaaaatgctcgtacacactcacgctcagcacagcatagaaacaacagacaaacatttcaccctaaacctggctgtttctttctcctattcttcactacctgcctgtgtctgaggcagtcccctcaaacctccagcgttgcctatgggtcttctttcttgacagaacttccctcttttcaaactgaaaggggagtcttccaaaggaagcagtgactgcacattaatcttggaggcaaaaaaagtggacgaagtcctgcttcatgcaaagaagacccatttaccactgagccagacaggtcatccagtgcccctgttctgtggaagagaacgaaggattaaaattaaatttagccgtcaagtagcccattaactgtggatttaggaggccagctgaaaaggaattggaaatttccaactgtaagcagataggaggattttgtttcctgacactccagtttaaaagtcacctcaagaatgactacatctgatttttgtgcccagacaaggacactaaggatgatcaatrcccatggacttttgaggtgcctactactatatcatagctgccttgaaaatggagtttgggagggagtaaggagggacagagtggcagccacatggagggagtgagtgtctgaaaggagataagtcctcagtctacctactcttggca

SEQ ID NO: 87818 - DNA, 1079 bp, Homo sapiens
tctaatttgttcataaaataaggtaaaatgatcattttctagatgaggctgagggatagagacatttagaaacttatcctggataagacataagggggcaggttcaggattcaaatcctgtgctattcaagttcatagtctttccagcatatgtgcttcaactattcttgtcatttcagttttctgctctggaatgtctagtgactccctgtttcaaaccatgtcaggtctttgtaatctggatcttttgcaatttacataatcctcagttatttaaatgtagccttactgttaaatggactacacttgttttcctctattacctttgtattgttttcctcttctggaaaattctccactgtttattgtccctctgtaaacccagacaatccttcaaacttcatttctcttcctatgagaagtaatccattactgaaagcctttcatggtatcctgcattgtaccaacatatggaggaactacatcagtgattaataatatagtggaacaggcatgaactytgcagtcttggactcaaattttcactctggcaatttactagcagtgtgatcttttggaacttcactatccttgtctgtaaaatgggaataatgcccagcttagagccttgttttgagaattaagtaaagcaaataaagtacctagaaactgttactaaataaatagaaatttcattagacattagggttgtccatgtgccagctattaagcttagaggctggggatggatatggaattaataagatcacagcctatagactaatggaaacataaaaatatttttcaacaagataggtgctatcagagagtacaaggagatgaaagataattagacttgtaggtggaggggtttttgggaaatagatgatgaatgttaattaaaacagtggtcttctcatgtcttttgactgtgagtggcctctctaaagcatttcactcctggtacacctgtctttgggtactcctgaaagtagcgcaagagataagacttgactgtatttagtttattcaggaaatgttccaaggaattgaaatgagggagaaacaaaggtgtggga

SEQ ID NO: 87819 - DNA, 1400 bp, Homo sapiens
ttcagatgaagaggcagatttagagagccgaactgaattacttgaggtcacagagctagtgattgatggagcagaaatgggaaatgtggttgatcttcctaattcaattctaggtcctcctcaccccaccattttggcaaacttttggcattgaccttgggtttttatccccttagctattccaaagtctgtgtcatccataacaggtattttagaagcagtagaaaaagaaatctacctatgaagtgaaatagccctaagttctgtctttggctcagccacttacccatatgacttcgggcaaagtgccaagcttctgttttttttttttttttttcatttaaaaagtaaacaaataacacacacctcatgatgcggttgtgatttctgggtaggaccctatgtgttacaagagttctcaatggaaaaataagtcatgtacattattaattaattggtatttcaatgtttatctggaacatgttacatctgcagggcatggcttgatagattcaagaagaacttccttacggttctctaacttactccaaatagcctcatgggaattgcggcagggtgggggcgggcggggaacgtgtagtcccagcgttgattttgggatccttcacttgccagttacgtgactttgggcagacgactttcgctgcctgagacttggtgcctcatgagtgacaaggatatattgcctgtcacctcttaggagaatgttgcacattaaatgagctaatgtcatacttgtaagaaagtgtgcttagctgccaaattttaaaataggctgtcataggtaatgatgatgaccctggaaaagcatctgtgcttatgagagcccgtctctgtcctggcagcccagtccacactcttctytgatgaaccacttttcttttcctagagtaccaggtggatgcccagccccttcgtccctgtgagctgcagagggaaacggcctttctgaagcaagcagactacgtgccccagtgtgcagaggatggcagcttccagtaaggcttatgtcagcagcgaactctcaaggtccaagatgccataaaaagcatcttgtgccttcccccctcttcctgagctctgccctgcaactcctttgtgcatgtgaggcttggccactgtcatttggaggtgcctgcctttcagttccactgtcatttggaggtgcctgcctttcagttccccaagctgttcaacactggacaatctgaccaagtgaaccccaatccatgcttcatcctcccactgccctcccttctcttcttgccatcactttttctgtgatggcttgaataaacggcacgtgtggggagtggggcaggttgaggagagtgtcaaatgatctgtgctttgggacctctccctcctccaagtatcct

SEQ ID NO: 87820 - DNA, 522 bp, Homo sapiens
aaacactctttttgtagaatctacaaagtgacatggatggccatattttagaggactgttcctgcagctggtggggaagccctggtgaggagcagtacagcaggctgttctggctggctcgttctgagctgtagggatgtgacggaggcaggaagagtgaggatgcagaggaggggaggaccaaggaagtagaaatgagcagcagcctggtaggacctggaggctggtaagacttgaggggagaagcctaggatggggctcggatttactatcacagagacagccaatggggtgatgtcaggagaaaggttgaggagttcaggttgggatatgttgaatttgaaatacctgtagggtgtccaggcagagtggayctgagctcaaaaaagtctggctggagactgagctagagagagatgtgggagttccaggcatgtgtggtccccaagaaggacgggcagagcacgggttctcccctgtttttaatcccataccctgacacttcaaatgactgttgtgttt

SEQ ID NO: 87821 - DNA, 1310 bp, Homo sapiens
cctatttaaagcatgtcataactctaaaacaatggttaacttaagccaaccacctcaaaatgaggaaattgagcctaaaaccaaaactatcctttgacggattaaaagctctgtttggggtactggttttatgcatctagtatggttgtcatgggggcacgctggccccatactctcctgctgtgtgagcttggctgagtcaggcatcctcactgagctatgggtcctcatctgtaacatgaatatagcatctgccttgtatgatgtgaggatttagaacacgtgtaaacactaggcacatagtaggtattcaataggggcgatcattgctaatgtctcagtccatttgtgttgttataaagaaatgcctgcggctagataatttataaagaaaagagatgtgtttggctcacagctctgcaggctgtgccgaagcatgccactagcttctgctgctgctgaggacctcaggctgcttccactcrtggtacaaggggaagaggaaccatctgtgcagagatcatgtgagagagaaagctagagagatagaaggtggaggtgccaggctctttttaacattcagctcttatggacactaatagagctggaactcactcactctgagggaaggcattcatctcttcataagggatccacttccaggactcaaacacctcccacattggggatcagatttcaacatgagatttggaggggacaaatgctgaaactgtggcagttaatgtcactagcctacaagcagagtggtgaagcagcttccccaggatcacacagagagcccgtggagaaaactggactcagaaaagctctgttaatgccaggcctgcactctgatcccatctcccctccacaggaccgtgctctggggtacctgactgatgtggcaccagcgagatcagcccttctctgactcagtccacaggatactagctaggcctgttctgtggctgccaccccatcactgcgtgtccttgggcgggtcattcccctctcagctgtgtccccttgggaagggagcatgagttttcctgggctctgccccctggaaatttccctgcagttctatctaacattgctccttgtacccacaggtctgtcattttgtcagctacagaaacagcagatcttactgagtggctacattaacagcacagacacctcctacctccctcagtgtcaggattcaggggactacgcgcctgttcagtgtgatgtgcagcaggtccagtgctggtgtgtggacgcagaggggatggaggtgtatgggacccgccagctggggaggccaa

SEQ ID NO: 87822 - DNA, 669 bp, Homo sapiens
ggcttgcactgctatgagtgaagaaggaaagttgtttatgggacactccagggtaagtccctagtgcaattcctgaatgttctccccttggctcttttccagggcactgctggtgtgtagatgagaaaggagggttcatccctggctcactgactgcccgctctctgcagattccacagtgtaagtgaagactgcagagttctcctcctgaccccccttggtgggcatcactggtctagtcagctgtggttgcctaaccgctggagactccatggcccagcccttcagccaggtcccgggtgcagccagacgcatttcccaagtccccaggcctgcaagcttgcgctgaccttggcacttcctagttggaaggctcccagctttgcaggtggaaggaaacagctgagactgttgaaggagccctggttctccccctctgtacatctgctgggcaatttcagccactcctgtagtttcagcaaccgcctcgcctctgaacctgcagccccaacccctcttctgaggytcagccatgtgtaatccacagtccacttgacatctcaaagctggcatgtcccacatgagtctttgtcctcagagattctacctctctatgaagagcacctgcattcacccaggctcatgacccttaaaggtggggtcagcctg

SEQ ID NO: 87823 - DNA, 669 bp, Homo sapiens
ggcttgcactgctatgagtgaagaaggaaagttgtttatgggacactccagggtaagtccctagtgcaattcctgaatgttctccccttggctcttttccagggcactgctggtgtgtagatgagaaaggagggttcatccctggctcactgactgcccgctctctgcagattccacagtgtaagtgaagactgcagagttctcctcctgaccccccttggtgggcatcactggtctagtcagctgtggttgcctaaccgctggagactccatggcccagcccttcagccaggtcccgggtgcagccagacgcatttcccaagtccccaggcctgcaagcttgcgctgaccttggcacttcctagttggaaggctcccagctttgcaggtggaaggaaacagctgagactgttgaaggagccctggttctccccctctgtacatctgctgggcaatttcagccactcctgtagtttcagcaaccgcctcgcctctgaacctgcagccccaacccctcttctgaggttcagccatgtgtaatccacagtccacttgacatctcaaagctggcatgtcccacatgagtctttgtcctcagagattctacctctctatgaagagcacctgcattcacccaggctcatgaccctkaaaggtggggtcagcctg

SEQ ID NO: 87824 - DNA, 772 bp, Homo sapiens
tttttcctttcattttatatagatattctgtcaaaaaaaatgtctcagcccataggacaataaaatacctatttaaaagccatttatcttataatggcacccttaagtcatctgaatatccattgaaaccaagattgagcttagtataaataacataggtatataaggaaagttggttaaaagtaaaattgtgtgggtttttttttttgtttgttttgttttgttttttgtttgtttctgaggcggagtctcctctgttgcccaggctggaatgcagtggcacgatttgggttcactgcaacctctgcctyctaggttcaagcaattctgcctcagcctcccgactagctgggatgacaagcacatgtcaccacgcctggctaattttttttttgtttttagtaaagatgggatttcatcgtgttacccaggatggtctccatcccctgacctctttatccgcctgcctcggcctcccaaagtgctgggattacaggcgtaagccaccacacacatctttaacacacatgttatacatatgatatttcattgtcaaaagcaattttctaaaattccaaaagatttatcttatttgaggttcaaaataatgggattaggacattctttacgtctcctattggatggaccatttttagggcagagtaaatattaagccatcatcaattaaaacttactcactgtatgagttagggtaatccagagaaccaatagctctatcaatttatcatctatctcatcatctatctagaaa

SEQ ID NO: 87825 - DNA, 772 bp, Homo sapiens
tttttcctttcattttatatagatattctgtcaaaaaaaatgtctcagcccataggacaataaaatacctatttaaaagccatttatcttataatggcacccttaagtcatctgaatatccattgaaaccaagattgagcttagtataaataacataggtatataaggaaagttggttaaaagtaaaattgtgtgggtttttttttttgtttgttttgttttgttttttgtttgtttctgaggcggagtctcctctgttgcccaggctggaatgcagtggcacgatttgggttcactgcaacctctgcctcctaggttcaagcaattctgcctcagcctcccgactagctgggatgacaagcacatgtcaccacgcctggctaattttttttttgtttttagtaaagatgggatttcatcgwgttacccaggatggtctccatcccctgacctctttatccgcctgcctcggcctcccaaagtgctgggattacaggcgtaagccaccacacacatctttaacacacatgttatacatatgatatttcattgtcaaaagcaattttctaaaattccaaaagatttatcttatttgaggttcaaaataatgggattaggacattctttacgtctcctattggatggaccatttttagggcagagtaaatattaagccatcatcaattaaaacttactcactgtatgagttagggtaatccagagaaccaatagctctatcaatttatcatctatctcatcatctatctagaaa

SEQ ID NO: 87826 - DNA, 772 bp, Homo sapiens
tttttcctttcattttatatagatattctgtcaaaaaaaatgtctcagcccataggacaataaaatacctatttaaaagccatttatcttataatggcacccttaagtcatctgaatatccattgaaaccaagattgagcttagtataaataacataggtatataaggaaagttggttaaaagtaaaattgtgtgggtttttttttttgtttgttttgttttgttttttgtttgtttctgaggcggagtctcctctgttgcccaggctggaatgcagtggcacgatttgggttcactgcaacctctgcctcctaggttcaagcaattctgcctcagcctcccgactagctgggatgacaagcacatgtcaccacgcctggctaattttttttttgtttttagtaaagatgggatttcatcgtgttacccaggatggtctccatcccctgacctctttatccgcctgcctcggcctcccaaagtgctgggattacaggcgtragccaccacacacatctttaacacacatgttatacatatgatatttcattgtcaaaagcaattttctaaaattccaaaagatttatcttatttgaggttcaaaataatgggattaggacattctttacgtctcctattggatggaccatttttagggcagagtaaatattaagccatcatcaattaaaacttactcactgtatgagttagggtaatccagagaaccaatagctctatcaatttatcatctatctcatcatctatctagaaa

SEQ ID NO: 87827 - DNA, 1099 bp, Homo sapiens
tgcattaaattatatttaattttatttacaattcacttacaagaaaccaggagatagatattgtttccttctcctattttaggtatatatgaagtgaaatgtgtgaaatagggaagcagtttgcttgtgacattaatttttaattaaaattattcattacaaacaagtagaatgataaacttgtcaggtaagtactcatttaccaagtcccaacccaaatttgaatggagtaccctaaaggcaacttgagagaagctaaatttctcagaatacaggcattttaccttgaggtaaaaaaaatgtgattcaaatatgtttaagaattgacataggggaaaaatatttcacagcataaaaggaggagatacgtgaaagcttatgtacaaaaagcatttttcttagaaatcaaaacattttagaaagtaatcgcttgcttttttaatgaagtaaataaaatgaaataaaataaaaatattaaaattaaaaatcagatttatgattatctttagaatcagaaataataatatgaaaaccatattgactagaagagatactcatgagaacctgctaaaagaaaacaatatggtaaggccgggtgtggtggctcacgcctgtaatcccagcactttgggaggccgaggtgggcgtatcacttgcagtcaggagtttgagaccagcctggtcaacatggtgaaaccccatctctactaaaaatacaaaaattagctggacttggtggcagatgcctgtaatcccagctacttgggaggctgaggcaggagaattgcttgaacccggaggcagaggytgcagtgagccaagatcgtgccactgctctccagcctgggcaacagagtgagaccccgtcacgcacacaaaaaagaaagaaaacaatatggtaatacttaaaacaatgagaatatgaaatatatgaaaacaagaaaataaatagtatgtaagtgccacagaaattacataagaaatatcctggaaaaaaataagaatagtaaaatagggaaaaatatctactgagctgtaaaataatgcagcataaaaatatttcttaagtagacataatacttagtataatatttgttaa

SEQ ID NO: 87828 - DNA, 1337 bp, Homo sapiens
gggatccttgtaccctgtgtcccwaaaaatgtaccacagattgagccctgaccagactctaggccctattttaagtgcattatttatagtaagtatacctcacaataatcacatgaggtcaataatattattaaccatttcatagctggaaaattgaggcatagagaagtaaagtaaccaccccaaggtgataagaaagcagcagggtttagttttaatgacaaggccctgcacttgaaaatcgtatgaggctgctgctttgtgaggccttcccagtaagaggggtctcctttctcctcgccgtgcgtttgctcttcccagcctttctgcaatgctcccagtcctcctgagtcagacaccagtggctggagagcaagcagaggcagcagacgtgctggggaaaggagtgaaagggcattgcctttcagtcacgtcagacaccttcagacctacatgctaaatagggaaaggagttctgggtattaaaccaaaccacaggaaatctattctttcccctcaagtgaaatcttactcttttacagacactagttttaaaaattcacctcttctatgaagccttcatctaaatatgtactttggcattcttctagttcttacgcctttatgtccatttttttttacttattagcacattgtatcttttaaaatatgtgtgtatatatgttttttgttttctccatttgattggaagttctcctttggagtgtcaaatgttctgtctttcatacttctttcagtgggatcttggataggtctgtggacatggggttatatggagcatatggaatggatgcacagctaatgttggggttgaatcaagatcctaacatcactctataccattagaaacgttcatgatgtttggcttttgcaaagtgagataccaaggcttagcgtctaaccaagaatctaaagtatgaaacctaatatcaaccttagctatagacatgtcagtacggagcacaggtgtgaaagatttagaagctgcatgtatgtgcatggttagcacagagatattgataagaggataagcccacttcctgggcaggcttcaagggcaaatacgcaattgatcatctaagacggggtcagcaaactgtgcccatgggcccgatctaacccattgcttcttttcataaataaagtgtcataaaaacacagccacactcattctttctcatatggtctgtggttgctatcatgagacaacagcagagctgaatagttgaatcagagaatagagggcctgctagcctgaagatctactacctggcccttttctctatttctatttttgatgcgtataaagaaaaaag

SEQ ID NO: 87829 - DNA, 1337 bp, Homo sapiens
gggatccttgtaccctgtgtccctwaaaatgtaccacagattgagccctgaccagactctaggccctattttaagtgcattatttatagtaagtatacctcacaataatcacatgaggtcaataatattattaaccatttcatagctggaaaattgaggcatagagaagtaaagtaaccaccccaaggtgataagaaagcagcagggtttagttttaatgacaaggccctgcacttgaaaatcgtatgaggctgctgctttgtgaggccttcccagtaagaggggtctcctttctcctcgccgtgcgtttgctcttcccagcctttctgcaatgctcccagtcctcctgagtcagacaccagtggctggagagcaagcagaggcagcagacgtgctggggaaaggagtgaaagggcattgcctttcagtcacgtcagacaccttcagacctacatgctaaatagggaaaggagttctgggtattaaaccaaaccacaggaaatctattctttcccctcaagtgaaatcttactcttttacagacactagttttaaaaattcacctcttctatgaagccttcatctaaatatgtactttggcattcttctagttcttacgcctttatgtccatttttttttacttattagcacattgtatcttttaaaatatgtgtgtatatatgttttttgttttctccatttgattggaagttctcctttggagtgtcaaatgttctgtctttcatacttctttcagtgggatcttggataggtctgtggacatggggttatatggagcatatggaatggatgcacagctaatgttggggttgaatcaagatcctaacatcactctataccattagaaacgttcatgatgtttggcttttgcaaagtgagataccaaggcttagcgtctaaccaagaatctaaagtatgaaacctaatatcaaccttagctatagacatgtcagtacggagcacaggtgtgaaagatttagaagctgcatgtatgtgcatggttagcacagagatattgataagaggataagcccacttcctgggcaggcttcaagggcaaatacgcaattgatcatctaagacggggtcagcaaactgtgcccatgggcccgatctaacccattgcttcttttcataaataaagtgtcataaaaacacagccacactcattctttctcatatggtctgtggttgctatcatgagacaacagcagagctgaatagttgaatcagagaatagagggcctgctagcctgaagatctactacctggcccttttctctatttctatttttgatgcgtataaagaaaaaag

SEQ ID NO: 87830 - DNA, 1337 bp, Homo sapiens
gggatccttgtaccctgtgtccctaaaaatgtaccacagattgagccctgaccagactctaggccctattttaagtgcattatttatagtaagtatacctcacaataatcacatgaggtcaataatattattaaccatttcatagctggaaaattgaggcatagagaagtaaagtaaccaccccaaggtgataagaaagcagcagggtttagttttaatgacaaggccctgcacttgaaaatcgtatgaggctgctgctttgtgaggccttcccagtaagaggggtctcctttctcctcgccgtgcgtttgctcttcccagcctttctgcaatgctcccagtcctcctgagtcagacaccagtggctggagagcaagcagaggcagcagacgtgctggggaaaggagtgaaagggcattgcctttcagtcacgtcagacaccttcagacctacatgctaaatagggaaaggagttctgggtattaaaccaaaccacaggaaatctattctttcccctcaagtgaaatcttactcttttacagacactagttttaaaaattcacctcttctatgaagccttcatctaaatatgtactttggcattcttctagttcttacgcctttatgtccatttttttttacttattagcacattgtatcttttaaaatatgtgtgtatatatgttttttgttttctccatttgattggaagttctcctttggagtgtcaaatgttctgtctttcatacttctttcartgggatcttggataggtctgtggacatggggttatatggagcatatggaatggatgcacagctaatgttggggttgaatcaagatcctaacatcactctataccattagaaacgttcatgatgtttggcttttgcaaagtgagataccaaggcttagcgtctaaccaagaatctaaagtatgaaacctaatatcaaccttagctatagacatgtcagtacggagcacaggtgtgaaagatttagaagctgcatgtatgtgcatggttagcacagagatattgataagaggataagcccacttcctgggcaggcttcaagggcaaatacgcaattgatcatctaagacggggtcagcaaactgtgcccatgggcccgatctaacccattgcttcttttcataaataaagtgtcataaaaacacagccacactcattctttctcatatggtctgtggttgctatcatgagacaacagcagagctgaatagttgaatcagagaatagagggcctgctagcctgaagatctactacctggcccttttctctatttctatttttgatgcgtataaagaaaaaag

SEQ ID NO: 87831 - DNA, 1337 bp, Homo sapiens
gggatccttgtaccctgtgtccctaaaaatgtaccacagattgagccctgaccagactctaggccctattttaagtgcattatttatagtaagtatacctcacaataatcacatgaggtcaataatattattaaccatttcatagctggaaaattgaggcatagagaagtaaagtaaccaccccaaggtgataagaaagcagcagggtttagttttaatgacaaggccctgcacttgaaaatcgtatgaggctgctgctttgtgaggccttcccagtaagaggggtctcctttctcctcgccgtgcgtttgctcttcccagcctttctgcaatgctcccagtcctcctgagtcagacaccagtggctggagagcaagcagaggcagcagacgtgctggggaaaggagtgaaagggcattgcctttcagtcacgtcagacaccttcagacctacatgctaaatagggaaaggagttctgggtattaaaccaaaccacaggaaatctattctttcccctcaagtgaaatcttactcttttacagacactagttttaaaaattcacctcttctatgaagccttcatctaaatatgtactttggcattcttctagttcttacgcctttatgtccatttttttttacttattagcacattgtatcttttaaaatatgtgtgtatatatgttttttgttttctccatttgattggaagttctcctttggagtgtcaaatgttctgtctttcatacttctttcagwgggatcttggataggtctgtggacatggggttatatggagcatatggaatggatgcacagctaatgttggggttgaatcaagatcctaacatcactctataccattagaaacgttcatgatgtttggcttttgcaaagtgagataccaaggcttagcgtctaaccaagaatctaaagtatgaaacctaatatcaaccttagctatagacatgtcagtacggagcacaggtgtgaaagatttagaagctgcatgtatgtgcatggttagcacagagatattgataagaggataagcccacttcctgggcaggcttcaagggcaaatacgcaattgatcatctaagacggggtcagcaaactgtgcccatgggcccgatctaacccattgcttcttttcataaataaagtgtcataaaaacacagccacactcattctttctcatatggtctgtggttgctatcatgagacaacagcagagctgaatagttgaatcagagaatagagggcctgctagcctgaagatctactacctggcccttttctctatttctatttttgatgcgtataaagaaaaaag

SEQ ID NO: 87832 - DNA, 1337 bp, Homo sapiens
gggatccttgtaccctgtgtccctaaaaatgtaccacagattgagccctgaccagactctaggccctattttaagtgcattatttatagtaagtatacctcacaataatcacatgaggtcaataatattattaaccatttcatagctggaaaattgaggcatagagaagtaaagtaaccaccccaaggtgataagaaagcagcagggtttagttttaatgacaaggccctgcacttgaaaatcgtatgaggctgctgctttgtgaggccttcccagtaagaggggtctcctttctcctcgccgtgcgtttgctcttcccagcctttctgcaatgctcccagtcctcctgagtcagacaccagtggctggagagcaagcagaggcagcagacgtgctggggaaaggagtgaaagggcattgcctttcagtcacgtcagacaccttcagacctacatgctaaatagggaaaggagttctgggtattaaaccaaaccacaggaaatctattctttcccctcaagtgaaatcttactcttttacagacactagttttaaaaattcacctcttctatgaagccttcatctaaatatgtactttggcattcttctagttcttacgcctttatgtccatttttttttacttattagcacattgtatcttttaaaatatgtgtgtatatatgttttttgttttctccatttgattggaagttctcctttggagtgtcaaatgttctgtctttcatacttctttcagtgggatcttggataggtctgtggacatggggttatatggagcatatggaatggatgcacagctaatgttggggttgaatcaagatcctaacatcactctataccattagaaacgttcatgatgtttggcttttgcaaagtgagataccaaggcttagcgtctaaccaagaatctaaagtatgaaacctaatatcaaccttagctatagacatgtcagtacggagcacaggtgtgaaagatttagaagctgcatgtatgtgcatggttagcacagagatattgataagaggataagcccacttcctgggcaggcttcaagggcaaatacgcaattgatcatctaagacggggtcagcaaactgtgcccatgggcccgatctaacccattgcttcttttcataaataaagtgtcataaaaacacarccacactcattctttctcatatggtctgtggttgctatcatgagacaacagcagagctgaatagttgaatcagagaatagagggcctgctagcctgaagatctactacctggcccttttctctatttctatttttgatgcgtataaagaaaaaag

SEQ ID NO: 87833 - DNA, 1109 bp, Homo sapiens
gctcttctctaaccacgccatattaaatagcattattatgttaatattcatcctaaatttgacttcatattgtggtaacaacactgaytaaaaactgctaaaaatgatcatttccaaagtacctgatgtatattttatttgtagtaagattgttaccaagtcaggttaagatacttgagctttctaggcctcactagaaagtgagattatctagattatctagatctggataatttcagatctacattccaagatttacattttatgaccttatttttccagcctttgtcttagtccttgcataattatttagcccctaaaaggtcttatgctatgttaataatagagaaagtatcattttattttcattgttttaagatttcacaaatgttgtatctgaacaaattagcataaattctaagaaagcttattgcagatgaagttctattaaaaagcattcatcatcaaagaaatacaatgtttgaagttgaagtattaaaggattccatgttattcttttatattcagctgtctaaattgttatttctattccacaggtctttaaaaaacattttaaggcatattttaatattaagactttatgccaatttcagccaacttggaatgtagtctaaatataggtagaacaagtaaagacaggagaagagtataaatagggtcttagagtctaaaatgtatatggttatgttcaagagacaatgaagagatagtttctcatatacagtagacttcagaacctaatattcttcttcacaaaacatcaaaatcacatgatgttaataaggtgtcttgatgggaagaaaaatgttctatgtaagcttatgaaatgtccttattcgcatatctatctcacaggtttacaacaaacttcaataaaatttctaagggtatccgctctaaagaaatttgcctaatttgtttaattactatgatttgcatttggaaccagattatattgttgaccatataatgccattttataccaaaaaattaaatatacttggtgtcaatggattcatcactatgtataaagcttatttgtgtaataagtcaaataagtaaagaattatttgaattgtgtttgtgta

SEQ ID NO: 87834 - DNA, 1109 bp, Homo sapiens
gctcttctctaaccacgccatattaaatagcattattatgttaatattcatcctaaatttgacttcatattgtggtaacaacactgattaaaaactgctaaaaatgatcatttccaaagtacctgatgtatattttatttgtagtaagattgttaccaagtcaggttaagatacttgagctttctaggcctcactagaaagtgagattatctagattatctagatctggataatttcagatctacattccaagatttacattttatgaccttatttttccagcctttgtcttagtccttgcataattatttagcccctaaaaggtcttatgctatgttaataatagagaaagtatcattttattttcattgttttaagatttcacaaatgttgtatctgaacaaattagcataaattctaagaaagcttattgcagatgaagttctattaaaaagcawtcatcatcaaagaaatacaatgtttgaagttgaagtattaaaggattccatgttattcttttatattcagctgtctaaattgttatttctattccacaggtctttaaaaaacattttaaggcatattttaatattaagactttatgccaatttcagccaacttggaatgtagtctaaatataggtagaacaagtaaagacaggagaagagtataaatagggtcttagagtctaaaatgtatatggttatgttcaagagacaatgaagagatagtttctcatatacagtagacttcagaacctaatattcttcttcacaaaacatcaaaatcacatgatgttaataaggtgtcttgatgggaagaaaaatgttctatgtaagcttatgaaatgtccttattcgcatatctatctcacaggtttacaacaaacttcaataaaatttctaagggtatccgctctaaagaaatttgcctaatttgtttaattactatgatttgcatttggaaccagattatattgttgaccatataatgccattttataccaaaaaattaaatatacttggtgtcaatggattcatcactatgtataaagcttatttgtgtaataagtcaaataagtaaagaattatttgaattgtgtttgtgta

SEQ ID NO: 87835 - DNA, 1109 bp, Homo sapiens
gctcttctctaaccacgccatattaaatagcattattatgttaatattcatcctaaatttgacttcatattgtggtaacaacactgattaaaaactgctaaaaatgatcatttccaaagtacctgatgtatattttatttgtagtaagattgttaccaagtcaggttaagatacttgagctttctaggcctcactagaaagtgagattatctagattatctagatctggataatttcagatctacattccaagatttacattttatgaccttatttttccagcctttgtcttagtccttgcataattatttagcccctaaaaggtcttatgctatgttaataatagagaaagtatcattttattttcattgttttaagatttcacaaatgttgtatctgaacaaattagcataaattctaagaaagcttattgcagatgaagttctattaaaaagcattcatyatcaaagaaatacaatgtttgaagttgaagtattaaaggattccatgttattcttttatattcagctgtctaaattgttatttctattccacaggtctttaaaaaacattttaaggcatattttaatattaagactttatgccaatttcagccaacttggaatgtagtctaaatataggtagaacaagtaaagacaggagaagagtataaatagggtcttagagtctaaaatgtatatggttatgttcaagagacaatgaagagatagtttctcatatacagtagacttcagaacctaatattcttcttcacaaaacatcaaaatcacatgatgttaataaggtgtcttgatgggaagaaaaatgttctatgtaagcttatgaaatgtccttattcgcatatctatctcacaggtttacaacaaacttcaataaaatttctaagggtatccgctctaaagaaatttgcctaatttgtttaattactatgatttgcatttggaaccagattatattgttgaccatataatgccattttataccaaaaaattaaatatacttggtgtcaatggattcatcactatgtataaagcttatttgtgtaataagtcaaataagtaaagaattatttgaattgtgtttgtgta

SEQ ID NO: 87836 - DNA, 1109 bp, Homo sapiens
gctcttctctaaccacgccatattaaatagcattattatgttaatattcatcctaaatttgacttcatattgtggtaacaacactgattaaaaactgctaaaaatgatcatttccaaagtacctgatgtatattttatttgtagtaagattgttaccaagtcaggttaagatacttgagctttctaggcctcactagaaagtgagattatctagattatctagatctggataatttcagatctacattccaagatttacattttatgaccttatttttccagcctttgtcttagtccttgcataattatttagcccctaaaaggtcttatgctatgttaataatagagaaagtatcattttattttcattgttttaagatttcacaaatgttgtatctgaacaaattagcataaattctaagaaagcttattgcagatgaagttctattaaaaagcattcatcatcaaagaaatacaatgtttgaagttgaagtattaaaggattccatgttattcttttatattcagctgkctaaattgttatttctattccacaggtctttaaaaaacattttaaggcatattttaatattaagactttatgccaatttcagccaacttggaatgtagtctaaatataggtagaacaagtaaagacaggagaagagtataaatagggtcttagagtctaaaatgtatatggttatgttcaagagacaatgaagagatagtttctcatatacagtagacttcagaacctaatattcttcttcacaaaacatcaaaatcacatgatgttaataaggtgtcttgatgggaagaaaaatgttctatgtaagcttatgaaatgtccttattcgcatatctatctcacaggtttacaacaaacttcaataaaatttctaagggtatccgctctaaagaaatttgcctaatttgtttaattactatgatttgcatttggaaccagattatattgttgaccatataatgccattttataccaaaaaattaaatatacttggtgtcaatggattcatcactatgtataaagcttatttgtgtaataagtcaaataagtaaagaattatttgaattgtgtttgtgta

SEQ ID NO: 87837 - DNA, 1109 bp, Homo sapiens
gctcttctctaaccacgccatattaaatagcattattatgttaatattcatcctaaatttgacttcatattgtggtaacaacactgattaaaaactgctaaaaatgatcatttccaaagtacctgatgtatattttatttgtagtaagattgttaccaagtcaggttaagatacttgagctttctaggcctcactagaaagtgagattatctagattatctagatctggataatttcagatctacattccaagatttacattttatgaccttatttttccagcctttgtcttagtccttgcataattatttagcccctaaaaggtcttatgctatgttaataatagagaaagtatcattttattttcattgttttaagatttcacaaatgttgtatctgaacaaattagcataaattctaagaaagcttattgcagatgaagttctattaaaaagcattcatcatcaaagaaatacaatgtttgaagttgaagtattaaaggattccatgttattcttttatattcagctgtctaaattgttatttctattccacaggtctttaaaaaacattttaaggcatattttaatattaagactttatgccaatttcagccaacttggaatgtagtctaaatataggtagaacaagtaaagacaggagaagagtataaatagggtcttagagtctaaaatgtatatggttatgttcaagagacaatgaagagatagtttctcatatacagtagacttcagaacctaatattmttcttcacaaaacatcaaaatcacatgatgttaataaggtgtcttgatgggaagaaaaatgttctatgtaagcttatgaaatgtccttattcgcatatctatctcacaggtttacaacaaacttcaataaaatttctaagggtatccgctctaaagaaatttgcctaatttgtttaattactatgatttgcatttggaaccagattatattgttgaccatataatgccattttataccaaaaaattaaatatacttggtgtcaatggattcatcactatgtataaagcttatttgtgtaataagtcaaataagtaaagaattatttgaattgtgtttgtgta

SEQ ID NO: 87838 - DNA, 660 bp, Homo sapiens
ctgtgtctttgttccatttgaccacctttgttactctaaaacagtagctgcattgcctaatctgatctcatttcagcactgacctcagcctgactgtattattttctatcatttgaatatcaaaacctttttgatgtttgcctatgctctacaatagaggaggttttatatctgtatctcccctctctactactgggaacattaaccaattttcagaatacagttacaaaaatattytccacttcccaaacctataagaaacaaaagcttctgttaagttctttttttcaaagcatttttttaaaggttacagaataagagttgaaactaatgtttaacatgaagctacagaagctcattatcactcagcagctgacagaaaaaagctttttagccatattatgtaacatttctaggtcccttggcacataaggaccacatcctgttgcctctttgtgggtaactcatgtgaactcacaccaaatggaagcttctgttttaactaattccctctggaagttttgtttgaatctctgctttagatgaaagcgtttctaacttgttctttaacattgatttggtaaaaaatatgaccctctgcaaattgtttagggctaatcctaatactgaatcaagtaagcacagactattaaaggtgga

SEQ ID NO: 87839 - DNA, 599 bp, Homo sapiens
aggttaatactaatttcataggcattaaggatatatttgagtgtattcagagataagcgaaccatgatattagtaaaatgacatcttttgatttgtttaaaagtttgaaaataagaacatactcaaagactatttttcttcacaaatccagtagtgttggcagattgaaaatgtgtaattataattattttccatttagacatgtattattttgatagcaatttctcagtaatatcaaatataattacccractctagaaagtaatttcatttctccctacctagacatgtggctataatataaaaagaatgataaacattttgttttaatcaaaagtacaaattaggtattctagcttccaaaataattttcaagcatgtcaaaaaaattcatgtcaagtattagcttaattatttttaactttagtgtttagtgccttataggtaaagtggcttaattcacagaggctttgagatatttctgcataacttttactatttcaagatgtgaaaacaaagaatcccaaggaagatatataaattgaaaggatcaacatgccacataaccagtgatggcattagcatttgtttgtgaatta

SEQ ID NO: 87840 - DNA, 599 bp, Homo sapiens
aggttaatactaatttcataggcattaaggatatatttgagtgtattcagagataagcgaaccatgatattagtaaaatgacatcttttgatttgtttaaaagtttgaaaataagaacatactcaaagactatttttcttcacaaatccagtagtgttggcagattgaaaatgtgtaattataattattttccatttagacatgtattattttgatagcaatttctcagtaatatcaaatataattacccaactctagaaagtaatttcatttctccctacctagacatgtggctataatataaaaagaatgataaacattttgttttaatcaaaagtacaaattaggtattctagcttccaaaataattttcaagcatgtcaaaaaaattcatgtcaagtattagcttaattatttttaactttagtgtttagtgccttataggtaamgtggcttaattcacagaggctttgagatatttctgcataacttttactatttcaagatgtgaaaacaaagaatcccaaggaagatatataaattgaaaggatcaacatgccacataaccagtgatggcattagcatttgtttgtgaatta

SEQ ID NO: 87841 - DNA, 651 bp, Homo sapiens
ttatatttgtgtgtgagtgtgtgtaggtgaggtgagatctcagttattccaaacacgtcacaagatgaagtaaagagatatacagtcactttttttttttttttttttgagatggagtctcgctctgtagcccaggctggagtgcagtggcgtgctcgactcactgcaagctctgactcccaggttcacaccattcctctgcctcagcctcctgagtagctgggactacaggtgcccgccaccacgcctagctgattttttctatttttagtaaagatggggtttcaccgtgttagccaggatggtctcgatctcytgacctcggcctcccaaagtgctgggattacaggcgtgagccaccacgtccggccatatcttattgtttgtggttgttatgctctataaagtcaccatgaacactgaattagtgaatactgaatcattgttcccaaggaaaatacaagtttggggtcctgggagcctctggtcacatttcatcaactgatcagtacgtaacctcttttacaaatttctttgtaaagttaacttacttaatatatattgttgattaattaacattgaactcacagccaataccttaactcatgcttgaatgaagcctaactaaacacataatttctctgtaaggca

SEQ ID NO: 87842 - DNA, 985 bp, Homo sapiens
agaatagttaagtcttgtagaatttcaacaaccctttatgattatgtaattcccttctttgtccttttttaatttttgtttatttaaaggctattttgtctgaaattagcattgcaacccttgcttgtttctgattttcatttacttatagatttttctctattcctttattttgagcccatgaatgtcattatgtgtgagatgggtttcttgaagacagcttactattgggtcttgttattttatccagcttgccactctgtcttttaaatgggggtatgtacaaacaactccaccaactggacgaaactataacttgttgacagctttctctctctggttctcagatgaggaatgatgataaaacaaaaccaaaaggcatcttattgaggaaggtcagctccagtggatttctttgagacaacccaagttagatggagctagcgggaaaaaatacagtaattctttaaactatcattcaagcaaaacctgtgacctaagtgttccttttaaagtagctagacttgttagagattttattgagtggatataagcactttatacagaaacttttttttaaaaaatgtacaccgtcttttcatagaacagaggaacagctgtcacatcagttcccgatgccragcacagcaatataaagtatataccctacgagttagatgaagcagaggaaagggatcaagagattaatatacctctttgagaaaagcacccaaaataaatcattttattattttttgcaaaaataaataaataaataaataaatgggggcatttagcccatttacattcatggttagtattgacatgtgtaattctgatcttgtcattgtgttattagctggatattatgccagcttgtttgtatggttgctttatagtgacactggtctttgtacttcagtgtgtttttgtattggctgataatggtctttcctttccatattgaaaactctttttaatatct

SEQ ID NO: 87843 - DNA, 985 bp, Homo sapiens
agaatagttaagtcttgtagaatttcaacaaccctttatgattatgtaattcccttctttgtccttttttaatttttgtttatttaaaggctattttgtctgaaattagcattgcaacccttgcttgtttctgattttcatttacttatagatttttctctattcctttattttgagcccatgaatgtcattatgtgtgagatgggtttcttgaagacagcttactattgggtcttgttattttatccagcttgccactctgtcttttaaatgggggtatgtacaaacaactccaccaactggacgaaactataacttgttgacagctttctctctctggttctcagatgaggaatgatgataaaacaaaaccaaaaggcatcttattgaggaaggtcagctccagtggatttctttgagacaacccaagttagatggagctagcgggaaaaaatacagtaattctttaaactatcattcaagcaaaacctgtgacctaagtgttccttttaaagtagctagacttgttagagattttattgagtggatataagcactttatacagaaacttttttttaaaaaatgtacaccgtcttttcatagaacagaggaacagctgtcacatcagttcccgatgccaagcacagcaatataaagtatataccctacgagttagatgaagcagaggaaagggatcaagagattaatatacctctttgagaaaagcacccaaaataaatcattttattattttttgcaaaaataaataaataaataaataaatgggggcatttagcccatttacattcatggttagtattgacatgtgtaattctgatcttgtcattgtgtyattagctggatattatgccagcttgtttgtatggttgctttatagtgacactggtctttgtacttcagtgtgtttttgtattggctgataatggtctttcctttccatattgaaaactctttttaatatct

SEQ ID NO: 87844 - DNA, 985 bp, Homo sapiens
agaatagttaagtcttgtagaatttcaacaaccctttatgattatgtaattcccttctttgtccttttttaatttttgtttatttaaaggctattttgtctgaaattagcattgcaacccttgcttgtttctgattttcatttacttatagatttttctctattcctttattttgagcccatgaatgtcattatgtgtgagatgggtttcttgaagacagcttactattgggtcttgttattttatccagcttgccactctgtcttttaaatgggggtatgtacaaacaactccaccaactggacgaaactataacttgttgacagctttctctctctggttctcagatgaggaatgatgataaaacaaaaccaaaaggcatcttattgaggaaggtcagctccagtggatttctttgagacaacccaagttagatggagctagcgggaaaaaatacagtaattctttaaactatcattcaagcaaaacctgtgacctaagtgttccttttaaagtagctagacttgttagagattttattgagtggatataagcactttatacagaaacttttttttaaaaaatgtacaccgtcttttcatagaacagaggaacagctgtcacatcagttcccgatgccaagcacagcaatataaagtatataccctacgagttagatgaagcagaggaaagggatcaagagattaatatacctctttgagaaaagcacccaaaataaatcattttattattttttgcaaaaataaataaataaataaataaatgggggcatttagcccatttacattcatggttagtattgacatgtgtaattctgatcttgtcattgtgttattagctggatattatgccrgcttgtttgtatggttgctttatagtgacactggtctttgtacttcagtgtgtttttgtattggctgataatggtctttcctttccatattgaaaactctttttaatatct

SEQ ID NO: 87845 - DNA, 638 bp, Homo sapiens
tgctggtgtcatgggccatgggccaggccacgtggggtcaccaagggtcagccttcaggaaagaagggtttcctcagggagccaaactgaatccccactgggaagagatgggttctccaggagggcggcttcctgggaaacaggaaccaaggaggacgccttccctgaagccctgcaggggtgacggtggtccaggcaggaaagggttccttcaattccacccagggcagctcccagctgagtctcggtgctcgcgtctggactgccctgactatgtggggggccacaggggctctggggtgccttgggggtcacacaggtgctctttgtccctggagaaaggtgggtgatcaggcccatggagttgagcagtggagattcaaggattgcacctgacacatggtcctgaatggaacccaccctgttgagcaatgggccatcccatgggcctcttcaagcctgaagaggggcggtgctgtttcactgggtttaggtcaaggctgagctctggccggtgcctggtggtgctgcagtcyagctgttggactcgtgggctttgggccagtggggcagcctgcatccctctggaagtcaccccttccctgtggctggaagttaccccttcccagtgggcgaat

SEQ ID NO: 87846 - DNA, 627 bp, Homo sapiens
ccctggcctgtgcccagtagtcctggggtgaccctggtgtcatgtaggggagctggcatgtgtagtggaggtgctcgtgtggtctgcagtagggagcagccctggcttctagcctgagcccagtgacctgcctgtcctgtcctttcagggttcagtggcggagagagcatcaggtggcccacgtctgtgatgggccagtattccacatggatctcatcacatgggtccatggaaggcgagcatccctgagctggcacaccccaccttctgccagcatggaagggtgaggttgcatttggcacctgtcctcttcctgttcctcgagatggtgaccccagaggaggacttgcattgggcccactgtccccgggccagtggccatcagccgggtgcctagcccctgttgcactgaagctcaggcccttcctgttgccctggtctcctgcattgagcttgggtgagcccatccggttgccactggatgcctaagcagggaggggggttccctgggttgggtcratgatgagaaccttacattgttctgaagagagatgatgacttaaaaatcatgctcaataggattacgctgaggcccagcctaggtgagaattttggaagaggacgctg

SEQ ID NO: 87847 - DNA, 1967 bp, Homo sapiens
tgctggggtcatgggtcatgagccaggctgtgtggggttgccgagcatcagcctttggctgcaagggtttcctcaggaactgacccgaatgcccacctgggatgggttctccaggagggcagcttccttaggaatcggacccaaggaggataccttccatgaagccctgcaggggttgtggtggtccaggcagtaaagggtttcctcagccccatgcagggcagcacccagctgaaactcggtgcttaagtcaggcctctaggatggcccgtccacatgaggggaaccacaagggcactggggcgccaagggggtcttatgggggctctccgaccttggagaggtatgtgtgattcggcccatgaggtcaggttttggattttcaaggatctctccaaacccatggccctgaatgggaccgaccctattaagctatgggccatcccagtggtgcctctttgagccaagtgtggggtggcactgtttccatgaggttgggtcaagactagctctggtgaccccatgatggtgctgcagtctggccctgggactcgtgggctttgggccaagggtatagcccatgtcccaccaggggccacaccttccttgtgggcaagtggcggacagggtgtcctcctgaggtgagaaggcctgctgtggaaggacctgtccaggctgcttccaagctatggggtcacctacagggtggtggggtcaaggaaaggagaagacaccatgtgtctcccgattggctgagtgtggccccactctgtgtgtgggaggtgttgtgtgaggcatggatggggacatatcagagaacacacgaggccctgggtccccaggctgcaatttccggtgtggtgtggagcagggcctgggtgcttgccctccacacacaggggcaggctgtgctactgccagattggcagcagtacgtggcatccaggccagcctccttggttggccgtgagacggtaggtggccctggctgacacccaggggccagtacagccctggggtcatgtgaggcaactggagtgggtagtggaggtgctcaaggtgcctgcagtagggcatagccagggcgtcttgcctgagcccagtgacctacctgccctgtccttccagggttcagtggtgcagagggccaaagttcccctgtgtccatgacacatcagtgtttcacatggatcccatcacatgggtccatkgtgggagagcaatcgtgagctagcatcccccacccccttcctgcatggaggcgtgaggttccatttggacacatgtccacctcctgtcccccagatagtgagactggaagaaaactttcattgggcccgctgtcccggggtgagtggtcatcagtcaggtgcccagcccttggtgtggtgaagctcaggctcttcctggcgccctggtctcctgcacggagctgcggtgagcacatccgggtcccgatggatgcatgcgtggggatggagggcgtgccctgagttgggtcaatgatgagaaccttatattgtcctgaagagaggtgatgacttaaaaatcatgctcaataggattacgctgaggcccagcttaggtgagaattctggaagaggatgctgagatccgaagtcccctggaagggccactgtattttgggctggagtccttgaggccctgaaggacaccttcggggtgcccaacccagtctctgcactcctctgtgtggcagccaaggctccttgtgcaggcttggtgttggcattctggttccctgggggtggagcacatcgacggctcctccctgagcccccgttcttctctgtgtctttcagtgagctcttctacccaggcgggcccctgcccttgagcggcataggtgagtggatcttgctggggtcacgggccaagagccaggccacggggggtcgctgagggtcacctttcaggccacgagggtttccttagggagctgacct

SEQ ID NO: 87848 - DNA, 707 bp, Homo sapiens
ggatgggttcatttaatgcccaggggcaggccatgtgactgccaggtctgcagtggtacgtggcatccaggccagcctccttgatttgctgtgagctatttggtgcccatggccctgcccagtggtcctgatgcagcccagattcgagcaggggatttggcgtgggcagtggaggtgctccagggtcctgcactagggtgcagcctgggcgttttgctcgaaccctgtgaccctcctgccccgtccttccagggttcagtggccaagggttcctcgcgtaaatgaccatcactgttttacatggatctcatctcatgagtccatggagggagagcatgtgtgagccagcaccccctgcccactttcctgcatggaggcatgaggccttgtttggacacctgtcccccacccttccagatggtgaccccagaggaagacttgcgttgggcccactggctctgggctcagcccctggtgagctgaagctcaggcccttcctggcaccctggtctgctgcactgagctgcggtgagcctatctgggtcccactggatgcatgggttgcggggcagtggagggtgatgccctgggttgggtcgatgatgagaaccttatattgtcctgaagagaggtgatgacttaaaaatcatgctcaataggattacgctgaggcccagcctaggtgagaattttggaagaaggtsctg

SEQ ID NO: 87849 - DNA, 1117 bp, Homo sapiens
tgcattagataaccatgcacaaaataagcctggctgtggaaacgcttatttgttgggagggtgcttgtttggatcgatgatgagaataattgtctgaggatgctgagggactcattccagatgtcaatctgaggtccagatgtgcggccctccaataggacaaataagactctcagagcctggctctatttggggatccctcagtgacaacatagtacccctgtgagcgtgccttttctatctcttcgaagagggcagtggcatcctgtcttatgagtcagtgtgyactttagtgtgcctagtgacccaagacttgctttaattgtagatagatacttacatataggaaatatttcttaagtaacaaatgaaaaactttagaagattgaattaagggtcaagcaactgtgatatgtctgaaaatctcattagtgttgtgctgaaagaaggaaatatggcatgcctctattaaataatgacagtggaaccaagtttattgctttgttatttttactgtggagtattttctaagattatttttgctttttttttctttcatgttttgctgagatagaaggcctggaatctgatcctccacttcagagaacaggggtgagtagctaagccattatcttttgaaattcatatgtcatgtgctctttgctaggtctttaggtcgttttgtacatcttttcagaagcttattggaggacattttcatgatatgtccttttcctcattgagaccctcaccatgtcacctacactattgaatccttatcatttctcttttaattttaactctcttttgcttttatggaaaaatgtagaatttaagagaatttttggcaatttcatattggatcaaaatgtattgtagtgaaatccaggtgtgccaaaatattaacagattttccccatctgtttaattattggggtttcagaatagagactccatggttcataatatctttgtggtcatactacattatatttctgcttctaatttaattattaaatattgacttgaattagtcttttcctcattgttgcaacaaggtaagttatataggaaattttcttctcttgatggcatgtctgagataatcatagatata

SEQ ID NO: 87850 - DNA, 1117 bp, Homo sapiens
tgcattagataaccatgcacaaaataagcctggctgtggaaacgcttatttgttgggagggtgcttgtttggatcgatgatgagaataattgtctgaggatgctgagggactcattccagatgtcaatctgaggtccagatgtgcggccctccaataggacaaataagactctcagagcctggctctatttggggatccctcagtgacaacatagtacccctgtgagcgtgccttttctatctcttcgaagagggcagtggcatcctgtcttatgagtcagtgtgtactttagtgtgcctagtgacccaagacttgctttaattgtagatagatacttacatataggaaatatttcttaagtaacaaatgaaaaactttagaagattgaattaagggtcaagcaactgtgatatgtctgaaaatctcattagtgttgtgctgaaagaaggaaatatggcatgcctctattaaataatgacagtggaaccaagtttattgctttgttatttttactgtggagtattttctaagattatttttgctttttttttctttcatgttttgctgagatagaaggcctggaatctgatcctccacttcaragaacaggggtgagtagctaagccattatcttttgaaattcatatgtcatgtgctctttgctaggtctttaggtcgttttgtacatcttttcagaagcttattggaggacattttcatgatatgtccttttcctcattgagaccctcaccatgtcacctacactattgaatccttatcatttctcttttaattttaactctcttttgcttttatggaaaaatgtagaatttaagagaatttttggcaatttcatattggatcaaaatgtattgtagtgaaatccaggtgtgccaaaatattaacagattttccccatctgtttaattattggggtttcagaatagagactccatggttcataatatctttgtggtcatactacattatatttctgcttctaatttaattattaaatattgacttgaattagtcttttcctcattgttgcaacaaggtaagttatataggaaattttcttctcttgatggcatgtctgagataatcatagatata

SEQ ID NO: 87851 - DNA, 578 bp, Homo sapiens
tgcaaataacaactctattggaaagtaayccagttatagaagtgctaatttgtcaggagctgccttaccaagatcatgatgagtacagttatctcaggattctgaaagattgttttccgatttcaactagtctagctgaatgttccttgatagaaagagaggacttttagaattggttcaatatgatgacctcctgaattatctcacatagcccgtttgtacatgcctttcttttctctcagaaaatggcactatcataatagctttcttacacagacttcaccttagggttttacattaagggaggggtctggtgtttcatttattttgaagtatttgttgttgattgtgtacagtgcttgagtaaaaaattgaatatagaaacatctagaatatttttttaaaggatcagtgtttataaagtgaattattagtgtcaataatgttgggaaagttttaagagaatataggaaacttgaacattacacaactacaatgggaccaaattgtggggtctcattatagttaatatttatgtatttttttccaattgatttgtgtgctttttttctgcatgt

SEQ ID NO: 87852 - DNA, 577 bp, Homo sapiens
tgattaatttttttaacagctaaatattgaaatgatgaatattattggtgactgtgaacaaaactgccaaatatttgtgtctgttgagtttattaataaatctatagcacctagaactgagacactcaataaatattttctgaatgaataaatataatgagataggtttataaaacccagatcaaaacacaatgacaatagaacctattttttgcattttaaaattttcagctttaaatgaaataaaattaacacaaatttgataaaaaattaacatttaaaatttagattttcgcagcttggtaatgaaagttaactttttttttttaatttaaatctggtctcatcttcaggatcagagctatccagcctgaaaaatctcttgaaggtacaagtaactgaattaaatttaatgtattgttaaagccaagtctaaaattgcaatagtcctgataaacaaaatgtagcacaacagggggaaacattgcaagcgatatggtctggctctgtgtcggcacccaaatctcatgttgaattgtaagccmcaatgttggaggagggatttggtggaaagtga

SEQ ID NO: 87853 - DNA, 578 bp, Homo sapiens
aaggagcagcagccacatggacaaggtgtgcaagacagtgttgatcgaatcattccacttctatcaagtgataggcccagaaacatcccttatctggaaaggaatttagggctcctggggcctcctccataggcccccacaatagccaggtacaktgaaattggtgctagaaaccaaaggcttactgtgctgccttcaagaaaacgatacaccatggaagctctggaacccaccatggttgtggttgatgcagctgaggagagcccagatggaggaagagcggggagcaggagagactaacatcatcagcacagttcattctggaaaggcaagtggaggaagtgagtgtaaattgaaaggcaagggctgggaaaaccggcctcatcacaccctggagaaggggcacaggacactgcacccaagacacaattttaaggaattaaagagagtttttatttgtgcagtatatattaacttaaaagactgaagaaaaaatcgacacagtttgcagaatggtttcagttggttggtgctggaggaaatgtgctaagtctagaaagtgaagtttccctgaaaga

SEQ ID NO: 87854 - DNA, 1821 bp, Homo sapiens
ctctcatcatttctcatatcatccccattgtgcagaaggcagtgtygtgcaacttaactaccccatcctcacgtgggaagtggcatcatctcagctcaccgcaacctctgcctcccgggttcatgcgattctctagcctcagcctcccgagtagctgggattacaggcgcccgccaccacgcctggcaaagttttttatttttagtagagacggggtttcatcatgttggtcagactggtctcgaactcctgacctcaggtgatccgcttgccttggcatcccaaagtgctgggattacaggcgtgagccaccatacttggcctcatctggcttttcttagatttcccttaaattactcaagattgagtctgcccacatagtggggacccagaccttgtctgtcacatctgcggctgagacaccttggagaagcacaatagaaaacactgggggtggctcatgccggtaatcccagcactctgggatgccgagttgggcagatgacttgctgaggccaagagttcgagacgagcctggccagtatggcgaaacccagtctctactaaaaatacaaatattagccgtgcacggtggtgcaagcctgtggccccagctactcaggaggctgtggcatgagaatcgcttgaacccgggagacagagtttgcagtgagccaagatcgtgccactgcactccagcctgggtgacagagtgagactctctcaaaaaccaaaaaaaagcaccagcatcttctctactaataacttgagaaggaaaaaataaaataaaaaaagaaagtaatacaaaaatgaaaagaaacaagtactgtacctcaagcggtgtcggcagccctgggcagcatgagccctgcggacgccagagaggccttcactctcccacttcccactgccccaaaccaacgcctgccactcacattacagcggtgcagaggagcaggcactcacctctggggtggcttgggcccacccaggaaggtaccacatagcctcttcaagtagctcatgtccacgttgtagaagttgtgcccggcctggaagagagtcacccactgactgaagggtctcccgggatggcggtggatgggcacgctgcccacacacgaagcccaacccagggaaaaccagaggccctacccaattcaagggcccaagggttggggggcactggggaacagcccagagtgacacacgggcaaagtgggtgtctcccctgatctgctcccatttgctgacaatcagagaccctctccagccctcaacatggctcactcctcattcttggttctcagtccgagggtcagggctgggcagagacaaagggaatcaggggcgggactgataaactgccactgtgccacggcgggcgtcacaggggctagctggttttgaacacttccgaagctcacttactcccccacacacctccacgtgcacacaaccatatattcatacacaagcacacacactcatgcacacacgtggggtatgggacaaaggagggaggcgtggtccagagccgacatgactcaaggtcagggccatttttcaacagtccaggacaatgttctgtgggccacagtgagggctggcttcccattcctggagtcagtgtgcacagaccgacctgggaggggacatacataggacgcagccccacagcctacctgccacgtggtattccgtttgttgacatagttgaccagctcatccgacaggggatggaaagagggcctgctccgggcattggccaacaccagcaggcagcagagggaggcccagagctgccacatgttggaagcc

SEQ ID NO: 87855 - DNA, 713 bp, Homo sapiens
gatcctcttggggtggcttttgcaggatgtagaggaaatgtcagttttcaccagatgcccacacttccttctttctttacctgtttcatactcaaaaaggagatgttgtgtgcagatgctgaggtttgacctcgrctgaggaaaaccctgatgcagacccttgggcttagaaattgtgcacttggggtcatgctttcttgcaaccctcttgcttttagtatcataccctgagagccagcttccttgttgctccccagaggccctcgcttaggccccgtgggccacctgctctccgaccttcttagccctcaacctgatttgaatctcagctgtcttgtgccacttgctcttccaagccagatctctgctttcctgtcaatgaatgcataggtcctttctacaaggtaatacatttgaattatggtagaaatctctgcagacaaaatgctctagtggtgagaatgtcagtctgtgtttagaattttgtgaggtggggatggtggggatacgtctcttttaacagcttacaaaccaggacaagagaaccgggggaagtcttggggggctggtgtctactttaaactgttctccttcccagccaggaggagccgaaacaccaccaggcccgctctgctgaggctgtcggattaccttttgaccaactacaggaagggtgtgcgccccgtgagggactggaggaagccaaccaccgt

SEQ ID NO: 87856 - DNA, 713 bp, Homo sapiens
gatcctcttggggtggcttttgcaggatgtagaggaaatgtcagttttcaccagatgcccacacttccttctttctttacctgtttcatactcaaaaaggagatgttgtgtgcagatgctgaggtttgacctcgactgaggaaaaccctgatgcagacccttgggcttagaaattgtgcacttggggtcatgctttcttgcaaccctcttgcttttagtatmataccctgagagccagcttccttgttgctccccagaggccctcgcttaggccccgtgggccacctgctctccgaccttcttagccctcaacctgatttgaatctcagctgtcttgtgccacttgctcttccaagccagatctctgctttcctgtcaatgaatgcataggtcctttctacaaggtaatacatttgaattatggtagaaatctctgcagacaaaatgctctagtggtgagaatgtcagtctgtgtttagaattttgtgaggtggggatggtggggatacgtctcttttaacagcttacaaaccaggacaagagaaccgggggaagtcttggggggctggtgtctactttaaactgttctccttcccagccaggaggagccgaaacaccaccaggcccgctctgctgaggctgtcggattaccttttgaccaactacaggaagggtgtgcgccccgtgagggactggaggaagccaaccaccgt

SEQ ID NO: 87857 - DNA, 713 bp, Homo sapiens
gatcctcttggggtggcttttgcaggatgtagaggaaatgtcagttttcaccagatgcccacacttccttctttctttacctgtttcatactcaaaaaggagatgttgtgtgcagatgctgaggtttgacctcgactgaggaaaaccctgatgcagacccttgggcttagaaattgtgcacttggggtcatgctttcttgcaaccctcttgcttttagtatcataccctgagagccagcttccttgttgctccccagaggccctcgcttaggccccgtgggccacctgctctccgaccttcttagccctcaacctgatttgaatctcagctgtcttgtgccacttgctcttccaagccagatctctgctttcctgtcaatgaatgcataggtcctttctacaaggtaatacatttgaattatggtagaaatctctgcagacaaaatgctctagtggtgagaatgtcagtctgtgtttagaattttgtgaggtggggatggtggggatacgtctcttttaacagcttacaaaccaggacaagagaaccgggggaagtcttggggggctggtgtctactttraactgttctccttcccagccaggaggagccgaaacaccaccaggcccgctctgctgaggctgtcggattaccttttgaccaactacaggaagggtgtgcgccccgtgagggactggaggaagccaaccaccgt

SEQ ID NO: 87858 - DNA, 615 bp, Homo sapiens
aggagttcgagaccagcctgaccaacatggagaaaccccgtctctactaaaaatacaaaattagccaggcattggtggcacatgcctgtaatcctagctactagggagggtgaggcaggagaatcacttgaacctgggaggtggaggttgcggtgagctragattgcgccattgcactccagcctgggcaacaagagcgaaactccatctaaaaaaaaaaaaagaatattggaagagtctaatacatgtggaagatttttccagtgtcttcaatttatcaaaacactttgagagtgttttaaggtcatggaataatccccaatatatgttattaaatgaaaatacagcaaggtaaacagtagagggtattcgatgcttttttccccctctgatttctatatgcttgtatatgcacagaatatgtctccaaggatagaaaagaaacttgtaagaataattggcagtggagaagaaaacaagggaattggatgaaatattgtcatctgtatatccttttgaaattttgcaatttatctctttatgtatatattgtctactttaaaaatctacacaggtgccagggacctagttctactgaatcagaatttctgggat

SEQ ID NO: 87859 - DNA, 1020 bp, Homo sapiens
tgggttacctgcagggctctagggaatggagtggggattacagatcaaaggggaaaaaataaaaccagagaggagttttgcacaggctgatgctagcaataaacagctaagaactgagaagcaggattcacttgatttctctgcctgggaccctgagaaataaacaaactgggctttatttcctgaaggatttagaacgtgggcgattcaagcttaaaatcttagtctctggaaagatgaagactgtgattctgaacaaggaaagccatattcaaagtttcattcaagtctttttttttctcattttcctactgtaatgtaccttccctgactcaatgactgcatattactgactctgagttggggaaggcagggagaatttccatcgttctcggaaatgcaaggggaaaccctcagttaacattgcagagttttagttcattggattcccttctccagtgtctttgctgaaaagctttacctaccatttggatgtccccatctttctttagagcacttgccattgcttgcgtggtttgggtgattgtgattctggatctcttactgtatgtgtcattaaacaatagggtctcttggaataaattaattcccattttctctctatctgggagattctccaaagcagtggagaaacacacttgtgggacaaagagattcattcgaggtgtaacacatcatctgtaacatttttcatgaattctcctgggaaatagttccatggagtcttacagaagacattttagccctttgccagcactcctgagcatgtctgcaatcttggacaatcggtccattctcagaataagaggttaagtgagcggaaaatattagacatcttacatgtcagccattaaacaagaagcctttaactgtgcactgagagtccctggacaccatcctttttacaaaacctttgcatttcagggccaatcactgatattwtcatttctatccaagaatgggcaaaagagggtacaaatgtggtgttccagcttctat

SEQ ID NO: 87860 - DNA, 603 bp, Homo sapiens
tttccaaactagactcttttagtttttttattaaaaaatatcagggcatttgtgccttgtaagatatgctttgggccttattctgatggctyatttaatcttcacgataacccaaagatgtagggaccactactgtccccattgtatatttgagggtaagagttactttattccctctgttgtcctcagaacccaggacaatgtttgacacagaacaagctctggggacacagagatgaatgaatgagtgaatgcagggatgaactgtgtgccctggggaaggggatactctgtggacacccagcccaaggaaccagagccttctctccagcctttgctactttctttgttcttgtcatcagttctctgcctcttacctttatttctcccagtccttcctctaccacctcaaagacacagatttaagccagctgatgtacagtatccattaaaaaacagtctcttaatttgctaaaattacattttctgttggttttctgaggtttggggaaagaaccagatgggtgttatcgtatgtttggaaagtgccctttgagaacagagacagttaatgactgtttccacatgagtccaatagacagt

SEQ ID NO: 87861 - DNA, 603 bp, Homo sapiens
tttccaaactagactcttttagtttttttattaaaaaatatcagggcatttgtgccttgtaagatatgctttgggccttattctgatggcttatttaatcttcacgataacccaaagatgtagggaccactactgtccccattgtatatttgagggtaagrgttactttattccctctgttgtcctcagaacccaggacaatgtttgacacagaacaagctctggggacacagagatgaatgaatgagtgaatgcagggatgaactgtgtgccctggggaaggggatactctgtggacacccagcccaaggaaccagagccttctctccagcctttgctactttctttgttcttgtcatcagttctctgcctcttacctttatttctcccagtccttcctctaccacctcaaagacacagatttaagccagctgatgtacagtatccattaaaaaacagtctcttaatttgctaaaattacattttctgttggttttctgaggtttggggaaagaaccagatgggtgttatcgtatgtttggaaagtgccctttgagaacagagacagttaatgactgtttccacatgagtccaatagacagt

SEQ ID NO: 87862 - DNA, 619 bp, Homo sapiens
gcattactaatgctagaacaatagagctgccgaaactcccgctccatgaaagcgactaacctgatccttggctagagttactgagtctgtacaggataattgcatttgatttctttaaagaaaaatgtccaacttttctattactgaagaaaasaagaaataacttcaattgtgctttaataagaaatagcttcaattgtgctttaccaacttttatctctaagacgtatgaattttgccccatgacagtttcctagtatgtcttccaatgggacattcacggtcttttgttttcctgtttttctgtcaaacccgtctacatctaaggtgaaattaaggctgttcccttttgagatgacccctgtctgatctctgcagaccacctttggctgatgtccttactctctatgatagactgtcaacaattgtgtggtaggctcctttttattttgagctgaagtttcgctctgtcacccaagctggagtgcagtggcacaatctaggctcactgcaacctttgcctcccgggttcaagcagttctcatgcctcagcctcccaagtagctgggactacaggtgcgtgccaccatgcccggctaatttttgtatttgttttttg

SEQ ID NO: 87863 - DNA, 619 bp, Homo sapiens
gcattactaatgctagaacaatagagctgccgaaactcccgctccatgaaagcgactaacctgatccttggctagagttactgagtctgtacaggataattgcatttgatttctttaaagaaaaatgtccaacttttctattactgaagaaaacaagaaataacttcaattgtgctttaataagaaatagcttcaattgtgctttaccaacttttatctctaagacgtatgaattttgccccatgacagtttcctagtatgtcttccaatgggacattcacggtcttttgttttcctgtttttctgtcaaacscgtctacatctaaggtgaaattaaggctgttcccttttgagatgacccctgtctgatctctgcagaccacctttggctgatgtccttactctctatgatagactgtcaacaattgtgtggtaggctcctttttattttgagctgaagtttcgctctgtcacccaagctggagtgcagtggcacaatctaggctcactgcaacctttgcctcccgggttcaagcagttctcatgcctcagcctcccaagtagctgggactacaggtgcgtgccaccatgcccggctaatttttgtatttgttttttg

SEQ ID NO: 87864 - DNA, 619 bp, Homo sapiens
gcattactaatgctagaacaatagagctgccgaaactcccgctccatgaaagcgactaacctgatccttggctagagttactgagtctgtacaggataattgcatttgatttctttaaagaaaaatgtccaacttttctattactgaagaaaacaagaaataacttcaattgtgctttaataagaaatagcttcaattgtgctttaccaacttttatctctaagacgtatgaattttgccccatgacagtttcctagtatgtcttccaatgggacattcacggtcttttgttttcctgtttttctgtcaaacccrtctacatctaaggtgaaattaaggctgttcccttttgagatgacccctgtctgatctctgcagaccacctttggctgatgtccttactctctatgatagactgtcaacaattgtgtggtaggctcctttttattttgagctgaagtttcgctctgtcacccaagctggagtgcagtggcacaatctaggctcactgcaacctttgcctcccgggttcaagcagttctcatgcctcagcctcccaagtagctgggactacaggtgcgtgccaccatgcccggctaatttttgtatttgttttttg

SEQ ID NO: 87865 - DNA, 1007 bp, Homo sapiens
atattccattttgctaagtaaatacatcaaaatagaaatgtgtcaaaaattaatatcattgggcaagtgtaagttaacaactattcaaagagaaatagattccactgtctaatgattttctactttcaaaaggttagatgaaacagctcttctgagcatggcatgggaatcacaatagttacactgctgacataggttaatggcacaattattaggcaatagtgcttagcaattagtgtggagcaggaagagcctaatctgccgatggagtcataaaacagcccatgaagggatttctgaagacatgacagggactttcaataaagtccagaaattaagtgctctttttcttctcccaaaaagtgaagttattttaaaacctcttttagtattgtttgtgcataattccctccagaggaagcttgtttgatgagatcttytgcaacagcaatagtaagttgtgcgggttccagacatagtcatttcaaagccatccaggttgtgcttccctgaagaagtctcagcccctgagcactaatctttcgggcctctgcttccaggtagctgctagggtggctgattgaaggtggattctgggctgttttctctgggaaaacactcatcagtgaacatgaatgctcattcagggggtgactgggaattgggactgcctcaagggcagtatcagaggtgttcaggctgaccatgggcctcttgaccctcatcagagggatcagaaagggtctaaactttcgggttaattccacacggattgggtccctggaagatcattcaaatcagcagcaatcccctaatcttagcgcacttgttactgcctccagctaaaaccaatatctagttgtctattccaggcaatgaacaaaggtaagactaccttactttgttacatgtactcatgtctcagatgcccatctggactcaaattctagactctcaagaggacaaaaacagtgcttggtgggagggagcaaaaactatttttatgc

SEQ ID NO: 87866 - DNA, 1074 bp, Homo sapiens
cacttgatgccaccttcaggagtacaacaggggctgaataggtcactgccttgctgcaaggagacatttgagatgtcctcatgtgactctgactccacattgaggttactcaagatcaccaatttatgaagttatagagagacgaacccaaactcaccttctagttttagtaaatcmccactgtgtcagaatagttgtaaatggcatattctgattaatcacataattggcagagaggttacacatatgtcatacccagtgcatcaagctttgatgaattaccaaaggttggcaaatggtgacttggggaacaaatctggcccatatctttttttttatatggtatcatgggataagcatagtttttcctttattaaagcattgtagggcctggcgcagcggctcacgcctgtaattccagcactttgggaggctgaggcaggcagattaactgaggtcaggagtttgagaccagcctggccaacatggtgaaaccctgtctcttctcaaatataaaaattagctgggagtggtagtggtgcctgtaatcccagctactcaagaggctaaggcaggagaatcacttgaacctgggaagtggaggttgcagtgagttgagggcacgccagtgcactccagcctgggcaacagagtaagactccatctcaaaaagaaaaaaagcattgtaaaaataacaaagaatatgcaacagagctgcttttagccacaaaatttaaaagattcactatttggtcctttatagaaaaaatgtgttgatccctgagttagggtttaacaaaatgaatctaacataaaggccacgtggagcataatgtttgtgattccaaaggcacttctgactcttacaatatcccaggttcaagattacaaacatcagttaggattggactacacaatggttaaaagtaggaatttctgaaatcagactgccttggatgaaatctagactctaccacttattaagtgtgtgatctttatcaagttacttaatcttcctaagccttggttccctcacctgtaaaaaatgagcattataaaagccacctcatccgg

SEQ ID NO: 87867 - DNA, 1074 bp, Homo sapiens
cacttgatgccaccttcaggagtacaacaggggctgaataggtcactgccttgctgcaaggagacatttgagatgtcctcatgtgactctgactccacattgaggttactcaagatcaccaatttatgaagttatagagagacgaacccaaactcaccttctagttttagtaaatcaccactgtgtcagaatagttgtaaatggcatattctgattaatcacataattggcagagaggttacacatatgtcatacccagtgcatcaagctttgatgaattaccaaaggttggcaaatggtgacttggggaacaaatctggcccatatcttttttttyatatggtatcatgggataagcatagtttttcctttattaaagcattgtagggcctggcgcagcggctcacgcctgtaattccagcactttgggaggctgaggcaggcagattaactgaggtcaggagtttgagaccagcctggccaacatggtgaaaccctgtctcttctcaaatataaaaattagctgggagtggtagtggtgcctgtaatcccagctactcaagaggctaaggcaggagaatcacttgaacctgggaagtggaggttgcagtgagttgagggcacgccagtgcactccagcctgggcaacagagtaagactccatctcaaaaagaaaaaaagcattgtaaaaataacaaagaatatgcaacagagctgcttttagccacaaaatttaaaagattcactatttggtcctttatagaaaaaatgtgttgatccctgagttagggtttaacaaaatgaatctaacataaaggccacgtggagcataatgtttgtgattccaaaggcacttctgactcttacaatatcccaggttcaagattacaaacatcagttaggattggactacacaatggttaaaagtaggaatttctgaaatcagactgccttggatgaaatctagactctaccacttattaagtgtgtgatctttatcaagttacttaatcttcctaagccttggttccctcacctgtaaaaaatgagcattataaaagccacctcatccgg

SEQ ID NO: 87868 - DNA, 996 bp, Homo sapiens
ctgttggacacattttaagaagtaaatattatcagttttaagtgggtcatgtagccagtatcattagtccagctgttctaagtggactaagaattattttaatttgtatttaggttattgctacctcggtcaatatcatacttgtgcaaaggctcccaaaacttctgggttgttagttatcaaactacaacaagcaaatgagcagcaaagctttctgactatttttggccaaattcaaccatccatctagtacctcatttcctggctatayagaatttctcccaagtctagctctcccagaatattgcactcctgctcccaaaacattacctcattctgcatagttacaaaatcattcccgagaaggtatttcatgacttattacgcatttgagaaattctgcatttatttatgcagaccttcttagaaccttgagtggactggtatacatttggttagtcaaagatgagcataccctcaggagctctcatcaagaaagtgggacagtcttcaggaaacatcagcccagtggaaaaggaccaagttctccagctatgtttgcttcacatccttgccttgagaaagaagcctcatttaccttcttctcctgttaacctctgcagttacccagctggaaatcatctctctatcttctggaaacctcttccagtatttttgataattttgttattgctctgagttttaaccacgtgaaaaggtttctttttctgttagttgcacatagtagatgctctaaatcagagttctgcaaccttttcctgtaaaggaccagacaggaagtattttaggctttgaagacaatatggtctcttttacaactactcatctctgcctttgtagcaaaaaaacagccacagacaatatgtaaattaataaatgtggcagagtttcaataaaactttatttacaagaacaggcagctgtcagttttgcctcatcgaccacagatgggtctccatgaacttaaaataatga

SEQ ID NO: 87869 - DNA, 795 bp, Homo sapiens
ggatccttgctcatgagccgtggtatgccctcagcctgcccctctgccaccagtccacccatctcctcccttttcccctgcagccaggcctgccatctctagaaagcccccatctctcctttctgtgtccttgggcccaggtgtccttgggttactgggtgacttgcttttcaggtcctgcctgtgtgtgccaagcttgttctcaagaagcatctccccaggatgctagttcctctctaaacaccgcccarattgcagacacaaaaattagacctgtcggtttgcacgctgtctgccttaaatttgcatttgattaagaagcaccagcgtcctcccacccatggttcttccttcccaaccttcttctctttgaagtgctccccccgcaccctgccccaccattctcccagctctctccctttgctgtgctcaggaaatcctccagttgggctcctctccgttgcctcggccactcccgcagatctgcttggcattctctgcttctggcctcttttccgaggccagctctgcagagtttgcctgggtacaatgtgttctcattgtgcctccaacagtgtcagttcctggagctcactgtcaggaatccagcagctggcttagaaatcagctgcctttgctgagggctcatggagatggggtgaggcctatcctccatttctgtccgcactagccacaagcactagctcatgtaggaaaccactagatgcagaataatctttgaaaagccctctcctctactcttcccatctcagtctctctctggaggggtgaggg

SEQ ID NO: 87870 - DNA, 795 bp, Homo sapiens
ggatccttgctcatgagccgtggtatgccctcagcctgcccctctgccaccagtccacccatctcctcccttttcccctgcagccaggcctgccatctctagaaagcccccatctctcctttctgtgtccttgggcccaggtgtccttgggttactgggtgacttgcttttcaggtcctgcctgtgtgtgccaagcttgttctcaagaagcatctccccaggatgctagttcctctctaaacaccgcccagattgcagacacaaaaattagacctgtcggtttgcacgctgtctgccttaaatttgcatttgattaagaagcaccagcgtcctcccacccatggttcttccttcccaaccttcttctctttgaagtgctccccccscaccctgccccaccattctcccagctctctccctttgctgtgctcaggaaatcctccagttgggctcctctccgttgcctcggccactcccgcagatctgcttggcattctctgcttctggcctcttttccgaggccagctctgcagagtttgcctgggtacaatgtgttctcattgtgcctccaacagtgtcagttcctggagctcactgtcaggaatccagcagctggcttagaaatcagctgcctttgctgagggctcatggagatggggtgaggcctatcctccatttctgtccgcactagccacaagcactagctcatgtaggaaaccactagatgcagaataatctttgaaaagccctctcctctactcttcccatctcagtctctctctggaggggtgaggg

SEQ ID NO: 87871 - DNA, 795 bp, Homo sapiens
ggatccttgctcatgagccgtggtatgccctcagcctgcccctctgccaccagtccacccatctcctcccttttcccctgcagccaggcctgccatctctagaaagcccccatctctcctttctgtgtccttgggcccaggtgtccttgggttactgggtgacttgcttttcaggtcctgcctgtgtgtgccaagcttgttctcaagaagcatctccccaggatgctagttcctctctaaacaccgcccagattgcagacacaaaaattagacctgtcggtttgcacgctgtctgccttaaatttgcatttgattaagaagcaccagcgtcctcccacccatggttcttccttcccaaccttcttctctttgaagtgctccccccgcaccctgccccaccattctcccagctctctccctttgctgtgctcaggaaatcctccagttgggctcytctccgttgcctcggccactcccgcagatctgcttggcattctctgcttctggcctcttttccgaggccagctctgcagagtttgcctgggtacaatgtgttctcattgtgcctccaacagtgtcagttcctggagctcactgtcaggaatccagcagctggcttagaaatcagctgcctttgctgagggctcatggagatggggtgaggcctatcctccatttctgtccgcactagccacaagcactagctcatgtaggaaaccactagatgcagaataatctttgaaaagccctctcctctactcttcccatctcagtctctctctggaggggtgaggg

SEQ ID NO: 87872 - DNA, 795 bp, Homo sapiens
ggatccttgctcatgagccgtggtatgccctcagcctgcccctctgccaccagtccacccatctcctcccttttcccctgcagccaggcctgccatctctagaaagcccccatctctcctttctgtgtccttgggcccaggtgtccttgggttactgggtgacttgcttttcaggtcctgcctgtgtgtgccaagcttgttctcaagaagcatctccccaggatgctagttcctctctaaacaccgcccagattgcagacacaaaaattagacctgtcggtttgcacgctgtctgccttaaatttgcatttgattaagaagcaccagcgtcctcccacccatggttcttccttcccaaccttcttctctttgaagtgctccccccgcaccctgccccaccattctcccagctctctccctttgctgtgctcaggaaatcctccagttgggctcctctccgttgcctcggccactccygcagatctgcttggcattctctgcttctggcctcttttccgaggccagctctgcagagtttgcctgggtacaatgtgttctcattgtgcctccaacagtgtcagttcctggagctcactgtcaggaatccagcagctggcttagaaatcagctgcctttgctgagggctcatggagatggggtgaggcctatcctccatttctgtccgcactagccacaagcactagctcatgtaggaaaccactagatgcagaataatctttgaaaagccctctcctctactcttcccatctcagtctctctctggaggggtgaggg

SEQ ID NO: 87873 - DNA, 1212 bp, Homo sapiens
tgcatgcaaagggtctggcacacacagaagtctctgagtaactcttgatcaccttcctctttgggaatacacaccccttggagatgtgtgtgcctgtccctcatgtctgccaagcccataaaaagcatcaccctgggccagaaacccacaccttggcaccatgttcttagtccccacataggcattttagaattcaactttatttcttggcgagtctaaaaaattgaccctgtctgtgtttcatgccaagccatcaattaaagccatggagcagcttacaaggtgacacttgccaggataaataggcattggcggccacggaagtgatgccaggactggggatagagcttaggccactggcatggtggcctgccatttgtccctgatccttgccaccagcatggaggcctggattcatggtgctgaccatgagaggatgtgggggtggagaagctccccctgggaggggaaaggagggatggctgggcttgggtgtggagctggttctcagaaaaggtgcccaaaaggctctggagagggcattgcaggctccctgcccgccccacccagcctcccctccctgacaagacagtcaagcagctgcctgccagccggcctgagcttagtcttgggggaataaaaacctcttgaagagattcagaaatgttccctttggcagctaaaaaaaaccttacactcctgctgagtctgtgggctgaggagggactgagggggcgtttggcctctgcagcagcggcagaaggcttgcggatggaggggaaaagggagcagcctggagagccagagttcttgggttttctctgttgttttgccatcatctttctgtcactccctgactctctcctgcagattgtcttttagggaggtactgggggacttggttccattcatgactttaggttmcaaaatgaaagataagccatggggcagggccagcttctcttcattatactgtccttagggcccagggtggtgcctgatgtgaagtaagtgcttgataaagattcattggatgaactgaaggaaggaagaacattctttgagttccttcatgctcaagcacctctcagtcatttggacgttattttcaccctgtttgctgttgtagattctcatccgtccaggctaatatctggacaccagggttgaatacaatggctcttggtgatttgggattctgaggattgggcc

SEQ ID NO: 87874 - DNA, 741 bp, Homo sapiens
tgtggcagcttcactccagtgcaagtcagcctggccacctcctggtaggcaaccagcagctgcagcagttcacggctatagcatgaactcccctgatgccagggcagcccagagctagcttcgatttatgaatgattttaatgtccgaaattaacatcatcttcagctcttgaaacaaatgactccagggatgtcaaagcacactggtttacccagcaccagggacactggaaaggtgtcatggaccctgaggctgatccttgcatccttcatctcttcactttagaggttctcaaagccatctttctgccatccttcccagctgacatcatataagatgctccaggttgtcaagggtatgtctgcctttaaaaaatgatctagggaaggtacagtgattctgggagtgcccatctctctgcatcactttrctggggctgcacacagagaggggccctgtgatcatgggactgcaggagctcaggaggaagcagttagtaaccccctcatgaggaagcccctcgcagtatccgctggtccagttctctccctttgctcacctggacaccttcttctaaggccacagaggagtgggaaggacaaaggctctggaagcagacatccagctcttaggcttctgactagtgtgtgatcgttgacaagtcaatttacttctcagttgctgttttacttgtgaaataatgagaaagacaacacctgccctgtccagctcctggggtt

SEQ ID NO: 87875 - DNA, 2491 bp, Homo sapiens
acatgttacttgtcacgagtgtgcatgtgtttcttccccaccagattgctagctcctagagagcagaacctgggtctcagccattgcaattgccacagcacctggtacatggaaggtgcccagccaaggtgtgtggttgttgaacaaagggatcctgccatgaatccctttgtaagtgcaaygttcttttgaaacagagagtactaactccctagtgtaatttattgaggactgggatccccaggatgagggaactaaagagcactgaggccctcctcttattcactgaggttaagtgaaatttcagatcagggtacttagaaggagaaagaacaaagagagcatgtttggaggtggaggatctgataagattccccaatctctctgtctctctctctctctctctctctctctctctctctgtctgtcacacacacacacacataaacacacacacacactcccataagaaagaaacactctccttgcttgcacctccagctctacccctaaacttctgcccttgagactccccagacacattgcaaagttatcacaaaggatgattgatgctgacaggcaagctctttggcttgaacagacccttgtttaagacgcataagctgggcacgggagctcatgcctataatcccagcattctgggaggccaaagaggcaggaggattgctcgagctcaggagtttgagaccagccagggaaacatagcaagacctcatttctactaaaaataaaaaaattagcccagtgtggtggtgtgtgtccttatagtttcagctagtcaagaggctgaggtgggaggatcacttaagcctgggagattgagtctgcagtgagctattattgcaccactgctctccagcctgggccctgtctcaagaacaaataaaatgaaagagacgtagattgtcctgcttctcagacacatttttgtctaacactgagatccaggagatgagggccattgtagctaacattatgcatctcaagacagcaaacattttcctgacattattttattcaatctgctcagacagaatatgaggcagtagagagtgagatggggcagaaaaagttcccctcatttcagaggaagggaaacagagcctcagagcaagcatgatgtctcccaaatcatttggtccattaagaatgtaaactgggtgcttgtagtcagcaggcatgtctaggccccaggagagaagacctgtgcaagaggccttacctttcagctttggaggcatcatcatccatgggcctcagcccaaatcctacttcccatgtgtattctctcccctttcttccccagccaccccacccctgctgccagagacctgaaattccagtcttcctcctcaatccccaccccaacccaggtgtgccacttgccaccaactaggcatattaaacctgcagccgggctggatgaggcctatcttttccccctcccatgcatgttgcctacagtgtcacatgggcaatgcccctgtaccatgctgacctacagtaccaccgaaggcaaacagcgtatgaggtggttggggaaaactagctagatctccagcatgttgggagaataagagaaggaaaagagccctccccaagagctgcctatgactgatcttctcttctggtttccaccctgtaaattggatccccactccccacccccaactctatctctggaaggccccatgctccaatcagagcaaggtcagagttgatcatggaggttgggggtgtgtaggcagagcccggatatgctctcggcgggtgtggccaaggggatccacccttgagcctcagagtcctgtccatctgcatttgagtcacaccactctgccactttttagctgtgtgtgtcctggggcagctcacttaaccttctccacctcattttctttacctgtgaaaggggtactaaaacttactttgtaaggttgttgttaagaactagaaacaatgtctcaatacaagggactgttactctgtctagggcagaagcatctgccaggtgtccttaaagatgctgaatacctgtgggttctcactccgaaggcaaaccaggaaaacttcatgacccctttctcacccaggctaaaataactcactgtttggggagccctcctccaccacccaaagatggtctgatcctcccaggctcccacctgggggcaatcctgtgtgcatcctcctcccagtctagatgagggctatcaagttgcggaaggaggagagagcagggcccccactgcagtggagagggaggggtagggttcttgtgacctaccatgggaatgttttaaatcctcctcccatcgagcttttgaaaaaatcatgatccaggaaaaacagcaactgcgtctgctccattagcaagcgagggagacgcagcctcctcagccttagggctcttttagctggaaattcagccagccctagccatagggactgggggaagtctgagtcaagg

SEQ ID NO: 87876 - DNA, 700 bp, Homo sapiens
atggaaaaatgatcatctccactgataaagcacaaaataaaaaattcagggtgaatttaaaaaaaaaaaaagagaactatttgttacattccacagtgagatgtgcataggccccgggaataacatttagaaatgtccataatwgtttgacagagaaattttttaatttaattttctgaacctaataataaaaattggcttatatctttaataaatcaataaataaaactatttggaaaaattatattattttagattattaattcaataattagtcattttatatttgtttatatatttttatataaattatttagaaatttttttatttaaaattatctcaaaatatttggacattaccatgtttaatgacataaaaaaatacactatattcttttgactgtagtttaatttttaatatttgtgttatattttgttgctgatgtttatgatttgggcatattcttttaaacttttataatgtcaacgtagtacttttattattcagaaaaaggtgatgaactgctcttgtctaattaagtatgtataaaaataaagctattctcagttatcctgggggctgaagctagagaactcattccacagtttatactgtccctgtattaataatggaatcaaactctaaatgtcagaactctcttgcttctgccttacttcattgtctaaaggaaatcttcaa

SEQ ID NO: 87877 - DNA, 808 bp, Homo sapiens
ggaggtctaggctgcagtgagccatgattgagccactgtactccagcctgggcgacagggcaagaccctgtctcaaacaaacaaaaaaaaaaaaaaaaaaaaaaaaggaaatatttagttcaaacaaataggagaggtttgggaagggaaagagttgaatgaaccttaatatatagttaaagtcattgtccaaatggcatctcaaataaatgtattttcaagatgatggaaacttaccttttaagtattgatgttttttttttttttaaacaactaattcaactctgtttatttttgacgaaaccgatttctttcattcagttcatactacgcgtccacactgtgcctccaaaaatatttgcccttataactgaatgctcagaaaggctaagaaatctgcccaaggtcccctggcaatccagccagagatgtgagtcactcttttttatttatttatttatttatttatttatttatttatttatttwttttattgatcattcttgggtgtttctcgcagagggggatttggcagggtcataggacaatagtggagggaaggtcagtagataaacaagtgaacaaaggtctctggttttcctaggcagaggaccctgcggccttccgcagtgtttgtgtccctgggtacttaagattagggagtggtgatgactcttaacgagcatgctgccttcaagcatctgtttaacaaagcacatcttgcaccgcccttaatccatttaaccctgagtggacacagcacatgtttcagagagcacagggttggggataaggtcacagatcaaca

SEQ ID NO: 87878 - DNA, 743 bp, Homo sapiens
tttgtataggcgttaggtaagggtccaagttcattcttgcaacaatggccaccagcctctttctctgcacatctatgatcagaagcagcaatcagcagacagagcacagatcactgacatttgaaggacaagatcctttttgcccatcgtggctccagcaagctgtttcaggaaatgtgtacagctgcctgccatgggggtggtcatgggtagcgtccactacactaagagcygaaattgaccaaaattaaccacaatttaggtccaagccttttcctggaagtcacaaaccttcaatagactctagagttccaaaataattacatcagacagatgctgctgtgcaaatgttgtctagctggggagagacattccagcagcttcctactccaccagaatgctgtctccttctccacattttgtgcagagaacataactggcctccacacaaagtttatttttttctccccatccccagtagtaacgaaggctaagatgttccatttgggagggaggggcagattgggtgtatactggaagtcacagatggtggttgtggatcatggggagggacctcagggttgaggtggctcaaattgttatctgaggtgccttggctaaaggatattatagcaggtagagaggtatgtcaccttttatattactttattcctttgattagggaagttttgctcccctttgtgaccaggcaagactgggcataaggtatgtggggcagagga

SEQ ID NO: 87879 - DNA, 720 bp, Homo sapiens
ccatccccgcttcgcagcatctgagagccctggatgacatctgctccgatcccggggcagacttcccataaatactctaaaccagcggggtgcaatcttttggcttacctgggccacagtggaagaagaagaattgggccacacataaaatatactaacacaaacgacagctgatgagcaaaaaaaaaaaaataaataaataaataaaaaaaaatctcataatgttttaagaaagtttatgaatttgcattgggccgcattcaaaactgtcctgggctgcacgtagcccacgggctgtgttggacaagcttgctctgagctccgagaaagctgacagacagctgcttggtgttcagagcttgtctgtccgtttggtcctttcctcctttagcgggcatgtaggtactattgcctactcacatgccaggtactgcgctggcttggcataagggacacagacgcagtctgttgtcaagacattgtctagtggagagagaggaaggaaaacagtgacaaccctgcctgatgtgtgcatgcaaagccatacatatgcgagcacttggtgagggcagctacaatgggggtcatggcaggcttcctggaggaggtggatttgagctaagtcctgaaggccagtaggtgatggtgggggtaatttcacgtagagtgyccgggctgttcctggaaacagggacccagaaacagtttggtttatcccag

SEQ ID NO: 87880 - DNA, 2104 bp, Homo sapiens
atgaggcttgatggggtgccaggcagccaggttctcaccggagccctgcagctccccgtcctggtaggcagaccataggccatcccttgtggtccaggcgatgcagatgtggtgccagccattgtccttcaggctcaggggcagctgggccacctggacacaggtcccccaaccccaggtcagaggtgccccaaggcccaaggcccatggctgaggcagtggggtggggctggggagacccatgtccatccttccagggcccgaccccaggcctgaccctctccatcctcctgcccagtgtctttccctgactcctgtctcctctttcctcaaagaccaaaccagatcacaagggactctctggttttggttttcagttgtcacaaggtagttcactcactctccaacaggcctattaaggtcacttggggagagagggatgtctcataatcccaacttcccctgaacacctcacacagcactcagcacacagctagggctcaagaagtactggcagggatagaatgagccttggactcagaggccaggctccagcatctggccctggctctgccaccaacccctgtgtgatctggggaggctgctccttcctccctgggcctcagtttccttatctgtaaagtgaggtcagacaagggatgacaagtctgcaagggatggcaaatcttcctccacccagggcagacatagccaatcaatcacgagcctcgatttagctcagatccctcagcacagtgctctggaaagccactgctgatgggttagagctggcctgtaagatgaaaggtgcttgctgtctgtggatttggtgctcccaaagggcttcctcatctggtaagtttcctgaggtcacatttttttttttgagatggaatttcactatgttgcccaggatagagtgcagtggtgtgatctcagctcaccacagcctccatctcctggttcaagcaattctcctccctcagcctcccaagtagctgggattacaggcgtgcaccaccatgcccagctatttttttttttttttttttgtatttttagtagaaacggcgggatttcaccatattggccagcctggtcttgaactcctgacctcagatgatccacccacctcagcctctcagagtgctgggattacaggcaagagccaccttacccagcctgagatcacaatttaatgtaacattctctgaggcctacgtggtgcctggccttgttgtggatsctggggatgtggagctggtccacgccttaaatgagctgagtctgcaggaggggaaggactttggggcaatgctataagacaaaataacggagggcatatgggaggtacagaggctgcgaggcccagaggtagaggggatatgggaacagaagccacgtcaaaacccgtctggaaggacaatggatccaccattccattgctaggcaaaacaagtggtgggcacagaaggagtaaaggcttagaggctggaataaaaagggaacagtgagcagtctgttaggctggctctcaaaaggactctagagcgtcccagaacagggctgcccaatgccctgtccagggtgctgaattccttctaatgagaactgagtgctgaacttgggccaggccaaggacggcagccagggggtgatgaagggcacaaggcagcaggatctagatgtagtccagccaccccggtggtcgtagggtttattgggccacaagggaaagtcactggtccctggactcatctcctccctcctcctcctccccctccagaatgccatgaaatgcaccttctgctaagctgggtctgatgggtatcaatcactcctagtggctttatgtgttgtgggctggtcacaggtgggtacgatatgtggtatctgcatttccaggggggtctcaatagaccaccatgcctgcaaggcccaaaacaatgtggcaggttggggaggagctttaggagtggatgacagtgatgagatgctccccttcctctcccctcaattaccatgctcctgccacatcattctccctgccttgtccttgtcctgccttccagccaggctgaaggaggggcatcggggagggagg

SEQ ID NO: 87881 - DNA, 561 bp, Homo sapiens
aggcggaggttgcagtgagccaagatcacgccactgcactccagcctgggtgacagtgccagactccatctcaaaaaacaaaataaaataaaataaaattgattttccttcttaaaataactttgtggcaagataaagtgccctgtatttcatatatttccaggaatgctgggaaacgaggagaaacactatgcttttcacagcatcacagacggtactggacccttcctatcaatgggaccatttcagggctgccacttggccagggcatcgcagtgggctgttggatcagaccgagaggcaccaattcaaacgcccccggcaagaacctatgtcaggtggatgggatgsttataaacggcagagctatgcctgctatcaaggattagaatgaaaatatctgagcagcctcagcagacagtagctggtggcacctcaggagaccggaaaagccctacctgccaggacccctagacccagcccttgcctgtcttgaaacagcaaagggagtgatcttggggacaccagaacagtctgcttgcagagattaggaacaggaca

SEQ ID NO: 87882 - DNA, 753 bp, Homo sapiens
cgcagccgcttcttccctccgctcttccacttctcaccagtccctccaggtccagctcaggcaccgcttctgcccctcccgcccctgcctgctgagcacctcccctgactgccccaggcaggccttgttccctggctcctttggagatgagttgttggtgaacgttacagctaacgtctgtgtggccatcaccactttatgcacccagatgatctcaccatccccacaccagagtgtgtgcgtggctaggtgctttgcaatgttcgctgattggaggcctccgttccaaacacgcccgatgtggaggtcaccgttccaaacacgcccgatgtggaggtcaccgttccaaacmtgcccgatgctccaggtggaccccctggttgtgaggggtgcccggcgagctctgagcctgcccaccagggccagtgaaggttatggcacagcaccagccccctccccatcacttccccctcgctggcttctgcctcagttttctcccacttctgtcctcctcagagccttggtctgggcagtgttctgtcaacacctacatgagcagctccagcccagcagacatccagtctctccataaaaggagctggcacctgctcctcacgatgggcacgtggccccccctatttcagagactatgaaggtaggcgggagttgaatggctagctcttgagcagctcctatgtggtaggcccagatcccagcccaagcagccccaaggcaggaatgcaggtcccttag

SEQ ID NO: 87883 - DNA, 496 bp, Homo sapiens
ctcatcagtaaattcctggagggcccaggctcagacaatggttgtattcaacttgaaagcagacatatttgaagacaaagcccctgccatatgtctatgagcaagagccaaacagagcagtgggcttaaggggaggggcacagctgacagtctctcctctctgggagactctgggaggaggattacttagggctgcagacataaaaggaaagtgcttcttgctcctcccgggtctgcaactgggttttgttagccactgtaggtcaacaaaggtaagaaaggagcttcatgttaacccaaccggcccagaatccaggacaatgagytggcccagcaggaggcaggaacatgagaaggcagtggagcctggctgtgtgctcgctgtggtgctgggctctttccatcattatttcattgcagacagcaactctgttttgtcacatagatggagaacctgggactcagagaggttaaattcttttccaaagtcatgcta

SEQ ID NO: 87884 - DNA, 496 bp, Homo sapiens
ctcatcagtaaattcctggagggcccaggctcagacaatggttgtattcaacttgaaagcagacatatttgaagacaaagcccctgccatatgtctatgagcaagagccaaacagagcagtgggcttaaggggaggggcacagctgacagtctctcctctctgggagactctgggaggaggattacttagggctgcagacataaaaggaaagtgcttcttgctcctcccgggtctgcaactgggttttgttagccactgtaggtcaacaaaggtaagaaaggagcttcatgttaacccaaccggcccagaatccaggacaatgagttggcccagcaggaggcaggaacatgagaaggcagtggagcctggctgtgtgctcgctgtggtgctgggctctttccatcattatttcattgcagacagcaactctgttttgtcacatagatggagaacctgggactcagagaggttaaattcttttccaaagtcaygcta

SEQ ID NO: 87885 - DNA, 1098 bp, Homo sapiens
taagttccacacaacggcacatattttacagtcatttgctagaatacctccacttcaatgatgtcatccagtgaccccgacaaaaggattatctcaatgtcttgcactttgcaatcaagcagcaagttatgcttctctaatcgtttctgttccagagaagtttgaatacttacaacttctttttgcaatttccccacttccctgtaattacacagatatgaaaaagtaattttactcattatgtaacactgcaccaaggaagaaaaatgtatgctataaacttttatgaaaaaagaattatttattcctgtgagtgctgtaagttctagaatcctctcattgatgcttgtaatttaattgttaacactcctgagaaaggtcacgaatatactcagttaatctaagggagcattttccactaataaatgttactgatttaatcarggttaccaaaaacagtgctttcctcactcaaatataagctctacattttagacctcaaaccaagataaacagactcttagcaaaagaaatcccttgccagtaagtcacatacacttaataatctgttttccttgctaccaccaccactaatgtagtaacgccttctatctgaaaatgagggcttgggttttactaatcgaaatgatgtgagatttttaaaggaacctggaaaaaggaccaaaagaaaatggaaaaaaaaagaaagaaagaagaaagtaagaactatgtgtttttcaagaatatgaagggaaaaagaaagtattctgtttgggctgagtgtggtggctcacgcctgtaatccagcactttggaaggccaagggaataggatcatttaagcccagaagtttgagaccagcataatgagacctcatttcttaaaaaaaaaaaaatggaagaatgtgttctatttacacaaaaaacaagagttttaaaaaagcaagagtaaacggactttaattccactccaaaatcttagacaaagaactttctggctgtatcttgaaacaccgaaggtcttcgaacagtgagaaaaactgtgaaatgccaaaaggctgagcaaaaacagagaattaactttgtctaatcactcatg

SEQ ID NO: 87886 - DNA, 595 bp, Homo sapiens
tcctgccttagtctcccgagtagctgggactgcaggtgtgtgcccctactcccggctgtgaggtcttcctgatgccctagaatgcagtgtggaaaagctgtgcttctggtaagcactgagaaactcggtgtctgtggatttaccctcaagcacacagctaggcgccctgttcctcagtgctcatccctgggccggtgtcatkccgtgacaggtgtcagcagatgagtgactgggcagatgcttttcagttgcatcattaatactgcttggtgataagaaatacctgggctgagactgagcctctctgagatatttggttagctgcattggcgattccctcctgcctgcctgagtgaccccatgcaatctgctttccctgtgcccacccgaccccgtcagtcatggtcactgatcccctcctcagctctcttgccctcattcgcaaaaccacccctgcaagaattcccacatatggcccactgagatcaacattaatttcagggtgttttatgtgcataattctgaactgaaaacatttactgtcctcattttgtgttttaataatttaaaatcgtacccaatttgagaagatttg

SEQ ID NO: 87887 - DNA, 595 bp, Homo sapiens
tcctgccttagtctcccgagtagctgggactgcaggtgtgtgcccctactcccggctgtgaggtcttcctgatgccctagaatgcagtgtggaaaagctgtgcttctggtaagcactgagaaactcggtgtctgtggatttaccctcaagcacacagctaggcgccctgttcctcagtgctcatccctgggccggtgtcattccgtgacaggtgtcagcagatgagtgactgggcagatgcttttcagttgcatcattaatactgcttggtgataagaaatacctgggctgagactgagcctctctgagatatttggttagctgmattggcgattccctcctgcctgcctgagtgaccccatgcaatctgctttccctgtgcccacccgaccccgtcagtcatggtcactgatcccctcctcagctctcttgccctcattcgcaaaaccacccctgcaagaattcccacatatggcccactgagatcaacattaatttcagggtgttttatgtgcataattctgaactgaaaacatttactgtcctcattttgtgttttaataatttaaaatcgtacccaatttgagaagatttg

SEQ ID NO: 87888 - DNA, 904 bp, Homo sapiens
agggaaaggaggcatttttattctaggatmtttagaggtaaagagacaaaatcccaggaaggttagatgtcttcctcaggcagttaaaagcaaaggacgcaggttttcagactcctagatcatccactggttttctttctttttttttttgttttttgagacagagtctcactctgttgcccacggtggagcgcagtggtacaatctcagctcactgcaacctccgcttcccaggttcaagcgattctcctgcctcagcctcccaagtagctgggactacaggcgcatgccactgcgcccagctaatttttgtactttttttaaagacagggtttcaccatgttggtcaggctggtcttgaactcctaacctcgtgatccgcccgccttggcctcccaaagtactgggattacaggcttgacccactgcacccggccccagtcactagttttcaataccgatgtagtgcggtgtgcatcagaacaatacactgaaacctagaaacctctcctggagcattttgtggtggtgttttgttgcaagcatggagaaccgccatggaagtctttcgcaagcctctctgctctattacttgattcactttccaatcacctctgctcttttccactgcttacttatgatagtaccaccacatattaaacactctctgttgtttttttggcttctaccttcccaccccaggctggaaagcatcaggataggtggattttcagaagtgtggtgaaagccctattagcaacactgcagctatataaggtactttgcaatttacaaagcacgttcacgtgatcctgtctgaccctccaaacaacctatggcagaggtggggaatgtattatgatgtttgtctcagaatcaagactacatttgctgatctcctctg

SEQ ID NO: 87889 - DNA, 904 bp, Homo sapiens
agggaaaggaggcatttttattctaggatctttagaggtaaagagacaaaatcccaggaaggytagatgtcttcctcaggcagttaaaagcaaaggacgcaggttttcagactcctagatcatccactggttttctttctttttttttttgttttttgagacagagtctcactctgttgcccacggtggagcgcagtggtacaatctcagctcactgcaacctccgcttcccaggttcaagcgattctcctgcctcagcctcccaagtagctgggactacaggcgcatgccactgcgcccagctaatttttgtactttttttaaagacagggtttcaccatgttggtcaggctggtcttgaactcctaacctcgtgatccgcccgccttggcctcccaaagtactgggattacaggcttgacccactgcacccggccccagtcactagttttcaataccgatgtagtgcggtgtgcatcagaacaatacactgaaacctagaaacctctcctggagcattttgtggtggtgttttgttgcaagcatggagaaccgccatggaagtctttcgcaagcctctctgctctattacttgattcactttccaatcacctctgctcttttccactgcttacttatgatagtaccaccacatattaaacactctctgttgtttttttggcttctaccttcccaccccaggctggaaagcatcaggataggtggattttcagaagtgtggtgaaagccctattagcaacactgcagctatataaggtactttgcaatttacaaagcacgttcacgtgatcctgtctgaccctccaaacaacctatggcagaggtggggaatgtattatgatgtttgtctcagaatcaagactacatttgctgatctcctctg

SEQ ID NO: 87890 - DNA, 904 bp, Homo sapiens
agggaaaggaggcatttttattctaggatctttagaggtaaagagacaaaatcccaggaaggttagatgtcttcctcaggcagttaaaagcaaaggacgcaggttttcagactcctagrtcatccactggttttctttctttttttttttgttttttgagacagagtctcactctgttgcccacggtggagcgcagtggtacaatctcagctcactgcaacctccgcttcccaggttcaagcgattctcctgcctcagcctcccaagtagctgggactacaggcgcatgccactgcgcccagctaatttttgtactttttttaaagacagggtttcaccatgttggtcaggctggtcttgaactcctaacctcgtgatccgcccgccttggcctcccaaagtactgggattacaggcttgacccactgcacccggccccagtcactagttttcaataccgatgtagtgcggtgtgcatcagaacaatacactgaaacctagaaacctctcctggagcattttgtggtggtgttttgttgcaagcatggagaaccgccatggaagtctttcgcaagcctctctgctctattacttgattcactttccaatcacctctgctcttttccactgcttacttatgatagtaccaccacatattaaacactctctgttgtttttttggcttctaccttcccaccccaggctggaaagcatcaggataggtggattttcagaagtgtggtgaaagccctattagcaacactgcagctatataaggtactttgcaatttacaaagcacgttcacgtgatcctgtctgaccctccaaacaacctatggcagaggtggggaatgtattatgatgtttgtctcagaatcaagactacatttgctgatctcctctg

SEQ ID NO: 87891 - DNA, 904 bp, Homo sapiens
agggaaaggaggcatttttattctaggatctttagaggtaaagagacaaaatcccaggaaggttagatgtcttcctcaggcagttaaaagcaaaggacgcaggttttcagactcctagatcatccactggttttctttctttttttttttgttttttgagacagagtctcactctgttgcccacggtggagcrcagtggtacaatctcagctcactgcaacctccgcttcccaggttcaagcgattctcctgcctcagcctcccaagtagctgggactacaggcgcatgccactgcgcccagctaatttttgtactttttttaaagacagggtttcaccatgttggtcaggctggtcttgaactcctaacctcgtgatccgcccgccttggcctcccaaagtactgggattacaggcttgacccactgcacccggccccagtcactagttttcaataccgatgtagtgcggtgtgcatcagaacaatacactgaaacctagaaacctctcctggagcattttgtggtggtgttttgttgcaagcatggagaaccgccatggaagtctttcgcaagcctctctgctctattacttgattcactttccaatcacctctgctcttttccactgcttacttatgatagtaccaccacatattaaacactctctgttgtttttttggcttctaccttcccaccccaggctggaaagcatcaggataggtggattttcagaagtgtggtgaaagccctattagcaacactgcagctatataaggtactttgcaatttacaaagcacgttcacgtgatcctgtctgaccctccaaacaacctatggcagaggtggggaatgtattatgatgtttgtctcagaatcaagactacatttgctgatctcctctg

SEQ ID NO: 87892 - DNA, 798 bp, Homo sapiens
tgcaacaggttatgtgtttctctgtatattctctctttaatgtggatgggaaccatccttgtctccccatttgctatggtttgagtgtctctcctccaaaattcaggagttgaaacttaatggccaatgtcttagtattaacaagtggggctttgaaaaggtgattaggccatgagggctcctccctcatgaacgacattaagacccttgtgaactggacttcacacagcagcataaagccctcttggccttccaccatgtgagcgtgccgcgtttctcccagccagaggctgcagccctcaccagacagccaaacctgccagcgccttgatcttggactttccrgccccgacaactgtgaggaaatacatttctgttcttcttaaattacccagtcttgggtattttattatagcagcacaaatgggccacaatctgccatagtacctgtcatgtaggaagtattctgaaactatttatggagtgggtttcattaaaagttactctaatctttgaaatagaaaaatatcttacttttatgatcaatgttttgttacaaactgtctcaattatagaaacaggcttttgcatacttacctggcagtggagataccatgatcacgaaggtggttttcccagggcgaggcttatccatcgcactccggatatgctgacccctgcgattttcccaaatgtgggaaactcgactgcataatttgtggtagtgggggactgtgcttgcgctttcccctgaaaaaaaaaaaagcaagaaaagaaacaggcttttgctgaggatcc

SEQ ID NO: 87893 - DNA, 1102 bp, Homo sapiens
cgctcagcctgggctgggaactgaataccccattcagagaggcactcgcacggcgtgttattgcaatttaatattttcacacacagacacatcattatctgggaacctgacactggcagcataattctgtaatttttcaagagggcctaatttttctaaatgcaagcaccagggcccgggattatctaaacagcctcgtttcctctttgtttcttctcaggggttacagcgtgcggaaaagtgctccagatcgctgccgcctctccacctttgaacttttccrgtctcttctcccacagtgaccagctgcagaacagctttgggccgggtgggcacgcgctactgaggcaaccaactctggcgccacggagggctaaggaccgaggtgcagccaaggcaagtggctctttcaaggcacaagagggcagggaagtgtgcgatgttgctgatcaacaaaaacagagtagcttggcgggccctctcaggccaacctcagaagcacgcttgcctgcaggtgtgtgtgttgtacacagacacagagcacacacacgtcctcacactccctggagacaatctcaacatgccagccagatgaaggggtatgtgaggggccacttctccctggagcagtctcagctctggccaagaaaacaccctctggttttcaagtagttcagaaacgcatcgggttttccaggaataagagcctgcgggtgatttgcaaggaaggccagaaatctcccagcaagccagctcctgtggcacgtccctggggccaggccgctccatgcggcttgctgctgcctaaggcagcagtattttcaccaagtcaatagacactctctgcattacaggcttccctccgaaagggacccagggaccttgggacagtccccctgacagccctgcaaccgcaggatccctgtgcacacacaggggctgggccagcagggcagcatgaaggagccctgtgcacacacaggggctgggccagccaggcagcgcgtgggacagggatgacagtagcccctctgatgtgaggctggaaggggctctcaggccaccactgcggagagatgctgacatagccgagacctctcct

SEQ ID NO: 87894 - DNA, 1102 bp, Homo sapiens
cgctcagcctgggctgggaactgaataccccattcagagaggcactcgcacggcgtgttattgcaatttaatattttcacacacagacacatcattatctgggaacctgacactggcagcataattctgtaatttttcaagagggcctaatttttctaaatgcaagcaccagggcccgggattatctaaacagcctcgtttcctctttgtttcttctcaggggttacagcgtgcggaaaagtgctccagatcgctgccgcctctccacctttgaacttttccagtctcttctcccacagtgaccagctgcagaacagctttgggccggstgggcacgcgctactgaggcaaccaactctggcgccacggagggctaaggaccgaggtgcagccaaggcaagtggctctttcaaggcacaagagggcagggaagtgtgcgatgttgctgatcaacaaaaacagagtagcttggcgggccctctcaggccaacctcagaagcacgcttgcctgcaggtgtgtgtgttgtacacagacacagagcacacacacgtcctcacactccctggagacaatctcaacatgccagccagatgaaggggtatgtgaggggccacttctccctggagcagtctcagctctggccaagaaaacaccctctggttttcaagtagttcagaaacgcatcgggttttccaggaataagagcctgcgggtgatttgcaaggaaggccagaaatctcccagcaagccagctcctgtggcacgtccctggggccaggccgctccatgcggcttgctgctgcctaaggcagcagtattttcaccaagtcaatagacactctctgcattacaggcttccctccgaaagggacccagggaccttgggacagtccccctgacagccctgcaaccgcaggatccctgtgcacacacaggggctgggccagcagggcagcatgaaggagccctgtgcacacacaggggctgggccagccaggcagcgcgtgggacagggatgacagtagcccctctgatgtgaggctggaaggggctctcaggccaccactgcggagagatgctgacatagccgagacctctcct

SEQ ID NO: 87895 - DNA, 1324 bp, Homo sapiens
tttcccttttgctctttgcaaaaatgtgcagtcacctgctcctgggccactctgaacccgctgtcctgtcatccacagcaattttctccctggactctaggaatcagtcccagaaaagattccaaaggcctcatagtatccaagttttgagaagaaatgtctgcagagtcacgttacccacagaacgctctcttctacctccacacccaagcctaccatccccacggccccaccgccatgtgtccgatgccgagatctgggaagtctcctggactccagcactaacttctttctttcttttctcttttttttttttttttttgttgttgtttttgaaatgaggtctcactctgtcacccaggctggagtgcagtggtgtgatctcggctcactgcaacctccccatcctggttcaagggattctcctgcctcagcctcctgagtagctgggactacaggcgcatgccactgtgcctaatttttgcattttttgtagagacggggtttcattgtgttggccaggctgtccagcactaacttctgatgggtggccatgcccatcttcccaaaggctctcttccctactcccttcctcggatcctctcacctgacctacccaccacygggtgtcacctcccctgacctctccatcactgccctccagcccttggcatgaagttcctggactgagacactcacacacgtccacccatccgcctgtccacctgtccacccatccacccatccgggatctcacctttcctccctctccagctgcatttccccccacccacaaaccctcaaccggctgtgctcgggccccatgcagactgaaccacctgcagtgcccctcacactgcttcatacaactgcccttaggtgtcttcaattctcccccttgggaggctgtccccgccaccctgtcccccacgcgaactcctacacatctgccagagctccagcaagtctttctgccctttactggcaaattccagcaaatgcagggcccgcccctagtaggacagagcagtggttttcaacctgggtgattttactaccctccctccttcaccccagcgtaccctgggagatttggcaatgtctggagacacatgtggggctcacaagttggggtggcgtctggtgggtgggggccagggatattgctaaacgcccagccacgcccgacacaagcctcacatcaacaattcccctgccctatgtcaacagtgccatgttgggaagccccagcgcagagtgagcttcaggtgaaaagacgcagggtattcctgggacaaaaccatcttcacgtgcccagaagcac

SEQ ID NO: 87896 - DNA, 1324 bp, Homo sapiens
tttcccttttgctctttgcaaaaatgtgcagtcacctgctcctgggccactctgaacccgctgtcctgtcatccacagcaattttctccctggactctaggaatcagtcccagaaaagattccaaaggcctcatagtatccaagttttgagaagaaatgtctgcagagtcacgttacccacagaacgctctcttctacctccacacccaagcctaccatccccacggccccaccgccatgtgtccgatgccgagatctgggaagtctcctggactccagcactaacttctttctttcttttctcttttttttttttttttttgttgttgtttttgaaatgaggtctcactctgtcacccaggctggagtgcagtggtgtgatctcggctcactgcaacctccccatcctggttcaagggattctcctgcctcagcctcctgagtagctgggactacaggcgcatgccactgtgcctaatttttgcattttttgtagagacggggtttcattgtgttggccaggctgtccagcactaacttctgatgggtggccatgcccatcttcccaaaggctctcttccctactcccttcctcggatcctctcacctgacctacccaccaccgggtgtcacctcccctgacctctccatcactgccctccagcccttggcatgaagttcctggactgagacactcacacacgtccacccatccgcctgtccacctgtccacccatccacccatccgggatctcacctttcctccctctccagctgcatttccccccacccacaaaccctcaaccggctgtgctcgggccccatgcagactgaaccacctgcagtgcccctcacactgcttcatacaactgcccttaggtgtcttcaattctcccccttgggaggctgtccccrccaccctgtcccccacgcgaactcctacacatctgccagagctccagcaagtctttctgccctttactggcaaattccagcaaatgcagggcccgcccctagtaggacagagcagtggttttcaacctgggtgattttactaccctccctccttcaccccagcgtaccctgggagatttggcaatgtctggagacacatgtggggctcacaagttggggtggcgtctggtgggtgggggccagggatattgctaaacgcccagccacgcccgacacaagcctcacatcaacaattcccctgccctatgtcaacagtgccatgttgggaagccccagcgcagagtgagcttcaggtgaaaagacgcagggtattcctgggacaaaaccatcttcacgtgcccagaagcac

SEQ ID NO: 87897 - DNA, 1404 bp, Homo sapiens
gctcttaaagtttgctgacccttggttgagaccttaggaaatggtgaagaaacaggggtcaaatttctcccccacactcccccaagactctgtcctactggctcaggtgcttgcatcctggtgcactggagtggccagctgctccccaagcacagacaagtgctcagatcctgctgtctgcccagctcgtgcccaaccctacactcccagtctgcctgctctgcctcgtaaggtgcattccccatggcacagcctttcctggacccccgatgacacccccttccctttacaccccasaacctcatttccagcagctactatcctgttttagttatgcgcttgcctggcgatcgacttttaagcatgtatctgccaaagacatacatatccatgcatacgtgctactcacatgcttctgtatcgatagattacatacattatgaaacacacatcccaaaaatagaaatgaaactggatgagataaaaatagctaccaatttctgcccatactcagggggatcatcgtatgagtggccactgtggaggccgtgggcttagagggccatcctgggacccccggaagcgctgcaagtgggcactgggggttgtgctagtctcttccccacgaaacgacggcagatgcatctaagaatgaggaaccatcccagtgccctgccctgagcacctgcccctaagccaagacccccaggtgcaaggaggctggggttctcgggatccaggtgcctctccaatctggaagtctggaaaagggcagcaagcaggaaagaaggggttagggtccccgcctccacctaaaaaaggcgccagctgctcccttggcagcaaacaccctgctgcatccacggggatttttgtgttttgactcagaggcaataagcctttccgattaaaccaacacagactaaactgcaggaatgaggaaggcccctcagaagcagcgggcttaccatttctgctccgccagtgggagggaagacggctgatgatcaggctgctgtttttctctggaagcagctgaccaagggtggcttagcctcagtggcttctttctgggacggggcacaggagcctcagcaaggcctctggtcccccagcttcttggggctctcagactcacaccccatgtcccactcagagcaaaccaagccctcccccaccagtccaccagggagaacattcagccacatgcagacagtgactctggtggtctcgaggtgaacctcctgcctccctgttccctctggtcatgcctttggccactgtgcccaggcagtgtgaggtgactcctccgacaccacccactgacttttctgtggccccttcagagactccaagagcttccacggggcccagtctgagtggcccctgggtgtctccacctcc

SEQ ID NO: 87898 - DNA, 1404 bp, Homo sapiens
gctcttaaagtttgctgacccttggttgagaccttaggaaatggtgaagaaacaggggtcaaatttctcccccacactcccccaagactctgtcctactggctcaggtgcttgcatcctggtgcactggagtggccagctgctccccaagcacagacaagtgctcagatcctgctgtctgcccagctcgtgcccaaccctacactcccagtctgcctgctctgcctcgtaaggtgcattccccatggcacagcctttcctggacccccgatgacacccccttccctttacaccccagaacctcatttccagcagctactatcctgttttagttatgcrcttgcctggcgatcgacttttaagcatgtatctgccaaagacatacatatccatgcatacgtgctactcacatgcttctgtatcgatagattacatacattatgaaacacacatcccaaaaatagaaatgaaactggatgagataaaaatagctaccaatttctgcccatactcagggggatcatcgtatgagtggccactgtggaggccgtgggcttagagggccatcctgggacccccggaagcgctgcaagtgggcactgggggttgtgctagtctcttccccacgaaacgacggcagatgcatctaagaatgaggaaccatcccagtgccctgccctgagcacctgcccctaagccaagacccccaggtgcaaggaggctggggttctcgggatccaggtgcctctccaatctggaagtctggaaaagggcagcaagcaggaaagaaggggttagggtccccgcctccacctaaaaaaggcgccagctgctcccttggcagcaaacaccctgctgcatccacggggatttttgtgttttgactcagaggcaataagcctttccgattaaaccaacacagactaaactgcaggaatgaggaaggcccctcagaagcagcgggcttaccatttctgctccgccagtgggagggaagacggctgatgatcaggctgctgtttttctctggaagcagctgaccaagggtggcttagcctcagtggcttctttctgggacggggcacaggagcctcagcaaggcctctggtcccccagcttcttggggctctcagactcacaccccatgtcccactcagagcaaaccaagccctcccccaccagtccaccagggagaacattcagccacatgcagacagtgactctggtggtctcgaggtgaacctcctgcctccctgttccctctggtcatgcctttggccactgtgcccaggcagtgtgaggtgactcctccgacaccacccactgacttttctgtggccccttcagagactccaagagcttccacggggcccagtctgagtggcccctgggtgtctccacctcc

SEQ ID NO: 87899 - DNA, 602 bp, Homo sapiens
tgtgaacaaaaaacagctcaaatttatgtgtaaataaaatatattgagatgaagcctttcattcaatgtgtgattttcagttcaaaaaaacacactgatgttcaagaacaaagactggtacaataactatctacaaaatgcttttgttactagattttaattccttcatcaaacagacacagtcaaagttgatagtgtcactagatctagaggtctatcaatatccttcccaccatttaatatgttcttaatctcagggaaattctaaatcatattcttctaaattgtacagttgactcctgaaaaacacaaggtttagggccatcaaacctccctaacccctccccaccaccccagcacagtcaaaaattcacatataactttggactccccaaaactaaactaacagcctactgttgactggacaatccttaacacatatttcatacgctgtatgtattttacamcgtagttttacaatgaagctagttacagaaaagaaagtgttattaagaaaattatagggaagaaaaaatacgtttacagtactacagtatatttatttctctcataagtttacaatcctgtgtttacaagatgga

SEQ ID NO: 87900 - DNA, 619 bp, Homo sapiens
tgcgattccctgcccaatgtttccaagtcacttccagtacctatgcagttctgtcttttgggtccattattctgagagcaaactgtgtgctacggggtgactggtgggtgaggtgataggggtgatggaatttagtcacatggtctagaatagccaccaaaggctcctagtggttcaggayagagccagaggtggaaagaaaaggagataggggctgcatggcttggggagtggggctccactgatcttcttgcctcaggctctgcaaatattaagggcaggcctgcccttaggagtacaatcttcctgttcaatgagcacatgtgggaagtaaatggcaatgctgcaaaaactgctacttattccagtacagttacttgtgagttcctcatcctttgcacaattatgaattgtcagataacagtggcatttccaagatttatctctagcatctcattgcacttctgaacttcatactttgcaagtatgtacaatagatgcacccatgttcatggctattttaattatatgtaacataaccaagaagaaattttcaaaggcttctaaatagtcaatctgtcacagccatgcacttgcattaattcacaaaaaaatcatt

SEQ ID NO: 87901 - DNA, 697 bp, Homo sapiens
aaaaggcaaggaggagcaagtcacatcttacgtcgatggcagcaggcaaagagagagcttgtgcaaagaaactcccgtttttaaaaccatcagatcttgtgagatccattcattatcaccagaacagcacaggaaagacccccgcccataattcactcatctcccactgggtccctcccacaacacatgagaattatgggagctacaatatgagatttgagtggggacacagagccaaatcgtatcactgagtgtagaatatgtcaatggtatttgtttcattctgcatttattggctaagtgccaaccatttgcgaagcactgtgctgagaacttcaataccaaggacagcctccctgctgagaaggagctgacagtgttgagggctagggtggggatggggagaggacatgatatcaaaaattgactctaaagtactgacatatgtccctggaagggaataaggataaaggagggcactactgtatcaccactcagaatgttaccactgaggtaaatgctctaawacaggggcatagagataccactggaacacacagaggcacaggctagctttacttagagaaatctgggaaggcttcataatgcacataccacctgagggttgtaggaggcagagaaaggctattggggatgcagtctatgcagatggaatggcatgaggaaaacgctagga

SEQ ID NO: 87902 - DNA, 596 bp, Homo sapiens
tctttccttccatctccttaggttgtcaaaacagcttttgaaagccccttcttctcccatcattctcagcaaactaacgcaggaacagaaaaccaaacactgcatgttctcactcataagtgggagttgaacaatgagaacacatggacacagggagaggaacatcacacaccagggcctgagggggcaagaggacggagagcattaggacaaatacctaatgcatgcagggcttaagacctagatgacgggttgatargtgcagcaaaccaccatggcacatgtatatctatgcaacaaaccttcatgttctgcacatgtatcccagaacttaaaataaaatcgaaagagaaaaccccttcttctgtccagctgcactcctccacagccccaagttgcctttctgaaactttctcctctccccagctcccttctcctgctttccccagattacttccctgccctttctaaggtgaaagcaattccacctgtctcatctcccatcgatgttcttttcacccattacccagatgcacacaacagaggctgaaaaaccaagaagttctaacaaaaaaccttcctgagagattagggca

SEQ ID NO: 87903 - DNA, 792 bp, Homo sapiens
tgcatgccaagtttaatacctaggtgatggtttaataggtgcagcaaaccgccatggcacacgtttacctatgtaacaaacctgcacattctgcacaygtaccctggaacttaaaaaatttaagaaataaaatacaagtatttttctctctcattcttgtttcacaaagggagaaagtaactctttcttacctcactgggataaagcttaactaagaaggaaacttcactcttctttcctcttcttgctggatggatagacttgtctagttgatgggattggaaaaaggctgaagtctacttgctgaattcttttcccctagtctttcaggcttatctgttcatccatgctttacatttatttgggcatattctctgcaaaccaagaggactacatttggggaagaggcgggtgaagtttcgagggggagggaaaattaacaagcttatttgaccacacatctaagctgcgttttgctttccatctgatttttgtgtctgaatttctcagttggttctgaccacagactggaaagagggctcctattaactgactccctcaaactgaccacattcaattgtagtcactcttctcaaggtcatctgtgacttcccaactgccacttcccaatggctcttttcagtcttcaccttgcctgatatctcagcagcgtttgacagtcatgaccatctccttccatgttgaaatttctctcttctgtgtctttgctttcctggcccattctctccttggcatcttgtatctgctctgcctcctcctcctttctttaaa

SEQ ID NO: 87904 - DNA, 792 bp, Homo sapiens
tgcatgccaagtttaatacctaggtgatggtttaataggtgcagcaaaccgccatggcacacgtttacctatgtaacaaacctgcacattctgcacatgtaccctggaacttaaaaaatttaagaaataaaatacaagtatttttctctctcattyttgtttcacaaagggagaaagtaactctttcttacctcactgggataaagcttaactaagaaggaaacttcactcttctttcctcttcttgctggatggatagacttgtctagttgatgggattggaaaaaggctgaagtctacttgctgaattcttttcccctagtctttcaggcttatctgttcatccatgctttacatttatttgggcatattctctgcaaaccaagaggactacatttggggaagaggcgggtgaagtttcgagggggagggaaaattaacaagcttatttgaccacacatctaagctgcgttttgctttccatctgatttttgtgtctgaatttctcagttggttctgaccacagactggaaagagggctcctattaactgactccctcaaactgaccacattcaattgtagtcactcttctcaaggtcatctgtgacttcccaactgccacttcccaatggctcttttcagtcttcaccttgcctgatatctcagcagcgtttgacagtcatgaccatctccttccatgttgaaatttctctcttctgtgtctttgctttcctggcccattctctccttggcatcttgtatctgctctgcctcctcctcctttctttaaa

SEQ ID NO: 87905 - DNA, 792 bp, Homo sapiens
tgcatgccaagtttaatacctaggtgatggtttaataggtgcagcaaaccgccatggcacacgtttacctatgtaacaaacctgcacattctgcacatgtaccctggaacttaaaaaatttaagaaataaaatacaagtatttttctctctcattcttgtttcacaaagggagaaagtaactctttcttacctcrctgggataaagcttaactaagaaggaaacttcactcttctttcctcttcttgctggatggatagacttgtctagttgatgggattggaaaaaggctgaagtctacttgctgaattcttttcccctagtctttcaggcttatctgttcatccatgctttacatttatttgggcatattctctgcaaaccaagaggactacatttggggaagaggcgggtgaagtttcgagggggagggaaaattaacaagcttatttgaccacacatctaagctgcgttttgctttccatctgatttttgtgtctgaatttctcagttggttctgaccacagactggaaagagggctcctattaactgactccctcaaactgaccacattcaattgtagtcactcttctcaaggtcatctgtgacttcccaactgccacttcccaatggctcttttcagtcttcaccttgcctgatatctcagcagcgtttgacagtcatgaccatctccttccatgttgaaatttctctcttctgtgtctttgctttcctggcccattctctccttggcatcttgtatctgctctgcctcctcctcctttctttaaa

SEQ ID NO: 87906 - DNA, 792 bp, Homo sapiens
tgcatgccaagtttaatacctaggtgatggtttaataggtgcagcaaaccgccatggcacacgtttacctatgtaacaaacctgcacattctgcacatgtaccctggaacttaaaaaatttaagaaataaaatacaagtatttttctctctcattcttgtttcacaaagggagaaagtaactctttcttacctcactgggataaagcttaactargaaggaaacttcactcttctttcctcttcttgctggatggatagacttgtctagttgatgggattggaaaaaggctgaagtctacttgctgaattcttttcccctagtctttcaggcttatctgttcatccatgctttacatttatttgggcatattctctgcaaaccaagaggactacatttggggaagaggcgggtgaagtttcgagggggagggaaaattaacaagcttatttgaccacacatctaagctgcgttttgctttccatctgatttttgtgtctgaatttctcagttggttctgaccacagactggaaagagggctcctattaactgactccctcaaactgaccacattcaattgtagtcactcttctcaaggtcatctgtgacttcccaactgccacttcccaatggctcttttcagtcttcaccttgcctgatatctcagcagcgtttgacagtcatgaccatctccttccatgttgaaatttctctcttctgtgtctttgctttcctggcccattctctccttggcatcttgtatctgctctgcctcctcctcctttctttaaa

SEQ ID NO: 87907 - DNA, 792 bp, Homo sapiens
tgcatgccaagtttaatacctaggtgatggtttaataggtgcagcaaaccgccatggcacacgtttacctatgtaacaaacctgcacattctgcacatgtaccctggaacttaaaaaatttaagaaataaaatacaagtatttttctctctcattcttgtttcacaaagggagaaagtaactctttcttacctcactgggataaagcttaactaagaaggaaacttcactcttctttcctcttcttkctggatggatagacttgtctagttgatgggattggaaaaaggctgaagtctacttgctgaattcttttcccctagtctttcaggcttatctgttcatccatgctttacatttatttgggcatattctctgcaaaccaagaggactacatttggggaagaggcgggtgaagtttcgagggggagggaaaattaacaagcttatttgaccacacatctaagctgcgttttgctttccatctgatttttgtgtctgaatttctcagttggttctgaccacagactggaaagagggctcctattaactgactccctcaaactgaccacattcaattgtagtcactcttctcaaggtcatctgtgacttcccaactgccacttcccaatggctcttttcagtcttcaccttgcctgatatctcagcagcgtttgacagtcatgaccatctccttccatgttgaaatttctctcttctgtgtctttgctttcctggcccattctctccttggcatcttgtatctgctctgcctcctcctcctttctttaaa

SEQ ID NO: 87908 - DNA, 595 bp, Homo sapiens
tccgcccaccttggcctcccaaagtgctaggattacaggcgtgagccactgcacctggcctaattttcaatgtttaatggttttatagagactgggtcttgaactcctggcctcaagcaatcttcctgcctctgccttccaaagtgttgggattacagatgtgatcagcatgcctggcctattctttctaacaaggctcaaagattccacctaaatgtgtccrctttcccctccactgccctggttcagtctgacttaacttctggacaattataatggtttcccaggcccccagcctcacctttccccctgcccacaggctaatgaagaaagaatgcttttctcaatgaccagctccacccctttgaactcaactcagcaaacagctactcctattctcccttcaaggaccaaatcagatatcaccttttggttccttctttttttttttgagacagagtctcgctctgtcgcccaggctggagtgcagtggcgtgatctcggcttactgagagctccacctcccgggttcatgccattctcctgcctcagcctctggagtagctgagactacaggcgccggtcaccgtgcccg

SEQ ID NO: 87909 - DNA, 532 bp, Homo sapiens
ctgggttttctcagggaagctgcaacaagagggaggaaaaggggagaggaggaaccaagaggcctgagtggcagagctgcagtgactcatcaggtctcaggcctgcccttggtaaacctggatggggtgacttcaaagttaattacactacgtgctttcaagatgctgggatgaaagtccttgggaggcataattacttgagaagacattcttcaagggccgtggaggagcccaggttactatctgtaggcatcctttgccccaggtgggcctttcttttgtttgtttttgagatggagtcttgctctgtcacccaggctggagttcagtggcgtaatctcagctgactgcaacctctgcctcctgggttcgaacaattctcctgtctcagccttccaagtagctggaactacrggcgtgtgccaccacgccccgcctaatttttgtatttttagtagagacggggtttcaccatgttgaccaggctggcctctaactcctgacctcaggtgatctgcccgccacggcctcc

SEQ ID NO: 87910 - DNA, 711 bp, Homo sapiens
catcacagagtatgtggctgctgtattggactgactgactgaggctggactctagaggtgctagaatggccaaaggaggccagtggggaaggctctggtcccatcccaacaggtgatggtggtagccaggagcacctgctgtggggaagccaggagacagtgcctccccagacagctgccttcccccaaccccaggctgggtcagagactgtcttgtacccatccctcccagcccctgggcgagcctcgtcccagcccagagcacagtgaaacataattgcctggctctgtactggaatggggagcggtctgagttccggatgacaggtgggtctcatcccttgatgagctcaccctctcagccccaacccaaggtccatctgtgtgtgggaacccctccccacatttgagtctccccagctcaacctcsgacccagtacccacccactgcccaccccctgcccacagggcatcagtgccttttgcgtccacagaggggagtgagattagctgatgagtttaacggacaagctcagggtccgttgcctggtttctagattccaccttaatttcttgcttctgaatatttttcaaattctattttaactttaagaatattcttcccataaacagactctttacaaaagtggaaatgtatctggttaacaaacatatggggaaaagctcagctttgtgggaatcagagaaaaa

SEQ ID NO: 87911 - DNA, 711 bp, Homo sapiens
catcacagagtatgtggctgctgtattggactgactgactgaggctggactctagaggtgctagaatggccaaaggaggccagtggggaaggctctggtcccatcccaacaggtgatggtggtagccaggagcacctgctgtggggaagccaggagacagtgcctccccagacagctgccttcccccaaccccaggctgggtcagagactgtcttgtacccatccctcccagcccctgggcgagcctcgtcccagcccagagcacagtgaaacataattgcctggctctgtactggaatggggagcggtctgagttccggatgacaggtgggtctcatcccttgatgagctcaccctctcagccccaacccaaggtccatctgtgtgtgggaacccctccccacatttgagtctccccagctcaacctccgacccagtacccacccactgcccaccccctgcccacagggcatcagtgccttttgcgtccacagaggggagtgagattagcygatgagtttaacggacaagctcagggtccgttgcctggtttctagattccaccttaatttcttgcttctgaatatttttcaaattctattttaactttaagaatattcttcccataaacagactctttacaaaagtggaaatgtatctggttaacaaacatatggggaaaagctcagctttgtgggaatcagagaaaaa

SEQ ID NO: 87912 - DNA, 628 bp, Homo sapiens
caggaggctgatagatgtcctaggtttgtcctggtggcacctagtcaaaaagatgtcttttcattgttgttttaagcgtcctttcagagtatctagtattgttaacggttctggctctggatggaatgctggctctgccaggttctctgcggggatcttgggcaagttttctyatctgtaaaatgagggaagtgatagtattacctcaaggggttgttgtgaagataaattagatagtacatgcacagtgattgtttttataactggcatatagaaaatattcaatacatttcaggtttttttgtttgtttgttttgttattaccattatgactttgtttaatcagcaagcattaagtattctcacgggtcagggatgctggtgggaatgaagagctgaatacaagtcatgctgctctccaagagtatgcagtctggtaggaaagacagacttataaacagatgatcttagtataatgtaacgggtaccacagtggaaacgtgtcaagaatgcagacatgagggtagtaattaactgccttgagaagtcaggcaagcaggcttggagaagagctggcattagagctagatcttaggacgagttggaatcctcagggaaggaatgggca

SEQ ID NO: 87913 - DNA, 1070 bp, Homo sapiens
gcataccaccacacccagctaatttttgtattttttgtagagacaggttttcactgtgttgcctaggctggtctcaaactcctggtgtcaagggatccactgatctcggcctcccaaagtgctgggattacagaaatgagccaccacgtctggccttgggcttacctttcaagtcaactttgattcattgtcttccttcaaacaccacattcagtgattagtcaaataatgaacattattcttgcacaagtcttttgaatctatcaattactttctactcatttagtacatattcactggggagatgctctgtgccagacactgtagtaagatcaggtaattcagaggaagtacagacaccccagacctcaaacgaagacaagataaatatggacaagggaagatccacctccagattcaccattttcagtctttctgtcatttccagctaaataacgccttcaaaaatgtttcaaaataactaagtcactatttcaaactctttcaataatagcacccttctatatgctggactactcttaattttctgattataacatgatcttgcttttcttttaatttttgtctttgctttctacctgaatttttattttgcattatgaaattgataggtccattactggatggcatggttcaattctccagtatgtctgttgatttgtgttctactaaatcttccaattactgagagaggagtgttaatgactgcaactataactggatttttctattttaacttggcgtatccaattttgtttatgagttttgaagctctgtgtcctcatatacatttgggacaatattctcctgaaaaattgacaatcataattatttaggaggcctcattattcctgaaaagtttctctgctttcaaatctactttgtctgattttatatatatacaccacagctgtctttgattaatgcttgcatgaggtatcttttcccactcttttctttcaagctgctatataacttttattcttatttataagtgtattgyaggtggctttctttagtcagcatatttatttttaacacattctgat

SEQ ID NO: 87914 - DNA, 624 bp, Homo sapiens
tcaattatgagaacagttaacctcatgctgttctcgtgatagtgagtgagttctcacaagatttatggttttataaggggctttccccgcttttgctcagcactgctctctcctaccatcatgtgaggaaggacatgtttgcttccccttccactatgatcctgaggcctccccagccatatggaactgtgagtcaattaaacctctttcctttataaattastcagtctcaggtatttcttcatagcagtgtaaggacagactaatacagtctgtatgagaagtgcagtgtttgttatagacagaatgaaaagagaaagaataaggtaatggtcaacttttaacatgcaaaatgggatttttcagtaggtcttgagatccaagatgacactattttaagttatagaggggataatctgaacagagtccacatgggaggtccattttggaacttaaaggtgtctacaccaccagtgccaactgacatgaggctgaatcacccagggaatactaccaggctctgacctagtcaagagaaaacaaactacaacctaaacctgtcattgacttcaggtgtgatgtgatgtgataccaagataatgatgtgatacctacactcagtgt

SEQ ID NO: 87915 - DNA, 624 bp, Homo sapiens
tcaattatgagaacagttaacctcatgctgttctcgtgatagtgagtgagttctcacaagatttatggttttataaggggctttccccgcttttgctcagcactgctctctcctaccatcatgtgaggaaggacatgtttgcttccccttccactatgatcctgaggcctccccagccatatggaactgtgagtcaattaaacctctttcctttataaattagtcagtctcaggtatttcttcatagcagtgtaaggacagactaatacagtctgtatgagaagtgcagtgtttgttatagacagaatgaaaagagaaagaataaggtaatggtcaacttttaacatgcaaaatgggatttttcagtaggtcttgagatccaagaygacactattttaagttatagaggggataatctgaacagagtccacatgggaggtccattttggaacttaaaggtgtctacaccaccagtgccaactgacatgaggctgaatcacccagggaatactaccaggctctgacctagtcaagagaaaacaaactacaacctaaacctgtcattgacttcaggtgtgatgtgatgtgataccaagataatgatgtgatacctacactcagtgt

SEQ ID NO: 87916 - DNA, 624 bp, Homo sapiens
tcaattatgagaacagttaacctcatgctgttctcgtgatagtgagtgagttctcacaagatttatggttttataaggggctttccccgcttttgctcagcactgctctctcctaccatcatgtgaggaaggacatgtttgcttccccttccactatgatcctgaggcctccccagccatatggaactgtgagtcaattaaacctctttcctttataaattagtcagtctcaggtatttcttcatagcagtgtaaggacagactaatacagtctgtatgagaagtgcagtgtttgttatagacagaatgaaaagagaaagaataaggtaatggtcaacttttaacatgcaaaatgggatttttcagtaggtcttgagatccaagatgacactattttaagttatagaggggataatctgaacagagtccacatgggaggtccattttggaacttaaagktgtctacaccaccagtgccaactgacatgaggctgaatcacccagggaatactaccaggctctgacctagtcaagagaaaacaaactacaacctaaacctgtcattgacttcaggtgtgatgtgatgtgataccaagataatgatgtgatacctacactcagtgt

SEQ ID NO: 87917 - DNA, 624 bp, Homo sapiens
tcaattatgagaacagttaacctcatgctgttctcgtgatagtgagtgagttctcacaagatttatggttttataaggggctttccccgcttttgctcagcactgctctctcctaccatcatgtgaggaaggacatgtttgcttccccttccactatgatcctgaggcctccccagccatatggaactgtgagtcaattaaacctctttcctttataaattagtcagtctcaggtatttcttcatagcagtgtaaggacagactaatacagtctgtatgagaagtgcagtgtttgttatagacagaatgaaaagagaaagaataaggtaatggtcaacttttaacatgcaaaatgggatttttcagtaggtcttgagatccaagatgacactattttaagttatagaggggataatctgaacagagtccacatgggaggtccattttggaacttaaaggtgtctacaccaccagtgccaactgacatgaggctgaatcacccagggaatactaccaggctctgacctagtcaagagaaaacaaactacaacctaaacctgtcattgacttcrggtgtgatgtgatgtgataccaagataatgatgtgatacctacactcagtgt

SEQ ID NO: 87918 - DNA, 2247 bp, Homo sapiens
tatgcctatcttttccaactctgcaatgtaaacagaacgactcacaagattatcattaaagcgaaattctgagcatccccctaaaataaaaaaataaaccctgttaaaaaatatataaataccagatatacctcaaaatccaccgaaagtttaataaaattatttttcttattgaaatggccagttatataataatatacatgggaataaatgcatttaatgagtcaacaaatattgagtgtctattacatgtcaaggtctcttttacagtggcgaacaaaacacatgaaagtctcttatctgaagagcatatatcctagtcaggatgtaaaaggaaaataaatctcagaacccctaactcactaagccaaagggaaaagtcaacctgggaactaggtcatgcaaacttgcctcctattttgttactaaataaggtagctgtaaagattgaaaaacaacaacagcaacaaaaactgcatgcctccctcacaatttacccacagggaaattccttgtgggccccaagatctttaccctaaaacagttctgttgaattttaacctgacaatataaattgatagcttatcttcacatgtacaggacaaaggacagaactcagtcatccctctgctcacctgagataaatgtatatctgattgtctcctctgcactatctttatctttttttttttctgagacagggtcttgctctgttgaccaggttggagtgcagtggcgcaatcttggctcactgtatcctagacctcccggactcaagtcatcttcccacctcagcctcctaagtactgggactatagactcacgctaccacacacagctaattgtagagacaaggtctcaccacgtttcccaggctggtctcaaactcccgagttcaagcaatcgtcctgctgtggcctcccaaagtgctgggattacaggcatgagccccatgcccagcctatattatcttatataaaaatgcagattcactgagctagcctaatgcagaagtgactatgcctctacccctgtcacatgtgaacaattgatcaaaggctcaaaagaatgcaaccactggtctcttttctatccacacctttaaaaaaaatttcttcctctttcccaaatccccgctcttttcccgtaaatgtatatatacacacacacacaaattcaaacatttcactcaagttgctttttggtggtagaaaaaactgtctataataaagccaaaaatatgcatacaatttgttcatcactaagaaaaactgataaacataaagaacctcaagaataaattttatgatttctctgtcttcaaggtactccttccttcatcttattattatttttttgagacggagtcttgatctgtcgcctaggctggagggcagtggcgtgatctcggctcactgcaagctctgcctcccgggttcatgccattctcctgcctcagcctcccgagtagctgggactacaggtgcctgccacctcgcccagctaattttttgtatttttagtagagacggggtttcatcgtgttagccaggatggtctcaatcacctgacctcgtgatccgcccgcctcggcctcccaaagtgctgggattacaggcgtgagccaccatacccgaccctccctccttcatcttaactaaatatccagattttaaaatgttatttgacagtagggggatttgaacaattatgtcagttaaggaaaagcagacataattggagaaatwtgtggcgaatcaaacaggttctgttacttgcttctgagatatgctatgcaagagaaaaaagaactctagttcattacaccagtagaataataaaccataccctccaaagaaagaaaaaatgggcaatcttacttgactcttgaaaaataaaatgaaaaaaaattataaaaaaatacctcggataatccttgcaaatgttttctcttcgccactttcctccacatatataatttttacacttgcagaagaagaaataggttttccaatatgtgctccatgaatgagttcttgaatatttttcactcttaaattagctattttctctcccattacaaaactaagtgcatccattacattagattttcctggggaagaaaagagataaaacattattcattcttaatgataaaaagccctacccagagctgaagaaatcaggccaccaatcgaagtgaaatatagccaaaagacatgtcctttttaatcaatgttcaaaatg

SEQ ID NO: 87919 - DNA, 2995 bp, Homo sapiens
ctgctcattcatttatggaagcgatggtgatgatgatgatgataattcactcattcattcatcaattcaaccaatgtttattgagcccttcctgctgggcattggagtggcttttgctaaaccctattgtctcattcatcaatttattcattcatatattctagaagatgtttaatgggcatccacagcctgcctggttttctcagacccccggctcctcacgtggatgccacgaggcagcaccattgcaaacactcctgcactgggaaaagccgccctctggcttctgcagctctgctactaactacaactaggctttttaattaacctgggatgttaatccaaagcccaagcaggccggtccagttcaacaggaaggacacacgtgagggcctccagttcttgggtcggggctcatttcgtcagagaggcattgtggcatcagggtgtggcacgcaggctctggagcccgaccacacggggtgcagaccaggctctgccctgcagccttgggcaggccacccactgcgtccatttgatcatctgcagaatgaggaagcgacaacaccctcctgtgtcggtcagaatgtgctaacccttgctgggataagaagcagcagtctcagtggcttaaacagaaagttgatgttccatgcatgctccctgcccgccatggacaggctgtgaggcctgttccttggcatcctcactttggagcccaggtcctgggatggagcgaccgccagccagaggatccctgcaggaggagggaaggaatgtggctagtccccgcaggcttcctcccaggagcagtactgccacctctgctcacatttcttttttcttttttttttttttttttgaggtggagtcttgttctcttgcccagcctggagtgtgtagtggcgcgatcttggctcactacaagctctgcctcccgggttcacaccattctcctgcctcagcctcccaagtagctgggattacaggcctctaccaccacgcccagctaatttttctatttttagtaaagatggggtttcaccatgttggccaggctggtcttgaactcctgaccttgtgatttgcccactttggcctcccaaagtaagaacagtgttgaatcacttgaacctgggaggcagaggttgcagtgagccgagattgtgccactgcactccagcctgggtgacagagcgagactcygtctcaaaaaaacaaacaaacaaacaaacaaaaaaaaacgggtgtaggggcttggaaggatgagctgacttccttagggagtactcagtggcaagtccggtattgaagttgggcctgtctaactacaaagcttgtactgtgtgactcaatcaagctggcctctggtgagcacatgtgggaggccggctccttgcaaactgccctgtccatgtgttactgaggacaactgtaaacccaagtacatgtctcctaagccatctcctgactttacagagaaatgactgcagcccagagaggggaggtgacttggtataggccacatagccagggaacccccagggaatcaaacagaaatgagacctggaattactttgtactgggggctgcagctcaggaccactgaagtgacagtgcattttctaccactgttgtcaatcactctgttgagcgttctttgcagcccacagatgtccaagggttgccaggggcatagagccctgccttgggtgggaccaggcccacgcggggtgtcggcctaatccaaggagggagttccctgccttggtaagttggtgcaagacccggagctcttatgcatacacccaacaggtggtgatcccccgagtccagcccacccgcccagcagtgcgcaggcagccaggggttcaaggacccacccacatccgtgcctgacaagtctcccctccacccgactcctgctgcccttagcatatcctcccctcgagggcccccagtgagatttgctggcctgggtgtcagaatgcccctggggtcactcggaccatcttctttaatgtcttcacctgcttaggccatcgagtcagtggaaaggaaaaagcaagagaaaaagcaagaacaagaggacaacttggccgagatcaccaacctcctgcgtggggacctgctctccgagaacccgcagcaggcagccagctccttcgggccccaccgcgtggtccctgaccgctggaagggcatgacccaggagcagctggagcagatccgcctagtccagaagcagcaaatccaggagaagctggtgactgccccgcccctttttccagagcccatagagccaggctctttgctcccactgccttccaggcacaaatgtagttgtagcaggccttgtgctctgccctagcacctgccctcaaggagtttcccttctagtcggtgggagacaagagccagatagtgtcacacccgtatgatgtggcattaggagtaggagtgccaagatagaggacagtagaatgggaagacattgaagcaaagacccaaaagagggtagggagggagccatgtgtctacctgggaaaagggcgaccgggcagggtgagctgcaagggcaaaggccttgaggcaggaccctgccagacctgctcagagaagggcgtggagcctggtgactagagtggagtgaggagaggggcaggtacggaggcctcagaggcagacggtcgaggtcctggcagtccactggggaggactttggcttcttctgtgacggagacggggaactctgcagggttttggacagagaagtgacaggatctgacttaggttgaacaggatccccagcgtgatccccctggattgagggcagacactaggggctgagggggaaggaaggagatctccaggaaggcctttgcagtgttcacagcgagaggtgatgctggctgggaccacggggcaggcagtgggggtgctgagcaatggtcagattctggatctgttttgaaggtagagtcgacaggattgg

SEQ ID NO: 87920 - DNA, 1159 bp, Homo sapiens
aataaatgacaaggaaaaaaagtcatgttcagtacagacacaaccatccttttttttttttttttttttttttcccccaagacagagttttgctttgtcacccaggctggagtgcagtggcataatctcggctcactgcaacttctgcctcctgggttcaagcaattcttgtgcctcagcctcctgagtagctgggactacaggtgcatgccaccatgcccagctgattttttgtattttagtacagacgggctttcaccatgctgcccaggctggtcttaaactcctagactcaggcaatccatccgcctcggactcccaaagtggtaggattacaggtgtgagccaccgtgcctggccgcaaccatcctttttcttttccgagtatttttcatccgtggttggttgaatgcacggatgtgaaacccactgataaggagggccgactgtatactcacatctactgacctggggtctgcctgcctcccagagtccaggtgggctctgttctgctggtctaacttacccattcatccagatttcattgagaggggctttgtttttgtgtgtgtgtgggtgtgtgtgtgtgtgtgtgtgtgtgtgtgtgtgtgtttragacagagtctcgctctgttgcccaggctggagtgcagtggggcgatcttggctcactgcaagctccacttcctgggtttacgccattctcctgcctcagcctcctgagtagctaggattacaggcacccaccaccacgcctggctgattttttgtatttttagtagagatggggtttcaccgtgttagccaggatggtctctatctcttgagcttgtgatccgcccacctcggccttccaaagtgctgggattacaggcgtgagccactgcactcggcctgttttaaaaatactgtaatcccggctactcagaaggctgagggaggagaatcacttgaacccaggaggcggaggttgcaatgagccaaggttgtgccatcgcactccagctggggaaacgagcgaaactctgtctcaaaaaaaataaataaataaataaataaaaataaaataaaatactgagccagttttagtagatagcagaaggaggtattatgttgctcgatctgcataatttttaaaactggctttggaattttccta

SEQ ID NO: 87921 - DNA, 1159 bp, Homo sapiens
aataaatgacaaggaaaaaaagtcatgttcagtacagacacaaccatccttttttttttttttttttttttttcccccaagacagagttttgctttgtcacccaggctggagtgcagtggcataatctcggctcactgcaacttctgcctcctgggttcaagcaattcttgtgcctcagcctcctgagtagctgggactacaggtgcatgccaccatgcccagctgattttttgtattttagtacagacgggctttcaccatgctgcccaggctggtcttaaactcctagactcaggcaatccatccgcctcggactcccaaagtggtaggattacaggtgtgagccaccgtgcctggccgcaaccatcctttttcttttccgagtatttttcatccgtggttggttgaatgcacggatgtgaaacccactgataaggagggccgactgtatactcacatctactgacctggggtctgcctgcctcccagagtccaggtgggctctgttctgctggtctaacttacccattcatccagatttcattgagaggggctttgtttttgtgtgtgtgtgggtgtgtgtgtgtgtgtgtgtgtgtgtgtgtgtgtgtttgagacagagtctcgctctgttgcccaggctggagtgcagtggggcgatcttggctcactgcaagctccacttcctgggtttacgccattctcctgcctcagcctcctgagtagctaggattacaggcacccaccaccacgcctggctgattttttgtatttttagtagagatggggtttcaccgtgttagccaggatggtctctatctcttgagcttgtgatccgcccacctcggcsttccaaagtgctgggattacaggcgtgagccactgcactcggcctgttttaaaaatactgtaatcccggctactcagaaggctgagggaggagaatcacttgaacccaggaggcggaggttgcaatgagccaaggttgtgccatcgcactccagctggggaaacgagcgaaactctgtctcaaaaaaaataaataaataaataaataaaaataaaataaaatactgagccagttttagtagatagcagaaggaggtattatgttgctcgatctgcataatttttaaaactggctttggaattttccta

SEQ ID NO: 87922 - DNA, 1159 bp, Homo sapiens
aataaatgacaaggaaaaaaagtcatgttcagtacagacacaaccatccttttttttttttttttttttttttcccccaagacagagttttgctttgtcacccaggctggagtgcagtggcataatctcggctcactgcaacttctgcctcctgggttcaagcaattcttgtgcctcagcctcctgagtagctgggactacaggtgcatgccaccatgcccagctgattttttgtattttagtacagacgggctttcaccatgctgcccaggctggtcttaaactcctagactcaggcaatccatccgcctcggactcccaaagtggtaggattacaggtgtgagccaccgtgcctggccgcaaccatcctttttcttttccgagtatttttcatccgtggttggttgaatgcacggatgtgaaacccactgataaggagggccgactgtatactcacatctactgacctggggtctgcctgcctcccagagtccaggtgggctctgttctgctggtctaacttacccattcatccagatttcattgagaggggctttgtttttgtgtgtgtgtgggtgtgtgtgtgtgtgtgtgtgtgtgtgtgtgtgtgtttgagacagagtctcgctctgttgcccaggctggagtgcagtggggcgatcttggctcactgcaagctccacttcctgggtttacgccattctcctgcctcagcctcctgagtagctaggattacaggcacccaccaccacgcctggctgattttttgtatttttagtagagatggggtttcaccgtgttagccaggatggtctctatctcttgagcttgtgatccgcccacctcggccttccaaagtgctgggattacaggcgtgagccactgcactcggcctgttttaaaaatactgtaatcccggctactcagaaggctgagggaggagaatcacttgaacccaggaggcggaggttgcaatgagccaaggttgtgccatcgcactccagctggggaaacgagcgaaactctgtctcaaaawaaataaataaataaataaataaaaataaaataaaatactgagccagttttagtagatagcagaaggaggtattatgttgctcgatctgcataatttttaaaactggctttggaattttccta

SEQ ID NO: 87923 - DNA, 569 bp, Homo sapiens
atatagataattcagtttattgacaaagatatatatgagatataatttctgactctggctttagatgtttaggttttggacttttcaaatgagtataatccttagtggtttcaaatttaacttgaggaaccaatgattacaactaamaatatactgctagtctacaaacccagtctagttaaggatgccataacaaagtgccacagaccgagtggctaaacaaatttattttcttagagttctggaggctagcattccaaaatcagaagtcagcagggttgcttccttctgaagcctctttctttgacttgtagatggctgacatctccctgtgtcttcacatggttttctctctgttctctttgtctaaatttctttctttttttttttttttgagatggagtctgtctcttgttgcccaggctcgagtgcaacggcgcaatctcggctcactgcaacctccccctgctaggttcaaacgatttctcctgcctcagcctcccgagtagctaggattataggcatgcacctccacgcccagctaattttgtattttttttttttttttt

SEQ ID NO: 87924 - DNA, 602 bp, Homo sapiens
gcattgtgttgaatgttgagtttatttcagtgtaaactgaatgctttagcgtaaactcagcattcaacacaatgtctggcattaaatgatttgcatagtattatgtaaaatgttcttgtacattgtagcagtgaggatatctgatataattttgacatcagcattatatatgtaattacatttctatttttaagtattaaggaatggaaatattttaatcttaatatacttaggaactctgggatcttccccaacctccccacttcccccaatagctgctgctggagatggaatcctatctgagggttaataataatgccatcacccattcccttcccccagccttatgctagagcctagtttgcctgcagctgcagtgctaggcatctttcagraagtgaccttggcttgtattaatcaaattcagaacacacaaaaaagcttcttgctaacatgctgacttgatgtaaaattttatcgcatccattttgtttcaaaatgaggccattttgtaaaaagaagatatacagaagacccctaatttattatatatctatatatacgtatatgtaaagcttttgcaaaccatgttgaaaaaacaa

SEQ ID NO: 87925 - DNA, 1241 bp, Homo sapiens
tgaatttgtgttgtgttcttgcattccatattctaaggtgaagaggtttttgtctttccttgctgagggaggcttgtgttgtaagattaaaagcacaagttgcctgaatagggatctcttccctggttttgtttatctcaaaacctaggcttagtgccagagtgtggatgtttatgtgtgtgtgtcggggagggggtaatgcaaagtggggagggagggagggaaagaccattgatggggagaaagtagaatcaaacagagagagaaagagagagggagagagcgagatcatgaagaccaaacttgcagtttggttttgaggagaagggaatttctggaaacagcaggaaaccagagcagatgactattaaggggttttaagggggttggrccccaggcattggggcttccggtctgggcattgactgcacatctgagcccaacctcacggaggcaacattggtatcagccaacaggatgccgagagggcttggacaacagctctaacaaaggcaacagtgtggacctacactcattggacatacccaaagctgggtgtatgtgtaagacccttgagaccttcacaggatcctgtggggcaagaagggaaccccaaatatgaatttcctgccaggtcagtaagctgagacttgggataggtttatagcaaatgcaattattgtgacatgtcttgcctttctgagattaaggcataaaattgacacccgctatcatttttccagtatttagcaccctctatctggtattgtctccatgacctacaccctgtcctccccaacttcctgctttcctcatatcccaccgcctgatcaataaccttttgtttgccttttgtgtactgaggataggacccaccttctaatcatctactatggggtcttagtacctagtttgtgctcgtcggttgaaatcgactacgttgcactgaactgtatcccaccctaccatgctagcaccatactttgtgtctggttggtattcaacaaatgtttgcagagtggagaaaggcatgtggagtattccaaggtgaccactttagaggagacaagatgaacctgaacgtgtaagttcaggcatgtttgttcagaagcacgttagtgacctggtttaatcacaggagactggcaaggaaggagcctgtgcatctgtgaaatgagccattttctgccaacccttgcacgggcactggtgttgcttgatcaattaaccccacgcccttg

SEQ ID NO: 87926 - DNA, 1241 bp, Homo sapiens
tgaatttgtgttgtgttcttgcattccatattctaaggtgaagaggtttttgtctttccttgctgagggaggcttgtgttgtaagattaaaagcacaagttgcctgaatagggatctcttccctggttttgtttatctcaaaacctaggcttagtgccagagtgtggatgtttatgtgtgtgtgtcggggagggggtaatgcaaagtggggagggagggagggaaagaccattgatggggagaaagtagaatcaaacagagagagaaagagagagggagagagcgagatcatgaagaccaaacttgcagtttggttttgaggagaagggaatttctggaaacagcaggaaaccagagcagatgactattaaggggttttaagggggttggaccccaggcattggggcttccggtctgggcattractgcacatctgagcccaacctcacggaggcaacattggtatcagccaacaggatgccgagagggcttggacaacagctctaacaaaggcaacagtgtggacctacactcattggacatacccaaagctgggtgtatgtgtaagacccttgagaccttcacaggatcctgtggggcaagaagggaaccccaaatatgaatttcctgccaggtcagtaagctgagacttgggataggtttatagcaaatgcaattattgtgacatgtcttgcctttctgagattaaggcataaaattgacacccgctatcatttttccagtatttagcaccctctatctggtattgtctccatgacctacaccctgtcctccccaacttcctgctttcctcatatcccaccgcctgatcaataaccttttgtttgccttttgtgtactgaggataggacccaccttctaatcatctactatggggtcttagtacctagtttgtgctcgtcggttgaaatcgactacgttgcactgaactgtatcccaccctaccatgctagcaccatactttgtgtctggttggtattcaacaaatgtttgcagagtggagaaaggcatgtggagtattccaaggtgaccactttagaggagacaagatgaacctgaacgtgtaagttcaggcatgtttgttcagaagcacgttagtgacctggtttaatcacaggagactggcaaggaaggagcctgtgcatctgtgaaatgagccattttctgccaacccttgcacgggcactggtgttgcttgatcaattaaccccacgcccttg

SEQ ID NO: 87927 - DNA, 1241 bp, Homo sapiens
tgaatttgtgttgtgttcttgcattccatattctaaggtgaagaggtttttgtctttccttgctgagggaggcttgtgttgtaagattaaaagcacaagttgcctgaatagggatctcttccctggttttgtttatctcaaaacctaggcttagtgccagagtgtggatgtttatgtgtgtgtgtcggggagggggtaatgcaaagtggggagggagggagggaaagaccattgatggggagaaagtagaatcaaacagagagagaaagagagagggagagagcgagatcatgaagaccaaacttgcagtttggttttgaggagaagggaatttctggaaacagcaggaaaccagagcagatgactattaaggggttttaagggggttggaccccaggcattggggcttccggtctgggcattgactgcacatctgagcccaacctcacggaggcaacattggtatcagccaacaggawgccgagagggcttggacaacagctctaacaaaggcaacagtgtggacctacactcattggacatacccaaagctgggtgtatgtgtaagacccttgagaccttcacaggatcctgtggggcaagaagggaaccccaaatatgaatttcctgccaggtcagtaagctgagacttgggataggtttatagcaaatgcaattattgtgacatgtcttgcctttctgagattaaggcataaaattgacacccgctatcatttttccagtatttagcaccctctatctggtattgtctccatgacctacaccctgtcctccccaacttcctgctttcctcatatcccaccgcctgatcaataaccttttgtttgccttttgtgtactgaggataggacccaccttctaatcatctactatggggtcttagtacctagtttgtgctcgtcggttgaaatcgactacgttgcactgaactgtatcccaccctaccatgctagcaccatactttgtgtctggttggtattcaacaaatgtttgcagagtggagaaaggcatgtggagtattccaaggtgaccactttagaggagacaagatgaacctgaacgtgtaagttcaggcatgtttgttcagaagcacgttagtgacctggtttaatcacaggagactggcaaggaaggagcctgtgcatctgtgaaatgagccattttctgccaacccttgcacgggcactggtgttgcttgatcaattaaccccacgcccttg

SEQ ID NO: 87928 - DNA, 852 bp, Homo sapiens
ccctgtatccgtccatctgtgcatccattcatgctaagtacaccaattggtaagtactgtgtacaagactctgtgctaggaagaaaagccacatggactgtagtggttgctctgatatgccacccagatctccatgcagggctgaaggacttattccccgggctgcygggggtgctgctggctgtcagcccttaattgatggccctctgcagaactgcatcaactgaggagagtcacttctctcaaggccgtgtctccttcccagggaagcacatattgacatgtgtatatggaagcctggtctccttcctcaacccaggacatctccaagttgtgcccgagggagtcagcaggagcttttattgagactgcatcacagtccaactcctctctcttcccaatcctgcctccttccacagagagtgatcccaggagcacttgctgttctctgcctcaggtctgcttcctggaaaacccaaactgctatgacctcttagggaggtctctcagtgcagactaacataatgcctctgggcaagtccgctgcagccagctcttcctccagtgctggaacaggtcactgggtcaagagtcttgtatgaagaaacatgaatcctccaaccctggaatccaaatcaatgcagagatctctttgcaatgaagagcctccattttgaaaggctcaaacggacagagaccaaccaagggaatggcagattcatacccacagcttatgcctaccctggaacctgtgctcattgagcggataattgacagagcttgtatgaagtcacgctgaatctgatcacagacgtagtaatcatctgtccatgcagccaccatgtacccatc

SEQ ID NO: 87929 - DNA, 852 bp, Homo sapiens
ccctgtatccgtccatctgtgcatccattcatgctaagtacaccaattggtaagtactgtgtacaagactctgtgctaggaagaaaagccacatggactgtagtggttgctctgatatgccacccagatctccatgcagggctgaaggacttattccccgggctgccgggggtgctgctggctgtcagcccttaattgatggccctctgcagaactgcatcaactgaggagagtcacttctctcaaggccgtgtctccttcccagggaagcacatattgacatgtgtatatggaagcctggtctccttcctcaacccaggacatctccaagttgtgcccgagggagtcagcaggagcttttattgagactgcatcacagtccaactcctctctcttcccaatcctgcctccttccacagagagtgatcccaggagcacttgctgttctctgcctcaggtctgcttcctggaaaacccaaactgctatgacctcttagggaggtctctcagtgcagactaacataatgcctctgggcaagtccgctgcagccagctcttcctccagtgctggaacaggtcactgggtcaagagtcttgtatgaagaaacatgaatcctccaaccctggaatccaaatcaatgcagagatctctttgcaatgaagagcctccattttgaaaggctcaaasggacagagaccaaccaagggaatggcagattcatacccacagcttatgcctaccctggaacctgtgctcattgagcggataattgacagagcttgtatgaagtcacgctgaatctgatcacagacgtagtaatcatctgtccatgcagccaccatgtacccatc

SEQ ID NO: 87930 - DNA, 580 bp, Homo sapiens
ccatagagagaagcccagctgagatacagagacagacagatagggagagagaggaggcccgatgccatcattcgagtacctagatccagctttgcctgaaggtgctcatgaagtgctcagctaagtaagccactgcgttcctcttttcacttaagcttgtttgagtttggtgtctgtctgtcattcataagaaaaagagtcttgcctaaaatacaaggagtgtatgtgttccccactcagtatttatcctttaagcccttataggtgtctgagacacagaatgggcaagatacagacctggcttggcagccctggagttgtgcctggaggctctcaactttccttgtccctgacactgcatcagccattcaaacactcttgcgtgcctgagaatcacctggggtgcctgttagaaatgcaaattcctgagcctcaacctccagagatgctgattcagctccacrcataattaacaaacagcccagttctggtgcaggtgcagtcccgggccccacattgagaagtatgtccgccacttgcccagcacaccctcttcagtagaatgggtcccatgtgcagg

SEQ ID NO: 87931 - DNA, 549 bp, Homo sapiens
ggcaagtcaccttcagctgtaatcatttggtaggtataactatcttctacttttccaattacaatatttaaaaatatttttgatattgcaccagagcctatataacatatactctgaaatagcatctatgtatagcagtagaatactgagaatttggtctagcatacttatttagttttctgattcagcttatttaaatttttcatcttagtgaatatacatccccaaactttgaaacatttttttctctagcactttattttttccctagtggtgaatatcttcaattttgtagacaatcaagtaagatattcaaagggggtgaatgcaacccagatgcccatctacaggtgaatggataaagaaagtgyagtctacaatggaatattattcagccttaaaaatgaaggaaatctcatcacatgctacaacatggatgaatcctgaggacttttgttaaatgaaataagccagtcacaaaaagaaagatactgtacaattccacttacatgatgtatctagagtactcaaatgtacagaaacaaaaag

SEQ ID NO: 87932 - DNA, 549 bp, Homo sapiens
ggcaagtcaccttcagctgtaatcatttggtaggtataactatcttctacttttccaattacaatatttaaaaatatttttgatattgcaccagagcctatataacatatactctgaaatagcatctatgtatagcagtagaatactgagaatttggtctagcatacttatttagttttctgattcagcttatttaaatttttcatcttagtgaatatacatccccaaactttgaaacatttttttctctagcactttattttttccctagtggtgaatatcttcaattttgtagacaatcaagtaagatattcaaagggggtgaatgcaacccagatgcccatctacaggtgaatggataaagaaagtgtagtctacaatggaatattattcagmcttaaaaatgaaggaaatctcatcacatgctacaacatggatgaatcctgaggacttttgttaaatgaaataagccagtcacaaaaagaaagatactgtacaattccacttacatgatgtatctagagtactcaaatgtacagaaacaaaaag

SEQ ID NO: 87933 - DNA, 865 bp, Homo sapiens
gtgagttaaagcaaggaaggaaagaaacatacacgtgggcaacatggctaattaatacataattgctttgattcatatgcyccattcatgcagagcgtatttttgtaaaataaacttcgtgagctttggaattggcaatgaactcttgagttgagtgtaaaagataacattcttggaaaactttttgagacattctagtctgtgtttcaaaaatgaatatgaataacaatgagaaggctttatttagaggaacctcatatctgtgaaagtctatattttttaaatggcctggatatttgtttctttgttctttatcatttagcaaaacagaaagaattttatttctttggattctaaaatgtaataccctacttgttgtcagatgcccaaatgagcactggaacctgggtctccacagaaaataagcagggaggactattaaagccaaaaacaaagtagtctgcagcaaaacaaaagacaagtacttctgaagaataagccctctgagaaaaccaagagctaagtgaggacattgctgtggtggtgtgggtgcataataggagatgatggaataaatgatctcatcaggtttctgataccttggttttctgggttattgtaataggttatcattattctgaagcaagcaatcttcgttttttcttacttgcatgggaaacacaattactcataagctgagaatatctgcagaagcttgaaagtagatgtatcaactacttaggactacttgatatgcttagcagaaagttattgcaagttttggctagtctattaatgcacacaattacaacacaaatcccaggttttgatttgtgcttcagtaaattcacactcatatcatacc

SEQ ID NO: 87934 - DNA, 865 bp, Homo sapiens
gtgagttaaagcaaggaaggaaagaaacatacacgtgggcaacatggctaattaatacataattgctttgattcatatgccccattcatgcagagcgtatttttgtaaaataaacttcgtgagctttggaattggcaatgaactcttgagttgagtgtaaaagataacattcttggaaaactttttgagacattctagtctgtgtttcaaaaatgaatatgaataacaatgagaaggctttatttagaggaacctcatatctgtgaaagtctatattttttaaatggcctggatatttgtttctttgttctttatcatttagcaaaacagaaagaattttatttctttggattctaaaatgtaataccctacttgttgtcagatgcccaaatgagcactggaacctgggtctccacagaaaataagcrgggaggactattaaagccaaaaacaaagtagtctgcagcaaaacaaaagacaagtacttctgaagaataagccctctgagaaaaccaagagctaagtgaggacattgctgtggtggtgtgggtgcataataggagatgatggaataaatgatctcatcaggtttctgataccttggttttctgggttattgtaataggttatcattattctgaagcaagcaatcttcgttttttcttacttgcatgggaaacacaattactcataagctgagaatatctgcagaagcttgaaagtagatgtatcaactacttaggactacttgatatgcttagcagaaagttattgcaagttttggctagtctattaatgcacacaattacaacacaaatcccaggttttgatttgtgcttcagtaaattcacactcatatcatacc

SEQ ID NO: 87935 - DNA, 865 bp, Homo sapiens
gtgagttaaagcaaggaaggaaagaaacatacacgtgggcaacatggctaattaatacataattgctttgattcatatgccccattcatgcagagcgtatttttgtaaaataaacttcgtgagctttggaattggcaatgaactcttgagttgagtgtaaaagataacattcttggaaaactttttgagacattctagtctgtgtttcaaaaatgaatatgaataacaatgagaaggctttatttagaggaacctcatatctgtgaaagtctatattttttaaatggcctggatatttgtttctttgttctttatcatttagcaaaacagaaagaattttatttctttggattctaaaatgtaataccctacttgttgtcagatgcccaaatgagcactggaacctgggtctccacagaaaataagcagggaggactattaaagccaaaaacaaagtagtctgcagcaaaacaaaagacaagtacttctgaagaataagccctctgagaaaaccaagagctaagtgaggacattgctgtggtggtgtgggtgcataataggagatgatggaataaatgatctcatcaggtttctgataccttggttttctgggttattgtaataggttatcattattctgaagcaagcaatcttygttttttcttacttgcatgggaaacacaattactcataagctgagaatatctgcagaagcttgaaagtagatgtatcaactacttaggactacttgatatgcttagcagaaagttattgcaagttttggctagtctattaatgcacacaattacaacacaaatcccaggttttgatttgtgcttcagtaaattcacactcatatcatacc

SEQ ID NO: 87936 - DNA, 761 bp, Homo sapiens
aaggctttttctcaaaatagttatataccgcacaaggaagaggtgtggctgttgtgtcacaggagacctaggggccaggtttgggaaaagtggttccatgtcttcagttgatcaacaagtattcaagtgctggctgtggtttctgagctgtaaggaatcrtgaaagatagcatagaattttatggcttcatggagcttgagatgagaaactctagtgccagtatggaacagcttaaaattgcacagcacaacaagtaaaagtcagcagtgagggtagcttggtaaaggctggcttagcaggaagaccacaccaaagaggtggctcttgacctgggccttggaggacaaaaagagttgggcatgctgaaggtcagtggtctgaagataaaattatcccttgattctcacccctgtgttcccattactgaatgttagctccttgaggcagagaccttcgtttcattcccactaaattctttgaacctagaacagtgcctggcacagtgagagtgcccattaaatatttgtggaatgcctgagtgatccagtgatcttgggctgggcaggatactaattgtcttggacatggtttggagttggattagatcaaggaaatagccagcctggatgcttctaggagccggtcaggtgaggaaggggagaggcaggcagggtgagtacatttacttcctttgtatgtgtatggtggggataaggggtggatgcaacctagagagcctccaggaggtgcaggcaggcaa

SEQ ID NO: 87937 - DNA, 768 bp, Homo sapiens
ctgaataactctgctctggggagctgtactaaggttaaaataattttgcatgcagatatagttgttcattgacaccagagggtaaagtcatatctctctggctgggattgggtttccttgaaagtaggggacaaccaaactgccaatctgacgagaagagggagatcccgaagtggaaaaaggggacccagaaggtgggccttcatctgggtaggaagagaaattctcccctctgaaccaccagacacgtagggtctcagggctgggggtggctacatggcctgggtctgtagagtcatatctcagaggtttaaggtcctgctaatatgatttatgtagatgtgaattttgaaatattaatgtaaatgtgatgataatgtgtctcctgagctaggaaatccaaaaaagctaccccagagaggttacatttattttattttttttccatgggaattgagaactgcataacagacacaatttctgtaatcacactggcttcaagaaacctcagaggagaatttgtgatcaacccaaatattcattgaaaaacgttgactgagtgcctacgctgggccagactttcaatgtctgtttcctgactttgctgattttttttccttttttttwaaaaaaattgtttttaatttatgccatcttgtcttttttatgttctcttataaaagcttgaaattctttctgaaacaaggcaggttgtaattaaactatgtgatacaactgcttaaggaaactgacccatcttaagatgca

SEQ ID NO: 87938 - DNA, 768 bp, Homo sapiens
ctgaataactctgctctggggagctgtactaaggttaaaataattttgcatgcagatatagttgttcattgacaccagagggtaaagtcatatctctctggctgggattgggtttccttgaaagtaggggacaaccaaactgccaatctgacgagaagagggagatcccgaagtggaaaaaggggacccagaaggtgggccttcatctgggtaggaagagaaattctcccctctgaaccaccagacacgtagggtctcagggctgggggtggctacatggcctgggtctgtagagtcatatctcagaggtttaaggtcctgctaatatgatttatgtagatgtgaattttgaaatattaatgtaaatgtgatgataatgtgtctcctgagctaggaaatccaaaaaagctaccccagagaggttacatttattttattttttttccatgggaattgagaactgcataacagacacaatttctgtaatcacactggcttcaagaaacctcagaggagaatttgtgatcaacccaaatattcattgaaaaacgttgactgagtgcctacgctgggccagactttcaatgtctgtttcctgactttgctgattttttttcctttttttttaaaaaaattgtttttaatttatgccatcttgtcttttttatgttctcttataaaagcytgaaattctttctgaaacaaggcaggttgtaattaaactatgtgatacaactgcttaaggaaactgacccatcttaagatgca

SEQ ID NO: 87939 - DNA, 1491 bp, Homo sapiens
ttatagcaatggcacagtgtatcactgtttaattaaagaagagaaagaaatgccaaacatacgaataaagtctgaatatatctgtaacattaaaagtgtaggtgtctatctttgaagatatgtcttaaggacaatgaaagagtcagtgagtaagagaagagagtcctgggatttcatacaagatcagtgttacttgatggtgtaggctcctaggtatttcatctttaggatataccgtctattacaaaagccaagatttttagatttggatcaacattagggaacttcattctaggcaagagccaggttttgcctttatgttaatatgacctcagctgtgagctccattttgccaggcatcttaaaactgcaacacatatcattggaatcttccgttacagtctaatacatagccacacattgggagcaagaatgaaatccaacccctgtcctttgcaaaatgcaatgagwcagtgtctgctttgggagcagggagtcagaatttcattgtggacaatggataaggtgagtaaaagggcttaaaacatttgtgctttcaagccataggctaggataacgatagtcagaactttttgatgaagtctgaccatgctacgccatttataaaattttgaagcttgtaagtattaccccaaaatgagcagtgtgaactcaaagggtttatcattgtctctcaggcaaaggtaatatttgaattatttagcaaaggactttgagcaattggaagagatactcagctgctggtctctagcgctctaacagggtggatgccccccgctctgccggcactgatgtttaagttgctggattatgaggaagtctggggattccttggggagaaaaggaagtgatgacatattgaagcacaacgacatattgaagagactcgggggctggggtgataaacttcagagccgtggctatttaccaattggagtgtaagtattttaatattttaacaaacataattgccattctggtatgtaccaacttcatctcagatctgtccttaagaaataggcaaattctttattgcctctctgaatggttcatataaattcccaggctcccttagctcattctaacataaaactgtattaaaaataatgaatgtaattcatcaataattttcctttgtcatagcaaatagtcacaagtggattgagatcagagtgatcactcatatttgttctggggagaagggagcctgctgttttgctcctgttttctcctaggactagtattttagcttcaaatgataataccttagcacagactctgatattcctcctacatgcaggagcattctcttggaataattttggggatgccaattcaaaatttcagccatgtatgatttacttattggaaaataatcactgagcagcaataactccagcagttacttgtatcaaggtagaatcaagaaatagatggtatggaccaaacttgcttctctctaaatatgca

SEQ ID NO: 87940 - DNA, 1233 bp, Homo sapiens
aaaagttgaaaatatacatataaataggaagagtctgccatgaaaagaaaattagagcataaagaagagttcccaatgattagaaaaatgacttctgatttttttaaaaaaggggaagtcgaatataaaaaagagctctcaaagattaaaaacatgattgctgaaatgactgaatggctgagcagtaaagtcaataacatttcccaaagggtaaaacaacaatgagaacaataagataaatagaaagaaaaaattattacatgaatgtacatgaagacaactttaaaatgtccaatatccaactgataggagtttcaggtagaaaagtaaaagaaagaggcctggaggaaattattaaagaccaacaatttccgaatgctgataatgtaagtcattagagtgagaaaacaaatcacaacttatcacgttccttatgaaatttcagaaaagtaatgtgtataaagagataaaataaacataaaactgtttacttataaaataattcaaatcaaactggtgtcagtccttgcatcagcaatgggtactagaagacaatggactgatgtctttaaggttctgaggaaaatggtttttccacttagattattatacccaatccaattgtcattcacacacaagagaagctatttaggtggtctgtaagtttacctcccttggatcctttttaagaaagtaacaaaggaatctactacaaacaaatgagaatataaaccaaatgagggcatactcagactacaagatattcaactcagacagaagaagagcaaactcaaagctgaaggcagacattatgtcttgtgagtagccacaacagaatggaacaggaaggcagagggctccaggggttatcttcaggtggggaataaggtgacctaataggttagatcaaataattgaaaagtttgaagaactkgataatattctgaagtttcacagtaaatggaaaaaagaaaagaaaagaaaggcagttagaaatctaatctaatcctaatcacctcccaaagaccccatctccaaatgccatcacattggggatcagagcttcaaaatacaaattttgagaggatataaatatttagtctatagcatataggtttaacagtttcctatacctataattttaggagaaaaatatcactatcatcatttgaaaaaaataagaatagttgaaaaatagccttgtataaaacaaagtttggaaaatgatagcat

SEQ ID NO: 87941 - DNA, 569 bp, Homo sapiens
ccagcaatttgtaaatgagaacatttccagctggatacttcaagtttcctccccatcccaccaccccacaacccatttccaaaataccatcaaaaagcagccatagtaacttcatacccagaacaggccccaagacattaamcctgtgtgggtttggaaaacaatactaacagacactgacaaaaatattctatcttctatctattctgctaagggcccacttacctttccaaaaattcacttgttcttcttaagtggcctttctccaccctcttctaagaatttatttgtcctcccagaatcgcccttttgccccccacatcccattaggatggtaaattctttctttttttttttgagacagagtctcactctgttgccaggctggagtccagtggcgtgatctcagctcactgcaacctccgcctcccgggttcaagcgattctaggatggtaaattctaacctcctcttagagtcacatttctttgtgaactcaactaaatctgttttttttttccctgttgctaatctgtctttcatccatttaattagcaggctccccaaaac

SEQ ID NO: 87942 - DNA, 1299 bp, Homo sapiens
tgtgctaactttttaatattataacataaacatatataaatagcattttgtttcacygcatttgattataaactttacaaaacaggttccaatgggaattgggttttttccaactcaacatcaagttactaagatccatccgtggccttgcttattatatcgcttgcctatccattttcattattacacaatggagtatttataatactacacaactgatgaatggtaggtattccaccatgattctcatgtccaagggcatctaaggcgcttctagtttattgctatcatgaaccatgttgcaattcctctctgcaagtctcctggaaatcatgcactagagtttctcttagataatatttgggactggaagtggtagatatccttggatatgcaaatgttcaaatttacaagttgaatggcaaatcagtttccaaagcaggtgtcaacttttgattttgcaccagtaatgttaccactggaatctcaaaatgtttaaagaccttctataacatgtcacaagagagaccaaggaactctactaactctaattcaggagaagtcagaattttcagatgggatctcatattcacagtaattctatgcagacacccaggttcatggctgccatccacctaattatcacctcaaccccaagaccaaccccagttggtgccttggtatttcagtaccacgctattaataatttccccaaaactactaatcgcaaaggaggggtagggtggtgtggattgtcgtatgatagaagagagtacaaggttatggtgccagagaatttcacataatacagaattgtaatgatcatacagcatcagccatgtatttgtaatgatatttctgtgttatatggatgaaattacgtagtattgaccatatcacatagggtgtgataaaaattaatgcagaaaggggatctactgtgctaatatttgactttcaaaaacatcattaaagtgtgggcactctgtgacagcagtatagtaataataaatgttacctgttggaattttatttaaataaaagttaatacactggcactataccaaccagaattaggtacacacacagtctggcttgaatgctttccaagaaggcttggtaattcctgaaacaccaacagtgctgaactttgtaatgcatgtggctggcccgatagctaacatgtcaacaaggccacactgtacaattataaaataataccaataattacaagaacatagtagggtgacccggactgggtgatggtatgcaaactcgtgaaactaactgggttgttaa

SEQ ID NO: 87943 - DNA, 762 bp, Homo sapiens
cctggcaacaaagcgagactctgcctcaaaaaacaaaaaaaagtaaaaaagaaaaatcattgtccactaatggtacaaaaaatttagattggggctggacacggtggctcacacctgtaatcccaccactttgggaggctgaggcaggtgaatcatttgaggtcagaagtttgagaccagcctggccaacatggcaaaacctcatctccactaaaaatacaaaaattagctgggcgtggtgatgcgtgcctgtaatcccagctactcaggaggctgaggcaggagaattgcttgaacccaggagacagaggctgcagtgagccaagatcgtaccaccgtcctccagcctgggcgacagagtgagactttgtctcaaaamaaaacaaaacaaaacaattctctagattgatgttctgtattcagttgaaaaagtggaggatgaatttggaccagactgcccagtggaatctcgctcatcgggactccactatctgaatatctgattactttgatttttgaagatgcaacattaactttgtactttcatgcagaaagtgccttggtaatgctagaaacagctaacccatacacagagcttgcttgtgccttcccccatctaacatctttacatacactaacctgcttaatccttacaacaaccttaagagacacatgctactaacacttccagtttacacatgggaaaattgagaaggtaacaatattgtctcataaacggtaaacccaggcagcctcattcca

SEQ ID NO: 87944 - DNA, 1104 bp, Homo sapiens
tcaggatagctatcacctcaaacatttatgatttatttgtactgggaacattccaagtcttctagttattttgaaatatgcaatatattgttgttaactatagtcactctattgtactatagactgctagaacttattccttctatctaactgtatgtttgtacccattaaccaacctttcttcattcccatctctcccatcacccaccccacacacacccttcccagcctctggtaataatcattctactctctacactatgcaattaacattttttagctcctacacgagtgaaaacatgtaatgcttgcctttctatgcctggcttaacataatgacctgcagttccatccgtgttgctgcaaatgacaggactgcattcttttctatggctgagtgctattctattgtggataggtaccacatcttccttatctgtgtatccactgacggacacttaggttgattccatattatggctattgtgaatagtgctgcaataaacatgggggtgcaggtttccctctgacatactgagagttagggaagcaattcatccaggtcagatgtcattgagcacccactgacactctgacactcaatttgctgccttcagggaggctgttgctgccacttggaggccaaaacacaaagtttctccttgaatccagtaagaacgaggtttatgggtgggttattatcatttacactggtgatactaagagcaggtgggggagttttacataaactgctctccacttttcaaakaattagagtgatcattttttactgagtatcagatgagaattgtcaacaatcccatactaaagttcagtagaggaaatgtattaagcaccaaagtgccttttaatgtggaattcatgaatctgctattctcactacttagaaattccttaatcaggattttctctcttgggggaaagaaggcctctgttaatgttacttgcaatcccaggaatgatttattttaagactatttaaaagaagcatgacatttataatttgaaagtaggctaaatacttgcatgcaattttttttttctgctgagatcacagatgctgccttttgttttttttttttt

SEQ ID NO: 87945 - DNA, 970 bp, Homo sapiens
aaagtattgttgctgcttaattaactattgatgcttatatttaatgttatagcctcactcttgatcataatgrgtcaatgcctcaaatacctaaaaaaaaaaaaaattagatagccagacaccaggaaagaaaagtatttctttttttaataaaaagaaatacctttttgagcaactgaaatgacaaagtcacaaatttcctgcacaccttaaaatatacttaatgtaaatgacgagttaatgggtgcagcacaccaacatggcacatgtatacatgtgtgacaaacctgtatgttgtgcacatgtaccctagaacttaaagtataattttaaaaaaattctatcttccaaagcatatcacttctcaggtagacacagtgtttattgcaaaagatctgatttcaatagtatttcttcaagagtctccccagagacaaagtcaagaagaggaaatcagcatatctgagaagaaagatttcaggatcactttttttgagggtctgagaaaatgtttagtttctatattatttaaaaccagaattgaaatggggtgattcctatccttgccacctgcctctacaaccccaagagtttctatctgagcatctaaacgtcttttaggctgaaaggctcaccatggctttgcttggtccttctctagttcttctgcagcccattgagcctcttgacttagcacaagggtctcaggtccttgcccaaagggagtgtgctgtgctgcaggtagactgcactgaatgtcaacagaaagccttgctttctttcatttctctaacccagtctcacatcctcctcctcctccccttttccctccccttcctcctgcacttctctttcctctttccccacccctttcctagactggcctctattgcctcccactgagacaaaaatgaactgctgatcagaaagtaatgtgactagattctctcttccttccctcctttctatc

SEQ ID NO: 87946 - DNA, 1387 bp, Homo sapiens
ctaattagctcagctatatgtacaaaaaaagcaaacataaatgaggtggctccatatttcattgctttgtatgactgtgacacattcactgccatattcctgaagctaaaattcctatactaatttgcaaagtaaacacagtacgaaactagaagctgcagcattagattctagtctattatgcattctccatctgytgtcccacactcacaatatttaattttagcaaaatctaattcagtgtatctctacatgaatgcctcattagacatctcaaacttttagcctccaagatggcctctcaaataggctttacttcccatctcattatctaatatttcatatctcagtataaagcaccactctccatgcagctgcccaaatcataacccaggaataattccttccttgtttttaacccatcctctacatccagcctaacaacaggctctgccaatctacctctaaaataagccccaaatttactgacttttctccatctctcccaacatcaccctaaatatcaccatattcttatacctaagactattactagagccactttcattctggactcctattccattctacattgaacagctcttatatcatattctacatctcatcactcccctgcttaaaagtcctccaatagcttaaaatccaaattgttttccttggcctacaaggccttagataatttggttctttctcatctctccaaactcatctcgggccacacttcctcctcagtcactacacctaagacatgcttatcttcttttgacttctcaaaacatacctattgtggactgaatgtttacatccccctataattcatgttgaaatcctaacctccaacatgatagataaagtggtggggcatttgggagctgattaggtcataagggcggagtcctcataaatggaattactgtccttagaaaacagaccccagagaaagctctgttttagtctgtgaggacacaaagagaagatagctatgaatcaggaagagggccctcatcagacactgaattgcaggcaccttcctcttggactctctagccgctagattgtgaaaataatcagacgtcttccctaatcaccttaatgtaaacaggtccaattctaattggtcaatattctcagcactttattgctttcaaaatagtataaacgaagctttgtgtactggcaatatcataaccaatgaggttcatccaagacatgataattgctaatggcaaacagcataaaaccaactgccaaaaaaatgctttgcatcccacaagaactagatatagacaagtgccatttttgctacacagaatgctttaaaaaaaaaaatggtgggaaatagagaagggtatccttgaagaaaaac

SEQ ID NO: 87947 - DNA, 806 bp, Homo sapiens
agctgggcgtgggggctcatgcctgtaatcccagcactttgggaggctgaggtgggcagatcacgaggtctggagttcgagaccagcctggccaacatagtgaaaccccgtgtctactaaaaagacaaaaaaaaaaattagccaggcatggtggcgggcacctgtaatctcagctactcrggaggctgaggcaggagaatcgcttgaaccgggaggcggaggttgcagtgagccaagatcacaccattgcattccagcccgggtgacagtgcgagactccgtctagaaaaaaaaaaaattgtggctccagccattatgaactgtgtggggacaaatcagcatcttaggagcttgatgacttgaaacgtgacatgcagtgaaggcaaacttcttcctcctcctgagagatgtcagggctagggagctgtgaaacgaatggaacagagccagtgcccagccagccccagttccctctctccttctggggacttgttgacagtatctcgttactattgcaggcaatgtccccttctgctgaatgatccaaggacaccaaactttgcctgatcgacaggggaggctgctaagctgcacctgctccctgtaagagtggagtcaggccaaggcatagaggcacacaaatactagctttcagacttgctaggactacgtccagtctcatcacagctgtccacgtggaagtctctttgaggtcaagcaaacaaattcaacacagtcaaactttaaaccattctgtgggtgaaaggtttctgaagaatagacagatcttattctgcagtttaatg

SEQ ID NO: 87948 - DNA, 806 bp, Homo sapiens
agctgggcgtgggggctcatgcctgtaatcccagcactttgggaggctgaggtgggcagatcacgaggtctggagttcgagaccagcctggccaacatagtgaaaccccgtgtctactaaaaagacaaaaaaaaaaattagccaggcatggtggcgggcacctgtaatctcagctactcaggaggctgaggcaggagaatcgcttgaaccgggaggcggaggttgcagtgagccaagatcacaccattgyattccagcccgggtgacagtgcgagactccgtctagaaaaaaaaaaaattgtggctccagccattatgaactgtgtggggacaaatcagcatcttaggagcttgatgacttgaaacgtgacatgcagtgaaggcaaacttcttcctcctcctgagagatgtcagggctagggagctgtgaaacgaatggaacagagccagtgcccagccagccccagttccctctctccttctggggacttgttgacagtatctcgttactattgcaggcaatgtccccttctgctgaatgatccaaggacaccaaactttgcctgatcgacaggggaggctgctaagctgcacctgctccctgtaagagtggagtcaggccaaggcatagaggcacacaaatactagctttcagacttgctaggactacgtccagtctcatcacagctgtccacgtggaagtctctttgaggtcaagcaaacaaattcaacacagtcaaactttaaaccattctgtgggtgaaaggtttctgaagaatagacagatcttattctgcagtttaatg

SEQ ID NO: 87949 - DNA, 879 bp, Homo sapiens
agggcagctgccaggggataggggaagagcggtgtagacaattcaaagctgtctttcctacttttttaccaatataaacttaaaaccaggtattgtgaatactcacctgattttcggttcatatagaggtgttttttgagtagacagttgtcaaatttggtgtttctgtgaggaagacaatcagtggaggcttctattcggccgtcttgccccatctcttccccatggacagttttttaaatagttcagtacatgcgagtgaatgccactgagaggtgacagcgtgctggcagtcctcacagccttcgctcgctctcggcgcctcctctgccyaggctcccactttggcggcacttgaggagcccttcagcccgccgctgcaccgcaggagccccttcctgggctggccgaggccggagccggctccctcagcttgcgaggaggtgtggagggcgaggcgcgggcgggaacccgggctgcgcgcagtgcttgcaggccagcgcaggttccaggtaggtgtaggctcggcgggccctgcactcggagcggcccgccctgccggccccaggcaatgaggcttagcacccgggccagcggctgcggaaggtgtgctaagtcccccagcagtgccggcccaccggcgctgcgctcgatttctcgccgggccttagctgcctccccgcggggcagagctcaggacctgcagcccgccatgcctgagcctccccccgcccccgtaggctcccgtgtggcccgagcctccctgatgagcgccgccccctgctccacggcgcccagtcccgtcgaccacccaagggctgataagtgcaggcgcacggcgcgggactggcaggcagctccacctgcggccccggtgca

SEQ ID NO: 87950 - DNA, 879 bp, Homo sapiens
agggcagctgccaggggataggggaagagcggtgtagacaattcaaagctgtctttcctacttttttaccaatataaacttaaaaccaggtattgtgaatactcacctgattttcggttcatatagaggtgttttttgagtagacagttgtcaaatttggtgtttctgtgaggaagacaatcagtggaggcttctattcggccgtcttgccccatctcttccccatggacagttttttaaatagttcagtacatgcgagtgaatgccactgagaggtgacagcgtgctggcagtcctcacagccttcgctcgctctcggcgcctcctctgcctaggctcccactttggcggcacttgaggagcccttcagcccgccgctgcaccgcaggagccccttcctgggctggccgaggccggagccggctccctcagcttgcgaggaggtgtggagggcgaggcgcgggcgggaacccgggctgcgcgcagtgcttgcaggccagcgcaggttccaggtaggtgtaggctcggcgggccctgcactcggagcggcccgccctgccggccccaggcaatgaggcttagcacccrggccagcggctgcggaaggtgtgctaagtcccccagcagtgccggcccaccggcgctgcgctcgatttctcgccgggccttagctgcctccccgcggggcagagctcaggacctgcagcccgccatgcctgagcctccccccgcccccgtaggctcccgtgtggcccgagcctccctgatgagcgccgccccctgctccacggcgcccagtcccgtcgaccacccaagggctgataagtgcaggcgcacggcgcgggactggcaggcagctccacctgcggccccggtgca

SEQ ID NO: 87951 - DNA, 879 bp, Homo sapiens
agggcagctgccaggggataggggaagagcggtgtagacaattcaaagctgtctttcctacttttttaccaatataaacttaaaaccaggtattgtgaatactcacctgattttcggttcatatagaggtgttttttgagtagacagttgtcaaatttggtgtttctgtgaggaagacaatcagtggaggcttctattcggccgtcttgccccatctcttccccatggacagttttttaaatagttcagtacatgcgagtgaatgccactgagaggtgacagcgtgctggcagtcctcacagccttcgctcgctctcggcgcctcctctgcctaggctcccactttggcggcacttgaggagcccttcagcccgccgctgcaccgcaggagccccttcctgggctggccgaggccggagccggctccctcagcttgcgaggaggtgtggagggcgaggcgcgggcgggaacccgggctgcgcgcagtgcttgcaggccagcgcaggttccaggtaggtgtaggctcggcgggccctgcactcggagcggcccgccctgccggccccaggcaatgaggcttagcacccgggccagcggctgcggaaggtgtgctaagtcccccagcagtgccggcccaccggcgctgcgctcgatttctcgccgggccttagctgcctccccgcggggcagagctcaggacctgcagcccgccatgcctgagcctcccccsgcccccgtaggctcccgtgtggcccgagcctccctgatgagcgccgccccctgctccacggcgcccagtcccgtcgaccacccaagggctgataagtgcaggcgcacggcgcgggactggcaggcagctccacctgcggccccggtgca

SEQ ID NO: 87952 - DNA, 879 bp, Homo sapiens
agggcagctgccaggggataggggaagagcggtgtagacaattcaaagctgtctttcctacttttttaccaatataaacttaaaaccaggtattgtgaatactcacctgattttcggttcatatagaggtgttttttgagtagacagttgtcaaatttggtgtttctgtgaggaagacaatcagtggaggcttctattcggccgtcttgccccatctcttccccatggacagttttttaaatagttcagtacatgcgagtgaatgccactgagaggtgacagcgtgctggcagtcctcacagccttcgctcgctctcggcgcctcctctgcctaggctcccactttggcggcacttgaggagcccttcagcccgccgctgcaccgcaggagccccttcctgggctggccgaggccggagccggctccctcagcttgcgaggaggtgtggagggcgaggcgcgggcgggaacccgggctgcgcgcagtgcttgcaggccagcgcaggttccaggtaggtgtaggctcggcgggccctgcactcggagcggcccgccctgccggccccaggcaatgaggcttagcacccgggccagcggctgcggaaggtgtgctaagtcccccagcagtgccggcccaccggcgctgcgctcgatttctcgccgggccttagctgcctccccgcggggcagagctcaggacctgcagcccgccatgcctgagcctccccccgcccccgtaggctcccgtgtggcccgagcctccctgatgagcgccgccccctgctccacggcgcccagtcccgtcgaccacccaagggctgataagtgcaggcgcasggcgcgggactggcaggcagctccacctgcggccccggtgca

SEQ ID NO: 87953 - DNA, 1916 bp, Homo sapiens
cttttctctgcctttgtgatccgaaagtcgtgctgcggtttatatactcctaggcgagggtcgcgtgctaatgatccctttcttttcaatatgcacccgcggtgggacttacagaacctttattttcaacacgtaagcagtcacgcttcctcgagcctaaggctttgtgctattcttaaatgctttcctcctccgacgctgcggctccctcctgagcccgtagctgcagcgcgttggtgaggagcgccggccctgggtgccgcccgccaccctggagggaccggtccgggggaaagtgctcgggagaagccaggggccccggctgcggtcgctggcccggggctctgcgcactccccagtgcccggaaaccgcaggctggcccagcttgcgggccgggtccgcccacgtgggtgtgggaagcgcaggggacgcgggccgcccggccaaggtgcccttgccaggaaccggcgcagacacaggccctgggcggcgcgggaacccggccagtcccaccgcgcgctgcgccgcaggggccccactgcaggtcgccccaagaccgcgcgacgctcggcagggcgcccacagtcctgtgggtcagagaaatgtcacctccacgtccccgctggccgggagccgctggagcctagcaaccgcctgccagccccggcccagccccagccgttttacggcagcgggccccgcccccgtgcgccaccgagggcgggaaggaggcgtgcggcacgagccagccagtccgcgccaccatctctggccctgcgccctgtcattggccgagagccgggcggcgcggcgcggccgtaaggcgtggccgggtgtcgtgaggcgggccttcgggctggctcgccgtcggctgccggggggttggccggggtgtcattggctctgggaagcggcagcagaggcagggaccactcggggtctggtgtcggcacagccatggcgggcgcgttggtgcggaaagcggcggactatgtccgaagcaaggatttccgggactacctcatgaggtgacgagcgccgcaggccgaaccccgcaacccggaggggctcccgggaggctgcgacccgtgcagtccgcgacgagggcggccgcgaggacgcggtggccccgggcagcgggtgggccggggcccaggcgagagggtgcgcttgtcaggggggccccacccggatccctcccggaccgccacaccccgaagcggacggcgtagagagccggtgacagtgggcgcctttcagggcgggggtgacagtgggcgcccctcagggcgggggtgacagtgggtgtcctctcccggcagggtgacagtgggcgctcctcagggcgggggtgacagtgggtgtcctctcccggcagggtgacagtgggcgcccctcaaggcaggggtgacattgagtccccttcagggagtgggtgacggtgggcgtccctcctggccaaggtgacactggggacgcctctcctggtaggcataacagtggacgcccttcccggccagagtggcagtggggacctggagggacgaaagcgacggcgctcctcaggacagggtgaccatggggacgcctctcccggcaggggtgacagtgggcgcccctcagggcagggtgacccggcaggggtgacagaggctcgttcctctcccatggttggcagtgggcacgtccctccgggccagktgacagtggctcgctcctccgggcgggagtggtttcctggccggtttctaccagatcctcggagtgggtcgccggtcacctgcggccgtccaggtgtgccagaggcggcgacctgggtgtggggtggggagacgccagcgggaggcgctgctgagagcgcggcgcggcgctgttggagcggagcttcgggtgcgcccagcgcgcttctgggaca

SEQ ID NO: 87954 - DNA, 1097 bp, Homo sapiens
gtatgaaggcaacttgattttagcaataaaaaagttttaaatcctgaattttattgcaaatactgtttacttctacttttatagagcagtagggtaggaaaaataattcagtctgccatatggtaaacttgtaaacagaagcttcacttctgactttcaaaaaaagacatttctatgcttaaatagaactackattaattaagatgggtgtttagcactgtggagcacagcaatgtatcagattaatggtagtaaaaatgtgaacaaggtagcagtctgagggtatgctctcaatccttgctgttaagtttctctacagctttgaatattactttagctttttactaatgtgttggatactgagccttcctaataggtacagctaaggataacattgtgtggtaaaattaaaaatacagttatgacacctagctatataaaaattatgctgataattacttaaccgttttcttttctttttttttttttttttttttttttgagacagagtttgtctcttgttgcccaggctggagtgcactggcactattttggctcatccaaacctccgcctcctgggttcaagtgattttcctaccttagcttcccaagtagctgggattacaagcatgcaccaccacgccaggctaattttgtatttttaatagagacggggtttctccatgttggtcaggctggtctcgaactcccgacttcaggtgatccgcccacctcggcctcccaaagtgctggggttagcaggtgtgagccaccatgcccggccctaacagtttcattacataggaagaatttgttaaatatattttcaaggaagagagttctgcttttctaagtgttatattttcttctactaaatgggtttccaagagccaggcttttcaataggatacttcagtatatcatctaacctttttttctaaaattaactttatgtagctttaaatttttatactttctccagtatttaattcaattacactttgactaaataaggaaaagaagagaattgcattactcggaacagtgttgcctggtagagcaccacactaagattcagaagaatgacttacagtcca

SEQ ID NO: 87955 - DNA, 1097 bp, Homo sapiens
gtatgaaggcaacttgattttagcaataaaaaagttttaaatcctgaattttattgcaaatactgtttacttctacttttatagagcagtagggtaggaaaaataattcagtctgccatatggtaaacttgtaaacagaagcttcacttctgactttcaaaaaaagacatttctatgcttaaatagaactactattaattaagatgggtgtttagcactgtggagcacagcaatgtatcagattaatggtagtaaaaatgtgaacaaggtagcagtctgagggtatgctctcaatccttgctgttaagtttctctacagctttgaatattactttagctttttactaatgtgttggatactgagccttcctaataggtacagctaaggataacattgtgtggtaaaattaaaaatacagttatgacacctagctatataaaaattatgctgataattacttaaccgttttcttttctttttttttttttttttttttttttgagacagagtttgtctcttgttgcccrggctggagtgcactggcactattttggctcatccaaacctccgcctcctgggttcaagtgattttcctaccttagcttcccaagtagctgggattacaagcatgcaccaccacgccaggctaattttgtatttttaatagagacggggtttctccatgttggtcaggctggtctcgaactcccgacttcaggtgatccgcccacctcggcctcccaaagtgctggggttagcaggtgtgagccaccatgcccggccctaacagtttcattacataggaagaatttgttaaatatattttcaaggaagagagttctgcttttctaagtgttatattttcttctactaaatgggtttccaagagccaggcttttcaataggatacttcagtatatcatctaacctttttttctaaaattaactttatgtagctttaaatttttatactttctccagtatttaattcaattacactttgactaaataaggaaaagaagagaattgcattactcggaacagtgttgcctggtagagcaccacactaagattcagaagaatgacttacagtcca

SEQ ID NO: 87956 - DNA, 1097 bp, Homo sapiens
gtatgaaggcaacttgattttagcaataaaaaagttttaaatcctgaattttattgcaaatactgtttacttctacttttatagagcagtagggtaggaaaaataattcagtctgccatatggtaaacttgtaaacagaagcttcacttctgactttcaaaaaaagacatttctatgcttaaatagaactactattaattaagatgggtgtttagcactgtggagcacagcaatgtatcagattaatggtagtaaaaatgtgaacaaggtagcagtctgagggtatgctctcaatccttgctgttaagtttctctacagctttgaatattactttagctttttactaatgtgttggatactgagccttcctaataggtacagctaaggataacattgtgtggtaaaattaaaaatacagttatgacacctagctatataaaaattatgctgataattacttaaccgttttcttttctttttttttttttttttttttttttgagacagagtttgtctcttgttgcccaggctggagtgcactggcactattttggctcatccaaacctccgcctcctgggttcaagtgattttcctaccttagcttcccaagtagctgggattacaagcatgcaccaccacgccaggctaattttgtatttttaatagagacggggtttctccatgttggtcaggctggtctygaactcccgacttcaggtgatccgcccacctcggcctcccaaagtgctggggttagcaggtgtgagccaccatgcccggccctaacagtttcattacataggaagaatttgttaaatatattttcaaggaagagagttctgcttttctaagtgttatattttcttctactaaatgggtttccaagagccaggcttttcaataggatacttcagtatatcatctaacctttttttctaaaattaactttatgtagctttaaatttttatactttctccagtatttaattcaattacactttgactaaataaggaaaagaagagaattgcattactcggaacagtgttgcctggtagagcaccacactaagattcagaagaatgacttacagtcca

SEQ ID NO: 87957 - DNA, 1097 bp, Homo sapiens
gtatgaaggcaacttgattttagcaataaaaaagttttaaatcctgaattttattgcaaatactgtttacttctacttttatagagcagtagggtaggaaaaataattcagtctgccatatggtaaacttgtaaacagaagcttcacttctgactttcaaaaaaagacatttctatgcttaaatagaactactattaattaagatgggtgtttagcactgtggagcacagcaatgtatcagattaatggtagtaaaaatgtgaacaaggtagcagtctgagggtatgctctcaatccttgctgttaagtttctctacagctttgaatattactttagctttttactaatgtgttggatactgagccttcctaataggtacagctaaggataacattgtgtggtaaaattaaaaatacagttatgacacctagctatataaaaattatgctgataattacttaaccgttttcttttctttttttttttttttttttttttttgagacagagtttgtctcttgttgcccaggctggagtgcactggcactattttggctcatccaaacctccgcctcctgggttcaagtgattttcctaccttagcttcccaagtagctgggattacaagcatgcaccaccacgccaggctaattttgtatttttaatagagacggggtttctccatgttggtcaggctggtctcgaactcccgacttcaggtgatccgcccacctcggcctcccaaagtgctggggttagcaggtgtgagccaccatgcccggccctaacagtttcattacataggaagaatttgttaaatatattttcaaggaagagagttctgcttttctaagtgttatattttcttctactaaatgggtttcyaagagccaggcttttcaataggatacttcagtatatcatctaacctttttttctaaaattaactttatgtagctttaaatttttatactttctccagtatttaattcaattacactttgactaaataaggaaaagaagagaattgcattactcggaacagtgttgcctggtagagcaccacactaagattcagaagaatgacttacagtcca

SEQ ID NO: 87958 - DNA, 919 bp, Homo sapiens
agattataatttcactcctagcagcctatcataagaataaatcttaggaaatcatctgtgcacatttcagtagtacttacaatagcagaaaattggaaatgtcctaagtgtacagcaacaaatacactcactatacattttgtcatatccatgtttgttaagtgatattacaaagatttcatcataaccattgaaagttttatattattctgtgaaaagttagtatacaaaaccttatctgtgtttttaaaacaaaataaaaaacagcttgaaaaaagtactaggaggaactaacaaatgttaagtttggatatctttgggtaatggaattctgcgtgatttttttggtctttctactttgtgtatctcctgagattttcgaactgcaaaggacgaatgctggaggatgaattctaaaagggcagagacacacgcagcaaaaaataaagatgagagagaattcaataagaccatggaaacacctgcttccccgtaatttaaactgacgtgaaagacaccgagtaggattgatccttgggcacattccacttagattcagggtcttattttatgaaaagattggttcctgctgcagccctagtttcttttgtgagaagcggtcagctgtgcaccttgctctgatgagaccattccrggccactgcttccagagtgtgtgtaatcaccactgcatgtgcccgggggagttggtgcaagaaagaaacccatgctcagacaaggctgtgctccatcccctccttatctcaagttccgtcctggcaggtgtccagtaataacaaaataaggatgtagggtgcggcagctgtatctgagaggttgctgtgccatattgtcctcgtcagaggctaatggctgtggtcaggtctatctcatgctggaagcactctagcccccaccat

SEQ ID NO: 87959 - DNA, 636 bp, Homo sapiens
gggatcccctgagcccaggaggtcaaggactgcagtgaggcataatcacaccactgcactctggcccagacaatagagtgagaccctgtctcagaaaaaaaaaaaaaaaaaaagtaacagtgagcagtggagtcaaggttgagtgtgaggccagggagagaagagcattattcaaagccaaggagctgcctaagcaaagctccctggcaggaaaagaaatctatggatcagagctctggaaagaaggccagtgtggctggaaaagtgggggacatggtgttgaggctgaaacggggctgaggccagaccacactgggcctctttgaccatgtagggatctctcactttaccaagagcaatagaagcccctggaatgttttaagcaaggaatgtcacacgatcagatttggttttcaaaaacatgactctggctgctttgtggagggggactgaaagggaagagtgtggctgcagaaccagcgggaggctacagcacagctacacaagcaacaagttgttccaactgaggttgtggcgaggggatagagataactcagcagatcccaaaataaataaaacccaaaatttctacagcttgctacttagttgaacaygagggaagagggatgatgctga

SEQ ID NO: 87960 - DNA, 1398 bp, Homo sapiens
gctccaaaaaggccacaatattggggaatgggggaatgtcaaaggggaacaggagccaactgaaagagttccaacagccagactggaacacgtaagaagcaaaataaacaatagagtgctggattataacacaaagtataaaataaaaatccatccgattataccaatataaatgaatgcgggatggatgaatgaatgaatgaatgaatgaatgaagagagaaatctcccatgcacaggaattccaagtaattcatactcttcccccaacaaggtggaacataactccccacgctttagtgtgggctgtacataaaggcttccttccagagagaacgggttggaaagggaggaaagaaagtaacttcacagtggaggaagctgacgaccactgcttccaccacgtgaccaaggccaacgtcaagagtgaagccaggctgacagtatgtcccctagctctggtgtgatgagaatggtactcaacctctgcgatcttccacaaaaaagaatcccataaccccggtctaatcacaaggggaaaaaataagacacatgtcaatagagggccattatgcaacattcctgaccaatgctcctcaaaatagtcaatgccacccaaaccaagggaagtctgagaaggtgtcacagccaagagagcctgaggaggcatgacaactaaatgcagtgtgggatcctggacaggaagaggacagcaggggaaaagtgagggaatctgaataaagcrtggatgctggtgaaaataatgtagtgacgttggttcactccttctgactaacatactcgtgtaccaggctaatgtgtgatgttaatatcaggggaacctcagtgggggaaatatggggactctgcagtatctttccaatttttctgtaaatctaaagcttctaaaataaaaagtttattaaaaagtaattatataaacttaattacataattaaaacaaaggcaataaatattttttaaagcgttcactttaccagattattttaaatattaaaaaaataccaagatgaaacaaaatacacagcacagctgaagtagctacctcccccttattctttacctccttctcctttccatcctcactatgacagcccttcctaatatcacaagtgatgttagtggctccatagagtaacataatgaatttagattgaaaaacctgagttacttcattacaaaaataaatcaggccactcagtgccttcagcttgagctatcccttgagataagcagtcagcctgtccaggacccttctggtttccaggcctcccagtctcttgcgagtggcaagtgtccatgagggagtgggtaggtctgggtacctggcatggacctccatggcttctgcacccaccttttagaaccaccgtttccc

SEQ ID NO: 87961 - DNA, 835 bp, Homo sapiens
gatgttaattgatcagttttccagatgttaattggagatgttttgaaagagagaagcttcagaaggcagacaaatactaaagagaatgtgtctttacaatattcattcagcatttattgtgtacctagcatgccctaggctctagagcagcattctcagaccactagttttctagatygcctttacattcataagtctcaagattattaaatttaaatagcctcaagatcccctttacattcttaaaaattattgaggaccccagagagtttttgtttatttggggttatatctactgatattgatcatattaaaaattaaaactgtatataaatgtttaaatgctttgcctgggcatagtggctcatgctctatagtcccagcactttgggaggtggaggcagaaggattgcttgaggataggagttcaagaccagcctgggtaacatagcaagacccccatcactacaaaaaaaaattttttttaattagctgtgctaggtagcacatgcctgtagtcccagccacttaggaggctgaggtgaaaaaattgtttgaggccaggaggtcgaggctgcagtgagctgtgatcataccactatactctagcctgggtgacatagtgaaacctgtctctttaaaaagaaataaagtttaaatgttttaagtaaaacattttaaaagattttattatttaaacatatcaataataaaaccattgcatattaacctaatataattctatgaaaaataactataaaaatttttgtgaaaagaatgacattgatttatatttttgcaaatctttttcgggtctggtctaagaagacaacta

SEQ ID NO: 87962 - DNA, 835 bp, Homo sapiens
gatgttaattgatcagttttccagatgttaattggagatgttttgaaagagagaagcttcagaaggcagacaaatactaaagagaatgtgtctttacaatattcattcagcatttattgtgtacctagcatgccctaggctctagagcagcattctcagaccactagttttctagattgcctttacattcataagtctcaagattattaaatttaaatagcctcaagatcccctttacattcttaaaaattattgaggaccccagagagtttttgtttatttggggttatatctactgatattgatcatattaaaaattaaaactgtatataaatgtttaaatgctttgcctgggcatagtggctcatgctctatagtcccagcactttgggaggtggaggcagaaggattgcttgaggataggagttcaagaccagcctgggtaacatagcaagacccccatcactacaaaaaaaaattttttttaattagctgtgctaggtagcacatgcctgtagtcccagccacttaggaggctgaggtgaaaarattgtttgaggccaggaggtcgaggctgcagtgagctgtgatcataccactatactctagcctgggtgacatagtgaaacctgtctctttaaaaagaaataaagtttaaatgttttaagtaaaacattttaaaagattttattatttaaacatatcaataataaaaccattgcatattaacctaatataattctatgaaaaataactataaaaatttttgtgaaaagaatgacattgatttatatttttgcaaatctttttcgggtctggtctaagaagacaacta

SEQ ID NO: 87963 - DNA, 755 bp, Homo sapiens
atgtccttggaggggtgtgaagcaaggtgaaaggtcatgtccaccttgtagcctcaggaagtctcccctcaccccacttccacctccattcttctctagggggccacgactgggtttgaaactctaaaccctagttatgaagttgtaaatataagtaaaaaagaaaatcccaaaagattacatacagcatggtattcattttataaaataaacaacttactaaaacctcagagctatctacaaaggaagtcaagggagcaataaacaaggattcagaacagtgattccctgagagagggcaggcaggaggatgagttggggaagactccacagatggacaaaagtcctcatccgagttccggttctgggggtgagtggkgttttgtgggtgtttgtgatcttattaagtaagggtgagtgagtgaaggtgacaggccacgaatgggccactcgcgagtgtgtcgggagccgtgggtcatgacagacccaagtacgtgcccctgggtttgatataaaaagagaataagggtagaaaagaaacaaagctcatatctatatatttcatttatttacatgccgtttgatttctagcttgttcaaccctagttattgcaaatatcaagtgtagtatcatgggtcatgggaaaaggctgctggattcaaaactcggctttgtgtgcacccttggacacgctgcagacccttccaggcctcagtgtcttcatcttcttcatctatgatgtggaataattgca

SEQ ID NO: 87964 - DNA, 755 bp, Homo sapiens
atgtccttggaggggtgtgaagcaaggtgaaaggtcatgtccaccttgtagcctcaggaagtctcccctcaccccacttccacctccattcttctctagggggccacgactgggtttgaaactctaaaccctagttatgaagttgtaaatataagtaaaaaagaaaatcccaaaagattacatacagcatggtattcattttataaaataaacaacttactaaaacctcagagctatctacaaaggaagtcaagggagcaataaacaaggattcagaacagtgattccctgagagagggcaggcaggaggatgagttggggaagactccacagatggacaaaagtcctcatccgagttccggttctgggggtgagtggggttttgtgggtgtttgtgatcttattaagtaagggtgagtgagtgaaggtgacaggccaygaatgggccactcgcgagtgtgtcgggagccgtgggtcatgacagacccaagtacgtgcccctgggtttgatataaaaagagaataagggtagaaaagaaacaaagctcatatctatatatttcatttatttacatgccgtttgatttctagcttgttcaaccctagttattgcaaatatcaagtgtagtatcatgggtcatgggaaaaggctgctggattcaaaactcggctttgtgtgcacccttggacacgctgcagacccttccaggcctcagtgtcttcatcttcttcatctatgatgtggaataattgca

SEQ ID NO: 87965 - DNA, 2107 bp, Homo sapiens
atttttgtatttttagtagagacagggtttcaccatgttggccaggctagtcttgaattcctgagctcaaagtgatccgcccacctcggcctcccaaagtgctgggattacaggcgtgagccactgcgcccggccccattttattttctttcttctttttcttggcatttgttatgatcaagccttttttttaagtactgaatatccatggactccttccagttttacctcatcaaaatgtgcttgcagggaaggatttggtcttgttgatttcaattaatgtaactccaagccaccactcttctgctattcaccttttaatctatatttcttactatacataagaagctttgcttctctacttatttcaaggagtgtagggtgaagatgaggtttttaaatcacggtatctttcttcagtcctttcctccaaattctacacgtagatgtactgtgcttcagccaacttatctctaactaggacattcagatctactaactaagctatgacttattataggcaggcggtcagcaggaagagctgtttttttttgaaagtaggacaagaataggtctatggaatgttggggtcacttggtttcctcaatggaaagaaacgggatgtttctgcattaactagaacacttgaaaggtagggaggggtgagggtgattgagaaatgatttcaacaaacagaacattaagtactctgtttgtcagacagcgtgttcccatctggggggtgagtggcagaaaacatagtcgccatcatgagaagagctcccctaaatctgcccacccacctccaactcttgctccagtcagtttttctgaatgcccagcctgctacactgaccctcaccgctcttaccccggtgccagggtgagagaggccagggatcaggtaaggaaagaggagaggaaatgcagaggctccatttggcttataaaggaactgtaccataatagttattattgtttaaaaaaatagcatgacatccattctatttctctccctcttcttcaaagatatttcagcctcagggactttctgcttgttagtgggatggcgaaaaatgcatgatagatttctagttagtaggtagaagggacgggagattacatcctaatacagtagagtaactatgttttattgagcacttaatatgtactgagtgaacacacctgctttgattcacaaccacttaatgagggaactttggagcctccttaagggttacaagcaaaagctgtggagtcagcttgcctgggttcaaatcctagttgtgccatgtacctgctgtgtggccttggtatagttacttaacctctccatgaatcagcttcctcaccttaaaatggagataattataatgtcacacacctttggggggaattyccaaggccacccccaggttcaatgactcattaggaggacccacaggattcatcatagagacatgcccacagctaagttctattacctcaaagacaaatcagaatcagcaaaggggaaagcaacagaagaaaccagacatgagctaccaagagtcctctcctaggggagtcacacaggacatacttaactcctccagcaacgagttatgacaggtatgaaatgttgtctactagggaagctcagtagatacttagtgccagagttttgatttggagctggtcacttagacaccctctgtctggcatgtacacaaattccagactcccagaaggaaagcaggtgttcagcataaaccatgttgtttgcacacacagttaagtcacagtgagccactcatatcacggaccagcaggaacccctcacatgttcccagatgccagccaagggccagccttgcaagcaggattgagacagcagtctcagacctgctatgtgaactctttactgcttgctaccttttgattgttgtgagattacataaggtaatatatatatctgttgcttacaacagtgcctaatttgtgggaagccctacagatttttttagcccttactattatgcagaaaaaaaaatactcaggtttagaatgactacacagtcaaaatggaacaaactggaatctgaattcacatatccccaaaaaaggt

SEQ ID NO: 87966 - DNA, 1158 bp, Homo sapiens
acggcaaggaggttgagcatattggcaagaggagggtgaagtagggaagctcaggggtttcagtgggcagagagggaagtgggcatgtgaggaggctgtggctatttctgctgaagaggcctgctcatgccccttgctttcggagcgcatggctgttgctgcttcctggaggaacagatgctgccagatgtgccatactaatgagctgcaggctgacaggctccccagatggtctccctcctctgcagtggtcctgactggtcccagctgggcaattcagcaatttgtgctcagtgctgccacaacgctcagagcatgctctggggacacacacccctgtgaaaggatgaggttggtaccagctgccctcctagtggcgtgtcgatgtatcccctggatcagtcagctcatttctctgttactttaaaatgcagtatggagtgactctgtttacatcttggattttattgctgtaatcttctaagactaccaatcttcccttagctgccatatttcaaataaaaactatggatattattataaatattattgatattactattctatacctctactgatgttattagcagtcaacttgaaactccaagttaccatattcacttcagtatcttcatatacaaataaaggagaagaaaaacccataaatgttttagaggggtggtgacacactaatgttattcctagtacaaaatggtcaacatttaaaaaaaatactaaacattgtcagaagcaatgggagctattataccttgttgatgagaatatcgattgatacgaccactttggaaacagtttggtattttctgttaaagctgaaaacaaagcaggcaaggtkctgtgagcctgtagtcccagctactcaggaggctgaggcaagagaatcccttgaggcagcctgggcaacacaaagaaacaaggaaggcaggaaggcagggagggatggagggaaacctatcatccagcaattccacataaacacaacagaaacagataaagatctacgtagcattattattcataatgggctagtactggaaacaacacaattgtctgtgaacattattaataggatggaaaaatgttggcatatccatacagtggaataccatacagcaatgcaaattacaaactacagct

SEQ ID NO: 87967 - DNA, 658 bp, Homo sapiens
tggctcactgcaacctctgcctcccaggttcaagtgattcttgtgcctcagcctcccaaatagctgggattacaggtgtgtgccaccatgcctggctaatttttgtatttttagtagagacggggtttcaccgtgttggccaggcttgtctcttaactcctgatctcatgtgatctgcccgccttggcctcccagaatgctggaattacagacrtgagccaccacgtctgacctcttctccatattttaatagacttcctattataattttaattttggtataatgtttcatcttattaatgtaccaaaatttgttaaatcattattagactgttggacttactgagttttcagcaaatatttttgagtgcatacctgggacttcgcaaggctgaaaattatgctgtaatgagtatctctgagcctgtatgtataagtatgtatgtgtgtatataaaaatacacacacacacacacacacacacacttctcctcctcctcctcctctgccttcttttttttcttcaattatttcttctgggtaagttccttggagtgggatgactgagttgaaagttgtgaacttcttattgactcatgcgttgcattaacaattcaaaatgattgatcaatttaatttgttacaagcaataaatgag

SEQ ID NO: 87968 - DNA, 658 bp, Homo sapiens
tggctcactgcaacctctgcctcccaggttcaagtgattcttgtgcctcagcctcccaaatagctgggattacaggtgtgtgccaccatgcctggctaatttttgtatttttagtagagacggggtttcaccgtgttggccaggcttgtctcttaactcctgatctcatgtgatctgcccgccttggcctcccagaatgctggaattacagacgtgagccaccacgtctgacctcttctccatattttaatagacttcctattataattttaattttggtataatgtttcatcttattaatgtaccaaaatttgttaaatcattattagactgttggacttactgagttttcagcaaatatttttgagygcatacctgggacttcgcaaggctgaaaattatgctgtaatgagtatctctgagcctgtatgtataagtatgtatgtgtgtatataaaaatacacacacacacacacacacacacacttctcctcctcctcctcctctgccttcttttttttcttcaattatttcttctgggtaagttccttggagtgggatgactgagttgaaagttgtgaacttcttattgactcatgcgttgcattaacaattcaaaatgattgatcaatttaatttgttacaagcaataaatgag

SEQ ID NO: 87969 - DNA, 648 bp, Homo sapiens
tgctctaatacctctaccaagttcctttaagacagaccataggaacggagtggtgagctggtggttgatttgtgggtggtgtcatgaagtcacacaatgactcaaaacagatcacacaccaagtcaaggagaagctgggtctggcccctggagtgagctttcccctgccctggaatccagggtatcactggcagaaggagttttgcaagaaacggaaaggacattagacttgatttctaggaaaaagcatgattggaaaagttgccagaaagaaaggcttataaaaactgctgagcataatagaaaaggcttttgaaattttgtttttatccagaagtcttcattacatgaagaagttgattcaagataaaaaaatcttctcctgtgattctcatattgcatttattcatgcttacttatttcctaatgtgttccaaaaaggggttgctgcaagtccgcttttctacaaaacggagaagggagaatttaaaaagaggcaggccactstcaacccaggcaaggcagtggtgagctctgctgaagaaatatgcagatatgacttcagagctttgcagataacagctgagaaatcacagagagcgacaggcagataagcaagttatgacacagataacattcaaataccca

SEQ ID NO: 87970 - DNA, 1397 bp, Homo sapiens
cagacatctgaaaccatgcctcgctaatttttgtatttttagtagaggtggggtttcaccatgctggccaggttggtctcgaacacctgacctcaagtgatccacctgccttggcctcccaaagtgctgggattacagctgtgagtcactggtgcttggcctctactttttttttttttaattagccgagcatggtgacatgcatctgtagtcccagctatttgggtggctggtgtgggagaatcacttgagcccagaagattgaggctgcagtgagccatgctcataccactcctgtactccagcctgggcaaaagagagacaccctgtccaaaaaacaaaaacaaaatcaatcaaaaaggatctttgaccttaattttaaaccaatcacatcctcttccacccaaatggagacatggctgtggggggtgcatgcctgtagtcccagctacgtggaaggctgaagcatgagaattgcttgaatcttggaggccgaggtaacagtgagccgatatgacaccactgcactctagcctggccgatgaagtgagattcagctccctcaacaccaaaaagaattacgccacctaggtgatctttggatatatgaagatttctactgtgttttcttagggactgtcatctctgtctttgaaaactgttttaactctgaaatattttgataaatttgacatggccaaggatccctcaacaaagatactttcaagttttctttctttctgtctaatatcaggaagaggttcaacccttccctrtctcacactcaggactttgaaggacacatattagtaaaactccatgtttgtgaagggaatcagtgaatgagtcctggactttcaccctatccctaaatctttcattttgatggatgaatatctaattcgatcagttaatatttaagaaagtcaaaaatccaatcaggattaactgggtagagattaagaattctaatcaaatgtagctctctctgtctctctgttcaatctagcctatttcccaggctggagtggagtggtataatgtcagctcactgcaacttctgcctcctgggttcaagtgatcctcctacctcagcctccctagtagcttggactacaggcggagaccactgcatctcactgaaattttcaataatgaggctggggcggaggctcacacctataatcccactatgttgggaggccaagaggggtagattgcttgagactaggagttcaagaccagcttggacaacatagcgaaatccactgtctttacaaaaagtcaaaaaataaaagatgagctgggtgtggtgatgcataactgtggtcccagctacttgagaggctgaggaggaagaatcctttgagctgggaggtcaaggctgcactgagctg

SEQ ID NO: 87971 - DNA, 1397 bp, Homo sapiens
cagacatctgaaaccatgcctcgctaatttttgtatttttagtagaggtggggtttcaccatgctggccaggttggtctcgaacacctgacctcaagtgatccacctgccttggcctcccaaagtgctgggattacagctgtgagtcactggtgcttggcctctactttttttttttttaattagccgagcatggtgacatgcatctgtagtcccagctatttgggtggctggtgtgggagaatcacttgagcccagaagattgaggctgcagtgagccatgctcataccactcctgtactccagcctgggcaaaagagagacaccctgtccaaaaaacaaaaacaaaatcaatcaaaaaggatctttgaccttaattttaaaccaatcacatcctcttccacccaaatggagacatggctgtggggggtgcatgcctgtagtcccagctacgtggaaggctgaagcatgagaattgcttgaatcttggaggccgaggtaacagtgagccgatatgacaccactgcactctagcctggccgatgaagtgagattcagctccctcaacaccaaaaagaattacgccacctaggtgatctttggatatatgaagatttctactgtgttttcttagggactgtcatctctgtctttgaaaactgttttaactctgaaatattttgataaatttgacatggccaaggatccctcaacaaagatactttcaagttttctttctttctgtctaatatcaggaagaggttcaacccttccctatctcacactcaggactttgaaggacacatattagtaaaactccatgtttgtgaagggaatcagtgaatgagtcctggactttcaccctatccctaaatctttcattttgatggatgaatatctaattcgatcagttaatatttaagaaagkcaaaaatccaatcaggattaactgggtagagattaagaattctaatcaaatgtagctctctctgtctctctgttcaatctagcctatttcccaggctggagtggagtggtataatgtcagctcactgcaacttctgcctcctgggttcaagtgatcctcctacctcagcctccctagtagcttggactacaggcggagaccactgcatctcactgaaattttcaataatgaggctggggcggaggctcacacctataatcccactatgttgggaggccaagaggggtagattgcttgagactaggagttcaagaccagcttggacaacatagcgaaatccactgtctttacaaaaagtcaaaaaataaaagatgagctgggtgtggtgatgcataactgtggtcccagctacttgagaggctgaggaggaagaatcctttgagctgggaggtcaaggctgcactgagctg

SEQ ID NO: 87972 - DNA, 1397 bp, Homo sapiens
cagacatctgaaaccatgcctcgctaatttttgtatttttagtagaggtggggtttcaccatgctggccaggttggtctcgaacacctgacctcaagtgatccacctgccttggcctcccaaagtgctgggattacagctgtgagtcactggtgcttggcctctactttttttttttttaattagccgagcatggtgacatgcatctgtagtcccagctatttgggtggctggtgtgggagaatcacttgagcccagaagattgaggctgcagtgagccatgctcataccactcctgtactccagcctgggcaaaagagagacaccctgtccaaaaaacaaaaacaaaatcaatcaaaaaggatctttgaccttaattttaaaccaatcacatcctcttccacccaaatggagacatggctgtggggggtgcatgcctgtagtcccagctacgtggaaggctgaagcatgagaattgcttgaatcttggaggccgaggtaacagtgagccgatatgacaccactgcactctagcctggccgatgaagtgagattcagctccctcaacaccaaaaagaattacgccacctaggtgatctttggatatatgaagatttctactgtgttttcttagggactgtcatctctgtctttgaaaactgttttaactctgaaatattttgataaatttgacatggccaaggatccctcaacaaagatactttcaagttttctttctttctgtctaatatcaggaagaggttcaacccttccctatctcacactcaggactttgaaggacacatattagtaaaactccatgtttgtgaagggaatcagtgaatgagtcctggactttcaccctatccctaaatctttcattttgatggatgaatatctaattcgatcagttaatatttaagaaagtcaaaaatccaatcaggattaactgggtagagattaagaattctaatcaaatgtagctctctctgtctctctgttcaatctagcctatttcccaggctggagtggagtggtataatgtcagctcactgcaacttctgcctcctgggttcaagtgatcctcctacctcagcctccctaktagcttggactacaggcggagaccactgcatctcactgaaattttcaataatgaggctggggcggaggctcacacctataatcccactatgttgggaggccaagaggggtagattgcttgagactaggagttcaagaccagcttggacaacatagcgaaatccactgtctttacaaaaagtcaaaaaataaaagatgagctgggtgtggtgatgcataactgtggtcccagctacttgagaggctgaggaggaagaatcctttgagctgggaggtcaaggctgcactgagctg

SEQ ID NO: 87973 - DNA, 1478 bp, Homo sapiens
aacttttccccccactgttcatggaggccttcagcaggagacgctgtgaggccctgaagctgatggtgcaggcctggcccttccgccgcctccctctgaggcctctgataaagatgccttgtctggaggccttccaagctgtgctcgatgggcttgatgcactgcttacccaaggggttcgtcccaggtgaggtggcccaggtgggctggtggggagggcccaggtgtccaactgaaggaacagctgggtcatgtgaagtgaggaggcccaagggggatggtggtggtgaggaagccgagaggacttggccattcaccagctcctcagggaaagcactgctcaccaggcaaggtccatagaggtaacaggaacctctcctctaatggcactgaaaggcaccatgaaaagtgagaactgggccgggcacggtggctcacaatgtaatcccagcacattgggaggctgaggtcaagagttggaggccagcctgtccaacatggtaaaccccaactctactamaaatactaaaattagctgggcatggtggtgggttcctgtaatcccagctacttgtgaggttgaggcaggagaatcatttgaacccgggaagaagaggttgcagtgaggtgacatcacaccactgcactctagcctgggcgacagaaggagacttggtctcaaaaaaaaaaacaaaaaaatgtggaagtgggtaggatccaaggggaaaacagggtgaagaaaactcagagagagggacaacaagcagggaggggaggagctgctatgcaggatgtggagtttaagttcagaaatgagttcttaaattctcagtctcacctctattttcccacaggagatggaaacttcaagtgctggatttacaggatgtctgtgagaacttctggatggtttggtctgaagctatggcccatgggtgcttcctcaatgccaagaggaacaaaacaccagtgcaggactgtccaaggatgagagaacggcagcccttgactgtgtttgtagaactttggctcaagaacaggactctggatgaatacctcacctgcctccttctatgggtcaagcagaggagagatttactacacctgtgctgtaagaagctgaaaattttgggaatgcccttccgcaatatcagaagcatcctgaaaatggtgaacctagactgtatccaggaggtggaagtgaattgcaagtggatactgcccatcctgacacagtttaccccatacctgggccacttgaggaatcttcagaagctcgttctctcccacatggatgtctctcgctacgtttccccagagcagaagaaggagattgttacccagttcaccactcagttcctcaagctgcgctgcctccaaaagctttatatgaactctgtttctttcctcgaaggccacctggaccagctgctcaggtgagggagggtggtgagctttctctgcagaccacagcagag

SEQ ID NO: 87974 - DNA, 1438 bp, Homo sapiens
gtctaagttaagatgatgaaaaataggccaggggcgttggctcatgcctgtaatcctagcagtttgggagtctgaggcaagaggatagcttgagcctaggagtttaagagcagtctgggtaacataccaagacccctgtcagaaatgaataaataaaagtaaaatcaaacaagataaattttttttctgagatggattttcactttgatcatccaggctagagtgcagttgtgacatctcagctcgcagcaacttctgcctcccaggttcaagcgattctcctgcctcagcctcctgagtacctgggattacaggcgtgggccaccacacctggctaatttttatattttaagtagagacaggttttcaccatgttggccaggttattctccaacccctgatttcaggtgatccacccaccttggactcccaaagtgctgggattataggcgagagctaccacgcccagccaacaagataatttttaagaagatgatgtgaagtagggaagtgaagtgggcactgaagaggggaatgctcagcaaacctgcacatgtcagaaaatcagctttgtgccccacagtttggtgaacatgaatgatcccatctctaattcccattgtaaaagtttcttttgagctccaggtaaattaattacctaggaaatgtatgattctgaaacagagggtcagggagcaggcacaaagaatgatgaaagtgatagatggtttgctgatgatacaggtgtgtcagggacgcctgcagcctgcccaccccagctgatgttgcaggatcctgtctgggtttgtcctttatgcctgcatctccactgggcttctgtggcccagggatgtggttttctgcctgacagatgaggaaagggagctttagggattctgtgaacttgatccattcctataaatgatggtgaaatgactcagcctgaaatggaattattttttctccttttttttttttttaatagagtatcactctgtcacccaggctggagtgtagtggcaygatctctgctcactgcaacctacacctcctgggttcaagcgattcttctgcctcagcttcccaagtagctggaattgcaggctcccgccaccacacctggctaatttttggatttttagtagagacgaggttttgccatgttcagcaggctggtctcaaactcctgatctcaaggaatccaccagtctcagcctcccaaagttctgggattacaggtgtgagttactgggccgggcctaaagtggaattgacctcggtggcaaagctcttcatcacacatcatccgaagtgttgaccatccggccatgagaatgatcctggacttgggcaaaatggtctccatccattaccttgaagccattccccaccaccctccactcacccctatgattccccagaattaacttcttgctct

SEQ ID NO: 87975 - DNA, 1438 bp, Homo sapiens
gtctaagttaagatgatgaaaaataggccaggggcgttggctcatgcctgtaatcctagcagtttgggagtctgaggcaagaggatagcttgagcctaggagtttaagagcagtctgggtaacataccaagacccctgtcagaaatgaataaataaaagtaaaatcaaacaagataaattttttttctgagatggattttcactttgatcatccaggctagagtgcagttgtgacatctcagctcgcagcaacttctgcctcccaggttcaagcgattctcctgcctcagcctcctgagtacctgggattacaggcgtgggccaccacacctggctaatttttatattttaagtagagacaggttttcaccatgttggccaggttattctccaacccctgatttcaggtgatccacccaccttggactcccaaagtgctgggattataggcgagagctaccacgcccagccaacaagataatttttaagaagatgatgtgaagtagggaagtgaagtgggcactgaagaggggaatgctcagcaaacctgcacatgtcagaaaatcagctttgtgccccacagtttggtgaacatgaatgatcccatctctaattcccattgtaaaagtttcttttgagctccaggtaaattaattacctaggaaatgtatgattctgaaacagagggtcagggagcaggcacaaagaatgatgaaagtgatagatggtttgctgatgatacaggtgtgtcagggacgcctgcagcctgcccaccccagctgatgttgcaggatcctgtctgggtttgtcctttatgcctgcatctccactgggcttctgtggcccagggatgtggttttctgcctgacagatgaggaaagggagctttagggattctgtgaacttgatccattcctataaatgatggtgaaatgactcagcctgaaatggaattattttttctccttttttttttttttaatagagtatcactctgtcacccaggctggagtgtagtggcatgatctctgctcactgcaacctacacctcctgggttcaagcgattcttctgcctcagcttcccaagtagctggaattgcaggctcccgccaccacacctggctaatttttggatttttagtagagacgaggttttgccatgttcagcaggctggtctcaaactcctgatctcaaggaatccaccagtctcagcctcccaaagtkctgggattacaggtgtgagttactgggccgggcctaaagtggaattgacctcggtggcaaagctcttcatcacacatcatccgaagtgttgaccatccggccatgagaatgatcctggacttgggcaaaatggtctccatccattaccttgaagccattccccaccaccctccactcacccctatgattccccagaattaacttcttgctct

SEQ ID NO: 87976 - DNA, 1153 bp, Homo sapiens
cccactgttcatggaggccttcagcaggagacgctgtgaggccctgaagctgatggtgcagtcctggcccttccgccgcctccctctgaggcctctgataaagatgccttgtctggaggccttccaagctgtgctcgatgggctggatgcactgcttaacctaggggttcgtcccaggtgaggtggcccaggtgggctggtggggagggcccaggtgtccaactgaaggaacagctgcgtcgtgagaagtgaggaggcccaagggggatggtggtggtgaggaagccgagaggacttggccattcaccagctcctcagggaaagcactgctcaccacgcaaggtccatggaggtaacaggaacctctcctctaatggcactgaaaggcaccatgaaaagtgagaactgggccgggcacggtggctcacaatgtattcccagcacattgggaggctgaggtcaagagttggaggccagcctgtccaacatggtaaaccccaactctactaaaaatactaaaattagctgggcatggtggtgggctcctgtaatcccagctacttgtgaggttgargcaggagaatcatttgaatctgggaagcagaggttgcagtgaggtgacatcacaccactgcactctagcctgggcgacacagggagacttggtctcaaaaaaaaaacaaaacaatgtggaagtgggtaggatccaaggggaaaacagagtgaagaaaagtcagagagagggacaagaagcagggaggggaggagctgctatccaggatgtggagtttaagttcagaaatgagttctgaaattctcagtctcacctctattttcccacaggaggtggaaacttcaagtgctggatttacaggatgtctgtgagaacttctggatggtttggtctgaagctatggcccatgggtgcttcctcaatgccaagaggaacaaaaaaccagtggaggactgtccaaggatgagaggacggcagcccttgactgtgttcgtagaactttggctcaagaacaggactctggatgaatacctcacctgcctccttctatgggtcaagcagaggaaagatttactacacctgtgctgtaagaagctgaaaattttgggaatgcccttccgcaatatcagaagcatcctg

SEQ ID NO: 87977 - DNA, 594 bp, Homo sapiens
cctgtctgggtttgtcctttatgcctgmatctccactgggctcctgtggcccagggatgtggttttctgcctgacagatgaggaaagggagctttagggattctgtgaacttgatccattcctataaatgatggtgaagtgactcagcctcaaatggaattattttttctccttttttttttttaatacagagtctctctctgtcacccaggctggagtgtagtggcatgatctctgctcactgcaacctacacctcctgggttcaagcgattcttctgcctcagcttcccaagtagctggaattgcaggctccccccaccacacctggctaatttttggatttttagtagagaggaggttttgccatgttcagcaggctggtctcaaactcctgatctcaaggaatccaccagtctcagcctcccaaagtgctgggattacaggtgtgagttactgggccgggtctaaagtggaattgacctcggtggcaaagctcttcatcacacatcatcctaagtgttgaccatcaggccatcagaatgaccctggacttgggcaaaaaggtctccatccattaccttgaagccattccc

SEQ ID NO: 87978 - DNA, 594 bp, Homo sapiens
cctgtctgggtttgtcctttatgcctgaatctccactgggctcctgtggcccagggatgtggttttctgcctgacagatgaggaaagggagctttagggattctgtgaacttgatccattcctataaatgatggtgaartgactcagcctcaaatggaattattttttctccttttttttttttaatacagagtctctctctgtcacccaggctggagtgtagtggcatgatctctgctcactgcaacctacacctcctgggttcaagcgattcttctgcctcagcttcccaagtagctggaattgcaggctccccccaccacacctggctaatttttggatttttagtagagaggaggttttgccatgttcagcaggctggtctcaaactcctgatctcaaggaatccaccagtctcagcctcccaaagtgctgggattacaggtgtgagttactgggccgggtctaaagtggaattgacctcggtggcaaagctcttcatcacacatcatcctaagtgttgaccatcaggccatcagaatgaccctggacttgggcaaaaaggtctccatccattaccttgaagccattccc

SEQ ID NO: 87979 - DNA, 594 bp, Homo sapiens
cctgtctgggtttgtcctttatgcctgaatctccactgggctcctgtggcccagggatgtggttttctgcctgacagatgaggaaagggagctttagggattctgtgaacttgatccattcctataaatgatggtgaagtgactcagcctcaaatggaattattttttctccttttttttttttaatrcagagtctctctctgtcacccaggctggagtgtagtggcatgatctctgctcactgcaacctacacctcctgggttcaagcgattcttctgcctcagcttcccaagtagctggaattgcaggctccccccaccacacctggctaatttttggatttttagtagagaggaggttttgccatgttcagcaggctggtctcaaactcctgatctcaaggaatccaccagtctcagcctcccaaagtgctgggattacaggtgtgagttactgggccgggtctaaagtggaattgacctcggtggcaaagctcttcatcacacatcatcctaagtgttgaccatcaggccatcagaatgaccctggacttgggcaaaaaggtctccatccattaccttgaagccattccc

SEQ ID NO: 87980 - DNA, 594 bp, Homo sapiens
cctgtctgggtttgtcctttatgcctgaatctccactgggctcctgtggcccagggatgtggttttctgcctgacagatgaggaaagggagctttagggattctgtgaacttgatccattcctataaatgatggtgaagtgactcagcctcaaatggaattattttttctccttttttttttttaatacrgagtctctctctgtcacccaggctggagtgtagtggcatgatctctgctcactgcaacctacacctcctgggttcaagcgattcttctgcctcagcttcccaagtagctggaattgcaggctccccccaccacacctggctaatttttggatttttagtagagaggaggttttgccatgttcagcaggctggtctcaaactcctgatctcaaggaatccaccagtctcagcctcccaaagtgctgggattacaggtgtgagttactgggccgggtctaaagtggaattgacctcggtggcaaagctcttcatcacacatcatcctaagtgttgaccatcaggccatcagaatgaccctggacttgggcaaaaaggtctccatccattaccttgaagccattccc

SEQ ID NO: 87981 - DNA, 594 bp, Homo sapiens
cctgtctgggtttgtcctttatgcctgaatctccactgggctcctgtggcccagggatgtggttttctgcctgacagatgaggaaagggagctttagggattctgtgaacttgatccattcctataaatgatggtgaagtgactcagcctcaaatggaattattttttctccttttttttttttaatacagagtctctctctgtcacccaggctggagtgtagtggcatgatctctgctcactgcaacctacacctcctgggttcaagcgattcttctgcctcagcttcccaagtagctggaaytgcaggctccccccaccacacctggctaatttttggatttttagtagagaggaggttttgccatgttcagcaggctggtctcaaactcctgatctcaaggaatccaccagtctcagcctcccaaagtgctgggattacaggtgtgagttactgggccgggtctaaagtggaattgacctcggtggcaaagctcttcatcacacatcatcctaagtgttgaccatcaggccatcagaatgaccctggacttgggcaaaaaggtctccatccattaccttgaagccattccc

SEQ ID NO: 87982 - DNA, 594 bp, Homo sapiens
cctgtctgggtttgtcctttatgcctgaatctccactgggctcctgtggcccagggatgtggttttctgcctgacagatgaggaaagggagctttagggattctgtgaacttgatccattcctataaatgatggtgaagtgactcagcctcaaatggaattattttttctccttttttttttttaatacagagtctctctctgtcacccaggctggagtgtagtggcatgatctctgctcactgcaacctacacctcctgggttcaagcgattcttctgcctcagcttcccaagtagctggaattgcaggctcccsccaccacacctggctaatttttggatttttagtagagaggaggttttgccatgttcagcaggctggtctcaaactcctgatctcaaggaatccaccagtctcagcctcccaaagtgctgggattacaggtgtgagttactgggccgggtctaaagtggaattgacctcggtggcaaagctcttcatcacacatcatcctaagtgttgaccatcaggccatcagaatgaccctggacttgggcaaaaaggtctccatccattaccttgaagccattccc

SEQ ID NO: 87983 - DNA, 743 bp, Homo sapiens
cctgccttggcctcccaaaatgcagggagtataggcgtggaccaccacgcttggcttggcctcctccagttcttcacttctttagatgtctgttaactccttgttagtttctgtggctgttcagtgggttaatacacactaggtggacaccaaaggcctggaacattactgggcaagaacagtgagccaatccacacggaaagcaccttcttctcagsgtctttcaccgctatccagatgctgagaccctgcccactccctgtgagtctccacatgcttccagaagccttagttggtggatgtcagcttcactgcacaaggagccactctcttcccgctgccctggaaggggatgtccatattgtgtattagctggagactctgggcagcatcaacccttgcttgttctcctgatgaccagcagcccttcttgaattaaactggttgtagccagtaaagacagccacattccctttaagtaaaatactaaaactatacaggcatgtaacactttttaaatatttccatctgacattttaaaagttacatcttttgggggagctaggtcagattgatgagagattttctcataacacctcccctctctccctatgaaggaagagactagtgcagcgtgttctggaatctgacagcatcaaagggtggataacgatcaagggcctgtgggtgatgagtgaccttccctgtgctgaggaattctgcataatgggcacccaagtgaa

SEQ ID NO: 87984 - DNA, 743 bp, Homo sapiens
cctgccttggcctcccaaaatgcagggagtataggcgtggaccaccacgcttggcttggcctcctccagttcttcacttctttagatgtctgttaactccttgttagtttctgtggctgttcagtgggttaatacacactaggtggacaccaaaggcctggaacattactgggcaagaacagtgagccaatccacacggaaagcaccttcttctcagggtctttcaccgctakccagatgctgagaccctgcccactccctgtgagtctccacatgcttccagaagccttagttggtggatgtcagcttcactgcacaaggagccactctcttcccgctgccctggaaggggatgtccatattgtgtattagctggagactctgggcagcatcaacccttgcttgttctcctgatgaccagcagcccttcttgaattaaactggttgtagccagtaaagacagccacattccctttaagtaaaatactaaaactatacaggcatgtaacactttttaaatatttccatctgacattttaaaagttacatcttttgggggagctaggtcagattgatgagagattttctcataacacctcccctctctccctatgaaggaagagactagtgcagcgtgttctggaatctgacagcatcaaagggtggataacgatcaagggcctgtgggtgatgagtgaccttccctgtgctgaggaattctgcataatgggcacccaagtgaa

SEQ ID NO: 87985 - DNA, 743 bp, Homo sapiens
cctgccttggcctcccaaaatgcagggagtataggcgtggaccaccacgcttggcttggcctcctccagttcttcacttctttagatgtctgttaactccttgttagtttctgtggctgttcagtgggttaatacacactaggtggacaccaaaggcctggaacattactgggcaagaacagtgagccaatccacacggaaagcaccttcttctcagggtctttcaccgctatccagatgctgagaccctgcccactccctgtgagtctccacatgcttccagaagccttagttggtggatgtcagctkcactgcacaaggagccactctcttcccgctgccctggaaggggatgtccatattgtgtattagctggagactctgggcagcatcaacccttgcttgttctcctgatgaccagcagcccttcttgaattaaactggttgtagccagtaaagacagccacattccctttaagtaaaatactaaaactatacaggcatgtaacactttttaaatatttccatctgacattttaaaagttacatcttttgggggagctaggtcagattgatgagagattttctcataacacctcccctctctccctatgaaggaagagactagtgcagcgtgttctggaatctgacagcatcaaagggtggataacgatcaagggcctgtgggtgatgagtgaccttccctgtgctgaggaattctgcataatgggcacccaagtgaa

SEQ ID NO: 87986 - DNA, 1262 bp, Homo sapiens
gatccagagggaatagagttgcagctccaactgttgcgtcatgccaatgaggtcaatcagcaggtctgcaacaatgaggtgagtgtggaggccccagaatatagaaatattttataatttctttctcctctgttgcttggaatctttcatactcagggagagcttagtccctctttaaatccacctgattgagtcaggtctacccacgataatctctcttttgatcaactcraactcaactgattgggactttaattgtacacacaaaatttctttatagtagcacctagaatagcatttgattgaataattgggagaaggttgtatgtattatagattggctgctgtccctctttgatacttcaattctcttgaaagaatctccctggtagcccaccttaaccagaaacattctagaaaggggattctggggaatacaggttatcttagccttgttaacatatcagaaatccatgacagtgttcaatacttacatatatcattctgattcacgctcatgcttttatcccacaaaacatgtagggctgatctattaaaacaaacaaacaaacaaacaacaacaaaaaaaaacctctttcctgactttcatggaaattgctgccaggctttagagaagacacattctctttttcttcctttagttgtcctccttgggtttaaatccttcttgcatgtcagtctttgtttctgtttgcttgaatgtcataggaaggaaagacctacactcttattattgtggtttgcttggttgtagctcttccattataaactgaggaggaatgatgtttttaccacttacaagctgtgtgaagttgggccaatcccttacttctccagtgctcaaagaataatcacctcttaggattgttctgtaggttaaatgaccaaatgcatgtaaagcactgtgcatgctgcctgaacactgtaggagtttgaaaagtgatgcatatcataattatcatcatcaatattattattttctctaattctttaaagataataaagaataagttatttacccagacccagagctaccccaaaccagaatttatatcaattgatgtgcttctcaccccaccaagagtaatctcaagtttcttgctactttaagacatttattcagagaggcttctaattgttgttagcccttcatcattttctcaaagatattgcctacagcattgacagcagcaataataaatataataacaattccatgaaacctcatgtgtgctaaagga

SEQ ID NO: 87987 - DNA, 653 bp, Homo sapiens
ttttagcccagtgaaactcatgttaaacttctggtaagataataaatgtatgttgttttaaaccactttctttgtggtatgcttttactgtaggaatagaaaacttatacactaaggaaggagagaaaagataggccaggcgtggcagctcacacctataatcccagcactttgggaggctaagggaggcagattgcttgagcccaggaattcaagatcagcctggacaacatggcataaaccccatctctaataaaaatacaaaaaattaaacaggcatggtggtgcaacacctgtagttctagctactcaggaggctgaggcaaaaggattgcctgagtctgggaggtcgaggctgcagtgagccgagattgcaccattgcactccagccacagtgacagaatgagaccctgtctcaaataaataaataaatagaataaaaagacaatacaaaaatagaaagaaaaagcattgttttgctccctctttatatcctccttgtgcaatttatagacttttcaaagatgtatcaggaatctatggaagaactggagctggagaatacttgctgatctgtttttcattccagcctccctctgtatttctattctarcaacatgctacctgggagggatgtaatatacctagagca

SEQ ID NO: 87988 - DNA, 1553 bp, Homo sapiens
agcccatgtagaagccagaattcaccatgcaggagacaatgtcctgatcaaatactccctgtgggcttttttttttttttttttacaaatgaagaggttttcactctacttctcagaacattgagctgaactgctgtgggggacaaaaatggtgtgatctggtagtgaggctctgatggacagccgcttgtaggtcaatcttgaaatgaatggctaagctaagatgctaaaaaaagctcttgctcaggccctatccaataccttcccccttaactgtgaggccccttcacttcgtttttactggattttatcttcagaaaagagaaaatagcactcaaagctattattctatttatatcatcttaaagtgtttctttctggggagataaagaaatggtatgcccatcatttcactagggcatggcacctttgttatttacaaattttggaaagtcacactttgttctttcacaaggtataaattaagcagacatttaaatagtaggaactagtgttgtagtgtaactggcctcagtagtttgggctacatctcattgcataaagaattattaacataatgaagcagcaaaaattttcttcaaaatcggtagtaaatagagcaatgattcttaatcttttggggatcttggatttacttgtaaataagatgaatgttatgggaccctgcctcaaaaaaaatgcatatacacacatatacagttttgcatgaaattccagaagattcatgggtcccttggtatactaatggaataacaaattataatgaaatgtagtgatatcctaaataaatgtggaattgtagatgattcttctggtgacccactcccagataattaatcatttttacttaaaagctaaaacccagagttcctttaaaaccataatagatgtaagaggcctcctgtgcatatagtagttgttctatgagctagcagcctggcatggtgggagaaaaaggtctggagtcagacagacataggctcaaacattaactctgtcacttacaagctgtctacaagccttcaattttctcaaggctgtttttcccattagcataacatagccaataatacctactttccaagattcctagaaatatttggtgaaataattcacttatgcagtctttaaacattattattcatctactgtgtgccttgtagtatactgggcattgagaaaataaagatgaaaaagtccttttcctcaaagaattgttggtctttgtgcttacagaacatatataatagatgctttctaaatactagattcctcttctatgaaaagtatcacacactggagaakggagagattggttggagtattcatttatgtgagtggtggagaggggagtatatgacataatggaacttactgtctcattcatgctaatatcagagtaagagtttaccctgactatttcatgttaatttttacaaacacagacatgttaatcaattccttcatgtttctctttcttcctccttaccctgcttctaaggggaatgcctctgctatgaaggctacatgaa

SEQ ID NO: 87989 - DNA, 734 bp, Homo sapiens
aattttgtaaatagtatatttggaggcaagatttatcaatgcattagcaggtatttgtcggatgctactatgtgtccatctttgcatcttggttctttggatatcacccttcgagagaatattttcatatatgtgctgttagaagagctactgtgaatattggaagtggctcatatcctttctgaccttttacattctgcctcatttattggcaatgttaggttacaaaagaaactataatctctttcacctccaatccacatgttgtttctcttgcattmtttcttttctgcagctgtgaaatgctcagaactacatgttaataagccaatagcgatgaactgctccaacctctggggaaacttcagttatggatcaatctgctctttccattgtctagagggccagttacttaatggctctgcacaaacagcatgccaagagaatggccactggtcaactaccgtgccaacctgccaaggtacaattttcatgtgggttaagaagtcactttgatgtggaaaataacaaaatcagtgtttcttccctgtgtctttctcatagtggtcttgctttccatccccgggtttccccctgcttaataagtgtttcacaatgaatcaggcagaatctccttgccttataaagtagtggaaattaaacccagtgactgtgtaggtaatcacccctcctcttcagtgttcagtttgtgaaatgaaaccttttgcttcgtt

SEQ ID NO: 87990 - DNA, 1316 bp, Homo sapiens
gctgaagatcatacagctgataagtggcagaattgtaattcacttgatcttagccaaaaggctgagaagcaatgcagaattgtaattcaattctagccaaatctgtctgatgcaggagtcaggttctcaaccattataatataggkactctgttttgtactgtgtatttatttttctgcagtagtaattctgctttttactgcatatagccactattttcttgctctatcatttatttcattgaacctgtgttttctcctacttgttcccattctgttgccatatcgtctttaatctcactgggcataggaaatagccagttgtgtagaatattcttctgattcataaagtgaacctcagaggaaaggagtttctcagctcttgactttttgtttcttttcattataaagcatttgttttctgcactatttagtctccatgattttgacttgttgatcctccttgctattcacaaatctaaaaagatggttttaactacttgtcttaaatgttggtatttgaagcttcctaggacaaggctgaagtagcaggccatatggggtgacagccctgacccatgccaggtgggctgccagggtttcattaactaggactgggggtacaggtcttggatcccatttctgaggtatggttgtgcatagattttcccaccacacacatctggccactgaggttaggcacgttagaggagaaagccagactgtgacaaagtcttacttggttgtgaggcagggtagaggctttatattattattgttgtagttactgaaaaatatttacagtaataacattggagacaagcaggttgctgacattgctacttattccacaatattcctgaaatcctacagtctgaaccaagtgtggaatttttcacaaactgtgacaaactgagatcttttagagcagaagcatccctgaaatcacaccacagttgctgccaacttggcctaaacacagagcccagtggtgctggcatctgtgaacacccatcatgcatttcactgtgactgtagcacttgacttttgcagctttatacccgcgtcatatatattttgtgagggtttgagacatagttgtggccctatagaggtacacagaggaatgcatgctggctgagcttttggacaaagagggtcttggaaatctgcatgatgatgtggaaagaatgtaggctttgaaatcagacttgtcactcttggctttaaaaactggctctaatattactagttctgtgatcttgggtttggcaaatgacatgtttagtttcaattttatcatctgtaatatgcca

SEQ ID NO: 87991 - DNA, 1316 bp, Homo sapiens
gctgaagatcatacagctgataagtggcagaattgtaattcacttgatcttagccaaaaggctgagaagcaatgcagaattgtaattcaattctagccaaatctgtctgatgcaggagtcaggttctcaaccattataatatagggactctgttttgtactgtgtatttatttttctgcagtagtaattctgctttttactgcatatagccactattttcttgctctatcatttatttcattgaacctgtgttttctcctacttgttccyattctgttgccatatcgtctttaatctcactgggcataggaaatagccagttgtgtagaatattcttctgattcataaagtgaacctcagaggaaaggagtttctcagctcttgactttttgtttcttttcattataaagcatttgttttctgcactatttagtctccatgattttgacttgttgatcctccttgctattcacaaatctaaaaagatggttttaactacttgtcttaaatgttggtatttgaagcttcctaggacaaggctgaagtagcaggccatatggggtgacagccctgacccatgccaggtgggctgccagggtttcattaactaggactgggggtacaggtcttggatcccatttctgaggtatggttgtgcatagattttcccaccacacacatctggccactgaggttaggcacgttagaggagaaagccagactgtgacaaagtcttacttggttgtgaggcagggtagaggctttatattattattgttgtagttactgaaaaatatttacagtaataacattggagacaagcaggttgctgacattgctacttattccacaatattcctgaaatcctacagtctgaaccaagtgtggaatttttcacaaactgtgacaaactgagatcttttagagcagaagcatccctgaaatcacaccacagttgctgccaacttggcctaaacacagagcccagtggtgctggcatctgtgaacacccatcatgcatttcactgtgactgtagcacttgacttttgcagctttatacccgcgtcatatatattttgtgagggtttgagacatagttgtggccctatagaggtacacagaggaatgcatgctggctgagcttttggacaaagagggtcttggaaatctgcatgatgatgtggaaagaatgtaggctttgaaatcagacttgtcactcttggctttaaaaactggctctaatattactagttctgtgatcttgggtttggcaaatgacatgtttagtttcaattttatcatctgtaatatgcca

SEQ ID NO: 87992 - DNA, 1316 bp, Homo sapiens
gctgaagatcatacagctgataagtggcagaattgtaattcacttgatcttagccaaaaggctgagaagcaatgcagaattgtaattcaattctagccaaatctgtctgatgcaggagtcaggttctcaaccattataatatagggactctgttttgtactgtgtatttatttttctgcagtagtaattctgctttttactgcatatagccactattttcttgctctatcatttatttcattgaacctgtgttttctcctacttgttcccattctgttgccatatcgtctttaatctcactgggcataggaaatagccagttgtgtagaatattcttctgattcataaagtgaacctcagaggaaaggagtttctcagctcttgactttttgtttcttttmattataaagcatttgttttctgcactatttagtctccatgattttgacttgttgatcctccttgctattcacaaatctaaaaagatggttttaactacttgtcttaaatgttggtatttgaagcttcctaggacaaggctgaagtagcaggccatatggggtgacagccctgacccatgccaggtgggctgccagggtttcattaactaggactgggggtacaggtcttggatcccatttctgaggtatggttgtgcatagattttcccaccacacacatctggccactgaggttaggcacgttagaggagaaagccagactgtgacaaagtcttacttggttgtgaggcagggtagaggctttatattattattgttgtagttactgaaaaatatttacagtaataacattggagacaagcaggttgctgacattgctacttattccacaatattcctgaaatcctacagtctgaaccaagtgtggaatttttcacaaactgtgacaaactgagatcttttagagcagaagcatccctgaaatcacaccacagttgctgccaacttggcctaaacacagagcccagtggtgctggcatctgtgaacacccatcatgcatttcactgtgactgtagcacttgacttttgcagctttatacccgcgtcatatatattttgtgagggtttgagacatagttgtggccctatagaggtacacagaggaatgcatgctggctgagcttttggacaaagagggtcttggaaatctgcatgatgatgtggaaagaatgtaggctttgaaatcagacttgtcactcttggctttaaaaactggctctaatattactagttctgtgatcttgggtttggcaaatgacatgtttagtttcaattttatcatctgtaatatgcca

SEQ ID NO: 87993 - DNA, 1316 bp, Homo sapiens
gctgaagatcatacagctgataagtggcagaattgtaattcacttgatcttagccaaaaggctgagaagcaatgcagaattgtaattcaattctagccaaatctgtctgatgcaggagtcaggttctcaaccattataatatagggactctgttttgtactgtgtatttatttttctgcagtagtaattctgctttttactgcatatagccactattttcttgctctatcatttatttcattgaacctgtgttttctcctacttgttcccattctgttgccatatcgtctttaatctcactgggcataggaaatagccagttgtgtagaatattcttctgattcataaagtgaacctcagaggaaaggagtttctcagctcttgactttttgtttcttttcattataaagcatttgttttctgcactatttagtctccatgattttgacttgttgatcctccttgctattcacaaatctaaaaagatggttttaactacttgtcttaaatgttggtatttgaagcttcctaggacaaggctgaagtagcaggccatatggggtgacagccctgacccatgccaggtgggctgccagggtttcattaactaggactrggggtacaggtcttggatcccatttctgaggtatggttgtgcatagattttcccaccacacacatctggccactgaggttaggcacgttagaggagaaagccagactgtgacaaagtcttacttggttgtgaggcagggtagaggctttatattattattgttgtagttactgaaaaatatttacagtaataacattggagacaagcaggttgctgacattgctacttattccacaatattcctgaaatcctacagtctgaaccaagtgtggaatttttcacaaactgtgacaaactgagatcttttagagcagaagcatccctgaaatcacaccacagttgctgccaacttggcctaaacacagagcccagtggtgctggcatctgtgaacacccatcatgcatttcactgtgactgtagcacttgacttttgcagctttatacccgcgtcatatatattttgtgagggtttgagacatagttgtggccctatagaggtacacagaggaatgcatgctggctgagcttttggacaaagagggtcttggaaatctgcatgatgatgtggaaagaatgtaggctttgaaatcagacttgtcactcttggctttaaaaactggctctaatattactagttctgtgatcttgggtttggcaaatgacatgtttagtttcaattttatcatctgtaatatgcca

SEQ ID NO: 87994 - DNA, 830 bp, Homo sapiens
atgtgccacattttcttaatccagtctatcattgttggacatttgggttggttccaagtctttgctattgtgagtagtgctgcaataaacatacgtgtgcatgtgtctttatagcagcatgatttataatcctttgggtatatacctagtaatgggatggctgggtcaaatggtatttctagttctagatccctgaggaatcgccacactgtcttccaccatggttgaactagtttacagtcccaccaacagtgtaaaagtgttcctatttctccacatcctctccagcacctgttgtttcctgactttttaatgattgccattctaactggtgtgagatggtatctcgttgtggttttgatttgcatttctctgatggccagtgataacgagcattttttttcatgtgtctgttggctgcataaatgtcttcttttgagaagtgtctgttctcttaaaggagttttccaattcctatcatgccctttcattgtaccacattcttttcttcctgaatttatttgtgtgatttttatttaatatctgctcccccacccccaacaaaaccatgggcttcatgagatatactcatgactgaatccctatgctagcacactctcagragtctcaaagggacttagctatttcttgtgtatttgaatgcaccagtgtaatgagataaatagaattcagagaggaacatgggagggagcactttcattgtgtccccttggggtctaatgaatcaaccaatgaatcaacaagtatttgctgagtgtctctctgccctctgctagatacttcaggtgatggaagattaatataggaaa

SEQ ID NO: 87995 - DNA, 775 bp, Homo sapiens
ggtaagaacccttctcgattgcctsctgggctttatgttcagaagcccctctcttggtaccctgaaattaggcttgagctctacagcgaagtgctaaggccccagccctggaatggtttttaatatttcaaagacaagacctcttccttttcctctgagcacatttggccccaaagattcagaaacctcaaactgcctgtgtaaattttgcttcaagttcagagagtggctttaattaacttttaggacctgagaaaatgaggataaggtttttctggtggggtattttcaatcagatagatctcagaggagtagctcttgattgggaacttatagttaaattgcactgatgtttgtcaaagttttagcgggctatggccgggctcagtggctcatgcctgtaatcccagcactttgggaggccgaggcgcatagatcacttgaagtcgagagttcaagagcagcctggccaacatggtgaaacaccatatttactaaacttacaaaaactggctgggcatgttggcatgtgcctgtaatcccagctactcaggaggctgaggcaggacaaactcttgaacccaggaggtggaggtggcagtgagttgagatcacaccactgaactccagcctgggtgacagagcaagacttgtctcaaaaacaaaacaaaaaaaaagttttagtgggctaaggagcaggtctggattttcgtccatttataccttttaaccaccttatgtggcttccagtccttactcttcttttcattacctg

SEQ ID NO: 87996 - DNA, 775 bp, Homo sapiens
ggtaagaacccttctcgattgcctcctgggctttatgttcagaagcccctctcttggtaccctgaaattaggcttgagctctacagcgaagtgctaaggccccagccctggaatggtttttaatatttcaaagacaagacctcttccttttcctctgagcacatttggccccaaagattcagaaacctcaaactgcctgtgtaaattttgcttcaagttcagagagtggctttaattaacttttaggacctgagaaaatgaggataaggtttttctggtggggtattttcaatcasatagatctcagaggagtagctcttgattgggaacttatagttaaattgcactgatgtttgtcaaagttttagcgggctatggccgggctcagtggctcatgcctgtaatcccagcactttgggaggccgaggcgcatagatcacttgaagtcgagagttcaagagcagcctggccaacatggtgaaacaccatatttactaaacttacaaaaactggctgggcatgttggcatgtgcctgtaatcccagctactcaggaggctgaggcaggacaaactcttgaacccaggaggtggaggtggcagtgagttgagatcacaccactgaactccagcctgggtgacagagcaagacttgtctcaaaaacaaaacaaaaaaaaagttttagtgggctaaggagcaggtctggattttcgtccatttataccttttaaccaccttatgtggcttccagtccttactcttcttttcattacctg

SEQ ID NO: 87997 - DNA, 2078 bp, Homo sapiens
ttttaaagcaggggtccccaacccctggttctggtctatggcaagttaggacctaggctccgcagcaggaggtgagagttggacgaaggagcaaagcttcatctgtatttacagtagctccccatcactcgcattgctgctccgcctcctgtaagatcagcggtggcattacattctcacaggagcatgaaccctattgtgaactacaagtgtgaaggatctaggttcatgctgcttatgagaatataatgcctgaggatctgtcactgtcccccttcacccccacatggaaggcttagttgcaggaaacaagctcagggctcccactgattctatgttatggtgagttgtataattatttcattatatattacaatgtaataataatataaataaagtgcacaataaatgtaatgcacttgaatcacaaaaccatccctgctcctaccccgccaccctggtccatgttaaaattgtcttccacaaaaccggtccctggtgccaaaaatgttggggactgctgttttaaagcacttccttattttcaggcactatgcttgttgctttaagcttcactatttcaaaatgactctggagagttttcaagataattagtgggttagatcctttaaaaattatttgaaaggctgaaatggcttttagtttttatagtttatctcctccagttctccacactctcctttaactgaaaatctccaattgtaaacatctaaaattgctttccgctggggaatttaaagatgacattgctgcttttcacaagaatacataatggacacaaccaacttcttcctaaaaaaggtggagttctaattagttctagctctaagctaagtattagggtgttgggggaagcctggaagaggtgatcattcttctttctaattgccctaataatacaagcagcatggaagcctgtaatgcagagatgctttatgccatgtgtgggaagaagtttacagtaattgtttaatgcctcacaggaagtacgtttttatctgaatgacatgttctaggtaaaaggtgcagagagattataaatatcaagcttatcatgcatagcatgtctgaacatagtgcaccaagcaagaggattttaaatttcctcctggttgtgggtgacccacttgkgcaatgaggaagtgaggatcctaatccgtgtgacaagaaccttggcagcacagcctgtaacattcaaaatggcagaaaaatcctgtgccttctcttccgttatcctgcctttgtttaaagagtcttgtcactccatccaggatcatgaatgtcttagccaagaaatgttggtagatacataaagtgtgtgctaatggagaagacaaatttgactataaatgcagcattgttgattttccttttattcaatggagctgtcagaacaaacaggcagggatatatatatatttttttttttgagacagaattttcactcttgttgcctaggctggagtacagtggcgcgatctcagctcactgcaacctccgcctgctgggttcaagtgattctcctacctcagcctcccgagtagctgagattacaagcatgggccaccatgcctggataatttttgtatttttagtagagatgggatttcgccatgttagccaggctggtttcgaactcctgacatcaggtgatccacctgccttggtctcccaaagtgctgggattacaggtgtgagccaccacacccagccaaacattggatatgtaattaataaattgcttggagacctgccagctgggaaaccagcattttcttgagcactttctgtcatgagacggcacaatgaaagaggccttgaatctttccatttattagaaaactctacatagagttgtaattgttaatgttatttccatccactcacaatggctttacactctggtgataaaaacattaaatctagtatcattttaagggcaatttttatgtatttcttgaaaaaaaaagaccatgctttacccatatcttgctttcttctaaattgcattgtctgtttggtagccaatcaccctttgacgttacattcatctgagc

SEQ ID NO: 87998 - DNA, 2078 bp, Homo sapiens
ttttaaagcaggggtccccaacccctggttctggtctatggcaagttaggacctaggctccgcagcaggaggtgagagttggacgaaggagcaaagcttcatctgtatttacagtagctccccatcactcgcattgctgctccgcctcctgtaagatcagcggtggcattacattctcacaggagcatgaaccctattgtgaactacaagtgtgaaggatctaggttcatgctgcttatgagaatataatgcctgaggatctgtcactgtcccccttcacccccacatggaaggcttagttgcaggaaacaagctcagggctcccactgattctatgttatggtgagttgtataattatttcattatatattacaatgtaataataatataaataaagtgcacaataaatgtaatgcacttgaatcacaaaaccatccctgctcctaccccgccaccctggtccatgttaaaattgtcttccacaaaaccggtccctggtgccaaaaatgttggggactgctgttttaaagcacttccttattttcaggcactatgcttgttgctttaagcttcactatttcaaaatgactctggagagttttcaagataattagtgggttagatcctttaaaaattatttgaaaggctgaaatggcttttagtttttatagtttatctcctccagttctccacactctcctttaactgaaaatctccaattgtaaacatctaaaattgctttccgctggggaatttaaagatgacattgctgcttttcacaagaatacataatggacacaaccaacttcttcctaaaaaaggtggagttctaattagttctagctctaagctaagtattagggtgttgggggaagcctggaagaggtgatcattcttctttctaattgccctaataatacaagcagcatggaagcctgtaatgcagagatgctttatgccatgtgtgggaagaagtttacagtaattgtttaatgcctcacaggaagtacgtttttatctgaatgacatgttctaggtaaaaggtgcagagagattataaatatcaagcttatcatgcatagcatgtctgaacatagtgcaccaagcaagaggattttaaatttcctcctggttgtgggtgacccacttgtgcaatgaggaagtgaggatcctaatccgtgtgacaagaaccttggcagcacagcctgtaacattcaaaatggcagaaaaatcctgtgccttctcttccgttatcctgcctttgtttaaagagtcttgtcactccatccaggatcatgaatgtcttagccaagaaatgttggtagatacataaagtgtgtgctaatggagaagacaaatttgactataaatgcagcattgttgattttccttttattcaatggagctgtcagaacaaacaggcagggatatatatatatttttttttttgagacagaattttcactcttgttgcctaggctggagtacagtggcgcgatctcagctcactgcaacctccgcctgctgggttcaagtgattctcctacctcagcctcccgagtagctgagattacaagcatgggccaccatgcctggataatttttgtatttttagtagagatgggatttcgccatgttagccaggctggtttcgaactcctgacatcaggtgatccacctgccttggtctcccaaagtgctgggattacaggtgtgagccaccacacccagccaaacattggatatgtaattaataaattrcttggagacctgccagctgggaaaccagcattttcttgagcactttctgtcatgagacggcacaatgaaagaggccttgaatctttccatttattagaaaactctacatagagttgtaattgttaatgttatttccatccactcacaatggctttacactctggtgataaaaacattaaatctagtatcattttaagggcaatttttatgtatttcttgaaaaaaaaagaccatgctttacccatatcttgctttcttctaaattgcattgtctgtttggtagccaatcaccctttgacgttacattcatctgagc

SEQ ID NO: 87999 - DNA, 2078 bp, Homo sapiens
ttttaaagcaggggtccccaacccctggttctggtctatggcaagttaggacctaggctccgcagcaggaggtgagagttggacgaaggagcaaagcttcatctgtatttacagtagctccccatcactcgcattgctgctccgcctcctgtaagatcagcggtggcattacattctcacaggagcatgaaccctattgtgaactacaagtgtgaaggatctaggttcatgctgcttatgagaatataatgcctgaggatctgtcactgtcccccttcacccccacatggaaggcttagttgcaggaaacaagctcagggctcccactgattctatgttatggtgagttgtataattatttcattatatattacaatgtaataataatataaataaagtgcacaataaatgtaatgcacttgaatcacaaaaccatccctgctcctaccccgccaccctggtccatgttaaaattgtcttccacaaaaccggtccctggtgccaaaaatgttggggactgctgttttaaagcacttccttattttcaggcactatgcttgttgctttaagcttcactatttcaaaatgactctggagagttttcaagataattagtgggttagatcctttaaaaattatttgaaaggctgaaatggcttttagtttttatagtttatctcctccagttctccacactctcctttaactgaaaatctccaattgtaaacatctaaaattgctttccgctggggaatttaaagatgacattgctgcttttcacaagaatacataatggacacaaccaacttcttcctaaaaaaggtggagttctaattagttctagctctaagctaagtattagggtgttgggggaagcctggaagaggtgatcattcttctttctaattgccctaataatacaagcagcatggaagcctgtaatgcagagatgctttatgccatgtgtgggaagaagtttacagtaattgtttaatgcctcacaggaagtacgtttttatctgaatgacatgttctaggtaaaaggtgcagagagattataaatatcaagcttatcatgcatagcatgtctgaacatagtgcaccaagcaagaggattttaaatttcctcctggttgtgggtgacccacttgtgcaatgaggaagtgaggatcctaatccgtgtgacaagaaccttggcagcacagcctgtaacattcaaaatggcagaaaaatcctgtgccttctcttccgttatcctgcctttgtttaaagagtcttgtcactccatccaggatcatgaatgtcttagccaagaaatgttggtagatacataaagtgtgtgctaatggagaagacaaatttgactataaatgcagcattgttgattttccttttattcaatggagctgtcagaacaaacaggcagggatatatatatatttttttttttgagacagaattttcactcttgttgcctaggctggagtacagtggcgcgatctcagctcactgcaacctccgcctgctgggttcaagtgattctcctacctcagcctcccgagtagctgagattacaagcatgggccaccatgcctggataatttttgtatttttagtagagatgggatttcgccatgttagccaggctggtttcgaactcctgacatcaggtgatccacctgccttggtctcccaaagtgctgggattacaggtgtgagccaccacacccagccaaacattggatatgtaattaataaattgcttggagacctgccagctgggaaaccagcattttcttgagcactttctgtcatgagacggcacaatgaaagaggccttgaatctttccatttattagaaaactctacatagagttgtaattgttaatgttatttccatccactcacratggctttacactctggtgataaaaacattaaatctagtatcattttaagggcaatttttatgtatttcttgaaaaaaaaagaccatgctttacccatatcttgctttcttctaaattgcattgtctgtttggtagccaatcaccctttgacgttacattcatctgagc

SEQ ID NO: 88000 - DNA, 720 bp, Homo sapiens
acaatttcaaaacctcttagtatccaacagattcacatgagtagtaatgttttttcttttagatctattgcccctagccactgaaactgtactttggttaggtgcctaatctagctccttctttagctacaaaacctagatagaccaggtcagaggaaatctgaaggagaacattctaggaagatgacagccataatagagtgtgtgtgtgtttgttgtgtctgtgaacaaggaatcgtttcacaaggcagggtaacttggacacgaatatttgaaactcacaaacaaaatctataataaaatcaggtgacaggacttaccatgaaacccaaaataagagtgggtgggaagagccatctcatgaagaaacatttgataaggcaaactctgcaggagtaagcagaaaaatgtccctgatcaccaaagggtagtcattacaatgctgaactcagtaaactaattaatactgaccaggagctacaytggctccaattcacaggtgagagtgcaaagggaccatagaaagatcttattgtgctagagtgatataagccctatgaaatctcaaaaataagcaatcaatatgttcactaacaacaataacaaaaagctacacactgagaaggaacttctggaagtagaatccaaattgaataggacagagattatagtgacaaagaaaacagtatatccaatccaagagggaaagaggaacagagt

SEQ ID NO: 88001 - DNA, 536 bp, Homo sapiens
tgagcaattcattgtgtcacatatctttgtgttttggtaaattcatcattagagagagagaaaaaacatcaatggagtttaaaccctttgtctcgttaagtcgcaaaaaaaattattggactaaataaaccacgcagtgtcaagttcaaaaaagaatgatactgccttyacaaaaattgtaagagtgagaaaattatgacattgaaagagatctgatctaaccaacccctatcttgcctttaacctccaaattacccttaatcattcctcggcctggcccaagaaaactttgagagacatttgttttatagtttaaaagataatagaccacaggtgtccaatcttttggctttcctgggccatattggaagaattgtcttgggccacatataaaatacaccaacactaaagatagccgatgagctaaaaaataaaaatcacaaaaaaagtcacaataagtctcataatgttttaagaaagtttacaaatttgtattgggccgcattcaaagccatcctgggccgcatgtggctcat

SEQ ID NO: 88002 - DNA, 624 bp, Homo sapiens
tccaccctctttctgtctcacttccggggaggggggaagcattgtgttttacctcttttgtctaattgccagagacttaattctccggtataatgttacccttttcctcaaggggatatcctctggggccatcagggctgttgcaaggcaaaacatttatggtagaagaatcaataatactcacatttattatttcaatatagcatccccgttatacagctttgcttctggaaagtacccaatcctgaaagcagcagagggtgaaatcctcacccccaccacccctgacctctgtcacctgtactgatataacttagatgagaagcatcaaggtgggactgctcctctcttgaatataaagcaaaaggagaggcagggggtgggggtgatcctcacaggtgaaggtgatagctgataccctaggctcaaaattctactgctattccctgggggacccagtaagatctgaatggagtgtttcaaaggggcctctgtttcaaagggggcctcacccctctawaaaggggctgagggttaggcaggcctttttctcccagaagtgggcaaagggacaacccatctaagaacctttacccttgggtaggggagaacaacctttccaag

SEQ ID NO: 88003 - DNA, 3168 bp, Homo sapiens
accaacactgtaggttccttgaatcctaagtggggtgggtaagctgatatttaatttttaatatttttaaatattaatgtcaacacattgatgtatgtgctaataatataaagggtaaaataaatcccttttcctcagtagtgcaaagaggagattattacaaaagacattcagatcatgacagtggcaagccttccagtagagggaaaagatcttcaaaactgtactccaccattgcagaagaggaagtgaatgcaattgggcacaggaagtcacagccaacaaatggttagagccttcgattatcatccctcactgacccgaagcttatgaactggcactaacaaaaacaaactgtaattgagtgaattctatcgtgggactgggtcagggattagtcatacaagagaggtttttggttttgtttttttctaaatctcaacaggatggtccttttatttggggcaaaaaaaatattgacttaaaaatctaaaattagaaattcttattaggaagatcaagttactttggtgacttgtccttttaaatttttgtgatcatgcaagtttatttttataattggggttaggcttcctattctcttcctttatatctttactctcctgttaggtttcaactgtggttggatcagagattcttagaatgacagagtttatatccttagagaatattggcctaatatcttacactctttcaggaaaggatcaataaaaagtcactgactcaatgcagacgttggatcatgcacatgatctttcaccctttatcattttatcaccctttagtaagaaagaaaaagtaccatttaacttgtcaaccatcaggaacaatttattccactttttaggagttgctctctgacttctgtctttcatttggccctgtagtaaattctgtaatgttctgttcaggtgagaacaatcccaagagacaaaaagaagacagatttcaaatcagctctgccctccaatgggaaattgaaggacaagtattgctgactcagagaaaaaaatgtcttttttgtgcctaaagtactcatctcttccctggttaatatattaacttcttataaacatgacttcaaaaatccgttaaaggaaatcttagtatctgtaaggaatataacatattctgatatgtgagatttctttaaaggacttctgctcttggaatgaggctcttttcttcctgttaaaccatatcaggggttaatagatgcatgtatttaggctcccagggatcaggtgtggcccagcattcaggctgtaacaccatgcccttcactgcctcccaagaaagcatttcagaatacaagttaatgggagtgaccttattatagggataccttctctttattgcaaagggataagccattcttgaattttcacactttactattgataataaacttcttatgatacacttcacagcttaacagcccaatgagttatgatacctgaagtgggaacggttctctttgagaattttctttgatataggttttaaaacaaaaaaacatctaccaactgcctgccagggacaacgtttggagcctgccttctcagccagtgccatgggctcagccacatgtgctcacttgcctggggttccggcgtatactagctaggtggcagggtgggttaaagacacctctcagagcataaagcaaagtctacaggacaagtaaggttaaaacattgtttgggctgggtagctcctgccctagagaaagccaattaagttgaccstttacttttatagagtatcctatgtagtggatttgtttatagacacatagttacaataactcctctctacaagaaagtttctctcatatggccaagaaaatctctatcttcagtcctagaaaagttacataaatgaacacctaagacatttattttctgacaagttatttttgagaatttgttaggccagaatctctgtctctatattgccccttttgttaagcatacctaaggttgcatagacgtttctggtttctggagctttacatttgaactattgttttcattgacttatatcacttgattattaacaaagcatcattaatgcaatgttccttcttcaagaggccactaaaaacactttatacaacacaaaaagagacgctccctgctacctgccgcccagtgcctattgatcatccaatgaggctttgcgttagagtaaaaagaggataaacacagagataacccaaattatagaaaagcaagaagagattctatatctgtctcagatttgttcatgacctctttagcttaaaattctcattgtgaggagctggtcaaattttgatggaactaaataggaccatcttgtatttacttttctgctttgatttcttgaaataatgacaggcattaagaagtaatttttacaggatcttcaattaaagtgattttatgcataatattttaattttgttttgttagtgccgattcctagcacttgactgtcttcacctttgagaactgcgtagcagtctgctttctgaatagttcctggttaaaaaaataacatttagcagatcaattctattaaataattgcttatactttcttttaagtcttttaagagcagctttgtttacactaaaacagccttattttcctaaagtatgtattcatgaaacaaacagaggctattgttctcaaatattgttctcaaagcatgctgcatatttttatcacgaatattatgttttgtgtggctactatattgatttgacaggtaaaatgcttaatttcttttactagaaatatttgtaagcacatttttttcatttcatattatttcctctctacatttaattataagttgtgatgttcttgtaagagtgtatcctattttcttgaagaaaatagttgattttggctttgaatgcgttgtaatggctcctgtttgtacagggcatctaagattccttttatatatcacttgcctcttccataatccaagctacagccaataaatacttggctgtgacttgcagtctgtaagccagtgctctgctctactttttccaccagactcaagttctgcttcccctaagtgagttcttgaagataaatttaacagttggcatgttgggctcttgctagaaagtataaaaaatcagggcca

SEQ ID NO: 88004 - DNA, 860 bp, Homo sapiens
tttccctatagtgttattttattttttctgtaccctcctccccccctttctctatgggtgagactgcagagaattctggttagggtcttttggctttgcttctatagccctatgcacttctttgggcaagttttatattgggctgtgcaatttaatgtacaagccagtagatgacgctaggcagccaatgcagttgggtatatacttgattcttgtttattttcggaagctctctgttgtgtcaggcagtgtactgattctttgaatgcacagtggtcgagctccctgcttaactaccataggacagaggccatgaaggcagggatagaccagcacatctgcccacacgtcccctgatggcaggcacttaaatttctctcaactgtgaatggcaccatgtatggtctgtaagtgtttgtatatgtaagtttttataaattataatttttaatgacagatttgtatatattttatggcagtaaattataacagactagtagctacatatatttcgtgcattcatgatataattttttcttaatttttttgatatttctaggccacatggttggcatgtttttcatgttatcacagatcttcaaaaaattttccaatacagtttttaaaaaaaatccacatataattggacccatttatttcaaactcatgttgttcaagggtcagctgtagttctgaaaagtgatattcattatgtgttgttttttatttgctgttttactttccctttcagtttctcagattagtctgcttttcggttgtatgacttttagttgatttttaaattgacaggatagtaggctgtcctactatctaggatactgtcctactrtataggatcc

SEQ ID NO: 88005 - DNA, 1851 bp, Homo sapiens
aaaacctaatttaatcagatcttcagagtaatcctataaggccattttattattaccttgatttttctgataaaagacttaaggttctgagaggccacttgatgtactcaaggtcacagagcaagtaaatgtcagagctgggattcagatctaggctatataggctcaaatgtcaccatccttattttcttaggcctcactagcttttgatacacaagattacactcatgtttatgctcacaatacaatggcctaaatctacaacctccttagctgtctttacagcatccctcaataattttggcatattccgcaaaagtagcctcaaatgcttacaaacaactcaaccagttacaatactctggttccggttctctgcaaattatagcccaagtcacagcgaagaagctacctgaagatgtctttcatcatagttgtctcccatagaatccatgggaatgccaacatccctggcatctggtctctgaaaatccacaaggcatcagattcacacagaagtgagaaggacaacctgctctaatctgtacccacctttgtgcatggggcttcagagagtgcactatataataatgcctcaattgcaggaggttctactcaaacacagagtctaactcacagttgtgtttagacccttgctctccctctgtttctttcttcttgtcatggaattttaatcatgatatttctcatccagtctaatgcatcattctactagaggaaaaagtgtattactctcaaggatccaatctaatgcatcatcctactagaggaaaaagtatattactctcaaggaataatatgtgcagagatatgactccacctgcaacatagccctacagtagtagtttccaaatgcaggtatgtacaaggaccagggcttttccatgacaaagttgccatcaatccagtgcaaaattagaaaaaataatgtgactgtcatgagttagtaaaaaatcataaatttattcaatttgaaggatggacttttattctgaaattatatcctttctatatttttggaattatgtcttttataaaacgatgtaaataaaagatgttgaagtaccctaggttagtcccccaagcctttttaaatgctactggcctgtgaattccaaaagtcttgaacatctggcacacagcgtcttttacataacagtatcaagtaacttaacttcctaaatcatgggtcctttccttctgctttacaaagaaaagtttgccaggcacaacacatctttatttcatgtaaatgtgtgtgtgtgtgtgtgtgtgtgtgtgtgtgtgtgtgtgtgwgagagagagagagattgtggtttctgctttacaaagaacatgtagatttgaagtgactggattttgtttcagttaaattttcgaacctctctttcccaaagaagttttgaaaatgtgctaggcaaggtgtattagtatgagtacctgccctcctctcggggtactccccaggaagaaagcttctcccaagcgtgtggcctgagaaaactcataagtgatggggatggatgtctgtttcctccttccatctggtaatcctgagagctgcgccaagctccctgcaacttctaagagggagatgttagctctcctgaggaatgctagttttagtgagataaggtgttttcttaagcaccttgtacatgttggataatcttctccctcagagagttctcaggaccacctgtgactctctagagaggttatcggtctgttagattaatcttgagtacttttccttcatcaaatactccttgactttcctccccagagctcacctttccttatggcagcaatattcttcccccaagccca

SEQ ID NO: 88006 - DNA, 597 bp, Homo sapiens
tcctcagcatgagaataggacactgtgagagatattcttcaggaggcctgaaggctgatcaccatagagattccttggtttttgtcccagaaactgtgggtaaaattccctattctggtagatcgttatcccaatatcatttgtcccaagtttgtgcaaatggttatgccatatttttccaatcgatttaaagcaattgcccccaaatggttgctaggagaaaaactgcactattcagccctgtctcatcaaatactcagattgttcatggtagcgaggattttagacgctgaaattagagtgaaggatgaaatctacaagatctacaaaattgagacaaaatcagagttgtgtgaatttgtcacatctgcccaggtccaatgtcatgagagtaggattagggcgccacaggcatggcctgagrctaggaagagcgccttgctcactgacccatcccttgtctgggcttccaagtggaactagagcttcattcaacctacatgtgcctataggtcctccctgtggcaatgacatccctcagctcagtaagggccacttgcagtaggaatatgaccctaaccagaagactcagtggat

SEQ ID NO: 88007 - DNA, 601 bp, Homo sapiens
ccacaatctgttattaaagtttgtcttaatccataaactgttattaagaacttctagaacatgtcggtataacaataaatttttgactgagattattaaaagcatgcaattttattaatcaaatgatttttttaaaaatccatttcctaagatttggaattttccactttccatgttctccctatgttcaaataagaaaggaaaaatacagattagttgaaaaacctcttcgcagaggtaccacattaccattcaaaatgtgtaaagttgagcttctttcatttgaagctaatatttgtgaattacacattcaatgaagatttattgagcactcactatgtgtacggattgtaccaaaggctaaggataaaacagcraaaacaaacataaaacaaaacaaaacagaaatagatcttgctctagtggcaaaaagtgtagtgaatagcatgtaagaacagcatgttttcaaaactgtttatttcaaacagtatgttttcaaaattatttatttcaatattttagtggcttttattgaaatcaaattacagactcagattctataattccaaacagattagttctacatttttgctctcaaggc

SEQ ID NO: 88008 - DNA, 3062 bp, Homo sapiens
ccagggcctccggagcctcctggagtctgggcctcaccttggagttttcctgactttttggaccttgagcctcctttaagctgcaggagacccagacacggcgcactgtccagggtgacccgttcctgttggagttgggtagtggtgggaagggctgccctgggtacccttggccttgcagggaactctgggctctgggaaacataatttcagcctggccttgcagtgtgccaccggggtgctcacatggtttcaggctggtgaggggcttaggaggttggcaggatgggcagatgcagctttcctgggcagcgaatccgatcatctaccagagctggagagccctgtgacctgaaaatggcaggcccatggggtcctgatggcagtgggggtgagagggacccttgccttgggcaaggctgaaggcagcagcctggactttgcccctgaaactctgagaagccccaaggccgcaggtgggtgtggactctgctgctgtcacttgccagctgcgagtttgaggccctgtgtgcctgtgggggtggaatgaagcgaggccagtagtgctacagtcttcacatcacccccaaccctctcacagccccaagcaccttccctgcacactggcccagccctcacgggctcccactgcctcctggctctgcacacagcaggtctgtggtcatgtgtggccctgcagaggggacccttttcctctccctgagagataaagagccctgtgcctgaaatgccaccagcagtactcattcctctggctaatcccaaacattcactgaatatttgctctgggtgcttcgggcaggagccactgctcacttctggcctggcctgttcccccaggccaagtttacatctctccattccaggctttgtgtgtaagaggcagtcagagccctcgggccctcctgaaatgtgcatatgcaccactagccccggctgggacatccgccctctgctccctgataaggtccctctctgcctggactggggactgaggatccgagatggaaaagccccagcccagcgcccctgccttcctggagtcagagaggcctgggttctgcttgtggtgcggccttcaccaatcaccccctcctcagggcctccatctccctgctggtgtggagtgagggatgaattcacagcagggcttgccaggcttttttttttttttttttttttaactgtagaagctttccttccaacaaaatcttgcgaggagctcagtgtctgaaattgaaaagctgggagcatcttcttgattgtgttttttgggggcgagtccctgggctttgttttctctcccccttcactccacctctctctcaggtcctggggcacctggaggggagttccagggacctggctgggaaagagctgtcctcagtgcccatgggaccagtccatgggatgtgtctgtacatctgtgtatcgggccctgaggcccacctttagcccacctcccctcccgaggtctccttctgccaatcacctgcctaatgcccctgcaccctggtgtcaggcagccccccagagctgcatccctccctcctgtagttaaccaatgctctatgagcctctctyagccaagaccttggcatcagctcaccactgccccgcccctggccctccccttcatcacgggccgtctctcaggcttggcgccctgggatgctcccttgctccagctctgtgactgtccccatgagggtcctccctcagtgcagccccatctctccagcggtgctggcacgatggacccggttgactccctgcctcctgccctctccgttcagtctaaactgcacagtctaacgtaggaaccactagagcatgcagctattaaaattcaaattaaattaagctgggtatggtggtgtgagacttgtcccaactactcacgaggctgagatgggaggattgcttgagtccaggaattcacatacagcctgggtaacataggtctcgtctctaaaaaacaaaaacaaaaacattatggaatgagcctctggggatgaggagctgatgtcctgaatggaccagtgaccagtgcaggaggggtggagtcctagcaggggtagatcccagctttgggaaccaactttcccaggcacttgccggccactccgtgggaaagtcctcaggcagcctgcagggagctgggatcagctgatggggatgggtttggaggggagagagtggtgcacagggactggaggtgggggaggggtggggttgccatggaaagggctcttgggatgggtcttgggctgagcctttggcaaggcctccaccctggagctgagccagcagagagtggggctgactccatgaggcccagactctcgtgggtattctggtggcctgggcaccctgtctttcctgaaccctgcctgcctaatctaagaactgctccccttgtagctctgtctctcctctgttggcctagtttcttcatccatgggtgggcacagcagaagctgtctcacctgctccatggtgaacgggatttgcaaggatttgactctggccatccagggaagatggagtctttgaccaggcctggcccctgaagcagacttcttccttctgagcctgctggggaagcagaattcctcgatgctgggtgtcatggtctaccaggccctccctcgcccaggccacttgtgttgagcctggagcagaacccccagatctgtagtccgcctgtcagcttggggagtctccgtttccgtctgtttcattcccatcagctgtgtgtggctgagcaagtcacttaacctcttgaggcctccatgtcctcatctgcaaaatggagacacacatatctgcgtccccgatgaccaccagtagctgggatgatacgtcgactgcagagtgaccactttgtgtaggcgtccctgtggatggttgtcagtcaaaggagtgagtcagatgatgagaggggaggacagcagagcagcagttgtttcttcagtctcgccgggactccaggatcggccatgttctgcagccaccgcctctacctgtctccccatgtg

SEQ ID NO: 88009 - DNA, 3062 bp, Homo sapiens
ccagggcctccggagcctcctggagtctgggcctcaccttggagttttcctgactttttggaccttgagcctcctttaagctgcaggagacccagacacggcgcactgtccagggtgacccgttcctgttggagttgggtagtggtgggaagggctgccctgggtacccttggccttgcagggaactctgggctctgggaaacataatttcagcctggccttgcagtgtgccaccggggtgctcacatggtttcaggctggtgaggggcttaggaggttggcaggatgggcagatgcagctttcctgggcagcgaatccgatcatctaccagagctggagagccctgtgacctgaaaatggcaggcccatggggtcctgatggcagtgggggtgagagggacccttgccttgggcaaggctgaaggcagcagcctggactttgcccctgaaactctgagaagccccaaggccgcaggtgggtgtggactctgctgctgtcacttgccagctgcgagtttgaggccctgtgtgcctgtgggggtggaatgaagcgaggccagtagtgctacagtcttcacatcacccccaaccctctcacagccccaagcaccttccctgcacactggcccagccctcacgggctcccactgcctcctggctctgcacacagcaggtctgtggtcatgtgtggccctgcagaggggacccttttcctctccctgagagataaagagccctgtgcctgaaatgccaccagcagtactcattcctctggctaatcccaaacattcactgaatatttgctctgggtgcttcgggcaggagccactgctcacttctggcctggcctgttcccccaggccaagtttacatctctccattccaggctttgtgtgtaagaggcagtcagagccctcgggccctcctgaaatgtgcatatgcaccactagccccggctgggacatccgccctctgctccctgataaggtccctctctgcctggactggggactgaggatccgagatggaaaagccccagcccagcgcccctgccttcctggagtcagagaggcctgggttctgcttgtggtgcggccttcaccaatcaccccctcctcagggcctccatctccctgctggtgtggagtgagggatgaattcacagcagggcttgccaggcttttttttttttttttttttttaactgtagaagctttccttccaacaaaatcttgcgaggagctcagtgtctgaaattgaaaagctgggagcatcttcttgattgtgttttttgggggcgagtccctgggctttgttttctctcccccttcactccacctctctctcaggtcctggggcacctggaggggagttccagggacctggctgggaaagagctgtcctcagtgcccatgggaccagtccatgggatgtgtctgtacatctgtgtatcgggccctgaggcccacctttagcccacctcccctcccgaggtctccttctgccaatcacctgcctaatgcccctgcaccctggtgtcaggcagccccccagagctgcatccctccctcctgtagttaaccaatgctctatgagcctctctcagccaagaccttggcatcagctcaccactgccccgcccctggccctccccttcatcacgggccgtctytcaggcttggcgccctgggatgctcccttgctccagctctgtgactgtccccatgagggtcctccctcagtgcagccccatctctccagcggtgctggcacgatggacccggttgactccctgcctcctgccctctccgttcagtctaaactgcacagtctaacgtaggaaccactagagcatgcagctattaaaattcaaattaaattaagctgggtatggtggtgtgagacttgtcccaactactcacgaggctgagatgggaggattgcttgagtccaggaattcacatacagcctgggtaacataggtctcgtctctaaaaaacaaaaacaaaaacattatggaatgagcctctggggatgaggagctgatgtcctgaatggaccagtgaccagtgcaggaggggtggagtcctagcaggggtagatcccagctttgggaaccaactttcccaggcacttgccggccactccgtgggaaagtcctcaggcagcctgcagggagctgggatcagctgatggggatgggtttggaggggagagagtggtgcacagggactggaggtgggggaggggtggggttgccatggaaagggctcttgggatgggtcttgggctgagcctttggcaaggcctccaccctggagctgagccagcagagagtggggctgactccatgaggcccagactctcgtgggtattctggtggcctgggcaccctgtctttcctgaaccctgcctgcctaatctaagaactgctccccttgtagctctgtctctcctctgttggcctagtttcttcatccatgggtgggcacagcagaagctgtctcacctgctccatggtgaacgggatttgcaaggatttgactctggccatccagggaagatggagtctttgaccaggcctggcccctgaagcagacttcttccttctgagcctgctggggaagcagaattcctcgatgctgggtgtcatggtctaccaggccctccctcgcccaggccacttgtgttgagcctggagcagaacccccagatctgtagtccgcctgtcagcttggggagtctccgtttccgtctgtttcattcccatcagctgtgtgtggctgagcaagtcacttaacctcttgaggcctccatgtcctcatctgcaaaatggagacacacatatctgcgtccccgatgaccaccagtagctgggatgatacgtcgactgcagagtgaccactttgtgtaggcgtccctgtggatggttgtcagtcaaaggagtgagtcagatgatgagaggggaggacagcagagcagcagttgtttcttcagtctcgccgggactccaggatcggccatgttctgcagccaccgcctctacctgtctccccatgtg

SEQ ID NO: 88010 - DNA, 2458 bp, Homo sapiens
aactctcatctttataagcacatgaggatggtgagagcttactgaaaacccaggagaagagagagaatatttgttaaacacccattcggtgttgggtcttgagcaggtacctaacatatatgatataatttcatcctcataacagyccggcagggtgtgtttttttgccccaatttacagacaagaaaattgaggttcagagagagaaactcccctgccacccagctagtgaaccaggattcatatccagaccagctcaacttttggagcaccctgtagtctccctatgtggcttccaaggagcccaggaagggtgagtgccacagggcctggagaactgggtttgggtcccacctgtgccactcacttgctgtgtggctaaggcgggtgctcacttcctctgtttttcccctgtgtaacatggggtatggcctgttagatggtttctttttgtttgtttgttttagatacagagtcttgctctataccccaggctggagtgcagtggcgtgatcttgactcactgcaacctccgtcttcggggttcaagcaattctcctgcctcagcctcccaagtagctgggattataggcgcccgccaccatgtccggctaatttttgtatttttagtagagatgggttttcgccatgttggccaggctggtctcaaactcatgacctcaggtgatccaccggcctcggccttccaaagtgctgggattacaggcctgagccaccgcgcccggccgttagatagtttctaatagctctgccctttccatgtggacatggtcctggccagccacaaaggggaatgacagaagagagaaggaaagaaagaaagaggtcggtgtggcttccgaggcgcagcagcagcagctcagaggaacaggcagaagaaaggctctggccttccccctccaagaaagtggggtcttactacccacaggatgcctgcaggtcgccgacccaattgtgccctcacagcaaatggactcacagcagcccagggcttgatttttccagttgagccccatctgctgtgggaacccggatgccccagctcagccctcctgccagcagggggagggagcgtcggctgcggagggagctgggatgcatgcgtgtgggcagccagaggccaggcatgtgtggacaagatggagggcggcgggagagcagggaggggtctgctgtgttgcagccagcaaagagcaatgtggaggaatcagaacggcttcagaagccaccaaggcagcgtatgacatgctctaaataatgaccaccagcggggaatacaaacagaagcctcttcggcacagaagagccagccccaagctctggcctttcgtggaagaggcctctttgcccagaaagaaggcaacaggccgggcgcggtggctcacgcctgtaatcccagcactttgggaggcagaggtgggtggatcacctgaggtcaggagttcgagaccagcctggctaacatggtgaaaccccgtctctactgaaaaaaacacaaaaattagccgggcatggtggtgcgtgtcagtagtctcagctactgggggtgctgaggcaggaagatagcttcaacttgggaggcggaggttgcagtgagctgagatcgcgccactgcaccccagcctgggcaacagagcaagactccatctcaaaaaaaaaaaaaaaaaaaaaggcaacagtgggcaaccagcaaatagcaccatgcttaggccactagacttggcagggcccagatccaggtgggaaggaagctggtttaggagcaagcagggacttctacattggagacgtttcttgaaggaggtatttctggctgggtagtgtcacaaacggaatggggattttggagttagtcacacttgactttgaatcctcgctttgtcagttatcaacagtgtgacccttgggcaagggtcattactgctctgagcctcagtttccccatcctgtgaaatgggaatagtaaaaataatatttagcttataggaatgttgtaaggccttgctgctgcaagtgtggcctgaggcccagcggcattggcatctgattagaaaggcagccctgccaggcatggtggctcatgcctgtaatcccagcactttgggatgctgaggtgagcggatcacatgaagtcaggagttcgagaccaacctggccagcatggcgaaaccttgcttctactaaaaatacaaaaattagccgggcgtgacggtaagtgcctgtaatctcagctacttgggaggctgaggcaggagaaccgcttgaacccgggaggcagaggttgcagtaaactgagatttcgccactgcactctagcctgggtgacggagcgaggttccatctcagaaaaaaagaaaaaagaaatgccgcccctcagctctttcccccaactgagtcataatctccattttaatgagatccccagagcaagatttgc

SEQ ID NO: 88011 - DNA, 2458 bp, Homo sapiens
aactctcatctttataagcacatgaggatggtgagagcttactgaaaacccaggagaagagagagaatatttgttaaacacccattcggtgttgggtcttgagcaggtacctaacatatatgatataatttcatcctcataacagtccggcagggtgtgtttttttgccccaatttacagacaagaaaattgaggttcagagagagaaactcccctgccacccagctagtgaaccaggattcatatccagaccagctcaacttttggagcaccctgtagtctccctatgtggcttccaaggagcccaggaagggtgagtgccacagggcctggagaactgggtttgggtcccasctgtgccactcacttgctgtgtggctaaggcgggtgctcacttcctctgtttttcccctgtgtaacatggggtatggcctgttagatggtttctttttgtttgtttgttttagatacagagtcttgctctataccccaggctggagtgcagtggcgtgatcttgactcactgcaacctccgtcttcggggttcaagcaattctcctgcctcagcctcccaagtagctgggattataggcgcccgccaccatgtccggctaatttttgtatttttagtagagatgggttttcgccatgttggccaggctggtctcaaactcatgacctcaggtgatccaccggcctcggccttccaaagtgctgggattacaggcctgagccaccgcgcccggccgttagatagtttctaatagctctgccctttccatgtggacatggtcctggccagccacaaaggggaatgacagaagagagaaggaaagaaagaaagaggtcggtgtggcttccgaggcgcagcagcagcagctcagaggaacaggcagaagaaaggctctggccttccccctccaagaaagtggggtcttactacccacaggatgcctgcaggtcgccgacccaattgtgccctcacagcaaatggactcacagcagcccagggcttgatttttccagttgagccccatctgctgtgggaacccggatgccccagctcagccctcctgccagcagggggagggagcgtcggctgcggagggagctgggatgcatgcgtgtgggcagccagaggccaggcatgtgtggacaagatggagggcggcgggagagcagggaggggtctgctgtgttgcagccagcaaagagcaatgtggaggaatcagaacggcttcagaagccaccaaggcagcgtatgacatgctctaaataatgaccaccagcggggaatacaaacagaagcctcttcggcacagaagagccagccccaagctctggcctttcgtggaagaggcctctttgcccagaaagaaggcaacaggccgggcgcggtggctcacgcctgtaatcccagcactttgggaggcagaggtgggtggatcacctgaggtcaggagttcgagaccagcctggctaacatggtgaaaccccgtctctactgaaaaaaacacaaaaattagccgggcatggtggtgcgtgtcagtagtctcagctactgggggtgctgaggcaggaagatagcttcaacttgggaggcggaggttgcagtgagctgagatcgcgccactgcaccccagcctgggcaacagagcaagactccatctcaaaaaaaaaaaaaaaaaaaaaggcaacagtgggcaaccagcaaatagcaccatgcttaggccactagacttggcagggcccagatccaggtgggaaggaagctggtttaggagcaagcagggacttctacattggagacgtttcttgaaggaggtatttctggctgggtagtgtcacaaacggaatggggattttggagttagtcacacttgactttgaatcctcgctttgtcagttatcaacagtgtgacccttgggcaagggtcattactgctctgagcctcagtttccccatcctgtgaaatgggaatagtaaaaataatatttagcttataggaatgttgtaaggccttgctgctgcaagtgtggcctgaggcccagcggcattggcatctgattagaaaggcagccctgccaggcatggtggctcatgcctgtaatcccagcactttgggatgctgaggtgagcggatcacatgaagtcaggagttcgagaccaacctggccagcatggcgaaaccttgcttctactaaaaatacaaaaattagccgggcgtgacggtaagtgcctgtaatctcagctacttgggaggctgaggcaggagaaccgcttgaacccgggaggcagaggttgcagtaaactgagatttcgccactgcactctagcctgggtgacggagcgaggttccatctcagaaaaaaagaaaaaagaaatgccgcccctcagctctttcccccaactgagtcataatctccattttaatgagatccccagagcaagatttgc

SEQ ID NO: 88012 - DNA, 2458 bp, Homo sapiens
aactctcatctttataagcacatgaggatggtgagagcttactgaaaacccaggagaagagagagaatatttgttaaacacccattcggtgttgggtcttgagcaggtacctaacatatatgatataatttcatcctcataacagtccggcagggtgtgtttttttgccccaatttacagacaagaaaattgaggttcagagagagaaactcccctgccacccagctagtgaaccaggattcatatccagaccagctcaacttttggagcaccctgtagtctccctatgtggcttccaaggagcccaggaagggtgagtgccacagggcctggagaactgggtttgggtcccacctgtgccactcacttgctgtgtggctaaggcgggtgctcacttcctctgtttttcccctgtgtaacatggggtatggcctgttagatggtttctttttgtttgtttgttttagatacagagtcttgctctataccccaggctggagtgcagtggcgtgatcttgactcactgcaacctccgtcttcggggttcaagcaattctcctgcctcagcctcccaagtagctgggattataggcgcccgccaccatgtccggctaatttttgtatttttagtagagatgggttttcgccatgttggccaggctggtctcaaactcatgacctcaggtgatccaccggcctcggccttccaaagtgctgggattacaggcctgagccaccgcgcccggccgttagatagtttctaayagctctgccctttccatgtggacatggtcctggccagccacaaaggggaatgacagaagagagaaggaaagaaagaaagaggtcggtgtggcttccgaggcgcagcagcagcagctcagaggaacaggcagaagaaaggctctggccttccccctccaagaaagtggggtcttactacccacaggatgcctgcaggtcgccgacccaattgtgccctcacagcaaatggactcacagcagcccagggcttgatttttccagttgagccccatctgctgtgggaacccggatgccccagctcagccctcctgccagcagggggagggagcgtcggctgcggagggagctgggatgcatgcgtgtgggcagccagaggccaggcatgtgtggacaagatggagggcggcgggagagcagggaggggtctgctgtgttgcagccagcaaagagcaatgtggaggaatcagaacggcttcagaagccaccaaggcagcgtatgacatgctctaaataatgaccaccagcggggaatacaaacagaagcctcttcggcacagaagagccagccccaagctctggcctttcgtggaagaggcctctttgcccagaaagaaggcaacaggccgggcgcggtggctcacgcctgtaatcccagcactttgggaggcagaggtgggtggatcacctgaggtcaggagttcgagaccagcctggctaacatggtgaaaccccgtctctactgaaaaaaacacaaaaattagccgggcatggtggtgcgtgtcagtagtctcagctactgggggtgctgaggcaggaagatagcttcaacttgggaggcggaggttgcagtgagctgagatcgcgccactgcaccccagcctgggcaacagagcaagactccatctcaaaaaaaaaaaaaaaaaaaaaggcaacagtgggcaaccagcaaatagcaccatgcttaggccactagacttggcagggcccagatccaggtgggaaggaagctggtttaggagcaagcagggacttctacattggagacgtttcttgaaggaggtatttctggctgggtagtgtcacaaacggaatggggattttggagttagtcacacttgactttgaatcctcgctttgtcagttatcaacagtgtgacccttgggcaagggtcattactgctctgagcctcagtttccccatcctgtgaaatgggaatagtaaaaataatatttagcttataggaatgttgtaaggccttgctgctgcaagtgtggcctgaggcccagcggcattggcatctgattagaaaggcagccctgccaggcatggtggctcatgcctgtaatcccagcactttgggatgctgaggtgagcggatcacatgaagtcaggagttcgagaccaacctggccagcatggcgaaaccttgcttctactaaaaatacaaaaattagccgggcgtgacggtaagtgcctgtaatctcagctacttgggaggctgaggcaggagaaccgcttgaacccgggaggcagaggttgcagtaaactgagatttcgccactgcactctagcctgggtgacggagcgaggttccatctcagaaaaaaagaaaaaagaaatgccgcccctcagctctttcccccaactgagtcataatctccattttaatgagatccccagagcaagatttgc

SEQ ID NO: 88013 - DNA, 2458 bp, Homo sapiens
aactctcatctttataagcacatgaggatggtgagagcttactgaaaacccaggagaagagagagaatatttgttaaacacccattcggtgttgggtcttgagcaggtacctaacatatatgatataatttcatcctcataacagtccggcagggtgtgtttttttgccccaatttacagacaagaaaattgaggttcagagagagaaactcccctgccacccagctagtgaaccaggattcatatccagaccagctcaacttttggagcaccctgtagtctccctatgtggcttccaaggagcccaggaagggtgagtgccacagggcctggagaactgggtttgggtcccacctgtgccactcacttgctgtgtggctaaggcgggtgctcacttcctctgtttttcccctgtgtaacatggggtatggcctgttagatggtttctttttgtttgtttgttttagatacagagtcttgctctataccccaggctggagtgcagtggcgtgatcttgactcactgcaacctccgtcttcggggttcaagcaattctcctgcctcagcctcccaagtagctgggattataggcgcccgccaccatgtccggctaatttttgtatttttagtagagatgggttttcgccatgttggccaggctggtctcaaactcatgacctcaggtgatccaccggcctcggccttccaaagtgctgggattacaggcctgagccaccgcgcccggccgttagatagtttctaatagctctgccctttccatgtggacatggtcctggccagccacaaaggggaatgacagaagagagaaggaaagaaagaaagaggtcggtgtggcttccgaggcgcagcagcagcagctcagaggaacaggcagaagaaaggctctggccttccccctccaagaaagtggggtcttactacccacaggatgcctgcaggtcgccgacccaattgtgccctcacagcaaatggactcacagcagcccagggcttgatttttccagttgagccccatctgctgtgggaacccggatgccccagctcagccytcctgccagcagggggagggagcgtcggctgcggagggagctgggatgcatgcgtgtgggcagccagaggccaggcatgtgtggacaagatggagggcggcgggagagcagggaggggtctgctgtgttgcagccagcaaagagcaatgtggaggaatcagaacggcttcagaagccaccaaggcagcgtatgacatgctctaaataatgaccaccagcggggaatacaaacagaagcctcttcggcacagaagagccagccccaagctctggcctttcgtggaagaggcctctttgcccagaaagaaggcaacaggccgggcgcggtggctcacgcctgtaatcccagcactttgggaggcagaggtgggtggatcacctgaggtcaggagttcgagaccagcctggctaacatggtgaaaccccgtctctactgaaaaaaacacaaaaattagccgggcatggtggtgcgtgtcagtagtctcagctactgggggtgctgaggcaggaagatagcttcaacttgggaggcggaggttgcagtgagctgagatcgcgccactgcaccccagcctgggcaacagagcaagactccatctcaaaaaaaaaaaaaaaaaaaaaggcaacagtgggcaaccagcaaatagcaccatgcttaggccactagacttggcagggcccagatccaggtgggaaggaagctggtttaggagcaagcagggacttctacattggagacgtttcttgaaggaggtatttctggctgggtagtgtcacaaacggaatggggattttggagttagtcacacttgactttgaatcctcgctttgtcagttatcaacagtgtgacccttgggcaagggtcattactgctctgagcctcagtttccccatcctgtgaaatgggaatagtaaaaataatatttagcttataggaatgttgtaaggccttgctgctgcaagtgtggcctgaggcccagcggcattggcatctgattagaaaggcagccctgccaggcatggtggctcatgcctgtaatcccagcactttgggatgctgaggtgagcggatcacatgaagtcaggagttcgagaccaacctggccagcatggcgaaaccttgcttctactaaaaatacaaaaattagccgggcgtgacggtaagtgcctgtaatctcagctacttgggaggctgaggcaggagaaccgcttgaacccgggaggcagaggttgcagtaaactgagatttcgccactgcactctagcctgggtgacggagcgaggttccatctcagaaaaaaagaaaaaagaaatgccgcccctcagctctttcccccaactgagtcataatctccattttaatgagatccccagagcaagatttgc

SEQ ID NO: 88014 - DNA, 558 bp, Homo sapiens
gcggccctgccagggtcgtgtgttcagtgctcagcccactgaagtcacccaacatgcgtgaattcatctctctcacttcctttttatttcccatttactcctaaaatcacaagtatcaatttttggttggggattattttagtgcaataaatagaattatgtttttaaragatattttagtattttctttgtaaacattctcaagttggcagaaaatttatacccttggtactgagagttttgaaaaagaactgatataatccaattacatttttttttttttttttgagatggagttttgctcttgttgcccaggctggagtgcaatggtgcgatctcagctcaccgcaacctccacctcctgggttcaagtgattctcctgcctcagcctcccgagtagctgggactgcaggcgcacgccaccacacctggctaatttttgtatttttagtagagacagggtttcgccgtgttgcccaggctggtcttgaactcctggcctgaagcaatccacctgccttggcctcccaaagtgctaggattacaggcgtgagcca

SEQ ID NO: 88015 - DNA, 619 bp, Homo sapiens
aggaagcagcgctggcctgagagtggggcctgggctctggccccaggtctgccagcaattcacgggagatcttgggaaagttgaagagttcgcttcctccagtgggtcccccaagctagtstcctgggtggacaccccagatgctgggaagggatttcctgagcctggggactagaagcaagatcgtgggctgagcctgtgcccagccggaccttctggctccttgcatttccagccttgaaatggaatcgattctccattctgggccacagcttcggtgagtacagtggccaggagctgaccgggcccggagtagggctgggagggaaggataggagctgctgccccacccctttcccctgcacttatgagatctgcaaagagagatgagagggtcagtcagaggttgaccactgtaccctctgacctcaggcaactgccgcaagggacacagggatgagggaaatgtggtcttttgagtggtcaggtctgatgaaggggacatcatggcccagatgctgagcccccagccacccatatggtgccccccccccaactggtgggaagaagctttagggtatgcagctggggagggagtgagggaatgtcacccacagct

SEQ ID NO: 88016 - DNA, 1183 bp, Homo sapiens
tctctagtgttgtgtgtatgactccgatttgtgatgtatcccccgccacctggagaggcaaggagrtctgtcatccacctgggaggtccggctgtccagggcgggcgtcacctgttgggggtgccaataaagatgccgcctaagggaaccacatcctgataatcatgttctgagccatgggggaaccctgctgcactccagcctcagactctgggacaggttggagccccagtgactctcacatggagataggacatccctctgggggacattgtgagccacaacctcaaccccatttgggctggggattctctgttcccagggtcctgtgtgaaccgcagctgctgaatggtgtgcagaattggaagagttatgatcaaaagccagttcctgtgtgaatttaagggtgctgggtggttagtccaggggcctactgagaacttgtcctattcttttttatttttatttttgacagagtgtcgctctgttgccaggctggagtgcagtggagtgatcttggcttactgcaatctctgcctcccaggttcaagcgattcccctgcctcagcctcccgagtagctgggactacaggtgcacaccaacacgcctggctaattttttgtattttagtagagacagcatttcaccatgttagccaggatggtctcaatttcccaacctcgtgatctgcctgcctgggcctcccaaagtgctgggattacaggcgtgagccaccgtgcccggcccgaacttgtcctattcttgaccccacatgaacagaaataagaggtaacaggactgtctcaaataacctcaacctcatatgcacattaatgtgaatttttggatgccctgaaaggcagattttatgtgcagaaaagattatccaggggttttcttaagttttaaaaattaatattcaatttattaaagttataaataaaaggaaaaacctagtttgtccttacacttttaatttcagcttaaataacttattattttaattatagatctagcaaatttagcaatcacttctaagaaggctctgattaattttggtctcatttacgaacttaaactcctttaaacttttcatattgcattattcatcacatataatatatttgcttaacttcctaagtataattggctgacaaaccttcttaagtgctgaagcaattc

SEQ ID NO: 88017 - DNA, 529 bp, Homo sapiens
ccacctcccgcatccctccctcctctcccgtcattgtcactgtccccaggccacctccctgtgccctctttccactctctcacctcctgctccattcaacccccctgctcttccagaatcagggaaactgaaggatgggcctcagtctctaaggaaggcagagacctgggttgagcagcagaataaaagatcttcttccaagaaatgcaaacagaccgttcaccaccatctccagctgctcacagacaccagcaaagcaatgtgctcctgatcaagtagattttttaaaaatcagagtcaattaattttaattgaaaatttctcttatgttccaagtgtacaagagtaagattatgctcaatattcccagaatagttttcaatgtattaatgaagtgattaattggctccatatttagactaataaaacattaagaatcttccataattgtttccacaaacactagcaaatgtgtagatgtctttccttgtgtagcggacctgtagcygggaaaggtcacacaacatcc

SEQ ID NO: 88018 - DNA, 1464 bp, Homo sapiens
ctggcagggggtagggcacataagtccctggggagctcactcagaggttccaggttgtggcccttatggaagttcctgggtccaggggctagagtgagactgttccccgctcatgtctgggctgcagacgcccaaccagtggctccccctgtccacccttggcaagggagggtcctggcctccctctctgctagtggggaccccccaacaccctgtcttctctcctctctggagctctgcctgggtgcatggcttgtacagtgagttactgagaattgaactctggacagtagctgggccccactttgctttaaacattttagtctgaggccttctttgtcatcagatgagaaggttcacagatgtgcagatgtgctgatagtctaacctgactggtttgtaaaactagaaagagaaacagacaatgtgcctgtttctgtgatgggccataaagtggatcttacagatttggagacattctggaagatctggacctgtctggatcagagaggggaggcaggcatgggccagtcatgaatccagtggggcttgggccagctggggcagcagggaggaggacgtgcccagggtgggtgagctggggagaccctggaacccaaggctgaggacccagagccaggagatgcaggagacgccccagggatgctgaacaaagcgctgtcccctgttgcagctctcctgggtctccccatagaaagctcatgtgggggctgtcctgaccatgggtccaggggtgtatttgctccaggggcatttgatgcattattgagccaggggaaaggccatcacactctgggcagcaggagccaccgggaagggttggggaagggttggatcctcccaaagttggtacaagtgtggtctctggcccaggtgggctgtgggtactgcggggcgtccagctgtgcatgcctckggtgtgaactgggaagggtggcctctggtcagactcacacaacacaccaagatgagctcacaccagaaccacctgagactcaaatggcagttgactgcccccaggggacatcttcttgactagaagagtccaacatctggagacagaatgggaggggtcctcacggcagagaacagggcctcttctagtctgtggcgcccaccaaaatggcagggacactgtgctgaggtgggaggattgctggccaaagacaggggggtctagtaagagccagaacaggggagcaggcaggacaggggacagcccctgggcccacagggccagcaccttccaggggcagctgtgctgggtgtagcaggtggacctgggaaaggacggcgccagacctgccgccaggactcaggggctcacttggggcaggagcacagtgtccctcacatttctgcagggcccagaggtgggagaaagggcacagggtggcccttctgacaggggggtgggggtgtgtccctgctggggactctgtt

SEQ ID NO: 88019 - DNA, 1464 bp, Homo sapiens
ctggcagggggtagggcacataagtccctggggagctcactcagaggttccaggttgtggcccttatggaagttcctgggtccaggggctagagtgagactgttccccgctcatgtctgggctgcagacgcccaaccagtggctccccctgtccacccttggcaagggagggtcctggcctccctctctgctagtggggaccccccaacaccctgtcttctctcctctctggagctctgcctgggtgcatggcttgtacagtgagttactgagaattgaactctggacagtagctgggccccactttgctttaaacattttagtctgaggccttctttgtcatcagatgagaaggttcacagatgtgcagatgtgctgatagtctaacctgactggtttgtaaaactagaaagagaaacagacaatgtgcctgtttctgtgatgggccataaagtggatcttacagatttggagacattctggaagatctggacctgtctggatcagagaggggaggcaggcatgggccagtcatgaatccagtggggcttgggccagctggggcagcagggaggaggacgtgcccagggtgggtgagctggggagaccctggaacccaaggctgaggacccagagccaggagatgcaggagacgccccagggatgctgaacaaagcgctgtcccctgttgcagctctcctgggtctccccatagaaagctcatgtgggggctgtcctgaccatgggtccaggggtgtatttgctccaggggcatttgatgcattattgagccaggggaaaggccatcacactctgggcagcaggagccaccgggaagggttggggaagggttggatcctcccaaagttggtacaagtgtggtctctggcccaggtgggctgtgggtactgcggggcgtccagctgtgcatgcctctrgtgtgaactgggaagggtggcctctggtcagactcacacaacacaccaagatgagctcacaccagaaccacctgagactcaaatggcagttgactgcccccaggggacatcttcttgactagaagagtccaacatctggagacagaatgggaggggtcctcacggcagagaacagggcctcttctagtctgtggcgcccaccaaaatggcagggacactgtgctgaggtgggaggattgctggccaaagacaggggggtctagtaagagccagaacaggggagcaggcaggacaggggacagcccctgggcccacagggccagcaccttccaggggcagctgtgctgggtgtagcaggtggacctgggaaaggacggcgccagacctgccgccaggactcaggggctcacttggggcaggagcacagtgtccctcacatttctgcagggcccagaggtgggagaaagggcacagggtggcccttctgacaggggggtgggggtgtgtccctgctggggactctgtt

SEQ ID NO: 88020 - DNA, 608 bp, Homo sapiens
aggtcttcaaggtggggctggtgtttccagcccaggagtcctgagctgccccatctcaattgcctgagaagcacatttgggagacctcagggcaccctaagggatgtggaaaatcctatgaattacccgaaaagaagtccctggcaggttcctctccccagtsatccccctcaggagtgtccctgtcccgatgctcggtgtggtaggagttaaccctgcaggcaggaggaagccccagagggtccatctccagcaggggctgtgggtgagcagagccaggacaggggtgcatggtgaggccacagaataagacccagctctaccccagggagaggagcagggtcctcctcggagggcctgagcacactgagctgaccctggggagaccctgacaaggcttagacaggccccagggctgcagtgatctcccagtgagccatagaaggggtcagagggggaggtttggaagtgtgctaagggatgtgcggagcagggggaaggagggtggggtgcaagggaggaagtgtggggagggaggaggaggcagggcagtccaggagggctcttcctcctctggtcttttccctggctgtccacagacacttgat

SEQ ID NO: 88021 - DNA, 608 bp, Homo sapiens
aggtcttcaaggtggggctggtgtttccagcccaggagtcctgagctgccccatctcaattgcctgagaagcacatttgggagacctcagggcaccctaagggatgtggaaaatcctatgaattacccgaaaagaagtccctggcaggttcctctccccagtcatccccctcaggagtgtccctgtcccgatgctcggtgtggtaggagttaaccctgcaggcaggaggaagccccagagggtccatctccagcaggggctgtgggtgagcagagccaggacaggggtgcatggtgaggccacagaataagacccagctctaccccagggagaggagcagggtcctcctcggagggcctgagcacactgagctgaccctggggagaccctgacaaggcttagacaggccccagggctgcagtgatctcccagtgagccatagaaggggtcagagggggaggtttggargtgtgctaagggatgtgcggagcagggggaaggagggtggggtgcaagggaggaagtgtggggagggaggaggaggcagggcagtccaggagggctcttcctcctctggtcttttccctggctgtccacagacacttgat

SEQ ID NO: 88022 - DNA, 1812 bp, Homo sapiens
gtcatcacctatgataacaatgccttcttctggaatacctcctgaaggacctacctgaggctgttttacagttaacattttttttaataaataggagtacaccataaaataatgataaaaactataagatagtaaatacataaaccatagctaaagaacactgaaaattaaataatgaaataaataaaacataaaccagtaacagtcatttattaccattaccccagtattgtgtactatattttatatgactggcaggcaacacagtacatttgttcacaccaacatcaccacaaacacgtgactaatgcgttacgctatgacattacgaaggctaagagtcgctaggtgataggaattgtttagttccattataatcttatgggaccaccgtcatatattcagtcagctgctgactgaaacatcgttacgtggtgcatgactgtgtgtatgtatacacacacatacatgtatatttaatagtcattttgggctttctcattttttcagtccaaatttgaaaaactttttaacttcagcacataggtgtccaagagaggcttgctatgacagtttattttactagcatttattcaacactgctcaattccacgtctctgctggatataaagacaggtaggtacctgccctcaaggagccatgagtctagtagagaagacaatgcagaaagagataatcaccacacaaggcaggatgagagggattagacatgcagctgggaaccaagcagaggctctctctggggttgcggggatggtggcccttagcttggggctggatcagtgaggatttgtcaatcgggcagggcgggaaaggcagaaggaacacagaggcttatttggggaactgcaagtggttctggtggaggattttaatttcaaaattaaaggagagaggccaaaaggaacgagtatttgttgaacacccaataatgatcatgatagccagtacatgctgcacttaccatgtgtcaggcactgttctaagtgcctcccacagattcatgcatccactcctcacacagacaccatgaggcacaacaattatcacccctatttacacgatggaactggggcaccaggaggttaagtaacttgcctgaggctcacagtctggctccagtgaccatgctcttaactgacatgctaaaccactatatggcaggcttgtatattcatatcttgactttattttcctgtcataagtacacataggagcagcaactaagccagacatagagcacacttcagccattcactagctgtgtggtcttgggaaaattatttaacctctctgtgcctgagtttcggtatctgaaaaccaagaataatatcggcgctgagttgtgagaattaaatgggttaatacacatgaagtatgtgggctcctgtgtggagaactgattggaggggcaagagaaagggcaaagagaatgctaggagaatattgtataacagaagtcccaagccaggagtaatggtgctttaaacaagaagagcctcaatttgaaaatgggggaaattgtacctcattcacagggctttagtgagaccacaatraaagtgtgtaaaatatgcttagaagtgtccatggtagatgcctttaattttaaaaattatggctaaaatcaaatatgcacaaaagtaaaacagtataatattcccatcacccatcttcaacaattttcaacacatggtcaatcttgtttcacctatacctccatccactttctctctcccatattatttgagtacaaattccataaatcttgtaattccatctgtgaatatt

SEQ ID NO: 88023 - DNA, 637 bp, Homo sapiens
ggcaccgcttttatctgtagacaaaactttgagaatcactttattaatataaggcatgatgagcttctcaacaatatctttttttctttttttttttttgagatggagtcttgctctgtcgcccaggctggagtgcagtgacatgatcttggctcactgcaacttccgcctcctgggttcaagcgattctcctgcctcagcctcccgagtagctgggattacaggtgcatgccaccatgcctagctaattttttgtattttcagtagagacgggtttcacagtgttagccaggatggtctcgatttcctgacctcatgatccgcccacctcggcctccccaagtgctgggattacaggcgtgaaccactgcgcccagcaacagtatcttaaacaacaaaaagtgatgtatttagcaatgcaactgctaacacacagttacaaacttcctcttgacaaaaaaatctttactayaattcacctaatgagaatttatttattaaacaagagtatcctttatttctgaaatatataagctataaacttaatcctggatattctatatgaatttaatgttaattttaaactagttctgaactttaaaacgttctggccatggaatggaagggttatttgcaa

SEQ ID NO: 88024 - DNA, 2582 bp, Homo sapiens
ggctgggctcctgggactgatgaccagagcacctgagtgaggcctcttctcaggacctctctaaactcagatgtcacccctgggcaaggccttccctgacaccacctctgcataaggcccgggcccccattattccctcacagcacccccattatcatgtgcagtgtccttctgatatctgcctccctcatcagggtggaggctgtttgctgacttcttatccctcccccaccaaacaagaattgcaggactgtagggctcttgaagctcttgttcacttttgtgttttcagtgcagagttgaagctaggtgaatattttttaagtgaggggccaggcatggtggctcatgcctgtaatcccagcactttgggaggccaaggtgggaggatcgcctgaggtcaggagttcaagatcagcctggccaacatggtgaaaccccgtttctactaaaaatacaaaaattagctgggtgtagtggtgggtgcctgtaatcccagctactgtaatctcagctacctgggaggctgaggcaggagaatcacttgaacccaggaggcaggggttgcagtgagccaagatcacaccactgcactccagccctggcgacagagtgagactccatctcaaaaaaaaaaaaaaaaaaaattgttgaatgaaggagtgagtgagttcacagccgaggaagggaaacagacacacaacagacagatgcacaacaaactaacccgacagaggagggagtaattggctcttccttggcctggtggcaggggaactagaaagactcatcttgccctggatcctgacaggggagtagtttggccaggcggagggaggggcaggaagggtaacccaggtaccagtctgcacaaggccgggaggctggacagcttgtgtggcaacagtaccttgctgcccctcccatgtagttcctgggaggggacccctgcactctcagggtgcccactcatcactgagcagagagaagggttcagagggaaaatggagaatttagttgggggcagaattctgagggcaaagtcccttccaaactgcctcagaaatccctgatctggggattcctaaatgccaggcctcctgcaaggcacccggggcaccttggggcttggaacccggatttgcaggccctttcccggggattctgcatcgggagctgtgcccggaagccaggccaggcagggatggggatttcgtgacaaatggtggggaggaaggagcttcccttgcatcccagctcttccttgcccagaatgttggttggatcgtccagtttttcaagcagaactgatgatcctgattttattttatttatttatttattttgagatggactcttgctctgttgccaaggctagagtgcagtggcatggtcttggctcaccgcaacctctgctgcctgagttcaagtgattctcctgactcagcctcctgagtagctgggattacaggcgtgcaccatcacgcctggctaatttttgtatttttagtagagacagggtttcgccatgttggccaggctggtctcaaactcctgacctcatgtgatggtccacctcggcctcccaaagtgctgggattacaggtgtgagccaccgcgcctggcccaatcctgatttcaatgtgacatctcaccatgtgctcaggccacattctagctgccttcggttcacactctgggtatcagaggtcttgttattcacacttgttatctcactggatccttgccacaactctgggagacccacgggaaactgagggttggcaaaacgaactgacttggcccaggcttcgacactgggcaggtagcacaggtgggggctcaatccagggccgccagtttctgttttacctgcctcattctcctcccaggtgaaacaaggcactggttttcttgtgcatcattcagaaatgaccacaagagggtaggatggagacggtctattttccacatttcgttaatttgcttttaagccgttttacattcgggcctccattctaaacctgaaacatccaaattttccatgaccacttagattttcatcttttcatgcagcccactaatttcggtagatgtgtcactgtgctctgtccccawtgggccccatgtcagtttctattttgtgaacctgacatcagagctgcccagctgagcttaggatgttcctctgcagccttcacagccctggctgccccatttattttcatggatgatattttctcttccggagaaagtattttttgggaaaaaaaaattttgtttttgttttatttgtaaaaaagagcgtggggtatggatagccgagcctatagtgagaaacttatggttatagaaacagcatttttctcttaaggagatgtatttccagagatgctgaatcttctacttgaactcgaggtctcttgagaatagggacattttgtcatatttcaagcctgggttctgtgccaccttctccaagaagccctcctgggttgcaccctatcctgtgaactcctccattccaggccctctagcctctagtgctgtaatttattcccaagtgcttctcttacagaccg

SEQ ID NO: 88025 - DNA, 792 bp, Homo sapiens
agcaggtcagttatgacaacttcatcactgtcattaaccccttttgtttgcagtgaacacaaaaagctgttcagtatcaagagagtcaagaaaaagagaaagaagagggggtagagaaagtgagacaaccaaagagacagccagggaacagaaattcatacactatgaacaccagaaaaaaatacycctgggtaattgagtcacctgactcaaatggtgtaggggcctcagttagaggatcaaattttggactccttggtctttctgccaaaacagtaattgctcatacttataaatacaaatgtttttgccatttggtttcctagaaatgccctagacggagatgttatttttggtaaggggtcttcctgcttcaagtataatgactgtgaacaactagtttcagtatcttctctagcatgccagggtaaaatgaagcaaaataaatagaggaagtgcttataatctttattgaggatctaccaggtgccaggaaagatgcatttttctttttcttttttttttttttttttttgtgagacagggtctcactctgtcacccagcctggggtgcagtggtgcaatcttgactgactgcagcttccacttactgggttcaagcaattcttgtgccccagcctgccaagtagctgggattacaggcgtgcaccaccatgcctgtctaatttttgtattttcaatagagacagggttttgccatgttggccaggctggtcttgagctactagcctcaagctatccacctgcctcggcctcccaaagtgcaggatt

SEQ ID NO: 88026 - DNA, 792 bp, Homo sapiens
agcaggtcagttatgacaacttcatcactgtcattaaccccttttgtttgcagtgaacacaaaaagctgttcagtatcaagagagtcaagaaaaagagaaagaagagggggtagagaaagtgagacaaccaaagagacagccagggaacagaaattcatacactatgaacaccagaaaaaaataccmctgggtaattgagtcacctgactcaaatggtgtaggggcctcagttagaggatcaaattttggactccttggtctttctgccaaaacagtaattgctcatacttataaatacaaatgtttttgccatttggtttcctagaaatgccctagacggagatgttatttttggtaaggggtcttcctgcttcaagtataatgactgtgaacaactagtttcagtatcttctctagcatgccagggtaaaatgaagcaaaataaatagaggaagtgcttataatctttattgaggatctaccaggtgccaggaaagatgcatttttctttttcttttttttttttttttttttgtgagacagggtctcactctgtcacccagcctggggtgcagtggtgcaatcttgactgactgcagcttccacttactgggttcaagcaattcttgtgccccagcctgccaagtagctgggattacaggcgtgcaccaccatgcctgtctaatttttgtattttcaatagagacagggttttgccatgttggccaggctggtcttgagctactagcctcaagctatccacctgcctcggcctcccaaagtgcaggatt

SEQ ID NO: 88027 - DNA, 819 bp, Homo sapiens
caggccgagtgcagtggtgcaatcttggctcactgcaagctccgcctcccaggttcaggccattctcttgtctcagcctccagagtagctggaactacaggtgcctgccaccacacccagctattttttgttttttttttttctatttttgtagagacggggtttcactgtgttagccaggatggtctcgatctcctgacctcgtgatttgcccgcctcagcctcccaactgtcttcctgtttttaaggaaaaaaaaaaaaagtgggtagaagatgaaagtttgatatttcgctcatgcatagctttgtctcattaatatattttgtgcttgcctgtcatttcagctttctgctgccagaccaagctcctttgactgccattcctacttctgacactcctcttgtcsttttcaggacaactttatgcctattgtgccttggatcttgagaaatatgtggtaaaactggccagtggtgatggcaggcatagcagggaatcagattgaggggggctgccgggtgagagagaaaacaaaagagggaaacaggctacttgatgacggaatcaggctgcttctgcaatgacattacatgaaataatctgaaatacgatcttaactgtatctggtgggtcccgttaaccctgtaagttatggacagaacatttactcaaattgtagccaagtctaggctcatgggaacacgtgaccaattcaggtgaatgaaagggactttaaaacattaatttccagcttaggtcttcctaagactgcctgcatgttccttaacaccactccagcctgagtgtcacgtggatcc

SEQ ID NO: 88028 - DNA, 596 bp, Homo sapiens
cggcgtccagcatttcaaggaaggacaggagccccttctgaatcctgctccaagccccctcgtgcataatccgattcatccactagagggcgcccaggtgatggtgacagcggcacaggcccagggctagggaaacggaggcaggcaggctggggacagtgaggtggaggcagcactcagaaagtgccccaactgcctggctacaatggaaatctctgagagccaaattcagatctggtcagaggcgtctgatttggtgtgtaytggtagggggagggggatctctgaatttcaacaagttttctccctctaggctccactcccaaaatgttctgttgacattggacctgtccttcaaggcccaggtcacacggcaccgcctcctcagggaagctgttcctccccacaccccggtggatggctgtcccgtacccccagtctgccccatggccaaggcaccacccctactggctcactggggtcctggcagaagccctctgctctccacagcccctagcacagccccacgtccacagcagcgctacatccagggatgagcagggagaatctgagaccgaaacctctggggcctgccc

SEQ ID NO: 88029 - DNA, 1285 bp, Homo sapiens
tgagtccaggcttttggccacgcctgcctgacagtccagtgggaaaactgtcaggtcctgggagaccctggcagggggacagactgccccaccgcagccaggggcagctcagagggtccccagggcagcagaggtctaagaccactgtggacatgggcctgagagccasagctcaaaagtcaggttggaggtttcctatttgaggagagcctccctctgcccagaacaccctctcctcctgcctttacctgcttcatgcttactcttgctcagctgagacgccacctcctccagggagccctccctgaccccagggagggtttacagctagcttcagagctccggtccagcccagagggaggtgtggccctgactggatgggagagactagagcaccagcaccagtgacttacacattcccaagtttccactgcctcccacgggagaccccccgctcgcactccaaaccccagccacctcccaccccctcagctccatgtggattaagagagaaaggaagaaacagcagtgactgcaggacagtaggacggctgctggcctagggtggcccagaaaaccccagcttcaccctacactggctgcatgacctgaggcatttcctaaccaccctgcgccttggcttcctcacctctaaaacagactgtagtggagttcctccctcccggtcactgtgagccttcacgggaagagcccctggtggacaccccagtaagtggtcatcttattattaatgaacaggggagcacccacccccggggtcatgggctcacagaatgcggggagcctagagcccccagccccaccgtctcattttatagctgaggagactaagcccagggagggaggaagccatggcttcagcaagaggccctgaccctaactccagagggagcccctgaccctaactccagagggagcccctgaccctaactccagttgctgccgccagctgcccttagccctggtccaccccctctaagggttcctgataagaagggacccagggccgggtgcagtggctctcacctgtaatcccagcactttgggaggccaagcaggggcggatcactggaggccaggaattcgagaccagcctggccaacatggtgagaaccccactccctgtctctactaaaaatacaaaaagtagccaggtgtggtggcggacacctgtaatcccagctactctggaggctgaggcagggtaatcgctttaacccaggaggtggaggttgaagtgagccaagatagtgccactgcactc

SEQ ID NO: 88030 - DNA, 1285 bp, Homo sapiens
tgagtccaggcttttggccacgcctgcctgacagtccagtgggaaaactgtcaggtcctgggagaccctggcagggggacagactgccccaccgcagccaggggcagctcagagggtccccagggcagcagaggtctaagaccactgtggacatgggcctgagagccagagctcaaaagtcaggttggaggtttcctatttgaggagagcctccctctgcccagaacrccctctcctcctgcctttacctgcttcatgcttactcttgctcagctgagacgccacctcctccagggagccctccctgaccccagggagggtttacagctagcttcagagctccggtccagcccagagggaggtgtggccctgactggatgggagagactagagcaccagcaccagtgacttacacattcccaagtttccactgcctcccacgggagaccccccgctcgcactccaaaccccagccacctcccaccccctcagctccatgtggattaagagagaaaggaagaaacagcagtgactgcaggacagtaggacggctgctggcctagggtggcccagaaaaccccagcttcaccctacactggctgcatgacctgaggcatttcctaaccaccctgcgccttggcttcctcacctctaaaacagactgtagtggagttcctccctcccggtcactgtgagccttcacgggaagagcccctggtggacaccccagtaagtggtcatcttattattaatgaacaggggagcacccacccccggggtcatgggctcacagaatgcggggagcctagagcccccagccccaccgtctcattttatagctgaggagactaagcccagggagggaggaagccatggcttcagcaagaggccctgaccctaactccagagggagcccctgaccctaactccagagggagcccctgaccctaactccagttgctgccgccagctgcccttagccctggtccaccccctctaagggttcctgataagaagggacccagggccgggtgcagtggctctcacctgtaatcccagcactttgggaggccaagcaggggcggatcactggaggccaggaattcgagaccagcctggccaacatggtgagaaccccactccctgtctctactaaaaatacaaaaagtagccaggtgtggtggcggacacctgtaatcccagctactctggaggctgaggcagggtaatcgctttaacccaggaggtggaggttgaagtgagccaagatagtgccactgcactc

SEQ ID NO: 88031 - DNA, 1285 bp, Homo sapiens
tgagtccaggcttttggccacgcctgcctgacagtccagtgggaaaactgtcaggtcctgggagaccctggcagggggacagactgccccaccgcagccaggggcagctcagagggtccccagggcagcagaggtctaagaccactgtggacatgggcctgagagccagagctcaaaagtcaggttggaggtttcctatttgaggagagcctccctctgcccagaacaccctctcctcctgcctttacctgcttcatgcttactcttgctcagctgagacgccacctcctccagggagccctccctgaccccagggagggtttacagctagcttcagagcyccggtccagcccagagggaggtgtggccctgactggatgggagagactagagcaccagcaccagtgacttacacattcccaagtttccactgcctcccacgggagaccccccgctcgcactccaaaccccagccacctcccaccccctcagctccatgtggattaagagagaaaggaagaaacagcagtgactgcaggacagtaggacggctgctggcctagggtggcccagaaaaccccagcttcaccctacactggctgcatgacctgaggcatttcctaaccaccctgcgccttggcttcctcacctctaaaacagactgtagtggagttcctccctcccggtcactgtgagccttcacgggaagagcccctggtggacaccccagtaagtggtcatcttattattaatgaacaggggagcacccacccccggggtcatgggctcacagaatgcggggagcctagagcccccagccccaccgtctcattttatagctgaggagactaagcccagggagggaggaagccatggcttcagcaagaggccctgaccctaactccagagggagcccctgaccctaactccagagggagcccctgaccctaactccagttgctgccgccagctgcccttagccctggtccaccccctctaagggttcctgataagaagggacccagggccgggtgcagtggctctcacctgtaatcccagcactttgggaggccaagcaggggcggatcactggaggccaggaattcgagaccagcctggccaacatggtgagaaccccactccctgtctctactaaaaatacaaaaagtagccaggtgtggtggcggacacctgtaatcccagctactctggaggctgaggcagggtaatcgctttaacccaggaggtggaggttgaagtgagccaagatagtgccactgcactc

SEQ ID NO: 88032 - DNA, 1285 bp, Homo sapiens
tgagtccaggcttttggccacgcctgcctgacagtccagtgggaaaactgtcaggtcctgggagaccctggcagggggacagactgccccaccgcagccaggggcagctcagagggtccccagggcagcagaggtctaagaccactgtggacatgggcctgagagccagagctcaaaagtcaggttggaggtttcctatttgaggagagcctccctctgcccagaacaccctctcctcctgcctttacctgcttcatgcttactcttgctcagctgagacgccacctcctccagggagccctccctgaccccagggagggtttacagctagcttcagagctccggtccagcccagagggaggtgtggccctgactggatgggagagactagagcaccagcaccagtgacttacacattcccragtttccactgcctcccacgggagaccccccgctcgcactccaaaccccagccacctcccaccccctcagctccatgtggattaagagagaaaggaagaaacagcagtgactgcaggacagtaggacggctgctggcctagggtggcccagaaaaccccagcttcaccctacactggctgcatgacctgaggcatttcctaaccaccctgcgccttggcttcctcacctctaaaacagactgtagtggagttcctccctcccggtcactgtgagccttcacgggaagagcccctggtggacaccccagtaagtggtcatcttattattaatgaacaggggagcacccacccccggggtcatgggctcacagaatgcggggagcctagagcccccagccccaccgtctcattttatagctgaggagactaagcccagggagggaggaagccatggcttcagcaagaggccctgaccctaactccagagggagcccctgaccctaactccagagggagcccctgaccctaactccagttgctgccgccagctgcccttagccctggtccaccccctctaagggttcctgataagaagggacccagggccgggtgcagtggctctcacctgtaatcccagcactttgggaggccaagcaggggcggatcactggaggccaggaattcgagaccagcctggccaacatggtgagaaccccactccctgtctctactaaaaatacaaaaagtagccaggtgtggtggcggacacctgtaatcccagctactctggaggctgaggcagggtaatcgctttaacccaggaggtggaggttgaagtgagccaagatagtgccactgcactc

SEQ ID NO: 88033 - DNA, 1141 bp, Homo sapiens
gctctgagctcagagattagtcagtatcaactgcctaacattaatgtctccatggctcagcaaccagtgctgttagacatctctaagtagaacacacacaggtaagtggccattattcaagctttcaggtgaaaaaaacatgaatgaggcagttcttatgccagcctcagcagctccaaccccccacactagtgttaacttctctttgctaaggttcctggcaaatttactatgctctgaaatcaataccccacaccgcacctaaagcaaacagtgctgaccatctgtagccttggaatattagttttcaagttaagcattcccattctgctgtcgcagcagttctgacaacgtgtaactcctgcttaaaaaaaaaagtctgccctctgctaacagcttgactccatctctacaatttccctccccctccactcctattcccccaacttttaggatgtctgtacatactggatcccggcctgtcgacttcccgcacgatgtgagtcatgccagccttgtatcccaggaaggctgtgaggtggaccggcttggacgggtcatccttagggaagctcttcaccttcccacgatgcctgctgctgcgcttccgaggcaggaagccgagggacccatgtctgggagcggagaactttctgtgagactaggtgggaaaaaaatcaccgtcagcacccaaaccaaagcagtgcccccttctctagttcccagctgcttaagttccaaatctcagcaatactgaagaatcctgaycagacacccagcaagccgaataaaaaggtcattatctcttccaggctcgcacgtgtcaagaatgcttttgtattcgacaaaatttaagctgaatcttatttcaaatcctctcaacctgtaagaaaacgacccattttttttatctaaccacacaaaaatacactaagtagtggcactaaaaactgcttaacaggcagctttatatgccaattagcaaggttttgaccgctaaagaaagggactcccgggacaaacgctgggtagcagctagcaatgttaagctataggctgcctccggtgcccggacactaattacactgatacacacaggccaaagaactccgcagagccaaatcagaacgtgacaatcagc

SEQ ID NO: 88034 - DNA, 1141 bp, Homo sapiens
gctctgagctcagagattagtcagtatcaactgcctaacattaatgtctccatggctcagcaaccagtgctgttagacatctctaagtagaacacacacaggtaagtggccattattcaagctttcaggtgaaaaaaacatgaatgaggcagttcttatgccagcctcagcagctccaaccccccacactagtgttaacttctctttgctaaggttcctggcaaatttactatgctctgaaatcaataccccacaccgcacctaaagcaaacagtgctgaccatctgtagccttggaatattagttttcaagttaagcattcccattctgctgtcgcagcagttctgacaacgtgtaactcctgcttaaaaaaaaaagtctgccctctgctaacagcttgactccatctctacaatttccctccccctccactcctattcccccaacttttaggatgtctgtacatactggatcccggcctgtcgacttcccgcacgatgtgagtcatgccagccttgtatcccaggaaggctgtgaggtggaccggcttggacgggtcatccttagggaagctcttcaccttcccacgatgcctgctgctgcgcttccgaggcaggaagccgagggacccatgtctgggagcggagaactttctgtgagactaggtgggaaaaaaatcaccgtcagcacccaaaccaaagcagtgcccccttctctagttcccagctgcttaagttccaaatctcagcaatactgaagaatcctgaccagacacccagcaagccgaataaaaaggtcattatctcttccaggctcgcacgtgtcaagaatgcttttgtattcgacaaaatttaagctgaatcttatttcaaatcctctcaacctgtaagaaaacgacccattttttttatctaaccacacaaaaatacactaagtagtggcactaaaaactgcttaacaggcagctttatrtgccaattagcaaggttttgaccgctaaagaaagggactcccgggacaaacgctgggtagcagctagcaatgttaagctataggctgcctccggtgcccggacactaattacactgatacacacaggccaaagaactccgcagagccaaatcagaacgtgacaatcagc

SEQ ID NO: 88035 - DNA, 577 bp, Homo sapiens
caggtcgggggcacgtaccgagcgccatttccacgcacgctcttccgctcctagctttcgttcagaagttgacgtcagcttcggagacagaaattacacactctacggcgaggggtcgggttcaaacttagtgaaaagccgcggagaggtgggctaagggtgggtgagccacaaatctacggcgtccggcagcagccaaatttgataataacgaagaaaaatggctgcgtcgcttctcctcctgtgatatgcagctatctctggaattagcgaagaaagactgaaactctcgtttcctggctcccacgctggttttgcggcgacaccaatttacctttaatacctttaatctcgggcatccctccctcaagccctatctctgccatttctcccatgctaatgcagtggcccgcgcttgattctgagggtcaggagcgtcccaagcctgcggaacggcctcacgacctctggtcatgccgagtccagctgctcagcctcccggagccccacgccttccagacctatgcatcagcgagggctttcgctgatctctgcctrggctccagggtgactcgga

SEQ ID NO: 88036 - DNA, 1390 bp, Homo sapiens
attcttaagctcactgacatggtattggcaggattcaattacttgtgggtgttggactgaggggctcagttccctgtgggcagttggctaaagaccctcagttccttgccatgcagtctttccaaagggtagtccaaaacacaacagctttcatcagagcaaccagggagtgggggagaagaggacgagcaagatggaggcagaaatcctttgtcacttactcccagaagtgatatcccatcacttcttgccatatcctgtagtggggtcagtgagatagcatgtgtaatatacccttgggatcatgcagggtgccctgtatctggcaggattgtgtctattgttattttctatttaatacacacacacacacacacacacacacacatagatagatttttttttttttgagagtgtcttgctctgttgcccaggctagagtgcagtggcttaatcttggctcactgcaacctccacctcccaggttcaagtgattctcctgcctcagcctcccgagtagctgggattacaggcatccgccaccatgcccagctaatttttgtattttagtaaagacggggtttcaccatgttggccaggctggtctcaaactcctgacctcgtgatccacccgcctctgcctcccaaagtgctgggattacaggcgtgagcgaccacgcctggcccgagagttttttgttttgctttgttttgtttttttgagacagagcctctctctgtcacccaggctggagtgcagtggcatgatcacggttcactacaacctccacctcctgggctcaagagatcctccccctcatcttccctggtacctgagactacaggcacgcaccaccatacctgggtaatttttttattttttagtaggggcggggttttgccatgttgcccaggctggtctccaactgctgagctcaagtgatcctcctaccttggcctcccaaagtgctgggattacaggcatgagccaccacccccagcccactgttattttttcattcatcactccatcyacttgccaggcctgggtaggggcctgagaccccagaccagcccacagctctgcagagggaaggagaacacaagatggggcccggcacatgccagcatctggaggagtcagcctgggggtgggggctgggcaggtccacagcccaggagggcctgtggctccttgttctttgagagtcggtccagtcccaggatatcttggtgtcagggcccaggaagacctttaggacctggctgaggggtgttggaaggggccacatctatggtcagagagtcctcagtgcctgtggctgaggaaggaagtgattgacccccacctggtgctatgtgacccacataagttaccctccctctctgg

SEQ ID NO: 88037 - DNA, 833 bp, Homo sapiens
gagtgggccccagatgtagcagctggtaccctacattcctaccatacagcccagcctggcacacagggcacgcaccagtatgaaggcacacacatgtggacacacccatgcacaagaacactcctacaactgcacgagcatacacatgagcgtgaatgtgcagtggtgtgcacatgagcatgtgcctacatctgtgtacagagacacgctcactccacctgcctttacgcagacacaccaactgctattcacatgtgtacaaacatgtgcacacccacctcccacaggcacgccaacatacacagaggcctgcatataaggcccacccaggtgtacacttcggggacaccagctggctgagcgtcactcagcaacataagcagccccgggtcccsgcctatgtgtgcacacatcgagtgccagctttagagaattccattccttgctggctctgctaatgatgccctcagggatgtcccattctggcagctgtaaacaggcaacgagcacaatgggactcttgttctttcaggtgtagcacagagggctggaggtgcacagaggagtggcggcccagtgtagggtggtcagggaaggcttcctggaggagggggtcttcgaaggagcaagcagggaaggacatgcctgtttgaatgaacccagcctagactgagtaattttctctgcttagggaaataacaaccatggcggtaaacccttgtcacgctcctatttaccacacacttcctcggcaccagactccatgtgtgtcatctcatttcatcctcatgacaaccttatgaggcgagtcctactacggtcaccatgtgcag

SEQ ID NO: 88038 - DNA, 1452 bp, Homo sapiens
acctgcctcggcctcccaaagtgctgggattacaggctctgttcacatttttgtgtgtgtgtgccaagcacagaggggccactgtgtgcagctacagaggcccagctggcctggcacctcggctggaaaggggcagcctctgggtagaagagctgggtgcccaggtggggaaggcatttcactcaccccctgccagagctcccttggagccccagagttccaggctcctgggtcctatctcctctgctttctccaagcccattccagggaaacagaaacccagacagggcttggaagatgtcactcctgggtcctgaagtgagaccccagaatagatgttctcctgaggtcccctctcctgaagttttataattctggggttggaagtgtcccatgctgtaaaatccaaaagtctgtttccctgcttctctttttcttatttatttatttattttgagatagggtctcactgtgtcaccaaggctgaatagcagtggtgcaaccatggctcactgcagctgtgaactcctgagctcaagtgatcttcccacctcggcctcccaagtagctgggactacaggcatgcgccaccacacctggctaacttttgtattttttatagagacgaggtctccctgtgttgcccagactggccttaaactcctgggctcaagcgatccttgcaccttggcctcccgaagtgcaaggattacaggcatgagccactgcaccaaaccttctctccttcttaagattctgagtttctgttttgactctatttgacagcatcagtcaaattgcaaacgggcttaccctttgacccagcaattctccttctaaggaatcttccagcctccagaagtcatcaagcatgtgcagaagagacaaggcaaaagtgttcacagtggcttcttgtgtaaccaaggaaaactgggagctgcccccatctgcaccaatggccagagcaatttatggaacgtttacggaacaccgcgtctggtatgtgcctatgaaacttctgcattcaacagacaaaacttctgcattcaaaacaccacatttcaaaacaaaacttctgcattcagcatgccacagtcatgtgtggagagcagagaggaaccctggagggaggagctgcagacggagcagggccgtggggcaggtgtctactggtttcctgtaataaattaccatacacttggtggtggaaataacaggcatttattctcatagctctggaggctagaagtccaaaatcaaggtgtctacagggccatgctgcctccacrgctccagggggcaatctttcagcttctggggactcccgggttccttggcctgtgaccgcactgttcaatccctgcctctgacttcacagggccctttcctctcctgagtctctgtttgcaaatctcccatccctttctcttgtaagaacactctaactggatt

SEQ ID NO: 88039 - DNA, 1452 bp, Homo sapiens
acctgcctcggcctcccaaagtgctgggattacaggctctgttcacatttttgtgtgtgtgtgccaagcacagaggggccactgtgtgcagctacagaggcccagctggcctggcacctcggctggaaaggggcagcctctgggtagaagagctgggtgcccaggtggggaaggcatttcactcaccccctgccagagctcccttggagccccagagttccaggctcctgggtcctatctcctctgctttctccaagcccattccagggaaacagaaacccagacagggcttggaagatgtcactcctgggtcctgaagtgagaccccagaatagatgttctcctgaggtcccctctcctgaagttttataattctggggttggaagtgtcccatgctgtaaaatccaaaagtctgtttccctgcttctctttttcttatttatttatttattttgagatagggtctcactgtgtcaccaaggctgaatagcagtggtgcaaccatggctcactgcagctgtgaactcctgagctcaagtgatcttcccacctcggcctcccaagtagctgggactacaggcatgcgccaccacacctggctaacttttgtattttttatagagacgaggtctccctgtgttgcccagactggccttaaactcctgggctcaagcgatccttgcaccttggcctcccgaagtgcaaggattacaggcatgagccactgcaccaaaccttctctccttcttaagattctgagtttctgttttgactctatttgacagcatcagtcaaattgcaaacgggcttaccctttgacccagcaattctccttctaaggaatcttccagcctccagaagtcatcaagcatgtgcagaagagacaaggcaaaagtgttcacagtggcttcttgtgtaaccaaggaaaactgggagctgcccccatctgcaccaatggccagagcaatttatggaacgtttacggaacaccgcgtctggtatgtgcctatgaaacttctgcattcaacagacaaaacttctgcattcaaaacaccacatttcaaaacaaaacttctgcattcagcatgccacagtcatgtgtggagagcagagaggaaccctggagggaggagctgcagacggagcagggccgtggggcaggtgtctactggtttcctgtaataaattaccatacacttggtggtggaaataacaggcatttattctcatagctctggaggctagaagtccaaaatcaaggtgtctacagggccatgctgcctccacagctccagggggcaatcttwcagcttctggggactcccgggttccttggcctgtgaccgcactgttcaatccctgcctctgacttcacagggccctttcctctcctgagtctctgtttgcaaatctcccatccctttctcttgtaagaacactctaactggatt

SEQ ID NO: 88040 - DNA, 573 bp, Homo sapiens
tgccatgaatttgagataattaaggaaacatttaactccaaatttaacactccaaggccaattataaatttaaatgttcggattacaatatgagtttacagatctgatggtgagacatacaatttattsaggaattttgcttcttcccttcatggcctccagtattatagacactgacacaaacaatagatgaaatggtcttatgtaaaagcgactcccatcaagcttcacttgaagcaggaatggcaggtaaactcctgtcgaaacacaacagcagcctgcagaaccaaagaccccacaccataggcagttgcagactccccaaacagagtctgcgtgggagaccaccttcacccctgctctgcacactcgtccttcattcagtcagcgcagcattcactgagggcctgccacaggccaggcactgggttcagagtggtgaatgagacagatgagatcccggcctccatggggcagctagtcttctgggcccccatagcacccagtaaccaatgacatgtgaccttctttctcccatgcaccatttgtcttttgggtttgtttgtttgttgt

SEQ ID NO: 88041 - DNA, 1336 bp, Homo sapiens
gatccacccaaagaaaaatggktttttttgcttgttttctccctctttttgtacgtggatttcttttcttggttaccctttaactgaggcatagctctttaataatccagatattataagaaaatatctcctttcctacttactgccttgtttggatcttaaggcctctcctctccttatgtgtgcattaaaacttatgcacttagattactactgagatagacacactccctagggcttctgctgcatttactcatgtttactgctctagctttcagttcccagtttagttttggctactggagattttgtttacatttattgtaagtaaaatatctaggagttttccagagtcttccctgcttaattcctctttaacacttctcaatggtgatttctcttgggtttgtcatacatgcattacctcttgaagctgtttgtgttctttgtaccttaggtaggcaggagctgattttcgggggataattggctcttgcttagggacacttctggtttgctcacagttctaagtgtcagcattgtattattatcagtaacacctctactgtgtcaagatattactaatcttgcctctgagagatttttaatactatgatagagaaaatagtacattatcaaaatgttttttctgtaataccagttatgaagtgtaaaatacttaaaagaaaatacttttacctttattttcaacccaattaccctaattcttatttttctgttctctttctaggatgtgtgctgtgtttggtggaatttattgtcttcgccattcagtacagtgccttgtagtggacaaagaatccagaaagtaaggatgatataagtaaccttcatatatatatatatatatattcatatatatatattcatatatatatattcatatatatattcatatatatatacatatatatatatatatatatatatatatatatacatatacacacacacatatcccaaacacaagtgaaaaatgctgaagtcagttttaagaaaaagattcttcaaagatcctccttggtattaataacatatcaaccttgattaaaagtaatttgtgtttaggtcctccagaacaagaatagtgagttcagaatatagaaactaaattaatttccctgcaatatgcctatagctcctggtcatccaagcttggaagacaaatcatttcagctgccagggggtgggtgatgagtgatgttagttttccttgtggccttacctcctctaattgattttcatcagatgacaacaaagccctctgttattgcatttttaaaaatggaattcacctaaagactcatcagattaa

SEQ ID NO: 88042 - DNA, 1336 bp, Homo sapiens
gatccacccaaagaaaaatgggtttttttgcttgttttctccctctttttgtacgtggatttcttttcttggttaccctttaactgaggcatagctctttaataatccagatattataagaaaatatctcctttcctacttactgccttgtttggatcttaaggcctctcctctccttatgtgtgcattaaaacttatgcacttagattactactgagatagacacactccctagggcttctgctgcatttactcatgtttactgctctagctttcagttcccagtttagttttggctactggagattttgtttacatttattgtaagtaaaatatctaggagttttccagagtcttccctgcttaattcctctttaacacttctcaatggtgatttctcttgggtttgtcatacatgcattacctcttgaagctgtttgtgttctttgtaccttaggtaggcaggagctgattttcgggggataattggctcttgcttagggacacttctggtttgctcacagttctaagtgtcagcattgtattattatcagtaacacctctactgtgtcaagatattactaatcttgcctctgagagatttttaatactatgatagagaaaatagtacattatcaaaatgttttttctgtaataccagttatgaagtgtaaaatacttaaaagaaaatacttttacctttattttcaacccaattaccctaattcttatttttctgttctctttctaggatgtgtgctgtgtttggtggaatttattgtcttcgccattcagtacagtgccttgtagtggacaaagaatccagaaagtaaggatgatataagtaaccttcatatatatwtatatatatattcatatatatatattcatatatatatattcatatatatattcatatatatatacatatatatatatatatatatatatatatatatacatatacacacacacatatcccaaacacaagtgaaaaatgctgaagtcagttttaagaaaaagattcttcaaagatcctccttggtattaataacatatcaaccttgattaaaagtaatttgtgtttaggtcctccagaacaagaatagtgagttcagaatatagaaactaaattaatttccctgcaatatgcctatagctcctggtcatccaagcttggaagacaaatcatttcagctgccagggggtgggtgatgagtgatgttagttttccttgtggccttacctcctctaattgattttcatcagatgacaacaaagccctctgttattgcatttttaaaaatggaattcacctaaagactcatcagattaa

SEQ ID NO: 88043 - DNA, 1336 bp, Homo sapiens
gatccacccaaagaaaaatgggtttttttgcttgttttctccctctttttgtacgtggatttcttttcttggttaccctttaactgaggcatagctctttaataatccagatattataagaaaatatctcctttcctacttactgccttgtttggatcttaaggcctctcctctccttatgtgtgcattaaaacttatgcacttagattactactgagatagacacactccctagggcttctgctgcatttactcatgtttactgctctagctttcagttcccagtttagttttggctactggagattttgtttacatttattgtaagtaaaatatctaggagttttccagagtcttccctgcttaattcctctttaacacttctcaatggtgatttctcttgggtttgtcatacatgcattacctcttgaagctgtttgtgttctttgtaccttaggtaggcaggagctgattttcgggggataattggctcttgcttagggacacttctggtttgctcacagttctaagtgtcagcattgtattattatcagtaacacctctactgtgtcaagatattactaatcttgcctctgagagatttttaatactatgatagagaaaatagtacattatcaaaatgttttttctgtaataccagttatgaagtgtaaaatacttaaaagaaaatacttttacctttattttcaacccaattaccctaattcttatttttctgttctctttctaggatgtgtgctgtgtttggtggaatttattgtcttcgccattcagtacagtgccttgtagtggacaaagaatccagaaagtaaggatgatataagtaaccttcatatatatayatatatatattcatatatatatattcatatatatatattcatatatatattcatatatatatacatatatatatatatatatatatatatatatatacatatacacacacacatatcccaaacacaagtgaaaaatgctgaagtcagttttaagaaaaagattcttcaaagatcctccttggtattaataacatatcaaccttgattaaaagtaatttgtgtttaggtcctccagaacaagaatagtgagttcagaatatagaaactaaattaatttccctgcaatatgcctatagctcctggtcatccaagcttggaagacaaatcatttcagctgccagggggtgggtgatgagtgatgttagttttccttgtggccttacctcctctaattgattttcatcagatgacaacaaagccctctgttattgcatttttaaaaatggaattcacctaaagactcatcagattaa

SEQ ID NO: 88044 - DNA, 1336 bp, Homo sapiens
gatccacccaaagaaaaatgggtttttttgcttgttttctccctctttttgtacgtggatttcttttcttggttaccctttaactgaggcatagctctttaataatccagatattataagaaaatatctcctttcctacttactgccttgtttggatcttaaggcctctcctctccttatgtgtgcattaaaacttatgcacttagattactactgagatagacacactccctagggcttctgctgcatttactcatgtttactgctctagctttcagttcccagtttagttttggctactggagattttgtttacatttattgtaagtaaaatatctaggagttttccagagtcttccctgcttaattcctctttaacacttctcaatggtgatttctcttgggtttgtcatacatgcattacctcttgaagctgtttgtgttctttgtaccttaggtaggcaggagctgattttcgggggataattggctcttgcttagggacacttctggtttgctcacagttctaagtgtcagcattgtattattatcagtaacacctctactgtgtcaagatattactaatcttgcctctgagagatttttaatactatgatagagaaaatagtacattatcaaaatgttttttctgtaataccagttatgaagtgtaaaatacttaaaagaaaatacttttacctttattttcaacccaattaccctaattcttatttttctgttctctttctaggatgtgtgctgtgtttggtggaatttattgtcttcgccattcagtacagtgccttgtagtggacaaagaatccagaaagtaaggatgatataagtaaccttcatatatatatatatatatattcatatatatatattcatatatatatattcatatatatattcatatatatatwcatatatatatatatatatatatatatatatatacatatacacacacacatatcccaaacacaagtgaaaaatgctgaagtcagttttaagaaaaagattcttcaaagatcctccttggtattaataacatatcaaccttgattaaaagtaatttgtgtttaggtcctccagaacaagaatagtgagttcagaatatagaaactaaattaatttccctgcaatatgcctatagctcctggtcatccaagcttggaagacaaatcatttcagctgccagggggtgggtgatgagtgatgttagttttccttgtggccttacctcctctaattgattttcatcagatgacaacaaagccctctgttattgcatttttaaaaatggaattcacctaaagactcatcagattaa

SEQ ID NO: 88045 - DNA, 1053 bp, Homo sapiens
agctacttgggaggctgaggcatgagaatcacttgaacccaggaggcgggggttgcagtgagctgagattgtaccactgtacaccagcctgggcaacagagtgagactccatctcaaaaaaaaaaaaaaaaacaaaaaaaaacattgacctgaaggtcatttaaagttttaaaatataaagccatctagcgtatcattaatgcctaggatagcatactacatataaataaatagtacttaagaataattttacattttacttttgattctgaatttctagttttattaatggagtctttaaaaattgttttcaaatgttttgatatatatatagtttgactgcttgcttcaatataattggaatgggtaacatctttaattattaatgctaactgctgtttttagccattatgagtaatcaagattgatttaatatggtctgatttcaaacagcaaaatacacatatttcagaactaagaagtcataattgtatcctttgaaaaatacagattgagtatcccttatctgaaatgcttgaaaccagaggtgtttgggatttcagattttttcagattttggagtgtactagttgaatgtccctaatctgaatatctaaaatctaacatgctccaatgagcatttccttagagcatcatgtcggtgctaaattttggattttggagtattttggaatttagataatggttactcaacctgtagtaagtttatagtaagaaacctatagtaagtaaggatttaataaatattaaagatatttaaaagttattatctatgagaattatgaaaatgatacataaatatgtttcaaattctgttccaaaattaaatccttacaagscatatttttttcagacatgatgtttgaaaaagatactcagtttagaagttaacagcattttaatgttagaagaatgaaaatgagatctaacagctgtgtctgatactttatttttgctttttagatttccattttgacagtgccagcagaggaaccaggaacttttgctgttcgggtcattgagttatgttct

SEQ ID NO: 88046 - DNA, 539 bp, Homo sapiens
agcacaagaaaaggcgtaactaatctacacccttcgaagccrggacagggaagagaaagaggaggcaggcaggaaggggtgccaggagggttttggagctgtgctgtggctcttaaactggctatgggtgtgctgggcttgtgaaaattcactgatatgtacacttgagatctgtgcactttaggtatgcatattattcaataacactttttaaaatctcatacagtaacaaaaaatacagacactacaggaaagagtagatatggaaaccaacctgcaaaaacagacaggaaacaaatatttcaagggatcaatttctgctaggtgccctcctagaagatacacatgcacactcccccattccccttggcaagccaggatctaagtggtaatggccagggcagggccagttcagggcggttcctcctttcaacatggcccaagcgggtgtatgtagggatgggaaaatacgtaattggcaaaagaacatactgcaaggggaaactgtgctaagtggatatacactatttaccagtgtt

SEQ ID NO: 88047 - DNA, 1309 bp, Homo sapiens
ctatggcagaagacaagactgactcaggcagctctcctgtccctggcagtgatacagctgcccgaccactctttaggtgatgctgggacagaaaccgctcagggaagctcacctgctggcctctggcatgcagagcctaagctggaattccagttctgatctggcttctgtcatcaaagactggaaaccaytggacattcattcaacaaacattaatgccaggcacagtgcttagggtcccacagtcaaagcagccaaggtccctgccccggcccacaatgtacaggctgagcagaagtgcaaataaataaaatgagggacatctcgtgctggttctccaagagtgtgcaaccagcctactcaaaccatgtggattaaggcggaagaaaattcagaaacagagagtccaccaagttaactaaagaccagcagcgccacccatcagctcaggccccctgcagaggcggcaaacaacacgcagggcagcacttcccagggggattctttcgcccagcggtcagtgcagctccagcaggccagttcatcagcctagcaggactcaaagacaggacaggatccagcaaggctgctgcttctatctgaggccttttgttatatgattgtcgcatggtaaaaatgactgcttgtaccacgtttaccacgctcatttgaaacactataagataggtactcctagccctgttttacagggaaggaaaccaccacagaacataagcaatctgcccaaggtcacccagctaataagggcagaatgggattcagtcaggtccacttgatacaaagtccctcctctctctaccacacccgtgcctcccatggaacgggacctgctatgaaaatcaagatatttggcaaaaggtcgtgtcatttggaaacaataaaatttctacaatttttttttcaccacttctctactggtctgtcatcgctctaatactatactgccttaaaaaaaaaacagctttattgagatataattcacgtcacacagttcacccatttaaagggcacaattcaatgttatttagtatattcacaggtgtgtgcaaccatcaccaccgtcaagggtaggacattttcattacctcaaagagaaaccctgtaccctttagctatcatccctctattcccaaccctttccccagcccgcggcagtcattgtgttttacaaggtgattcttggctgggcacggtggcccatgcctgtaatcccagtactttgtggggccaaggtgcgcagatcacttgaggtcaggagttggagaccagcctggccaacatagtgaaa

SEQ ID NO: 88048 - DNA, 1309 bp, Homo sapiens
ctatggcagaagacaagactgactcaggcagctctcctgtccctggcagtgatacagctgcccgaccactctttaggtgatgctgggacagaaaccgctcagggaagctcacctgctggcctctggcatgcagagcctaagctggaattccagttctgatctggcttctgtcatcaaagactggaaaccattggacattcattcaacaaacattaatgccaggcacagtgcttagggtcccacagtcaaagcagccaaggtccctgccccggcccacaatgtacaggctgagcagaagtgcaaataaataaaatgagggacrtctcgtgctggttctccaagagtgtgcaaccagcctactcaaaccatgtggattaaggcggaagaaaattcagaaacagagagtccaccaagttaactaaagaccagcagcgccacccatcagctcaggccccctgcagaggcggcaaacaacacgcagggcagcacttcccagggggattctttcgcccagcggtcagtgcagctccagcaggccagttcatcagcctagcaggactcaaagacaggacaggatccagcaaggctgctgcttctatctgaggccttttgttatatgattgtcgcatggtaaaaatgactgcttgtaccacgtttaccacgctcatttgaaacactataagataggtactcctagccctgttttacagggaaggaaaccaccacagaacataagcaatctgcccaaggtcacccagctaataagggcagaatgggattcagtcaggtccacttgatacaaagtccctcctctctctaccacacccgtgcctcccatggaacgggacctgctatgaaaatcaagatatttggcaaaaggtcgtgtcatttggaaacaataaaatttctacaatttttttttcaccacttctctactggtctgtcatcgctctaatactatactgccttaaaaaaaaaacagctttattgagatataattcacgtcacacagttcacccatttaaagggcacaattcaatgttatttagtatattcacaggtgtgtgcaaccatcaccaccgtcaagggtaggacattttcattacctcaaagagaaaccctgtaccctttagctatcatccctctattcccaaccctttccccagcccgcggcagtcattgtgttttacaaggtgattcttggctgggcacggtggcccatgcctgtaatcccagtactttgtggggccaaggtgcgcagatcacttgaggtcaggagttggagaccagcctggccaacatagtgaaa

SEQ ID NO: 88049 - DNA, 1309 bp, Homo sapiens
ctatggcagaagacaagactgactcaggcagctctcctgtccctggcagtgatacagctgcccgaccactctttaggtgatgctgggacagaaaccgctcagggaagctcacctgctggcctctggcatgcagagcctaagctggaattccagttctgatctggcttctgtcatcaaagactggaaaccattggacattcattcaacaaacattaatgccaggcacagtgcttagggtcccacagtcaaagcagccaaggtccctgccccggcccacaatgtacaggctgagcagaagtgcaaataaataaaatgagggacatctcgtgctggttctccaagagtgtgcaaccagcctactcaaaccatgtggattaaggcggaagaaaattcagaaacagagagtccaccaagttaactaaagaccagcagcgccacccatcagctcaggccccctgcagaggcggcaaacaacacgcagggcagcacttcccagggggattctttcrcccagcggtcagtgcagctccagcaggccagttcatcagcctagcaggactcaaagacaggacaggatccagcaaggctgctgcttctatctgaggccttttgttatatgattgtcgcatggtaaaaatgactgcttgtaccacgtttaccacgctcatttgaaacactataagataggtactcctagccctgttttacagggaaggaaaccaccacagaacataagcaatctgcccaaggtcacccagctaataagggcagaatgggattcagtcaggtccacttgatacaaagtccctcctctctctaccacacccgtgcctcccatggaacgggacctgctatgaaaatcaagatatttggcaaaaggtcgtgtcatttggaaacaataaaatttctacaatttttttttcaccacttctctactggtctgtcatcgctctaatactatactgccttaaaaaaaaaacagctttattgagatataattcacgtcacacagttcacccatttaaagggcacaattcaatgttatttagtatattcacaggtgtgtgcaaccatcaccaccgtcaagggtaggacattttcattacctcaaagagaaaccctgtaccctttagctatcatccctctattcccaaccctttccccagcccgcggcagtcattgtgttttacaaggtgattcttggctgggcacggtggcccatgcctgtaatcccagtactttgtggggccaaggtgcgcagatcacttgaggtcaggagttggagaccagcctggccaacatagtgaaa

SEQ ID NO: 88050 - DNA, 1254 bp, Homo sapiens
aaaagtagaatgtcctgataaaagcccaccataagaatgctaggtaagcatggacaagaagaggtcacacccatcagaagcgctatctagaagtgaactacctaaataccttctcaaccagtactataaatatgtgcctttgaagtttaaaaagccacacgagctgggtgtggtggcacatgactatctatagtcccagatacttgggaagctgaggcaggaagatcacttgagcccaagagtttgaggctgcagtgagctatgatagtgcctgtgagtagccactgtactccagcctgggcaacacagtgagatcccatctctaaaaaaaaattttaagtacaaaccaygagaggatttggttttcaaatattttctgggcatctatgcactcaactatggtgccgctttctcaagaaaatattctatttcattcaaaggtatcagctagagccaaagcactctactgtagagaagaatatggagccagtttcgtgtgacaaactgataaatgaattctaacttgacagtgcttttatttctaaaaaaagttcacataaaatgaactagccagtaatttggaaaaacaaacagggaactcaattgtcaggcaacaatctgaaactaataggcttaaatcaagcataaaattaatagcaaaagtttcccttaaacaaggggagtgggtcaggcatagtggctcacgcctgtaatcccagcactttgggaggtggaggtggaaggattgcttgagcccaggagttacaaaccagcctgagcaacaaggtgggatcctgtctctataaggacaaaacatttcttaaataataggtgcacattttaacttctaagctaccttcttaccagcaaaatgggaataaaggtggctgacctacacagagtaggaatttaaatgacacattgtatgtgagtgcctgaaaatgtcagtctccagccttcccagccttcttgctcctagtatgactcctcctggcctctctggcaactcccaccccacacagggaggatatggctttggcaagcaggacttacacacccattctcagctgtgccactgagaactctagaaacacaaaacaaagaccttcaacgttaagcctcatacacacacgcgcgcgcacgcacacacacacacattttgtgatgctagctgcctaataaacatttccagtgaccacttataaaggggaaaaattaatgacaattcttatttatgataaaatgccgaattac

SEQ ID NO: 88051 - DNA, 542 bp, Homo sapiens
tgaagkggtttgcttatgacttttgatagagctataagacagataaaatatgtaattctttatttaaataaatttctactttactagcctgtgaaatctttaaaaacagggaccacagcaaaatccatctctgtgtgttgtataatgtctctgatcaagactgaatcccaggaatgatagaaacaggcctgacgttcatcatcatcccagagacacagctagttaaaaactaatattttgcctgagttgtagccacagacctttctaaattgatttgtaatgttcttgcctgcattccagtgagctaagtcagaaaacaacatggatcttgcccttcttctacatagcctcttctgggttaactgatggaaaaagcgtaaaaacaggaaagttacaatgctacaaaaggaacagacaggaatccttgcctctgataaaacttaaagtatttagggataaagagtgccttcctgttctctctacagctaggacacctaggtaaccatcaagtaagcttataaataaggttgatccttatcaag

SEQ ID NO: 88052 - DNA, 542 bp, Homo sapiens
tgaaggggtttgcttatgacttttgatagagctataagacagataaaatatgtaattctttatttaaataaatttctactttactagcctgtgaaatctttaaaaacagggaccacagcaaaatccatctctgtgtgttgtataatgtctctgatcaagactgaatcccaggaatgatagaaacaggcctgacgttcatcatcatcccagagacacagctagttaaaaactaayattttgcctgagttgtagccacagacctttctaaattgatttgtaatgttcttgcctgcattccagtgagctaagtcagaaaacaacatggatcttgcccttcttctacatagcctcttctgggttaactgatggaaaaagcgtaaaaacaggaaagttacaatgctacaaaaggaacagacaggaatccttgcctctgataaaacttaaagtatttagggataaagagtgccttcctgttctctctacagctaggacacctaggtaaccatcaagtaagcttataaataaggttgatccttatcaag

SEQ ID NO: 88053 - DNA, 733 bp, Homo sapiens
tgcatctctgatacaaagctattgatcttacttgtgatctaggtggtaaactcaaaatttgatataccctattttatgccagtttgtgtaacttttgttgtgcaactttcaaaatattgttccttttagaaatagaagttatgctgtgatgttactagagtttaaatattcttatactggagggtataggaagggctaatggtttaactttttgttaaaacttttgactccaacaaatgagaacacaccaaaacctcattctctttattctccctcccattacttttttcttactgagatataattcacataccataaaattcacctcttttaaagggtacaattcagtggttttagtatattcaaaagattgtgcaaccaccaccattatctaattccagaatattttgataatcctaagaagaaaccctgtattctttgtcagtctcaattcccccatccccatactccaggccctgagaacyacttatgtactttctgtctctatcagtttgcctactcaggatattttatatatatggaataatatagtatatggccttttgtatctggtctatttcacttagcataatgtttacaaggtttatccaacgtgtagtatgtaacaataatttgttcatttttatgaccaaatagtattccattgtataaacacactatattttgttgacttgttcatcagttaatagatatttgagctgttgccactttt

SEQ ID NO: 88054 - DNA, 544 bp, Homo sapiens
cttttcccctatttatttatttattagatcattatttatatcaatatgacattatgtatatttattttatgctttggattgtaatccaatacaatattatttcttttgttactcaaattgttccagctttggcmattaggagctctttccggttggctcctatgacatactccaccatttttttggtagcacttccttatttttggcactagatcatgctctaagctcatcttgtattttccttgacccagctctagaatcagctatttcaccaaggagccctggttccttttattggagactggtgtgagtacttagaaattcaaatatgagtgttgggtgcattaacatattttgaaaacacatgaacaaaattatgcaaaaaagtcttcttagatttgtattattatcagacaaacaccaaaagattaaccaagttcaaagcaattttgaatcctcagtttgcaatgaatagtatcctcttggttgtacttgggataataatcgctactttatgttttctatgatgaattgttttatttct

SEQ ID NO: 88055 - DNA, 544 bp, Homo sapiens
cttttcccctatttatttatttattagatcattatttatatcaatatgacattatgtatatttattttatgctttggattgtaatccaatacaatattatttcttttgttactcaaattgttccagctttggcaattaggagctctttccggttggctcctatgacatactccaccatttttttggtagcacttccttatttttggcactagatcatgctctaagctcatcttgtattttccttgacccagctctagaatcagctrtttcaccaaggagccctggttccttttattggagactggtgtgagtacttagaaattcaaatatgagtgttgggtgcattaacatattttgaaaacacatgaacaaaattatgcaaaaaagtcttcttagatttgtattattatcagacaaacaccaaaagattaaccaagttcaaagcaattttgaatcctcagtttgcaatgaatagtatcctcttggttgtacttgggataataatcgctactttatgttttctatgatgaattgttttatttct

SEQ ID NO: 88056 - DNA, 544 bp, Homo sapiens
cttttcccctatttatttatttattagatcattatttatatcaatatgacattatgtatatttattttatgctttggattgtaatccaatacaatattatttcttttgttactcaaattgttccagctttggcaattaggagctctttccggttggctcctatgacatactccaccatttttttggtagcacttccttatttttggcactagatcatgctctaagctcatcttgtattttccttgacccagctctagaatcagctatttcaccaaggagccctggttccttttattggagactggtgtgagtacttagaaattcaaatatgagtgttgggtgcattaacatattttgaaaacacatgaacaaaattatgcaaaaaagtcttcttagatttgtwttattatcagacaaacaccaaaagattaaccaagttcaaagcaattttgaatcctcagtttgcaatgaatagtatcctcttggttgtacttgggataataatcgctactttatgttttctatgatgaattgttttatttct

SEQ ID NO: 88057 - DNA, 536 bp, Homo sapiens
cccggccaacatggtgaaattccgtctctactaaaaatacaaaaaattagccaggcatggtggcagatcctgtaatcccagctacttgggaggccgaggcaggataatccttgaacctgggaggcagaggttgcagtgagccgagatcacgccattgtactacagcctgggcaatgggagtgaaactttgtctcttaaaaaaaaaacgagtatgaagagtataaattatttttcatggagtcytgcccttagaacaaggcattaaatcctctaagtgtataggaaatttgagttcaaaatagatgctttgaaaaaaaggaatgtttttgaaaaatgcgaatttttacagatttacaatgtagaagtgcagttgtgttccatggatatattgcatagtggtgaagtctgatttttcaatgtatccatcatccaaataaaatacattgtcctcagtaggtagtctttcatccctcaaccctttcccagcctcccaccttttggagtctccaatgcctatatttcactctatatccaca

SEQ ID NO: 88058 - DNA, 785 bp, Homo sapiens
acttttacaagcttgaggctctttagggatgcactagtcttaaatccttgtacgtggcagcattggccagttcttcgcagccaggtcttccctctgcatccccaagagatgagacctttggaccttagagtctgctaggcagatgcttgtcctgaggcagaggccctggggtttctgtaagatttctgggagcactggtgggtcctgagagttcacagagcctgtcayacctctcatgtgttcttccccacatccccgggtggggcactaactccatctgactgatgagcggcagaacctcaggtgaaggctcttgctgcaaaacaataaataaaaatgttgcttcccgcaggcactattctgtgcctcatggacaggatctcatccagtcatcagtgaaccaatgatgtgagcacgattgttagctatttcttgatagggaaactgagctccgagagaagtgacttgtccatggtcccacaacaactagtagatggtggggccagacctcagaccccccgatacaggacgcctggctcagggcttgccaagcagtgtcctgcagcttcagggggccagtgcctcagaggtgcctggtgcctgggccacacttgggtgttgagcctatacagcacccaaggtgttgagcacttgggtgttgaggtgttgctgcctttcttaccaaatgttttgggggaagtgctccccacggctgggaggagcgcctcagtgaagggagtactgtgaaatgggacaggtgatgaggcagggtggcatcgcgcctt

SEQ ID NO: 88059 - DNA, 672 bp, Homo sapiens
ctggattttagcagcatagtcattcttttgcttatttccattatcggagtattgatagagctttgagtgacagtgagggaaagaagagctggtgctagtttctcattgataagttgtagctttagaatgatttgttttagctttccattgttagcatttaaattttacttccctccaccttgttttttttgtgttgtctaaaccaaggctactgccaaatacatcctttgcctgacttccttgaatgttcctcrtagcttaggtgcttttgtgctccacagttaatctcggaaacattgaaaggtaaaaaccaaagcatctgagcgtagcacattttctgtagcagttctagacccacgtgagacaagcagagagttccctggggttgctcgtgtgtggaatagcgaagtggaggtggctggctttgcagcccctgaactgactgtgcaggtgccacatctttgcattgcccacgactcatatatattcattttttctagttaaaaacatttcggaaataattagtgtaatggacttactgtttaaaagattggaaagtttaataacagtatggctttgccatcccagaagctgtcacttgaatgtttggctaatttttttctggccttttactctgtagattcttttccatagtagctattatattatgca

SEQ ID NO: 88060 - DNA, 672 bp, Homo sapiens
ctggattttagcagcatagtcattcttttgcttatttccattatcggagtattgatagagctttgagtgacagtgagggaaagaagagctggtgctagtttctcattgataagttgtagctttagaatgatttgttttagctttccattgttagcatttaaattttacttccctccaccttgttttttttgtgttgtctaaaccaaggctactgccaaatacatcctttgcctgacttccttgaatgttcctcatagcttaggtgcttttgtgctccacagttaatctcggaaacattgaaaggtaaaaaccaaagcatctgagcgtagcacattttctgtagcagttctagacccacgtgagacaagcagagagttccctggggttgctcgtgtgtggaatagcgaagtggaggtkgctggctttgcagcccctgaactgactgtgcaggtgccacatctttgcattgcccacgactcatatatattcattttttctagttaaaaacatttcggaaataattagtgtaatggacttactgtttaaaagattggaaagtttaataacagtatggctttgccatcccagaagctgtcacttgaatgtttggctaatttttttctggccttttactctgtagattcttttccatagtagctattatattatgca

SEQ ID NO: 88061 - DNA, 672 bp, Homo sapiens
ctggattttagcagcatagtcattcttttgcttatttccattatcggagtattgatagagctttgagtgacagtgagggaaagaagagctggtgctagtttctcattgataagttgtagctttagaatgatttgttttagctttccattgttagcatttaaattttacttccctccaccttgttttttttgtgttgtctaaaccaaggctactgccaaatacatcctttgcctgacttccttgaatgttcctcatagcttaggtgcttttgtgctccacagttaatctcggaaacattgaaaggtaaaaaccaaagcatctgagcgtagcacattttctgtagcagttctagacccacgtgagacaagcagagagttccctggggttgctcgtgtgtggaatagcgaagtggaggtggctggctttgcagcccctgaactgactgtgcaggtgccacatctttgcattgcccacgactcatatatattcattttttctagttaaaaacatttcggaaataattagkgtaatggacttactgtttaaaagattggaaagtttaataacagtatggctttgccatcccagaagctgtcacttgaatgtttggctaatttttttctggccttttactctgtagattcttttccatagtagctattatattatgca

SEQ ID NO: 88062 - DNA, 2481 bp, Homo sapiens
gattttcccctagcatttatctggttataaaattgattttctctttttcaaattaggcattttatctttttgaaaagtaaattttatttttaataattgacttaaaatgatcaatagctgtagcttttagtgcttttaaaaggacattgtatgcaaatataataacttctttcaagtcaagtttttgcttgatactaattctggattgtgtctctacaaaattgtcacaatatgtttaattttcaaatgctatagattttaggccattgctaggtatgtttatgtaatgcaatgctgattgctcttactttatggggcttcactttaaggtctttgtataaaataatgcatttaaaactcaacaaagatatatattgattctaattaaaggaaattatgaaaaatgtaaagatctatatatattacctattttcctcattgtctcacttattagatatggaagaaatatttcaaatttagacataaaaaattatctttataactccaagaaattaataaggaacttttaatttacttaaaaagatgatattcaatgtgcctgagtgggttatgtatgttaagagagagagagagagagagagagggagagagaaatgacataaataaattttaaaaatatgaagattaatgtatattcttcagctgagattatttgataattatagaaattactgtaacatcttgggatgttatgagtgccagatactttctagtcaccatgataatttcctgcaaggtccatggattaatgtaaaattttgtgacaygccagcacttacacttttccctttttcaggaatcaataatataaaacttatatttaatgaaagacaacacctgaaaactatcttttcaagcaagttatgtcattcactttttcacttcactttttctgtcacttcttctgtctgctcatgtcattcttgtgatttctttttcctttcttgaatatttggcatgtgatttttggagtggcaggtgaaggcagagtgtattctatatagggtattttttttctcagtacatttttaaaatttcaacttttattttaggttcaagggatgcatgtttaggtttgttacaatggtatattgtgtgaaactgaggtttagagtatgaatgattccatcacccaggtagtgagccaggcacccaacaggtagttttttcattcttgtctccctctctccctctctctctagtagttcccagtgtctgtttttcccatctttatgtctatgtgtattcaatgattagatcccacttatatgtgagaacacgcggtttttggttttctgttcctgtgtaattcacttaggatgatggcctccagatgcacccatgctgctgcaaaggacatgatttctttctttttttgtgtggctacatagtattccatggtgtatatgtaccacattttctttatctagtccacctttgatggacaccttggttgattccatgtctttgctattgtgaatagtgctatgatgaacatacaaatgcatgtggtctttttggtagaactatttattttcctttgggtgtatagctagtaataggattactgggttgaatggtagttctgttttaagttctttgagaaatctacaaactgcttccacagttggctgaactaatttacatccccaccaacaatgtataagcattgtcttttctctgcaaccttgccaatatcagttgttgtttttttttgcattttaataatagcccttctgactggtgagatggtatctcactctggtttttatttgcatttttctgatgattattagtgatgtggagcattttttcatgttttttggccttatgtatgtcttcttttgagaaatgagtaaaatttttgaagcattgatcaaatcacattttttgttgtatttgtcttctcacttagctaagccaaaacagatcagccagcaggggtcaggcttttatagtgtatgggtttgaactttccatctctcacagtatcttttaggaacctgcaggtttcttgattacaccattagcattgtacttttcagaaatgaatgcttaccagttaattttttaactagaaccaaaccaaattaatgtagaattgtgagactctgtagaagctttctgagacaaaattatttgtttaaattttgaccgggcatggtggctcacacctataatcccagcactttgagtggtggaggtgggagggttgcttgcgcctgggagttccagaccaacctgggcaacatagcaagaccccatatctattaaaaaatataaaattaaaaataaaattaatgccaatctgctactaaaaaataaatatcattctttaaaaatcttttatttggtatttcttctagtaatcactgatgagctcatcaacattttgcattaggttatctatgtgtatgaaaatgaataagtgtgagatctattttaggatgctgaaaagta

SEQ ID NO: 88063 - DNA, 2481 bp, Homo sapiens
gattttcccctagcatttatctggttataaaattgattttctctttttcaaattaggcattttatctttttgaaaagtaaattttatttttaataattgacttaaaatgatcaatagctgtagcttttagtgcttttaaaaggacattgtatgcaaatataataacttctttcaagtcaagtttttgcttgatactaattctggattgtgtctctacaaaattgtcacaatatgtttaattttcaaatgctatagattttaggccattgctaggtatgtttatgtaatgcaatgctgattgctcttactttatggggcttcactttaaggtctttgtataaaataatgcatttaaaactcaacaaagatatatattgattctaattaaaggaaattatgaaaaatgtaaagatctatatatattacctattttcctcattgtctcacttattagatatggaagaaatatttcaaatttagacataaaaaattatctttataactccaagaaattaataaggaacttttaatttacttaaaaagatgatattcaatgtgcctgagtgggttatgtatgttaagagagagagagagagagagagagggagagagaaatgacataaataaattttaaaaatatgaagattaatgtatattcttcagctgagattatttgataattatagaaattactgtaacatcttgggatgttatgagtgccagatactttctagtcaccatgataatttcctgcaaggtccatggattaatgtaaaattttgtgacatgccagcacttacacttttcccttttwcaggaatcaataatataaaacttatatttaatgaaagacaacacctgaaaactatcttttcaagcaagttatgtcattcactttttcacttcactttttctgtcacttcttctgtctgctcatgtcattcttgtgatttctttttcctttcttgaatatttggcatgtgatttttggagtggcaggtgaaggcagagtgtattctatatagggtattttttttctcagtacatttttaaaatttcaacttttattttaggttcaagggatgcatgtttaggtttgttacaatggtatattgtgtgaaactgaggtttagagtatgaatgattccatcacccaggtagtgagccaggcacccaacaggtagttttttcattcttgtctccctctctccctctctctctagtagttcccagtgtctgtttttcccatctttatgtctatgtgtattcaatgattagatcccacttatatgtgagaacacgcggtttttggttttctgttcctgtgtaattcacttaggatgatggcctccagatgcacccatgctgctgcaaaggacatgatttctttctttttttgtgtggctacatagtattccatggtgtatatgtaccacattttctttatctagtccacctttgatggacaccttggttgattccatgtctttgctattgtgaatagtgctatgatgaacatacaaatgcatgtggtctttttggtagaactatttattttcctttgggtgtatagctagtaataggattactgggttgaatggtagttctgttttaagttctttgagaaatctacaaactgcttccacagttggctgaactaatttacatccccaccaacaatgtataagcattgtcttttctctgcaaccttgccaatatcagttgttgtttttttttgcattttaataatagcccttctgactggtgagatggtatctcactctggtttttatttgcatttttctgatgattattagtgatgtggagcattttttcatgttttttggccttatgtatgtcttcttttgagaaatgagtaaaatttttgaagcattgatcaaatcacattttttgttgtatttgtcttctcacttagctaagccaaaacagatcagccagcaggggtcaggcttttatagtgtatgggtttgaactttccatctctcacagtatcttttaggaacctgcaggtttcttgattacaccattagcattgtacttttcagaaatgaatgcttaccagttaattttttaactagaaccaaaccaaattaatgtagaattgtgagactctgtagaagctttctgagacaaaattatttgtttaaattttgaccgggcatggtggctcacacctataatcccagcactttgagtggtggaggtgggagggttgcttgcgcctgggagttccagaccaacctgggcaacatagcaagaccccatatctattaaaaaatataaaattaaaaataaaattaatgccaatctgctactaaaaaataaatatcattctttaaaaatcttttatttggtatttcttctagtaatcactgatgagctcatcaacattttgcattaggttatctatgtgtatgaaaatgaataagtgtgagatctattttaggatgctgaaaagta

SEQ ID NO: 88064 - DNA, 2481 bp, Homo sapiens
gattttcccctagcatttatctggttataaaattgattttctctttttcaaattaggcattttatctttttgaaaagtaaattttatttttaataattgacttaaaatgatcaatagctgtagcttttagtgcttttaaaaggacattgtatgcaaatataataacttctttcaagtcaagtttttgcttgatactaattctggattgtgtctctacaaaattgtcacaatatgtttaattttcaaatgctatagattttaggccattgctaggtatgtttatgtaatgcaatgctgattgctcttactttatggggcttcactttaaggtctttgtataaaataatgcatttaaaactcaacaaagatatatattgattctaattaaaggaaattatgaaaaatgtaaagatctatatatattacctattttcctcattgtctcacttattagatatggaagaaatatttcaaatttagacataaaaaattatctttataactccaagaaattaataaggaacttttaatttacttaaaaagatgatattcaatgtgcctgagtgggttatgtatgttaagagagagagagagagagagagagggagagagaaatgacataaataaattttaaaaatatgaagattaatgtatattcttcagctgagattatttgataattatagaaattactgtaacatcttgggatgttatgagtgccagatactttctagtcaccatgataatttcctgcaaggtccatggattaatgtaaaattttgtgacatgccagcacttacacttttccctttttcaggaatcaataatataaaacttatatttaatgaaagacaacacctgaaaactatcttttcaagcaagttatgtcattcactttttcacttcactttttctgtcacttyttctgtctgctcatgtcattcttgtgatttctttttcctttcttgaatatttggcatgtgatttttggagtggcaggtgaaggcagagtgtattctatatagggtattttttttctcagtacatttttaaaatttcaacttttattttaggttcaagggatgcatgtttaggtttgttacaatggtatattgtgtgaaactgaggtttagagtatgaatgattccatcacccaggtagtgagccaggcacccaacaggtagttttttcattcttgtctccctctctccctctctctctagtagttcccagtgtctgtttttcccatctttatgtctatgtgtattcaatgattagatcccacttatatgtgagaacacgcggtttttggttttctgttcctgtgtaattcacttaggatgatggcctccagatgcacccatgctgctgcaaaggacatgatttctttctttttttgtgtggctacatagtattccatggtgtatatgtaccacattttctttatctagtccacctttgatggacaccttggttgattccatgtctttgctattgtgaatagtgctatgatgaacatacaaatgcatgtggtctttttggtagaactatttattttcctttgggtgtatagctagtaataggattactgggttgaatggtagttctgttttaagttctttgagaaatctacaaactgcttccacagttggctgaactaatttacatccccaccaacaatgtataagcattgtcttttctctgcaaccttgccaatatcagttgttgtttttttttgcattttaataatagcccttctgactggtgagatggtatctcactctggtttttatttgcatttttctgatgattattagtgatgtggagcattttttcatgttttttggccttatgtatgtcttcttttgagaaatgagtaaaatttttgaagcattgatcaaatcacattttttgttgtatttgtcttctcacttagctaagccaaaacagatcagccagcaggggtcaggcttttatagtgtatgggtttgaactttccatctctcacagtatcttttaggaacctgcaggtttcttgattacaccattagcattgtacttttcagaaatgaatgcttaccagttaattttttaactagaaccaaaccaaattaatgtagaattgtgagactctgtagaagctttctgagacaaaattatttgtttaaattttgaccgggcatggtggctcacacctataatcccagcactttgagtggtggaggtgggagggttgcttgcgcctgggagttccagaccaacctgggcaacatagcaagaccccatatctattaaaaaatataaaattaaaaataaaattaatgccaatctgctactaaaaaataaatatcattctttaaaaatcttttatttggtatttcttctagtaatcactgatgagctcatcaacattttgcattaggttatctatgtgtatgaaaatgaataagtgtgagatctattttaggatgctgaaaagta

SEQ ID NO: 88065 - DNA, 2481 bp, Homo sapiens
gattttcccctagcatttatctggttataaaattgattttctctttttcaaattaggcattttatctttttgaaaagtaaattttatttttaataattgacttaaaatgatcaatagctgtagcttttagtgcttttaaaaggacattgtatgcaaatataataacttctttcaagtcaagtttttgcttgatactaattctggattgtgtctctacaaaattgtcacaatatgtttaattttcaaatgctatagattttaggccattgctaggtatgtttatgtaatgcaatgctgattgctcttactttatggggcttcactttaaggtctttgtataaaataatgcatttaaaactcaacaaagatatatattgattctaattaaaggaaattatgaaaaatgtaaagatctatatatattacctattttcctcattgtctcacttattagatatggaagaaatatttcaaatttagacataaaaaattatctttataactccaagaaattaataaggaacttttaatttacttaaaaagatgatattcaatgtgcctgagtgggttatgtatgttaagagagagagagagagagagagagggagagagaaatgacataaataaattttaaaaatatgaagattaatgtatattcttcagctgagattatttgataattatagaaattactgtaacatcttgggatgttatgagtgccagatactttctagtcaccatgataatttcctgcaaggtccatggattaatgtaaaattttgtgacatgccagcacttacacttttccctttttcaggaatcaataatataaaacttatatttaatgaaagacaacacctgaaaactatcttttcaagcaagttatgtcattcactttttcacttcactttttctgtcacttcttctgtctgctcatgtcattcttgtgatttctttttcctttcttgaatatttggcatgtgatttttggagtggcaggtgaaggcagagtgtattctatatagggtattttttttctcagtacatttttaaaatttcaacttttattttaggttcaagggatgcaygtttaggtttgttacaatggtatattgtgtgaaactgaggtttagagtatgaatgattccatcacccaggtagtgagccaggcacccaacaggtagttttttcattcttgtctccctctctccctctctctctagtagttcccagtgtctgtttttcccatctttatgtctatgtgtattcaatgattagatcccacttatatgtgagaacacgcggtttttggttttctgttcctgtgtaattcacttaggatgatggcctccagatgcacccatgctgctgcaaaggacatgatttctttctttttttgtgtggctacatagtattccatggtgtatatgtaccacattttctttatctagtccacctttgatggacaccttggttgattccatgtctttgctattgtgaatagtgctatgatgaacatacaaatgcatgtggtctttttggtagaactatttattttcctttgggtgtatagctagtaataggattactgggttgaatggtagttctgttttaagttctttgagaaatctacaaactgcttccacagttggctgaactaatttacatccccaccaacaatgtataagcattgtcttttctctgcaaccttgccaatatcagttgttgtttttttttgcattttaataatagcccttctgactggtgagatggtatctcactctggtttttatttgcatttttctgatgattattagtgatgtggagcattttttcatgttttttggccttatgtatgtcttcttttgagaaatgagtaaaatttttgaagcattgatcaaatcacattttttgttgtatttgtcttctcacttagctaagccaaaacagatcagccagcaggggtcaggcttttatagtgtatgggtttgaactttccatctctcacagtatcttttaggaacctgcaggtttcttgattacaccattagcattgtacttttcagaaatgaatgcttaccagttaattttttaactagaaccaaaccaaattaatgtagaattgtgagactctgtagaagctttctgagacaaaattatttgtttaaattttgaccgggcatggtggctcacacctataatcccagcactttgagtggtggaggtgggagggttgcttgcgcctgggagttccagaccaacctgggcaacatagcaagaccccatatctattaaaaaatataaaattaaaaataaaattaatgccaatctgctactaaaaaataaatatcattctttaaaaatcttttatttggtatttcttctagtaatcactgatgagctcatcaacattttgcattaggttatctatgtgtatgaaaatgaataagtgtgagatctattttaggatgctgaaaagta

SEQ ID NO: 88066 - DNA, 2481 bp, Homo sapiens
gattttcccctagcatttatctggttataaaattgattttctctttttcaaattaggcattttatctttttgaaaagtaaattttatttttaataattgacttaaaatgatcaatagctgtagcttttagtgcttttaaaaggacattgtatgcaaatataataacttctttcaagtcaagtttttgcttgatactaattctggattgtgtctctacaaaattgtcacaatatgtttaattttcaaatgctatagattttaggccattgctaggtatgtttatgtaatgcaatgctgattgctcttactttatggggcttcactttaaggtctttgtataaaataatgcatttaaaactcaacaaagatatatattgattctaattaaaggaaattatgaaaaatgtaaagatctatatatattacctattttcctcattgtctcacttattagatatggaagaaatatttcaaatttagacataaaaaattatctttataactccaagaaattaataaggaacttttaatttacttaaaaagatgatattcaatgtgcctgagtgggttatgtatgttaagagagagagagagagagagagagggagagagaaatgacataaataaattttaaaaatatgaagattaatgtatattcttcagctgagattatttgataattatagaaattactgtaacatcttgggatgttatgagtgccagatactttctagtcaccatgataatttcctgcaaggtccatggattaatgtaaaattttgtgacatgccagcacttacacttttccctttttcaggaatcaataatataaaacttatatttaatgaaagacaacacctgaaaactatcttttcaagcaagttatgtcattcactttttcacttcactttttctgtcacttcttctgtctgctcatgtcattcttgtgatttctttttcctttcttgaatatttggcatgtgatttttggagtggcaggtgaaggcagagtgtattctatatagggtattttttttctcagtacatttttaaaatttcaacttttattttaggttcaagggatgcatgtttaggtttgttacaatggtatattgtgtgaaactgaggtttagagtatgaatgattccatcacccaggtagtgagccaggcacccaacaggtagttttttcattcttgtctccctctctccctctctctctagtagttcccagtgtctgtttttcccatctttatgtctatgtgtattcaatgattagatcccacttatatgtgagaacacgcggtttttggttttctgttcctgtgtaattcacttaggatgatggcctccagatgcacccatgctgctgcaaaggacatgatttctttctttttttgtgtggctacatagtattccatggtgtatatgtaccacattttctttatctagtccacctttgatggacaccttggttgattccatgtctttgctattgtgaatagtgctatgatgaacatacaaatgcatgtggtctttttggtagaactatttattttcctttgggtgtatagctagtaataggattactgggttgaatggtagttctgttytaagttctttgagaaatctacaaactgcttccacagttggctgaactaatttacatccccaccaacaatgtataagcattgtcttttctctgcaaccttgccaatatcagttgttgtttttttttgcattttaataatagcccttctgactggtgagatggtatctcactctggtttttatttgcatttttctgatgattattagtgatgtggagcattttttcatgttttttggccttatgtatgtcttcttttgagaaatgagtaaaatttttgaagcattgatcaaatcacattttttgttgtatttgtcttctcacttagctaagccaaaacagatcagccagcaggggtcaggcttttatagtgtatgggtttgaactttccatctctcacagtatcttttaggaacctgcaggtttcttgattacaccattagcattgtacttttcagaaatgaatgcttaccagttaattttttaactagaaccaaaccaaattaatgtagaattgtgagactctgtagaagctttctgagacaaaattatttgtttaaattttgaccgggcatggtggctcacacctataatcccagcactttgagtggtggaggtgggagggttgcttgcgcctgggagttccagaccaacctgggcaacatagcaagaccccatatctattaaaaaatataaaattaaaaataaaattaatgccaatctgctactaaaaaataaatatcattctttaaaaatcttttatttggtatttcttctagtaatcactgatgagctcatcaacattttgcattaggttatctatgtgtatgaaaatgaataagtgtgagatctattttaggatgctgaaaagta

SEQ ID NO: 88067 - DNA, 2481 bp, Homo sapiens
gattttcccctagcatttatctggttataaaattgattttctctttttcaaattaggcattttatctttttgaaaagtaaattttatttttaataattgacttaaaatgatcaatagctgtagcttttagtgcttttaaaaggacattgtatgcaaatataataacttctttcaagtcaagtttttgcttgatactaattctggattgtgtctctacaaaattgtcacaatatgtttaattttcaaatgctatagattttaggccattgctaggtatgtttatgtaatgcaatgctgattgctcttactttatggggcttcactttaaggtctttgtataaaataatgcatttaaaactcaacaaagatatatattgattctaattaaaggaaattatgaaaaatgtaaagatctatatatattacctattttcctcattgtctcacttattagatatggaagaaatatttcaaatttagacataaaaaattatctttataactccaagaaattaataaggaacttttaatttacttaaaaagatgatattcaatgtgcctgagtgggttatgtatgttaagagagagagagagagagagagagggagagagaaatgacataaataaattttaaaaatatgaagattaatgtatattcttcagctgagattatttgataattatagaaattactgtaacatcttgggatgttatgagtgccagatactttctagtcaccatgataatttcctgcaaggtccatggattaatgtaaaattttgtgacatgccagcacttacacttttccctttttcaggaatcaataatataaaacttatatttaatgaaagacaacacctgaaaactatcttttcaagcaagttatgtcattcactttttcacttcactttttctgtcacttcttctgtctgctcatgtcattcttgtgatttctttttcctttcttgaatatttggcatgtgatttttggagtggcaggtgaaggcagagtgtattctatatagggtattttttttctcagtacatttttaaaatttcaacttttattttaggttcaagggatgcatgtttaggtttgttacaatggtatattgtgtgaaactgaggtttagagtatgaatgattccatcacccaggtagtgagccaggcacccaacaggtagttttttcattcttgtctccctctctccctctctctctagtagttcccagtgtctgtttttcccatctttatgtctatgtgtattcaatgattagatcccacttatatgtgagaacacgcggtttttggttttctgttcctgtgtaattcacttaggatgatggcctccagatgcacccatgctgctgcaaaggacatgatttctttctttttttgtgtggctacatagtattccatggtgtatatgtaccacattttctttatctagtccacctttgatggacaccttggttgattccatgtctttgctattgtgaatagtgctatgatgaacatacaaatgcatgtggtctttttggtagaactatttattttcctttgggtgtatagctagtaataggattactgggttgaatggtagttctgttttaagttctttgagaaatctacaaactgcttccacagttggctgaactaatttacatccccaccaacaatgtataagcattgtcttttctctgcaaccttgccaatatcagttgttgtttttttttgcattttaataatagcccttctgactggtgagatggtatctcactctggtttttatttgcatttttctgatgattattagtgatgtggagcattttttcatgttttttggccttatgtatgtcttcttttgagaaatgagtaaaatttttgaagcattgatcaaatcacattttttgttgtatttgtcttctcacttagctaagccaaaacagatcagccagcaggggtcaggcttttatagtgtatgggtttgaactttccatctctcacagtatcttttaggaacctgcaggtttcttgattacaccattagcattgtacttttcagaaatgaatgcttaccagttaattttttaactagaaccaaaccaaattaatgtagaattgtgagactctgtagaagctttctgagacaaaattatttgtttaaattttgaccgggcatggtggctcacacctataatcccagcactttgagtggtggaggtgggagggttgcttgcgcctgggagttccagaccaacctgggcaacatagcaagaccccatatctattaaaaaatataaaattaaaaataaaattaatgccaatctgctactaaaaaataaatatcwttctttaaaaatcttttatttggtatttcttctagtaatcactgatgagctcatcaacattttgcattaggttatctatgtgtatgaaaatgaataagtgtgagatctattttaggatgctgaaaagta

SEQ ID NO: 88068 - DNA, 2481 bp, Homo sapiens
gattttcccctagcatttatctggttataaaattgattttctctttttcaaattaggcattttatctttttgaaaagtaaattttatttttaataattgacttaaaatgatcaatagctgtagcttttagtgcttttaaaaggacattgtatgcaaatataataacttctttcaagtcaagtttttgcttgatactaattctggattgtgtctctacaaaattgtcacaatatgtttaattttcaaatgctatagattttaggccattgctaggtatgtttatgtaatgcaatgctgattgctcttactttatggggcttcactttaaggtctttgtataaaataatgcatttaaaactcaacaaagatatatattgattctaattaaaggaaattatgaaaaatgtaaagatctatatatattacctattttcctcattgtctcacttattagatatggaagaaatatttcaaatttagacataaaaaattatctttataactccaagaaattaataaggaacttttaatttacttaaaaagatgatattcaatgtgcctgagtgggttatgtatgttaagagagagagagagagagagagagggagagagaaatgacataaataaattttaaaaatatgaagattaatgtatattcttcagctgagattatttgataattatagaaattactgtaacatcttgggatgttatgagtgccagatactttctagtcaccatgataatttcctgcaaggtccatggattaatgtaaaattttgtgacatgccagcacttacacttttccctttttcaggaatcaataatataaaacttatatttaatgaaagacaacacctgaaaactatcttttcaagcaagttatgtcattcactttttcacttcactttttctgtcacttcttctgtctgctcatgtcattcttgtgatttctttttcctttcttgaatatttggcatgtgatttttggagtggcaggtgaaggcagagtgtattctatatagggtattttttttctcagtacatttttaaaatttcaacttttattttaggttcaagggatgcatgtttaggtttgttacaatggtatattgtgtgaaactgaggtttagagtatgaatgattccatcacccaggtagtgagccaggcacccaacaggtagttttttcattcttgtctccctctctccctctctctctagtagttcccagtgtctgtttttcccatctttatgtctatgtgtattcaatgattagatcccacttatatgtgagaacacgcggtttttggttttctgttcctgtgtaattcacttaggatgatggcctccagatgcacccatgctgctgcaaaggacatgatttctttctttttttgtgtggctacatagtattccatggtgtatatgtaccacattttctttatctagtccacctttgatggacaccttggttgattccatgtctttgctattgtgaatagtgctatgatgaacatacaaatgcatgtggtctttttggtagaactatttattttcctttgggtgtatagctagtaataggattactgggttgaatggtagttctgttttaagttctttgagaaatctacaaactgcttccacagttggctgaactaatttacatccccaccaacaatgtataagcattgtcttttctctgcaaccttgccaatatcagttgttgtttttttttgcattttaataatagcccttctgactggtgagatggtatctcactctggtttttatttgcatttttctgatgattattagtgatgtggagcattttttcatgttttttggccttatgtatgtcttcttttgagaaatgagtaaaatttttgaagcattgatcaaatcacattttttgttgtatttgtcttctcacttagctaagccaaaacagatcagccagcaggggtcaggcttttatagtgtatgggtttgaactttccatctctcacagtatcttttaggaacctgcaggtttcttgattacaccattagcattgtacttttcagaaatgaatgcttaccagttaattttttaactagaaccaaaccaaattaatgtagaattgtgagactctgtagaagctttctgagacaaaattatttgtttaaattttgaccgggcatggtggctcacacctataatcccagcactttgagtggtggaggtgggagggttgcttgcgcctgggagttccagaccaacctgggcaacatagcaagaccccatatctattaaaaaatataaaattaaaaataaaattaatgccaatctgctactaaaaaataaatatcattctttaaaaatcttttatktggtatttcttctagtaatcactgatgagctcatcaacattttgcattaggttatctatgtgtatgaaaatgaataagtgtgagatctattttaggatgctgaaaagta

SEQ ID NO: 88069 - DNA, 487 bp, Homo sapiens
cccaacagaactcatcttactctataattctttgttcttatctatttcctgctttagtgaattggcaccacagtgttctcattcacatagccataaacttggaattatcatagatttcattcatttatccagtcctcacaatctatctgtccctgtgtcttaaatgcttcctgccatmctcactgttagaggtttaactcaagttcttcttatctctcatctgttcttttaccgtattttccatttcagtgaccccaaaacctggaagtgagggagaattacctggcgtattttgtaaaaataaatattcccagtccccacctcatacccattgaagcatgagagtagaggatgaacctagagcattcccaaatgattaactaaccaatgtggtgggtttttaaagatactcatcagccgggcatggtggcaggcacctgcagtcccagttacttgggaggctgaggcaggagaatggcgtgaaccc

SEQ ID NO: 88070 - DNA, 487 bp, Homo sapiens
cccaacagaactcatcttactctataattctttgttcttatctatttcctgctttagtgaattggcaccacagtgttctcattcacatagccataaacttggaattatcatagatttcattcatttatccagtcctcacaatctatctgtccctgtgtcttaaatgcttcctgccatactcactgttagaggtttaactcaagttcttcttatctctcatctgttcttttaccgtattttccatttcagtgaccccaaaacctggaagtgagggagaattacctggcgtattttgtaaaaataaatattcccagtccccacctcatacccattgaagcatgagagtagaggatgaacctagagcattcycaaatgattaactaaccaatgtggtgggtttttaaagatactcatcagccgggcatggtggcaggcacctgcagtcccagttacttgggaggctgaggcaggagaatggcgtgaaccc

SEQ ID NO: 88071 - DNA, 682 bp, Homo sapiens
agtcctagttaccaaggaagaaatgcttccacaggaagacacacatttacttctaataaactggaagttgagactaccatctggccattttgggtttttcacaccactcaaccaaaaggagaaaaaaagtatattgttatgttggctgaagttatttttatactaaatatcaagaaaaaatagttttgctacagaaaagtgggtaaaggagagtatatctgcaatacaggagctcatctggggacatgctactactttctaatcactagtaaaagttcctggatgatcatagcaacattttacatgcaggactaccacggaatgttagcttgacttacttcaccgagaagcctggtcagttgagatgttagcaaaagacaaagggaataggaaacagatagtagagcaaagaaatttaaaactataactatacattcattaacagttgcccatactttttcatactgtgttaaatatatatgatatatatgaatatatattaacycatttccttttttctcttctgttgttcatccactatttcgcataagttgtcttcatgtgtgtgtgtgtgtatttttaaaatttcttttagagatgaaatctggctttgtgactcaggctggagtacactgctgtgatcacacatagctcactgcggcctcaaactcctggactcaag

SEQ ID NO: 88072 - DNA, 701 bp, Homo sapiens
tccttcacttggatgcccgctatgcaggcttcctcagcacagggaaggtcactcatcacccacaggcccttgatcgttatccaccctttgatgctgtcagattccagaacacgctgcactagtctcttccttcatagggagagagggaargtgttatgagaaaatctctcatcaatctgacctagctccccaaaaagatgtaacttttaaaatgtcagatggaaatatttaaaaagtgttacatgcctgtatagttttagtattttacttaaagggaatgtggctgtctttactggctacaaccagtttaattcaagaagggctgctggtcatcaggggaacaagcaaggtttggtgctgcccagagtctccagctaatacacaatatggacatacccttccagggcagcgagaagagagtgggtccttgtgcagtgcagctgacatccaccaactaaggcttctggaagcatgtggagactcacagggagtgggcagggtctcagcatctggctagcagtgaaagaccctgagaagaaggtgctttccgtgtggattggctcactgttcttgcccagtaatgttccaggcctttggtgtccacctggtgtgtattaacccactgaacagccacagaaactaacaaggatttaacagacatctaaagaagtgaagaactggaggaggccaagccaagcgtg

SEQ ID NO: 88073 - DNA, 701 bp, Homo sapiens
tccttcacttggatgcccgctatgcaggcttcctcagcacagggaaggtcactcatcacccacaggcccttgatcgttatccaccctttgatgctgtcagattccagaacacgctgcactagtctcttccttcatagggagagagggaaggtgttatgagaaaatctctcatcaatctgacctagctccccaaaaagatgtaacttttaaaatgtcagatggaaatatttaaaaagtgttacatgcctgtatagttttagtattttacttaaagggaatgtggctgtctttactggctacaaccagtttaattcaagaagggctgctggtcatcaggggaacaagcaaggtttggtgctgcccagagtctccagctaatacacaatatggacatacccttccagggcagcgagaagagagtgggtccttgtgcagtgcagctgacatccaccaamtaaggcttctggaagcatgtggagactcacagggagtgggcagggtctcagcatctggctagcagtgaaagaccctgagaagaaggtgctttccgtgtggattggctcactgttcttgcccagtaatgttccaggcctttggtgtccacctggtgtgtattaacccactgaacagccacagaaactaacaaggatttaacagacatctaaagaagtgaagaactggaggaggccaagccaagcgtg

SEQ ID NO: 88074 - DNA, 2334 bp, Homo sapiens
tcctgcccctgcttgatcagcattcctttcccactttcagagcccatgtgtgaaacgatgggttctgtgctccctttaggatgtacctaagacctaggttttagtttccaagtgtccagaagaaagcgtttgacatacccatccaaataggcaggcattcaacagcagtattgatctgcctccaggtcataaaatgacctgttgccacagtcagggcagtagtcagtaccgaacaagatcctcttggggtgccttaagtccctaactctcttcatcagctcagccctaatctgagtaaatctgctccagcagagagtaccatcagcaccataactctcccgtggggcaggatacagctccaggcataagtttttgagtatgattgtgtggctcagcaggttctccagggtggccatggagatgggatttccacagaagctgaaggtgttgagctcaaagcagcggctcagggcaggcaggatggcgttgacttgggagtctatgatgccacagtcatctaaatccaggtactcaagggtggctgcaactttttctaggagaatttggagaggcacaagactgtaattggtcagtctgatgccactcaggtccagggtctttagttgactgatactcgggcactgggatagatgcttcaagtctgattccaaaagcacacagttagttattgtgaggacctttaacgaggtcttcagacagctgtggagagagagcaagaagttaattctggggaatcataggggtgagtggagggtggtggggaatggcttcaaggtaatggatggagaccattttgcccaagtccaggatcattctcatggccggatggtcaacacttcggatgatgtgtgatgaagagctttgccaccgaggtcaattccactttaggcccggcccagtaactcacacctgtaatcccagcactttgggaggctgagactggtggattccttgagatcaggagtttgagaccagcctgctgaacatggcaaaacctcctctctactaaaaatccaaaaattagccagctgtggtggcgggagcctgcaattccagctacttgggaagctgaggcagaagaatcgcttgaacccaggaggtgtaggttgcagtgagcagagatcatgccactacactccagcctgggtgacagagagagactctgtattaaaaaaaaaaaaaggagaaaaaataattccatttgaggctgagtcatttcaccatcatttataggaatggatcaagttcacagaatccctaaagctccctttcctcatctgtcaggcagaaaaccacatccctgggccacagaagcccagtggagatgcaggcataaaggacaaacccagacaggatcctgcaacatcagctggggtgggcgggctgcaggcgtccctgacacgcctgtatcatcagcaaaccatctatcactttcaccattctttgtgcctgctccctgaccctctgtttcagaatcatacatttcctaggtaattaatttacctggagctcaaaagaaacttttacaacagggaattagagatgggatcattcatgttcacggaactgtggggcacaaagctgattttctgacatgtgcagatttgctgagcattcccctcttcagtgaccacttcacttccctacttcmcatcatcttcttaaaaattatcttgttggctgggcgtggtagctctcgcctataatcccagcactttgggagtccaaggtgggcggatcacctgaagtcaggagttggagaatatcctggccaacatggtgaaaccctgtctctacttaaaatataaaaattagccaggtgtggtggctcacgcctgtaatcccaggcactgaggaggctgaggcaggagaatcgcttgaacctgggaggcagaagttgctgcgagctgagatgtcacaactgcactctagcctggacgatcatagtgaaaatccatctcagaaaaaaaaaaagttatcttgtttgtttttacttttatttcttcatttctgacaggggtcttgggatgttacccagactggtcttaaactcctaggctcaagctatcctcttgcctcagactcccaaagtgctaggattacaggcatgagccaccgtccctgacctatttttcatcatcttaacttagacacacgtcctcaggaagaattcagaaaggcaccctcactagatctgaaccccccagtagctagcttcctagtatggcaacctctctatagcatctcccctagctgatccctctgcctctattgggatggttgcatgatacccatttcaggacagggccgcca

SEQ ID NO: 88075 - DNA, 1308 bp, Homo sapiens
ttgtccaagctggtcttgaactcctagtctcaagcaatccaccccccttggcctcccaaagtaccgggattatagttgtgagcctccactccagccttattatcgaatatttcagtgagaagctttgaaagctatgtgacactgttatgcatcattcgcaagatagatgattccaatacacacctctcgcacatattcaaaatcaaccactttggctgggtgcagtgactcacccgtaatctgagcattttgtgaggccaaggcaggtggatcatctgagatcaggagttcaagacgagcctggccaacatggtaaaaccctacctctactaagccagcaaaaattagccaggtgcagtggtctgcgcctgtagtccaagctactagggaggctgaggcaggaggatcacttgaacccaggaggcagaagttgcrgtgagctgacattataccactccactccagcctgggaaataggctagattcaaaagagagagagagctacatttgattagacttcttaatctctacccagttaatcctgattggatttttggctttcttccagattaactgattgaattagatattcatccatcaaaatgaaagatttagggatagggtgaaagtccaagactcattcactgattcactccacaaacgtggagttttactaatatgtgtccttcacagtcctgagtgtgagacagggaagggttgaatctcttcctgatattagacagaaagaaagaaaacttgaaagtatctgtagagggatccttggtcacatcaaatttctcaaaatatttcagagttaaaacagttttacaaagacagagatgacagttcctaagaaaacacaatagtaatcttcatatatccagtgattacctgggtggcataattcttcttggtgttgagggagctgagtctcacttcgttgcccaggctggagtgcagtggtgccatctcggctcactgttacctcagcctccaagattcaagcaattctcatgcttcagtcttccacgtagctgggattacaggcatgcacccccacactcatgtctccatttgggtggaagaggatgtgattgctttaaaattaaggtcaaagatccttttttgttaagatgttgcttttgttttttggacagggtctctctcttttgcccaggctggagtacagcagtggtgtgagcatggctcactgcatcctcaatcttctgggctaaagtgattctcccacaccaaccacccaaatagctggggctacagatgcatgccaccatgcccagctaattaaaa

SEQ ID NO: 88076 - DNA, 1506 bp, Homo sapiens
tgcaacctttacctcctgggttcaagcaattctcatgcctcagtctccatcctcagaagctggtgtcacagacatctgaaaccatgcctggctaatttttgtatttttagtagaggtggggtttcaccacgctggccaggttggtctcgaacacctgacctcaagtgatccacctgccttggcctcccaaagtgctgggattacagctgtgagtcaccatgcatctgtagtcccagctatttgggtggctggtgtgggagaatcacttgagtccagaagattgaggctgcagtgagcyatgctcacaccactgctgtactccagcctgggcaaaagagagacactctgtccaaaaacaaaaacaaaatcaatcaaaaaggatctttgaccttaattttaaaccaatcacatcctcttccacccaaatggagacatggctgtggggggtgcctgcctgtagtcccagctacgtggaaggctgaagcatgcgaattgcttgaatcttggaggcaatcttggaggtaacagtgagccaagatggtgccactgcactccagcctgggcgacgaagtgagactcagctccctcagcaccaaaaaaaattatatgacccaggtgatcatcggatacatgaagatttctattgtgttttcttagggactgtcatctctgtctttgaaaactgttttaactctgaaatattttgataaatttgatgtggccaaggatccctcaacaaagatactttcaagttttctttctttctgtctaatatcaggaagagattcaacccttccctgtctcacactcaggactttgaaggacacatattagtggaagtccatgtttgtgaagggaatcggtgaatgagtcctggactttcaccctatcccgaaatctttcattttgatggattaatatctaattcgatcagttattctttaagaaagccaaaaatccaataaggattaactggatagagattaagaagtctagtcaaatgtagctctctctgtctctcagttcaatctagcctattccccaggctggagtggagtagtataatgtcagctcactgcaacttctgcctcctgggttcaagtgatcctcctacctcagcctccctagtagcttggactacaggcgcagaccactgcacctggctaatttttgctgtcttagtagaggcagggttttaccatgttggccaggctcgtcttgaactcctgatctcagatgatccacctgcctcggcctcacaaaatgctcagattacaggtgtgagtcactgcacccagccaaagtggttcagattgaatatgtgtaagaggtgtgcattggaaacatctatcttgagaatgatgcataacagtgtcacataactttcaaagcttctcactgaaattttcaataacgaggctggggcagaggctcacacctataatcccagtatgttgggaggccaagaggggtagattgcttgagactaggagttcaagaccagct

SEQ ID NO: 88077 - DNA, 1506 bp, Homo sapiens
tgcaacctttacctcctgggttcaagcaattctcatgcctcagtctccatcctcagaagctggtgtcacagacatctgaaaccatgcctggctaatttttgtatttttagtagaggtggggtttcaccacgctggccaggttggtctcgaacacctgacctcaagtgatccacctgccttggcctcccaaagtgctgggattacagctgtgagtcaccatgcatctgtagtcccagctatttgggtggctggtgtgggagaatcacttgagtccagaagattgaggctgcagtgagccatgctcacaccactgctgtactccagcctgggcaaaagagagacactctgtccaaaaacaaaaacaaaatcaatcaaaaaggatctttgaccttaattttaaaccaatcacatcctcttccacccaaatggagacatggctgtggggggtgcctgcctgtagtcccagctacgtggaaggctgaagcatgcgaattgcttgaatcttggaggcaatcttggaggtaacagtgagccaagatggtgccactgcactccagcctgggcgacgaagtgagactcagctccctcagcaccaaaaaaaattatatgacccaggtgatcatcggatacatgaagatttctattgtgttttcttagggactgtcatctctgtctttgaaaactgttttaactctgaaatattttgataaatttgatgtggccaaggatccctcaacaaagatactttcaagttttctttctttctgtctaatatcaggaagagattcaacccttccctgtctcacactcaggactttgaaggacacatattagtggaagtccatgtttgtgaagggaatcggtgaatgagtcctggactttcaccctatccckaaatctttcattttgatggattaatatctaattcgatcagttattctttaagaaagccaaaaatccaataaggattaactggatagagattaagaagtctagtcaaatgtagctctctctgtctctcagttcaatctagcctattccccaggctggagtggagtagtataatgtcagctcactgcaacttctgcctcctgggttcaagtgatcctcctacctcagcctccctagtagcttggactacaggcgcagaccactgcacctggctaatttttgctgtcttagtagaggcagggttttaccatgttggccaggctcgtcttgaactcctgatctcagatgatccacctgcctcggcctcacaaaatgctcagattacaggtgtgagtcactgcacccagccaaagtggttcagattgaatatgtgtaagaggtgtgcattggaaacatctatcttgagaatgatgcataacagtgtcacataactttcaaagcttctcactgaaattttcaataacgaggctggggcagaggctcacacctataatcccagtatgttgggaggccaagaggggtagattgcttgagactaggagttcaagaccagct

SEQ ID NO: 88078 - DNA, 1506 bp, Homo sapiens
tgcaacctttacctcctgggttcaagcaattctcatgcctcagtctccatcctcagaagctggtgtcacagacatctgaaaccatgcctggctaatttttgtatttttagtagaggtggggtttcaccacgctggccaggttggtctcgaacacctgacctcaagtgatccacctgccttggcctcccaaagtgctgggattacagctgtgagtcaccatgcatctgtagtcccagctatttgggtggctggtgtgggagaatcacttgagtccagaagattgaggctgcagtgagccatgctcacaccactgctgtactccagcctgggcaaaagagagacactctgtccaaaaacaaaaacaaaatcaatcaaaaaggatctttgaccttaattttaaaccaatcacatcctcttccacccaaatggagacatggctgtggggggtgcctgcctgtagtcccagctacgtggaaggctgaagcatgcgaattgcttgaatcttggaggcaatcttggaggtaacagtgagccaagatggtgccactgcactccagcctgggcgacgaagtgagactcagctccctcagcaccaaaaaaaattatatgacccaggtgatcatcggatacatgaagatttctattgtgttttcttagggactgtcatctctgtctttgaaaactgttttaactctgaaatattttgataaatttgatgtggccaaggatccctcaacaaagatactttcaagttttctttctttctgtctaatatcaggaagagattcaacccttccctgtctcacactcaggactttgaaggacacatattagtggaagtccatgtttgtgaagggaatcggtgaatgagtcctggactttcaccctatcccgaaatctttcattttgatggattaatatctaattcgatcagttattctttaagaaagccaaaaatccaataaggattaactggrtagagattaagaagtctagtcaaatgtagctctctctgtctctcagttcaatctagcctattccccaggctggagtggagtagtataatgtcagctcactgcaacttctgcctcctgggttcaagtgatcctcctacctcagcctccctagtagcttggactacaggcgcagaccactgcacctggctaatttttgctgtcttagtagaggcagggttttaccatgttggccaggctcgtcttgaactcctgatctcagatgatccacctgcctcggcctcacaaaatgctcagattacaggtgtgagtcactgcacccagccaaagtggttcagattgaatatgtgtaagaggtgtgcattggaaacatctatcttgagaatgatgcataacagtgtcacataactttcaaagcttctcactgaaattttcaataacgaggctggggcagaggctcacacctataatcccagtatgttgggaggccaagaggggtagattgcttgagactaggagttcaagaccagct

SEQ ID NO: 88079 - DNA, 1506 bp, Homo sapiens
tgcaacctttacctcctgggttcaagcaattctcatgcctcagtctccatcctcagaagctggtgtcacagacatctgaaaccatgcctggctaatttttgtatttttagtagaggtggggtttcaccacgctggccaggttggtctcgaacacctgacctcaagtgatccacctgccttggcctcccaaagtgctgggattacagctgtgagtcaccatgcatctgtagtcccagctatttgggtggctggtgtgggagaatcacttgagtccagaagattgaggctgcagtgagccatgctcacaccactgctgtactccagcctgggcaaaagagagacactctgtccaaaaacaaaaacaaaatcaatcaaaaaggatctttgaccttaattttaaaccaatcacatcctcttccacccaaatggagacatggctgtggggggtgcctgcctgtagtcccagctacgtggaaggctgaagcatgcgaattgcttgaatcttggaggcaatcttggaggtaacagtgagccaagatggtgccactgcactccagcctgggcgacgaagtgagactcagctccctcagcaccaaaaaaaattatatgacccaggtgatcatcggatacatgaagatttctattgtgttttcttagggactgtcatctctgtctttgaaaactgttttaactctgaaatattttgataaatttgatgtggccaaggatccctcaacaaagatactttcaagttttctttctttctgtctaatatcaggaagagattcaacccttccctgtctcacactcaggactttgaaggacacatattagtggaagtccatgtttgtgaagggaatcggtgaatgagtcctggactttcaccctatcccgaaatctttcattttgatggattaatatctaattcgatcagttattctttaagaaagccaaaaatccaataaggattaactggatagagattaagaagtctagtcaaatgtagctctctctgtctctcagttcaatctagcctattccccaggctggagtggagtagtataatgtcagctcactgcaacttctgcctcctgggttcaagtgatcctcctacctcagcctccctagtagcttggactacaggcgcagaccactgcacctggctaatttttgctgtcttagtagaggcagggttttaccatgttggccaggctcgtcttgaactcctgatctcagatgatccacctgcctcggcctcacaaaatgctcagattacaggtgtgagtcactgcacccagccaaagtggttcagattgaatatgtgtaagaggtgtgcattggaaacatctatcttgagaatgatgcataacagtgtcacatarctttcaaagcttctcactgaaattttcaataacgaggctggggcagaggctcacacctataatcccagtatgttgggaggccaagaggggtagattgcttgagactaggagttcaagaccagct

SEQ ID NO: 88080 - DNA, 947 bp, Homo sapiens
gtccaacatggtaaaccccaactctactaaaaatactaaaattagctgggcatggtggtgggctcctgtaatcccagctacttgtgaggttgaggcaggagaatcatttgaacccaggaagcagaggttgcagtgaggtgacatcacaccactgcactctagcctgggcgacagagggagactttgtctcaaaaaaaaaaacaaaaaaatgtggaagtgggtaggatccaaggggaaaacagagtgaagaaaagtcagagagagggacaagaagcagggaggggaggagctgctatccaggatgtggagtttaaattcagaaatgagttcttaaattctcagtctcacctctattttcccacaggaggtggaaacttcaagtgctggatttacaggatgtctgtgagaacttctggatggtttggtctgaagctatggcccgtgggtccttcctcaatgccaagaggaacaaaacaccagtgcaggactgtccaaggatgagaggacagcagcccttgactgtgttcgtagaactttggctcaagaacaggactctggatgaatacctcacctacctccttctatgggtcaagcagaggaaagatttactacacctgtgctgtaagaagctgaaaattttgggaatgcccttccgcaatatcagaagcatcctgaaaatggtgaacctagactgtatccaggaggtggaagtgaattgcaagtgggtactgcccatcctgacacagtttaccccatacctgggccacatgaggaatcttcagaagctcgttctctcycacatggatgtctctcgctacgtttccccagagcagaagaaggagattgttaccaagttcaccactcagttcctcaagctgcactgcctccaaaagctttatatgaactctgtttctttcctcgaaggccacctggaccagctgctcagg

SEQ ID NO: 88081 - DNA, 947 bp, Homo sapiens
gtccaacatggtaaaccccaactctactaaaaatactaaaattagctgggcatggtggtgggctcctgtaatcccagctacttgtgaggttgaggcaggagaatcatttgaacccaggaagcagaggttgcagtgaggtgacatcacaccactgcactctagcctgggcgacagagggagactttgtctcaaaaaaaaaaacaaaaaaatgtggaagtgggtaggatccaaggggaaaacagagtgaagaaaagtcagagagagggacaagaagcagggaggggaggagctgctatccaggatgtggagtttaaattcagaaatgagttcttaaattctcagtctcacctctattttcccacaggaggtggaaacttcaagtgctggatttacaggatgtctgtgagaacttctggatggtttggtctgaagctatggcccgtgggtccttcctcaatgccaagaggaacaaaacaccagtgcaggactgtccaaggatgagaggacagcagcccttgactgtgttcgtagaactttggctcaagaacaggactctggatgaatacctcacctacctccttctatgggtcaagcagaggaaagatttactacacctgtgctgtaagaagctgaaaattttgggaatgcccttccgcaatatcagaagcatcctgaaaatggtgaacctagactgtatccaggaggtggaagtgaattgcaagtgggtactgcccatcctgacacagtttaccccatacctgggccacatgaggaatcttcagaagctcgttctctcccacatggatgtctctcgctacgtttccccagagcagaagaaggagattgttaccmagttcaccactcagttcctcaagctgcactgcctccaaaagctttatatgaactctgtttctttcctcgaaggccacctggaccagctgctcagg

SEQ ID NO: 88082 - DNA, 597 bp, Homo sapiens
gggtttgtcctttatgcctgcatctccactgggcttctgcggcccagggatgtggttttctgcctgacagatgaggaaagggagctttagggattctgtgaacttgatccattcctataaatgatggtgaaatgactcagcctcaaatggaattattttttctcctttttttttttttaatacagagtctctctctgtcacccaggctggagtgtagtggcatgatctctgcwcactgcaacctacacctcctgggttcaagcgattcttctgcctcagcttcccaagtagctggaattgcaggctcccgccaccacagctggctaatttttggatttttagtagagaggaggttttgccatgttcagcaggctggtctcaaactcctgatctcaaggaatccaccagtctcagcctcccaaagttctgggattacaggtgtgagttactgggccgggcctaaagtggaattgacctcggtggcaaagctcttcatcacacatcatccgaagtgttgaccatccggccatgagaatgatcctggacttgggcaaaatggtctccatccattaccttgaagccattccccaccaccct

SEQ ID NO: 88083 - DNA, 662 bp, Homo sapiens
gttaactccttgttagtttctgtggctgttcagtgggttaatacacactaggtggacaccaaaggcctggaacattactgggcaagaacagtgagccaatccacrtggaaagcaccttcttctcagggtctttcaccgctagccagatgctgagaccctgcccactccctgtgagtctccacatgcttccagaagccttatttggtggatgtcagcttcactgcacaaggagccactctcttcccactgccctggaagggtatgtccatattgtgtattagctggagactctgggcagcatcaacccttgcttgttctcctgatgaccagcagcccttcttgaattaaactggttgtagccagtaaagacagccacattccctttaagtaaaatactaaaactatacaggcatgtaacactttttaaatatttccatctgacattttaaaagttacatctttttggggagctgggtcagattgatgagagattttctcataacacctcccctctctccctatgaaggaagagactagtactagtgcagcgtgttctggaatctgacagcatcaaagggtggataacgatcaagggcctatgggtgatgagtgaccttccctgtgctgaggaattctgcataatgggcacccaagtgaaggat

SEQ ID NO: 88084 - DNA, 662 bp, Homo sapiens
gttaactccttgttagtttctgtggctgttcagtgggttaatacacactaggtggacaccaaaggcctggaacattactgggcaagaacagtgagccaatccacgyggaaagcaccttcttctcagggtctttcaccgctagccagatgctgagaccctgcccactccctgtgagtctccacatgcttccagaagccttatttggtggatgtcagcttcactgcacaaggagccactctcttcccactgccctggaagggtatgtccatattgtgtattagctggagactctgggcagcatcaacccttgcttgttctcctgatgaccagcagcccttcttgaattaaactggttgtagccagtaaagacagccacattccctttaagtaaaatactaaaactatacaggcatgtaacactttttaaatatttccatctgacattttaaaagttacatctttttggggagctgggtcagattgatgagagattttctcataacacctcccctctctccctatgaaggaagagactagtactagtgcagcgtgttctggaatctgacagcatcaaagggtggataacgatcaagggcctatgggtgatgagtgaccttccctgtgctgaggaattctgcataatgggcacccaagtgaaggat

SEQ ID NO: 88085 - DNA, 662 bp, Homo sapiens
gttaactccttgttagtttctgtggctgttcagtgggttaatacacactaggtggacaccaaaggcctggaacattactgggcaagaacagtgagccaatccacgtggaaagcaccttcttctcagggtctttcaccgctagccagatgctgagaccctgcccactccctgtgagtctccacatgcttccagaagccttatttggtggatgtcagcttcactgcacaaggasccactctcttcccactgccctggaagggtatgtccatattgtgtattagctggagactctgggcagcatcaacccttgcttgttctcctgatgaccagcagcccttcttgaattaaactggttgtagccagtaaagacagccacattccctttaagtaaaatactaaaactatacaggcatgtaacactttttaaatatttccatctgacattttaaaagttacatctttttggggagctgggtcagattgatgagagattttctcataacacctcccctctctccctatgaaggaagagactagtactagtgcagcgtgttctggaatctgacagcatcaaagggtggataacgatcaagggcctatgggtgatgagtgaccttccctgtgctgaggaattctgcataatgggcacccaagtgaaggat

SEQ ID NO: 88086 - DNA, 662 bp, Homo sapiens
gttaactccttgttagtttctgtggctgttcagtgggttaatacacactaggtggacaccaaaggcctggaacattactgggcaagaacagtgagccaatccacgtggaaagcaccttcttctcagggtctttcaccgctagccagatgctgagaccctgcccactccctgtgagtctccacatgcttccagaagccttatttggtggatgtcagcttcactgcacaaggagccactctcttcccactgccctggaagggkatgtccatattgtgtattagctggagactctgggcagcatcaacccttgcttgttctcctgatgaccagcagcccttcttgaattaaactggttgtagccagtaaagacagccacattccctttaagtaaaatactaaaactatacaggcatgtaacactttttaaatatttccatctgacattttaaaagttacatctttttggggagctgggtcagattgatgagagattttctcataacacctcccctctctccctatgaaggaagagactagtactagtgcagcgtgttctggaatctgacagcatcaaagggtggataacgatcaagggcctatgggtgatgagtgaccttccctgtgctgaggaattctgcataatgggcacccaagtgaaggat

SEQ ID NO: 88087 - DNA, 662 bp, Homo sapiens
gttaactccttgttagtttctgtggctgttcagtgggttaatacacactaggtggacaccaaaggcctggaacattactgggcaagaacagtgagccaatccacgtggaaagcaccttcttctcagggtctttcaccgctagccagatgctgagaccctgcccactccctgtgagtctccacatgcttccagaagccttatttggtggatgtcagcttcactgcacaaggagccactctcttcccactgccctggaagggtatgtccatattgtgtattagctggagactctgggcagcatcaacccttgcttgttctcctgatgaccagcagcccttcttgaattaaactggttgtagccagtaaagacagccacattccctttaagtaaaatactaaaactatacaggcatgtaacactttttaaatatttccatctgacattttaaaagttacatctttttggggagctrggtcagattgatgagagattttctcataacacctcccctctctccctatgaaggaagagactagtactagtgcagcgtgttctggaatctgacagcatcaaagggtggataacgatcaagggcctatgggtgatgagtgaccttccctgtgctgaggaattctgcataatgggcacccaagtgaaggat

SEQ ID NO: 88088 - DNA, 662 bp, Homo sapiens
gttaactccttgttagtttctgtggctgttcagtgggttaatacacactaggtggacaccaaaggcctggaacattactgggcaagaacagtgagccaatccacgtggaaagcaccttcttctcagggtctttcaccgctagccagatgctgagaccctgcccactccctgtgagtctccacatgcttccagaagccttatttggtggatgtcagcttcactgcacaaggagccactctcttcccactgccctggaagggtatgtccatattgtgtattagctggagactctgggcagcatcaacccttgcttgttctcctgatgaccagcagcccttcttgaattaaactggttgtagccagtaaagacagccacattccctttaagtaaaatactaaaactatacaggcatgtaacactttttaaatatttccatctgacattttaaaagttacatctttttggggagctgggtcagattgatgagagattttctcataacacctcccctctctccctatgaaggaagagactagtactagtgcagcgtgttctggaatctgacagcatcaaagggtggataacgatcaagggcctrtgggtgatgagtgaccttccctgtgctgaggaattctgcataatgggcacccaagtgaaggat

SEQ ID NO: 88089 - DNA, 673 bp, Homo sapiens
atcttgttggtaacgttgctggccattgtgttggatgataaggtttctcaaaaagccaaaaacaggaggcgggagggagaagagattcgattctaagtctcctactgccgggttctacggggagaarctgactgcggctcgaggccagaaatgcagccaaaacagctcagtcttcgtctcttcacaaaatggctgccaacaagaattctgaaatgatgtaaagaaaagcacaacaacatttttgaaatcacgacaaaattgcatttagaaaaaaaaatcaaagcttcaaagtgttcatatgaaaaaaagaaaaaaagacatgatatagttctatgccatcgtaggctgcactgtcaccgttctagaccggctgactgtaggtcacatgggagtgtccttacagaaattagtgacttaccagatctggttgtagtttagaaggtgctcagacctcaggaagagccaagcaggaactccaggcttgaagactttgagtttgtcctgtgggtctttagaagcttttattgacctttctaatcacaactcccacccacgcccctccacgtatccgctgctagcttccaatcaaaaagcgatatctgattgcatttctgaagctccactcagttaatcctgattgggtttttgactgtccgaagactaatggattgaa

SEQ ID NO: 88090 - DNA, 791 bp, Homo sapiens
gaggcaagtggatcacctgaggtcaggagttctagccaacacagagaaattctgcctcttctaaaactacataaattagctggatgtggtggcatgtggctctaatcccagctactagagaggctgaggcaggagaattgctcgaatctgggagtaaraggttgcagtgaggtgagattgtgccactgcactccagcctgcatgacagagtgagtctctgtctcaaaaaaaaaaaaaaagaaagaaaaaagaaaaaaaacttttgccaaataagtttaaatttactttccttctaatatccttagccatttttaaaatatgggttactgctctcttatgaaatgaattagacaactttccatatttgcctttctttctggaacatcttgtacaaaacagaaaataccggccaggtgcagtggctcatgcctgcaatcctagcactttgggagactaaggcaggcggatcactagcttccaatcaaaaagtgatatctgattgcatttctgaagctccacccagttaatcctgattgggtttttggctctccccagattaatggattgaatcagatatccattcatatcagatatccatattaattgcatgaatcaggaaattgacagtgttagggatagggtagaagtcaagaattcactcattcaaggccgggtgaggcagctcacgcctgtaatccttccagaaggacttccctgtactggtttaggctttgcataccctgtctttcatttgggtcccactgggggtctgttcctgctagttggatcct

SEQ ID NO: 88091 - DNA, 785 bp, Homo sapiens
gctcacagtccaagggagagggaaagctgtctaacaggattggttttcccgtgtgctttataagcagatgagtagaggagacagctcttattgtcctagtggcaattgggataggctgcaaagtttgttagggtggaggcttattccgggaccaagggagcccaaagaaacaagctcctgccaggcgcggtggctcacgcctgtaatcccagcactttgggaggctgaggcaggtggatcacctgaggtcaggagtttgagaccagcctggccaacatggtgaaaccccgtctcyatgaaaaatacaaaaattacccgggcatggtggcgggcacctgtaatcccagctactagggaggctgaggcaggaaaatggcttgaacctcggaagtggaggtggccgttagccgagatcacgccactgcactccagcctgggcaacagagcaagactctgccttaaaaaaaaaaaaaaaaaaaagaaaagtaaaaggaaaaaaaagaggctctggcctgctggggtgcctgcaaagtctccgtggaagggtgacattcaagccgagacctccagggaactgtctcctgggagcacagagccctttgctcagcccccaggtggctcagtgcccccagccagcagactcagagcttgcatgattctttggtgctctctgcggtcttccaatgatgctgaaataaatggtgcttggtgtctccctgctgtagtccccttgcttgctttgctcacaggtgctgggagagatatgccttcgaggatatttggat

SEQ ID NO: 88092 - DNA, 785 bp, Homo sapiens
gctcacagtccaagggagagggaaagctgtctaacaggattggttttcccgtgtgctttataagcagatgagtagaggagacagctcttattgtcctagtggcaattgggataggctgcaaagtttgttagggtggaggcttattccgggaccaagggagcccaaagaaacaagctcctgccaggcgcggtggctcacgcctgtaatcccagcactttgggaggctgaggcaggtggatcacctgaggtcaggagtttgagaccagcctggccaacatggtgaaaccccgtctccatgaaaaatacaaaaattacccgggcatggtggcgggcacctgtaatcccagctactagggaggctgaggcaggaaaatggcttgaacctcggaagyggaggtggccgttagccgagatcacgccactgcactccagcctgggcaacagagcaagactctgccttaaaaaaaaaaaaaaaaaaaagaaaagtaaaaggaaaaaaaagaggctctggcctgctggggtgcctgcaaagtctccgtggaagggtgacattcaagccgagacctccagggaactgtctcctgggagcacagagccctttgctcagcccccaggtggctcagtgcccccagccagcagactcagagcttgcatgattctttggtgctctctgcggtcttccaatgatgctgaaataaatggtgcttggtgtctccctgctgtagtccccttgcttgctttgctcacaggtgctgggagagatatgccttcgaggatatttggat

SEQ ID NO: 88093 - DNA, 785 bp, Homo sapiens
gctcacagtccaagggagagggaaagctgtctaacaggattggttttcccgtgtgctttataagcagatgagtagaggagacagctcttattgtcctagtggcaattgggataggctgcaaagtttgttagggtggaggcttattccgggaccaagggagcccaaagaaacaagctcctgccaggcgcggtggctcacgcctgtaatcccagcactttgggaggctgaggcaggtggatcacctgaggtcaggagtttgagaccagcctggccaacatggtgaaaccccgtctccatgaaaaatacaaaaattacccgggcatggtggcgggcacctgtaatcccagctactagggaggctgaggcaggaaaatggcttgaacctcggaagtggaggtggccgttagccgagatcacgccactgcactccagcctgggcaacagagcaagactctgccttaaaaaaaaaaaaaaraaaaagaaaagtaaaaggaaaaaaaagaggctctggcctgctggggtgcctgcaaagtctccgtggaagggtgacattcaagccgagacctccagggaactgtctcctgggagcacagagccctttgctcagcccccaggtggctcagtgcccccagccagcagactcagagcttgcatgattctttggtgctctctgcggtcttccaatgatgctgaaataaatggtgcttggtgtctccctgctgtagtccccttgcttgctttgctcacaggtgctgggagagatatgccttcgaggatatttggat

SEQ ID NO: 88094 - DNA, 960 bp, Homo sapiens
ggggcttttatttttcccttagtaattgaagtgttagatccgggatatttccaagtgtaaaagccaaatccatgagtatggcaatggaacacatcctggtatcagctattaatcaaggtactgaaaagtgatggcaagagacctcattttggayacttcagtttcttattcatgaattcagaggattttctttttttaaatgtctttttcccccctctgtcctctgttttttattagatgatctcattttattgggaccaactaggaaaaatgagtacatagggattatctgtgcttaaaaatgcacatttatggaagtgtaatttcaggttgaagtattattagacaaactaaatatggcatactaaaaaaggagtagagagtaggaggtttggctttagtttatactttatttcttgccagctctgggatgttgggcaagtcacttagcttttcagtccctcacttatctaatctactggatggggataatgatatatgtcctacctgcagacacaggattgaactaaatgacaacctccctgccctatctatacagcactttccctccagagctccttaccccactttatttttattcatagcatttatcactacctgaccttttactatgtatatgcttgatttttttattatctgttgatccaaatagaaagtcagctccatgaaaacagagctctctctgtgttattgccagtactagcgcagtgactcacatatagtgtatgatcaataaatatttgctggaaagacaaattctagctctaagacctaggattataaaacagaaaacagaatccggtatagtctggtggttaagctcagttgtcaagatgccatagttcaaatctcagctccatcatttctggttgtgtgaccttgggtaagttacttagctctttagggcttcaattttagcttttgtcacaggtaatatgg

SEQ ID NO: 88095 - DNA, 1106 bp, Homo sapiens
ctgccattgtctttatatactttggatgggcaaaaaaatgccactactggtggtgcaggaactaatgccttaaaaaagtgacaacataaggatatctagcatggcagtagagtgaagattggctctatgttctaactcaaggaagcttgagttacggtccatgggaatattgcttaacccctcctgtttctcattgcttaacctcatgctcctcaagtgtgattggatgtcagctatatagttcataggattatcataagaattaaatgagatagtgcatgaatagtgccttgctcagtacttggcagaaagaataggagttcaatagaaactgctctgttttgatgatgattaagatgaaatgtgcctggctaactccatattccagagttactctgccattgattctgtatgagtaaatgattggtaatcattgttcataattttttctatgggatacttatttgtttgaataagggccatggaatttggaagctgaaatcaaaaccaatacacttaaaatgaaagaaaatcaaacaacgattgagtaatctatctaacccatcactgagttttgtttggtaacaatgataggacataaagagcatacttaaattgcatttcaagtcatggcaaataattcttggtgttttagagagcagatccccttcccaaagacttctgagcatgtggctgaaatttcttaaacattcctcaaatgaggtacaaattatggccatcctatttctcacctagtgactgtgttgtcctggcaagtctttagtctacattcgctatttcacttcatcaaataaaataaataatattgttagactctaatgaatgaagaatatacaatgtggcagctacttagtacacattcaatagcagtaaacttcacctttcctgtcacctcaaaataatatccaataacaaaaacgttttcttgggtggggtcaagatggccaactacaaacagtggtgatcagaggctccaactgaaaagaaccacagttagcatgtgaatccttcaccagcaaccagggtatccagattctctcatcagaactgactaggcagctggcgtgacccacrgagaggaagga

SEQ ID NO: 88096 - DNA, 1068 bp, Homo sapiens
gtttgtccatgtgatgattaagctttttaaggacaaaaattgtttttccatatggtctgattggtcatttccttagcatctttgctcatttaacaaaagcgatattaatgctctgtacttaagaaaattgtgaaatggagaatgacacagacacacacacacacacacacacacacacacacacatcaatcatatgaggtcttataacatttgtaaatatgagttttcttccttaaatttgaatgctagagacaaaaagaaagatgaagatggagtaaactgagtgaaggaaaggcaacacattgtggcctaaagatacaaccagggcttgatttctattggatgaattgtgttcgtacttgacatagtctcatactcctttttgggataaaagagtaagttggctttgacaaccgtcaccacattggtctctgaggatgacctttctggacaggggaatgtgcctctctttctttgctattcatgtgtgtacctcctgaagctgcatgttctattgaagaggatagcctttaattcaatgtttagttcagtgcatacaaatatctcaacacaccagtcaatatttctcataccttcctctatctactrgtacctctgccctcccttctcccgggttttcaggattcctttgtaaacttttggctgcccgaattccagtgtttggatgcttcatgaagtctttctcttctccagcatgatccatgctttgcatgtaattatctctttcccttccaagccctcccttaaaatttcccttttcttgtgatcaatgaattgatatatgttaagtacttgctctggattatcagtttggctccaatgcttaaagaacttattcttttgagtcagagtttacttgcataaacaatcacaaaaaagcagttgtgggtcaaattacatcacccatagaagtaattttttacagaaaaaagaagtcaatatgggctaatgcagttaagagaaagtttaatggaatccaaatgcacaagtatctggagataaagggttaatgttttatttccctactgaataagttattggaatagt

SEQ ID NO: 88097 - DNA, 624 bp, Homo sapiens
ggttatttatttatttattttttttactgtctttaactcaggtaaaaatcaatatacagcgagacaaagggctctagagggtctggctacaccagcttttggtttggctcctgcacaattctacaacatgctgaggctgggaaggattagcctgcttgtgttgagtaaaccgatgatactcaataaacagtttctgttgtaaaccccttaggacgtgcaaagccacactagttggcaatagaccagataagctgcagaaccagctgtaatctcatttagacctgagctgatcctcctgtcctttcattccacaggatcaaagcaaaccactgaggaggcagctgtattatagcagctctgcttgctggatgcagcaaacatttcataaattccactccttgaagcaagtctctayctaatctacccagagctgggacaatcaatgaatttctgaattcattagaccgattattacagggtaaccattttttctttggagaaatataatgattgtatgccaactttacaaagcagctgtttctgaccatctctttcttctggaaggggctaaattttcccccacaatattgaataaaagtggtttaaaagtacttagctcattat

SEQ ID NO: 88098 - DNA, 1339 bp, Homo sapiens
cttacagaactgaaatagatatttatatttccaacacgcttgtaacccaataactagagactaaaaacctaacttcatgaaaaggagtgtaaatttagctgttatggtcaaatactcacacagcacacccagttcacaagcatctccaaaacgttgattgttctgatcaattttgaaaatcatcctgctctctacagcaggaattcaggtagtacaagtgaaaacagtattatatactacttaaatgaaaggctgcccttgtgagttactgtgtgtgaagttgcttctgcgtatgtccatccagagaacaggagagacactgagaagactgatgtgtccccgacctctagatgggactgaaaattcaagataagagagatgcccagggataaacttccttctttctttagaaattatacaatattagaactgaaagggacattagatatcatcagggcttcccataaggggctcactgtcttgctttattgaaagaaaatcagttttgaagccagaccaatctttttttttctttttaaatataggtggtgtcttgccatcttgcccagactggtctcaaattcctgggttcaaccagtcctcccacctcagcctcccaaagtgctgggattacaggtgtgagccaccgcacctggccaccaatcttgatttgaattcagaccctaccctttaccagctgtgtgactttgtatgttttacttaatctctcaaagctttattttacttatattttaattatactggagataaaaatgcatttcaagtcaaggttgttattgtgaagattctgcaagtaaatacattcttgcatctctgtaaaatgttgccgtgcctgttgattagataagtcaccatgatgacttatgatcaattagagaaaaatgtctgttacccagcgatgggaaagtgaatacctccgagacccatgtccccaattgtgtgttaaaactattctatgttaaaaacttactttaaaactcaattatatcttctcaaaatattactaatcattctaacatattttagttaatatgtttctccttgtacaaatatatatgtgggaagtagagggcatatttttccttaagcttgctgctttctaatccaaaaaaaatgtgatgtgcaggtctattacactccacttaaaatacttacaactttggggcttatttttctcctttgaaccattactattataaaaatcaattcttccttagtcaccaagtcctcatccttgaggaaaggaagtcagctaaaatacaaatctctttgtaaaagtaaartttagcgacttgggaggctgaggtgggaggatccc

SEQ ID NO: 88099 - DNA, 656 bp, Homo sapiens
ctccatagcctctatattgtacatcatgtagactcaggccactctcacagtataggggctacattcaagatggtcctgcagatgctttgacttcgtaaatgagcctagtattctcagggagtgctgcccgcctgtccctaccttttgggagaaaggtcatgaagtaaattgttatgactccttggcccacatcgctggactcgttgcattggaagggacctggcctgcataagtgtcgaatctctatcagtggtaccattaayctcttaacaaacatctattctgtgtggagtactgtttcaggttctaagcatttcaactaatcagagatggccatgatacttaccctcgagagttagggaaacagcaaatacagaaaaacaggctagggctaggcacaaaattgtcttgtgcaccaaatttaaggttgtggggggtgtgtcataaaaaacaaagtcatccagggaaataatattctaatgaataattttagaaatctgaattaacacacaaaaaatcatgatgaacaaaatattaaaattttaaatgcaggtaagatcagtatcagtgccttcccaaaccatattggagcctgaggcaaaaagaataatcagaggtacccactcctctccctagtcccgccctgtaggaaggaa

SEQ ID NO: 88100 - DNA, 1317 bp, Homo sapiens
cacacatcctagtacatttccccacaaaacccagagctccgtatcacgctgcaagctttgtaagcttaggggtggctcccatcctgggcagaatcacaccgtgattcttctgatgttttgggatacaaagtagcaagagcctcccccaccccagagaatcctccaggcctttctctcccattttttatgacacccaaacagctctgagatgccactggcccaccaaagctggagttcttcgaaggatgttctccatctcggaatctttctggaaatgttttctctccacatttctgacctcactatcaatgccttatgtgtgcaatcaagttaaactgaaatgtactcagtgaggcttctacttcccagccccttgctttgtgaacctgaggctgagggtgagctcagcaccaaggatggtcgtgagcatctctgttgactgagcatccacgaggcacagcaggggctgagtacttttcacccagctctccctcacagagacctcacctctccctcccagtgaacctaaggtatgttgctctttcccgcatttttaacctggtgaccctgagactcggccagggagaggaatctgcccatgttcaggccgcaaatgattggcagatccctcaggtgagggctcagaggatcccccaaggggttcaataacctaaatgttacaaagaactgattgacagccttttccttcctacccaattcagggagtcttgcaccacccccaggaccctggtgagaatcctgcacttggggccttttctaccatatcctgtcgcctgttcttctcaaggtgcttgtctgctgcccaggtcagagcagccttcgcagttcatctcaaggaaccacctgaccccttctccactcatggaatccccactgggatctcaaagtttcccccaggcccttgctcagggtctctagaatatttctgagcttctgttttcctctccaggtgcagccttttcagctctaaggctgggccagrggcgcctggaaagggtcagggcagcccacactctgcatctcaggaatatcagcccatctctcctggagcttggaacatggccatgatgcttgaagaccctttccctgtcatcagcagtaatgaaggaattctccccaagttctactgaggtattctggtgaacatagcaaggcacaaagcagggagctcctcagctgctgctgtggacctaaagaggcacctgggactgttgcagggtgactgaccttgcctggcttgcagaggaagacctgactcctctggttctcctagggattccaggctgatgggaatcc

SEQ ID NO: 88101 - DNA, 1317 bp, Homo sapiens
cacacatcctagtacatttccccacaaaacccagagctccgtatcacgctgcaagctttgtaagcttaggggtggctcccatcctgggcagaatcacaccgtgattcttctgatgttttgggatacaaagtagcaagagcctcccccaccccagagaatcctccaggcctttctctcccattttttatgacacccaaacagctctgagatgccactggcccaccaaagctggagttcttcgaaggatgttctccatctcggaatctttctggaaatgttttctctccacatttctgacctcactatcaatgccttatgtgtgcaatcaagttaaactgaaatgtactcagtgaggcttctacttcccagccccttgctttgtgaacctgaggctgagggtgagctcagcaccaaggatggtcgtgagcatctctgttgactgagcatccacgaggcacagcaggggctgagtacttttcacccagctctccctcacagagacctcacctctccctcccagtgaacctaaggtatgttgctctttcccgcatttttaacctggtgaccctgagactcggccagggagaggaatctgcccatgttcaggccgcaaatgattggcagatccctcaggtgagggctcagaggatcccccaaggggttcaataacctaaatgttacaaagaactgattgacagccttttccttcctacccaattcagggagtcttgcaccacccccaggaccctggtgagaatcctgcacttggggccttttctaccatatcctgtcgcctgttcttctcaaggtgcttgtctgctgcccaggtcagagcagccttcgcagttcatctcaaggaaccacctgaccccttctccactcatggaatccccactgggatctcaaagtttcccccaggcccttgctcagggtctctagaatatttctgagcttctgttttcctctccaggtgcagccttttcagctctaaggctgggccaggggcgcctggaaagggtcagggcagcccacactctgcatstcaggaatatcagcccatctctcctggagcttggaacatggccatgatgcttgaagaccctttccctgtcatcagcagtaatgaaggaattctccccaagttctactgaggtattctggtgaacatagcaaggcacaaagcagggagctcctcagctgctgctgtggacctaaagaggcacctgggactgttgcagggtgactgaccttgcctggcttgcagaggaagacctgactcctctggttctcctagggattccaggctgatgggaatcc

SEQ ID NO: 88102 - DNA, 725 bp, Homo sapiens
ctgagtgcctgggatgtgccatctactattctcggtgctactgacaaagacaaacaaaaagcaaagaatctggaaaatgaacccaacacagtacacgtggctcagcactgcagcccaggtcagaaaaaaatgactgtgcaagatgaaatgtgcagagtgatcttaataatccatggggaaaatgacagatgtcctatgtcctttaatcactttttgttgaagatgaagaactctcactgctgaatataaacagacaggtaagtggaaaacattagtaaaactaatgtttattaagtgcaatgygattcagaacactgagaatccaagggctttatttctttgaaacaacttgccagggcagtttgaacagtgatcatcttcctcctgggcacagcactgcagaggcagctggtgtcttctcccccttggagaattctcctaatttctttaagttggggtgggccagggagtctggaggagtttgttcagcttgggttgggggtgcaggaggagttggtggagtgcctgtggccacacccctggcctctgggatcaggaggagacagtggggccaggacccaacccctggtctgtgcttcaggtgatccctctctctcctttggatgtggggtttgggagcaggttaggggtcctcgcccatcaccactggctcttctagggaagatacatctgtgggacctgcaggtggccctgtgcaggaaggg

SEQ ID NO: 88103 - DNA, 549 bp, Homo sapiens
attaaagacttcctttttttccagaaatacactgaatgataccttcagagcaaggtatatgtactgtgggattatgtgcagggcacttaatcataaggggccaaaattatagtctataaagggtaagatttggagcagatattctataaaatcttctagcttcctgggttargatttaaaaatacagcccttacacctatgtacccataaaaattaaattattaaaaaataaaaataataaataaaaacatagctttctgagtaaagatggagaaacacaggctttatatttagacagacttggtttttaattctaaccagagcccctgtattagtccattttcatgctgttgataaagacatacccgagactgggcaacttacaaaagaaagaggtttaataggactcacagttccacgtggctggggaggcctcacaatcatggaggaaggcaagcaggagcaagtcacatcttatgtggacgacagcaggcaaacagagagcttgtgcagagaaactcctgttttcgaaaccatcagatctcgtga

SEQ ID NO: 88104 - DNA, 1753 bp, Homo sapiens
catgtccacacttgaagactcaggctcgctgagaaagctcggcctcggctgggctgctggggctgcaggggaggccgggatgacccagagggaggaaccagcaccaggcttcagggagggggtggtcggggatattagagaggagagtccgcagcaggtcccagctccgccgtgtggccagggacaccactgaggcctggtggcccgtccctgccccccmccctcccgggcttattctccctcagggcacccaagaggagaagccttcccctgcccttatactctcactgcaaaggccgggtagggctgagacatttcggaagaaggcccactgcccgcagagagggtcggcctcctcggggttctggggaggggacagtggcaggaggcgcctggtgagatctggtgagcgccagttccagaatgggggaatgtggggcgctgtccgaggtcctgaacgtctctggagggcctgactacgtcaggctcaggactcagaggacctgtgcagcagcgagaacagaggggtccaaggaggcagagacgggggagatggggctcacagcagcacttgtcatgcagactcggggctcctgggcatctctgatactcaggggccatggggtcaagacggattcagggatccggccaggtccagggactgagtggcctcagggttacctccatgcactgcacctgtgggtccccacaaggcctgagtcagtccaacctggagctccggccaggggcagtgcaggactgggcagagcctcaccagagagaccagtggtggtggacacggaggggatgccagcctcggaaggagaaagggtttatctcctagaggagagctgtccagccggggcgtgacagcagcctggggtccagaacagagggaaggggcaccgtgctgtgcgacccggctgtgcttcagcctcctgggagactcagccccctgggaggctgcccacaaacgggccaggcatccacctggaggaatgagctccccgtcagctccgtggctccccaaactggcacatatacccaagtcagacaacacagaagcatggtctccatgtggagtggaacgcagaccccctgcccaggccctgctggctgaccttgggccccttccaagccactaagccctcatcacaaaagtcagacgtgctgatctctgaagccaggcctgatgccgggggcctggttttctgctcttgacgggaatagctcacagctgtgtgtctatattggaagccgcttctaccaagcccagttatttatatatcttcttcccaaatggaaatataaggaaatgtgttagcaattttgactttatttcataaaacacaggatgaggccaaatggaagtctgtttctgaataagattacagattacagatctgaaaaacaaagttgtctttcagctgcaaatatcatttagagaaaatgtcttgttttgtaaaaagaagctgtgtgttgacagatttcttcccctcaaattctagaggaatttcaaagctctcagaggttctaagctctcaaagttctacctgtgggggaggtggtgcttgcatcctggacaccccctgccccctgcaggcccagtgcagtggggtcgccagatgcagctctgtgcccacaggcttgctggcaggggcagggctggctgccatgggggggatgccacctccaccctgaccagcacctcaggtacaccagcccagcagcaggatgcagaggttccaggatc

SEQ ID NO: 88105 - DNA, 567 bp, Homo sapiens
gggctcaaatgacttaactttaagtgcttacaatgatgcctgacacatggtaaggctaatcgaggagtagctattgttacatctctttctccagcctcttccttctttgcaccaactgcctccctctgagcaattttgagggaggtttatctcgaggtgcagccaatcccagctgctagggccaagatcagccacrtgctcctttcccttggccatggctttggacactccaagctggcagtgagtgccaggtgagggggctgctaggagccggcaggggggatctcacctttgtgccacttatgtccctaatcaggggcaacctccccaaatctgcacccccaaatcccctccccagcttgactggagaaatcactctaactcccaatgatagcaactccaaatcatagcaataataatttactgagtgcttacagtgagccagacacagtgctagcatcttgtaccagcagttctcaaactttttggcttcaggaaccctttacaccctaagaatgatcaaggccctcaaagctcttgttcatgtgggttgtatctatcactaat

SEQ ID NO: 88106 - DNA, 540 bp, Homo sapiens
tgtttcttcaatcagtagcactgtaaccaggacactacagcagatatagcccaggaaggggccaagggtcttgaaagggcagaggcagtggagtggggacgatacrgggagtctgaactgggaagggccttgctaagaagaatgtgaagcctaaggtgagacaagagattattcgagagcttggagcattgatatatgagttgggtatgattgtccctatgtttcagacaaggaaaccaaggctcagagtagtggaaaagctcaccacagtcaacggcagaactaagtgggcctgagtgctttcttttcttaatgctgccccttgtagctcaaggaaatttgatgaagagtgttttgaaacttcagctggctcttgacaagtgtttgtgtgacattttggtgggagagatggagatatgtctgctggtatttgggacaattgggtacatcgcatcagtaccagtgggaatagagcagccttgacatttcaccatctgaggaatggcaggaggactgagaccattctgtcggaagaataga

SEQ ID NO: 88107 - DNA, 540 bp, Homo sapiens
tgtttcttcaatcagtagcactgtaaccaggacactacagcagatatagcccaggaaggggccaagggtcttgaaagggcagaggcagtggagtggggacgatacagggagtctgaactgggaagggccttgctaagaagaatgtgaagcctaaggtgagacaagagattattcgagagcttggagcattgatatatgagttgggtatgattgtccctatgtttcagacaaggaaaccaaggctcagagtagtggaaaagctcaccacagtcaacggcagaactaagtgggcctgagtgctttcttttcttaatgctgccccttgtagctcaaggaaatttgatgaagagtgttttgaaacttcagctggctcttgacaagtgtttgtgtgacattttggtgggagagatggagatatgtctgctggtatttgggacaattgggtacatcgcatcagtaccartgggaatagagcagccttgacatttcaccatctgaggaatggcaggaggactgagaccattctgtcggaagaataga

SEQ ID NO: 88108 - DNA, 883 bp, Homo sapiens
catacatgtgcagtatattgccccagcataccactaccagtgtacgtttttggtaattatgtatttgtaggagatgtgacattgcttgttaagccacatgtgatatgagtgtttctgcctcagcaggcctgtactagagaaggcctgtcctgtgttcctattctccatacccattatggtgttgagggtgagtgaggatggactgttactctaatgtgatgccattaaacaaacaagttggaggaagatcagcttaccttctttcagactttgctaaaatgttctttattactagcatgttttctttgaygattttatcccacacattttgcttcagaatcatttcttggattctgttgtttagtatcccaaaaaggttgagtgttcttttagaacacatacacgcatgaactaagggtctcaaaagtaaatataagaaaagaacagatgagaagatggaccaaatgtagaagtaacatcacttgaggcttgagaactgtctggctagtgtaccatgtatactgtcactaaatggtgaccctaagccacgcatatgccaataattatatctgggaattgtaaactaaggctttttgtcctaaccatttgctcagcagatgagtattgctgaattgttcatttatatttctcccactccctgccaacagttaatgacagttcggactatcacaggaaatatctactatgcaaggtcaggaactaagattattgggaaggttcacgaaaagttcacgttgattgatggcatccgcgtggcaacaggctcctacaggtaagtctctaacccgtccaaggcttattaatctaaactcttcagaagaagcatgtcatgtaaaggtaaaagccttttcctctcaatggg

SEQ ID NO: 88109 - DNA, 740 bp, Homo sapiens
aaatttattagtttgcacatggatatccagttgtccccgcaccatgcattgactcatccagttgaagcagttaaagcactatttccccacagaatgatctttgcacctttgtcaaaactcaattaaccataactgtatgggttgatttttggactctcaattctattctattggtccatttgtctatctttatgccagtatcacactatcttgattgctgtaactttgtattaagttttgaaattgggagatatatgccctgcaactttgttcttcttttycaagatgattttggctactccgggacccttgaatttccagatgcattttaagatctggttgctcatttctgcaaaataggcagttggaattttgtgttaaatctgtcaaataatttcaggtgtactgctcaaatcttattaaattttctgttccatgaacatgggatatcttttcatttatttagatttcttcattttttttcagtaatatttcaactactgttttgttgtttttagtgtacaagtcctacactttggttagactatttttagtatgtttgaaataggatttagtttgtatcctacaaatttgctgaattcatttattatttgtttttctatgtgtgtagacagatgtattgctttaaagaaaaattaggaccagattgtttggctttcacatttgtgcctcaccacaattaatcacaatgaaatagttctgtgcgttttccgaaggaa

SEQ ID NO: 88110 - DNA, 1295 bp, Homo sapiens
tagaagcccatgcaaacaggaaaataactgttatacaattgtatataagaagaaaacaagctagttgctcaaaaagaacatagctattctatttactaagccctgggtgaaggatctttctgtccttttagtgttatttagagaacaatatcttcaataacatctctactataaatacagtcactgggctgttttgtttaatgtcaaatttatggtagtcagttggtaaaatattaaaagttcaatttgactctacatggtccaacctaattcggggagaatataaagggcttacaatatgcttggtgcttgttgggccaattttggggtggttttaggtccctttcatgctgggacatgatttattgcctatcttaataacttatttattatcccacatcagttgctaccttccacctttggaatcccagctcctttccaggtccccttaccagcccacactagtgaagtccacctccttgccaagtccagatctcattaagctgcacatcccagtttccacttccgtattttctccagtttgargtgctcttttagcctcctctctgcaaactcacattcattggttccttttggatgtttcagcatacgtcttcctttaagaatctttctctgacccttggcttaacattaagcccctgtaatattatgtagataattttaaccatatttttatgtacttgttaatctgctgtttaatacttttttgaactgaaagatgctacgcttcttgaaaggaggcttagtttctcctactgtggatcttgaaaggggtctagtgcagtgttcggtactcaattcgtgctcaaaaacaatgaaagaatgaatgatacgttatactgtgaattcactccttgatgacgaagtcagtaggggcttcttcccagctcatttcacttttactttgctgtttctcctgcactactatatgatagacaccacaattctttacattcctttattctgctgggaatatacctctgaggaatgacatataaaaatatttctgaaacatttaaaacccatggtccctttggatcaacttaaaaatctcacctcctcctgagagatgatgctctcgatatatcccctgggtaaaggaaggagctgccctgtaccccaaccccaactataactgatataagaggatccctctttgggtaatagtattgaaggttattaccccaaaatggtcactgatttgttagccaggctgatcacattcataaatgcatagttaatacatagaaagagatacctatttgtggggagag

SEQ ID NO: 88111 - DNA, 611 bp, Homo sapiens
cagtataacttataattatctgttgtgttacaatgaagtatatcatcactgctgtactgaatattggatttcagatgtagcactgaaacatctgttactgaaatatgcaccagaatgtcttatgtattccttgcaggcattgttgtttatagaggtcttctgttgttttagtgttgttaatatgtagcagatgcacaaggaaagggggaggaaagaggaaagggcggaaagcgccctaaagtgccttagagtttttctgagatttaaatttgtttctgtttatacttttactcaattggagaaaataatggaggtcttgaaggaatttgtgccaatttgcttacataactattgcatatgtatcagagttcagtgactcatctctttaccatcatggggtttttgacatgcaaggctagaaaatttcatgagattggttggctaaattgaactggttttgtagaatgaatacataaaaattagtgcattccttatataacaacacaactttttcgttgctgggtaaaaaaaaaaaaaaaaaaattcactctaaggcagtgaaattttaaagactttcagttccaagttgatgatttaaggaaatcmtccat

SEQ ID NO: 88112 - DNA, 1590 bp, Homo sapiens
agcctcccgagtagctgggactacaggcgcccgccactacgcccggctaattttttgtatttttagtagagacggggtttcaccgttttagccgggatggtcttgatctcctgacctcgtgatccgcccgcctcggcctcccaaagtgctgggattacaggcgtgagccaccgcgcccggcctgcaagagttcagttctaaaataaataaataaagttaaataaacttttttaaaaagtgcttgctccggaggrctaggacaggagggagaaaaggatgggcagtggctgataattttacaaatctttctacactatttgatatttgaactgtgtgagggtgttatggtatatgttattcacaagtctagaagcagacaagagtccctgaagaaggaagagacagggcagcagggtgtccaaagtggcctgggaacagcatcaaagacaggcttttccagcccaagactttccctggggtcatttgtcctttccttccatttcattcaggtgctgcaaccttctacggtctggggacaggacattttgtttatgactcataggtgacaagatagttcaaaagaatctccattccttgcccccatgttttccacatcatgcctttatgtgtcattgactgtgcttactctacacagtctcagagttgtgtaaaccagtttggtgggaagtggcaattcccatcctgagagagacttcacattggagaggacatttgagctggatccaaaaagttcacagggtagtttgccaagcagggaaagagaatgccttaatcaggaatcactgggttgcaagaaatggagatgaattcaaactagccaaagagaaaagaaggcaggaaaagaagacagtaacttgaattcccaactttccagacccaggctacagccctgcagcaaccaacactgacaaagtgttctgaaggtgtggaacagcagcctagtctttgccttctccacactggacccacaagctcctgcttcctcttttggccacttcctatggttgattagacatggttctcctctggagggaaacagaaggtaggatcataggagcaggagtctgaatgatctcatgcttggaggtcgtgtggagatgcagtccgtatctatttttttgccaaatgaaagaaaatatcctttctgaatgaaccacagcagcggagaaagtgtggtgggtctgaggaagttaactatcaactcccaccacacacaggacctgaaaataccaaattccctccttcttttctcagtgtcccaccacccgtgactctctccctcctctccctcctccactctgctgatcactgtctctcccctgtatgctcatcccatgtgctcagttgacccagcattttcttcagtctgtcaacacttttttttttttttttgagacagagtcttgctctgtcacccaggttggagtgtgatggcttgagctcagctcactgcaacctctgccctctgggttcaagcaattctcttgcctcagcctccgagtagctgggattactagagcccaccaccatgcctggctaattatttgtatttttagtagagacggggtt

SEQ ID NO: 88113 - DNA, 1246 bp, Homo sapiens
catattgtaaatatataggataaaaataatactttttttttcattgtaccaagcagaagagtcctctccttcattcctccttgatccatggccccagcacaggcattgctgctgtgtggcgcctgcacggcccatccccgtttctacaaaatcagtgtgctttccagctttcattggtctttttctcattcacaatggtctcctcatgctgtattttaaagyggatttcaaatatttatttctttgttctgaagtggaattttattgggttaaaatcggcttattttaaaatattagaaaagctagcattgttgtagctttggagctgaggtttttctagctaggttgtttaggttatcaggttatatactccctgaactttggaaaagtttaatggagatggggatccatttcaagctttgttgtaaggattttcttctctgctttttgaggcattaagaaaggttcttaggaaatgtgtctaagataattttgagaaactgagtgaagctcgtgtctctccaggatctttgtgctttcctcacgtgccctttcttggtggtcttgacaggatgaagtggggcccacccatgagctggtccagagtctcatctctacccactccaccattgatgccaagatggcttcaagtcgagtgacgctgttttctgattccaagccacttgggtcagaggatatagataatcaagggtaagtctgctttttttctatttttaataaaaagatgtattacaaaagatcatatcacccataattcagccatcataacacatttcggtgggattcattctatgttgttttgtttttctttgtgtgtgcatgtgtctctgagggctcttcacttacctgacattacaagggagtcttttcttgaaataaattgcagatgcatttttcaacagaccccaaatattcctcaaataccatgccatcttccataggttgccttttgttttttaagagacctgaaccacttggctttcttttggtggccaaaacactagagcaaagtcagggagttttggctgtccagaagccacatgccttgtctctgaaagttttatttagattgtgttgtattatctcctctgggtaggtttccgtggatgtatggctcatgtgaattattttccagtctgggttggggatttgtatacctttatatgcagtggatgtttgcaaaacattggttttgttgtattgatttatgactcccagtaaaatt

SEQ ID NO: 88114 - DNA, 1246 bp, Homo sapiens
catattgtaaatatataggataaaaataatactttttttttcattgtaccaagcagaagagtcctctccttcattcctccttgatccatggccccagcacaggcattgctgctgtgtggcgcctgcacggcccatccccgtttctacaaaatcagtgtgctttccagctttcattggtctttttctcattcacaatggtctcctcatgctgtattttaaagtggatttcaaatatttatttctttgttctgaagtggaattttattgggttaaaatcggcttattttaaaatattagaaaagctagcattgttgtagctttggagctgaggtttttctagctaggttgtttaggttatcaggttatatactccctgaactttggaaaagtttaatggagatggggatccatttcaagctttgttgtaaggattttcttctctgctttttgaggcattaagaaaggttcttaggaaatgtstctaagataattttgagaaactgagtgaagctcgtgtctctccaggatctttgtgctttcctcacgtgccctttcttggtggtcttgacaggatgaagtggggcccacccatgagctggtccagagtctcatctctacccactccaccattgatgccaagatggcttcaagtcgagtgacgctgttttctgattccaagccacttgggtcagaggatatagataatcaagggtaagtctgctttttttctatttttaataaaaagatgtattacaaaagatcatatcacccataattcagccatcataacacatttcggtgggattcattctatgttgttttgtttttctttgtgtgtgcatgtgtctctgagggctcttcacttacctgacattacaagggagtcttttcttgaaataaattgcagatgcatttttcaacagaccccaaatattcctcaaataccatgccatcttccataggttgccttttgttttttaagagacctgaaccacttggctttcttttggtggccaaaacactagagcaaagtcagggagttttggctgtccagaagccacatgccttgtctctgaaagttttatttagattgtgttgtattatctcctctgggtaggtttccgtggatgtatggctcatgtgaattattttccagtctgggttggggatttgtatacctttatatgcagtggatgtttgcaaaacattggttttgttgtattgatttatgactcccagtaaaatt

SEQ ID NO: 88115 - DNA, 1039 bp, Homo sapiens
tttgggtgttcttttcccagaggagctctacggtgactttgaagacttggaaacaggggacgtgcacaagggaaaatcaggccccaatactcaggtatgactttgtcgtagctggctgttcttggtcattgtgttctgagagaggcccacattgagaaatgcaaatcttacttgtgatgtgtgaagattgcagactggatrgatagattccttcctaaagggtggggatgtggggaccaaagagaagctttcttgtttacttgttaagttttggatgacagttactaccgtttcttgccatagtcatttgccaagtccactgtgatttttcactcacggaagtcttagcttcttggacttacattcaaccattggcatcattctcctttttttaaatttaagtgtcatttaaaagaatgaagtccctgttctccctagtatttctttagaacagggtctgggagcatctgggtgagggacacgtctgttatttttattctagtttgtgttcccagccagcttaaggattagcagctaattgtaatgcagatgtaaccatttcctgtagcagtaccatgttattcagagacaaaggttgtgttgtgttttcttttgttttattgataatgataacagatttttgctaagattcttgtttaaatagaactttaaaaaagctaatgtttaaagaaaagaccttcataaacatacacaaaattttttcttctggaaatttaagaatgaagatatagagaaagaagttaaggaagaaattgaccccgacgaagaagaaagtgccaagaaaaagcatttggataagaagagaaaattgaaggagatgtttgatgcagaatatgatgaaggagaaagcacatattttgatgatcttaaaggagaaatgcagaaacaagcacaggtgagaaacctcagttcctctcagccccttgtcaagactatcatatagcgcaggaatccctgactttgtttgggtccctacgtcctatcctgcttctgtgtatcctgcttctgtgcctttcat

SEQ ID NO: 88116 - DNA, 3715 bp, Homo sapiens
cggagagctctacaagttctcctgcctctcagcattctaactgcccctaaatggctgctattccagttctactccattcccagtcaatgacaggaatcaagtccagagcacaatgtatgaaatattaagcagttgctggaaaagaaacaggaaaatctcaagagaaattttcatatcacattgacatttgttgaatccaaattactcaagataccaagaagcatttgccaggctcttattttcttatctctttcacttttaagggaaggacaaaataaatatctggagaataacaaaatcttgaacaacagcagcatgaggtttttataaagaataaatcatttccagtcatgcttaatgagttttctaatagagttgtgaaattagaagatgagaggggtacagggggatattacatatttgaattcttgcaaagcacttgatatggtgtctcctatttttacttacataattatccctgttggtttcagaaaacttaaaagtggtcctgaggctataacaatttaaaaagtcagctaagtcataattgatgggaaatagttgaaggacttgtagatgtttagactgaggaagataaagctcaggaacctatgacagctctcctcacacttgtgaaagttgtcaggtaaaagagggaagtgacttctgtactgttttagatgctaccatttgccactactgagtgaatttttcacaaacgcagattttggctgaatataaggaagaattttctaatggagcagtccaaagatgcaacggatcttgagaagtattgaagtttcccatgattgaaagagatcaatgtagagacaacaaaccatcaggcatggaatgggcacaattttggacctgataccctcatggatccttctaatactaagctcacaaatctgtgatgtcatttttgttctactgaaatctgtgtgtgggtctgcatacatggagcaaatccctagtgaaaccaactcctaaactatctcacatagaagtgaatctatcttaaaatttttttcaaggatgtatttttaaagtcgcagaggtttaattgtatgatcttataagctttccttctttattatcttacctcaatctcccactggaaggaagctttaagatgcatacatacgaatgaaatctgcaggaaacaggcaaaggggtactatatacttaaataataagaaataatattgtttctcttggcagatttctaatgatagtgatattgctgacttttccttttcctccttgttctatcaatggaaataaatgattggcaaccaatgaaaatgaagttatttttgaggtcagatgtttcaattggaaacgtttcggatcaatagggctgaggcagaaaatatctacagtcctccaatctttaaactgccaagggacatctggaattactcgatgtggccaaatatgaaacaaaaggatctagaagggcatccattaggggcaaactatatgtcctcccaaaatgtcatcaaactttgggctgagagctacacatctgtggatctctaaacaggttaaattgtatgtgtcatgtaagaggatgctcaagtataaacctgaagtcaattttatagataaggaagagaactactagagaacatagtacatcagttacataatgaataacctggcagaggatcaaaatctataaggctctctatcccattctacaataatctgttgacaatattgcttctccattcacaattttaaatacaaccaataacataatggctatattcgtctgtgtttccaaggaaacagatgactcaaccaagtaaagtgactaatttgcatggggcacagagcaattaaattaactgatcttaagaaaaatactggtatgaagtgaggtttttatctaactacagtagaatcaatgaacattatggttcttaagatagcacagccttattaaatcaacttatttctctccaggaagtttaaatttggaaaatttataaagcaaatatataaatccacaaattatatgtacaatgtacagtacacatataggcaactgatcaggatagatgcttttttttttttaaaagtgaatctaataagagctatattagcttctgagtaaacatgacagctaatgacagctaatgtgtgctgacataaactggtttgatggttttgaatatagtcaaacagttagggagttacctgtcaattagatcaaaatgatcatgtatattccattagcttatttctttgatggccaatcacaggagtgttggaatagagaagaaataattgccttttctccttgaacctaatgcaggggatattaaccatgagtctatcaaagggcttcatctacagggactggttgctggtggggcagtgggaggcagggaactctaaggaagggaaaaaaatgcgatcccttaaatcacatatgccattttgtgtgattttgttttctctagggagagggtccatagccttcagtagattctcaaaggagtctaacactaataaaaaaaaagttaagaagaactactctaaaggatctcaactcagaaaagccggctagcttgagaaaagctctcaagctaagtgagagagccttgatgtgtaaattcaaagtgtgtgcatgcctaagtgaagagctgagacaatgagagaaaatagtgtcatggaataagaatgaatagaggcattggatagtacttcaaactgtcaaaaactaatttttctttatactgtgaaaatcagtttgcaattagagtccaagttattctattttatacttcaaatggctttgtattgaaggtcataaggtactttggactaaaatgcaaatttgtaaactgttaaggatccttgaccaaaagagaatctcatcaataaatgacaattgctccactttaggtaaatttacgtttaaattacaaagaaaaggactaaatttagctggagtttaaaaaatattaatataattttttgttttgtttttgtagataattttactgtttttcctttgaggagttagctatataggggttagctatacaggctttatagggttaactatgtagactcagcaagaaaaggtctctgtctacctgacagtctggatgactggaaacattcagatgttgaatgaattgttcagcgctcccatctatatttggcattatatagatagagcatccctagggttttgaaaacaatgtggactgttgtataaatcatttccacatccaggcatacaascaaccatcttggccttcctgttgactttccagtaagtaggtgcccaaagagatatgctgctggaaatgacaagtccccatgaggtgtaacattctgaggtacatgaacacttgattagggtagggtgctatgaattagtacctctctagactctctaaaagtgctttgtctttattataaagtcttaactttacagtctgttttttcattagctaaaggatttaacagctttcttccctatgacagcctttgctactataattaagaaatgtattaaaactggagtgaattaatgtgaaaaatggatgggggcttgggactagaagatttccccagctaggtgttagggaataacactcagtattagaaaatggaggtatattccatagcaagcatgagaatctgaaaaattttgagaaatgccctttggactttcacatgcttgtgtgaa

SEQ ID NO: 88117 - DNA, 725 bp, Homo sapiens
ctgagagattgggccaagaggagcccatctggaagggaagcttggtgccccttcctgggaaagtcatgggttaaattgttgccccagagagttgctgtgaaaccctgagggattccctgtcagctgctttagccccaggataaaatacagattattcccaacccaggggctggtgaagtgggagcttctgatgtcgtctttatctaggattctgcttttacagtggcccagggaaggcagaacagaggttagtattgactgaaagccttactggggagactgggaggagccagcagcacaaaggcctgggccagggtcaacagctaaggcagaaactgctggctgggtgcagtggctcacgcctgtaatcccagcactttgggaggccaaggtgggcggatcacctgaggtccgataccagcctgaccaacatatagaaaccctgtctctactaaaaatacaaaattagctgggcgtggtggcgcgtggctgtaatcccagctactcaggaggctgaggcaggagactcgcttgaacctgcgaggcggaggttacagtgagccragatcgtgccattgcactctagtctgggcaacaagcgtgaaactccatcttaaaaaaaaaaaaaaaaaggccaggcgcagtgggtcacacctgtaatcccagcactttgggaggccgaggtgggtggatcatgaggtcaagagatcaagaccatcctggcc

SEQ ID NO: 88118 - DNA, 531 bp, Homo sapiens
ggatccaccacaattttaacacttgtatactatggcatctgcaaatgaaagcaggcagagattaaatctcgctgtgacactgaatcaaagacaatagtatttgtcagtttatttttctcattaaactataaaaatcatgcatatttatccaktgattattgaagtcttcagattacagtctggaagagccattgagaccatctttggtgatatattagctaatcatatatgtaatttgttcataaagtaacattttcggccaagcacagtggctcatgcctgtaatcccagcactttgggaggccgaggcaggcggatcacttgaggtcaggagtttgtgaccagcctggccaagatggtgaaaccccgtctttattaaaaatacaaaaattaaccggacgtggtggcgcatgcctgtaatcccagctgctcaagaggctgaggcaggagaatcgtttgaaccccggaggcagaggttgcagtgagctgagattatgccactgcactccagcctgggccacagagtgagac

SEQ ID NO: 88119 - DNA, 1138 bp, Homo sapiens
aggccccaactcaggcaggtggatgggtctgcaaacatcacaattacccagttcagaacgaggcctggcggctaagaaatgttcgtttggaaggcctctggctgtgtgatgtggaccaaggctctctgtagggcaggaacacttgcagccttggagggaggcatggagaatggcagaaggaagcaggatcacgctttcctggcatgcagggtgccatgctgagatgacccccagcatttctgtgccctggtgcccaagttctttatcatctccttctcttgagcatggggggcacctgtgagcatgacaggatgccattctgtgattagctatgatattagggaaacgtaaatggatcctgcgtgtataattaaggctcccaatcacttgattttgagataagtaaaaaaggagattgcctgggttgggcctgatttaatcagatgaaggcccttaaaagaaggaccggcccttcctgaagagagagattcttctgctgggcttgaagtcagctgtcatgttgtgagttgccccaagagggtcacgtggtaagggactgagcatgattcctggatgacagccagccaggaaacagggccctcagggtgatgcaaggaagtgaactctacaaacaacctgaatgagcttggaagtggagaaagctgcagatgaaaatgtgccctagctgacccctgcacagcagccttgggagaccctaaggagagagccctgccatgctgggcccagactcgtgattcccaaaaactgcgagataagaaatgtgtgttgctttaagtcactggggttgcagtaatattgttacagagcaatagctaatgaatacacccgggttccagaaaggcccctgtaggttcttgctgctgcctccccaaagtcagggggcttctacyctgtcttgtcctcctctgctcctctacttagggagggctcatgggacattgtggagtagcacagaagcgttgccccaaggtcatgcaggttccagggatggccaccccactgactagcatggtcatattccatattctgggcatattccttgtaacttcttagaacctcagtttccccatttgtaagtggaaatgttgagattacctactgcatttggcagagtgaa

SEQ ID NO: 88120 - DNA, 762 bp, Homo sapiens
ccacggccctgacatttcagattctgcagctttgcaaagcagccagagagcctttgctgcccttgggggagtgcagaaggccatgaaacatcttcacttttgcaatataatttttcttcaagaactcaagccagagttgcatgagtttccatccagctttgggagggaaaaacaaaaacgaattaattaagcttaccagacagccttcaaaaagtgtaatgtcagccctttattatgatataatatcagccaacacttggttcactttccccgggagatactggattggagctgctgattatggaagaagcacttggctgtcccagcccacacactcaagtgatttaaatctagtctcaggagagacttgacatcataaagggaaagtgtattcaggttttctaatctatgaaaacattacctcaatactgctaaactcaagccttaccaccatttatttctttccttctatcacaaaacttcacggaagaggaatcaatgcttcactacttcactacctaacatttccttaactctgagatccactgccatagaaaacgtgaatgatgctcttcttttaaaggtcacyaaggacctcacattcttcaatccaatatgtatttttcagttgccatggactttaccattagacaccacttaccaacctttttttccattctgaagctttgtgtttccctgccttttgtggacatagtgccggaagtttcctctctgcctcttttctgtgccttttccaggccg

SEQ ID NO: 88121 - DNA, 690 bp, Homo sapiens
tttcctcatttttatatttcctctgcaaactccctagtagggactttcattattacctacccaaactattgcaactgtcaactcagttgttccccaacccttgtgtatcctcctcttttccaggttactctatggaaaccttgagatgaaacttccaagaaccctgctctaatcttgttactcctctaattgaagacctgaataacatatgattgtccactgagctagataactccctcctcagcctggctcttgagaccccaacctatcttctgaccttgatctstgtctccttacatgccagtcagtctagactcttcaatttgccttctactttcttaactctgttgcttggctcatgtttcactcatccagaatgttctcttactccatccacttcctacatttcaatttcttagcaaactcacaaagctgcatggaaatattgtcattccaggaagtcctctttctaaaatggatgttattttccctttacttcaagcattttgtgtctgtcttatggcatttgtgttctattgcttcacagcagtgattctcaaaatttggagagtatcagaatcacctggatgaattctgaaaacacagattgctgtgccctactcccagagaccctgatttacaaggtctggcggggtggagcctgagaatctgcatttctcataggatccc

SEQ ID NO: 88122 - DNA, 690 bp, Homo sapiens
tttcctcatttttatatttcctctgcaaactccctagtagggactttcattattacctacccaaactattgcaactgtcaactcagttgttccccaacccttgtgtatcctcctcttttccaggttactctatggaaaccttgagatgaaacttccaagaaccctgctctaatcttgttactcctctaattgaagacctgaataacatatgattgtccactgagctagataactccctcctcagcctggctcttgagaccccaacctatcttctgaccttgatctctgtctccttacatgccagtcagtctagacycttcaatttgccttctactttcttaactctgttgcttggctcatgtttcactcatccagaatgttctcttactccatccacttcctacatttcaatttcttagcaaactcacaaagctgcatggaaatattgtcattccaggaagtcctctttctaaaatggatgttattttccctttacttcaagcattttgtgtctgtcttatggcatttgtgttctattgcttcacagcagtgattctcaaaatttggagagtatcagaatcacctggatgaattctgaaaacacagattgctgtgccctactcccagagaccctgatttacaaggtctggcggggtggagcctgagaatctgcatttctcataggatccc

SEQ ID NO: 88123 - DNA, 676 bp, Homo sapiens
tctctcggcagcctccatctgtcttggggaggaggggctcagcaagcaatggcggccgtgtacttacccgggccatgttacagatgcggaatattctgtggatgatgtcctcgtcgatgtctgcggagacgaactccacctggatgggcccatagcacccggaggtcttctcaggccartactgcatacagaactgagataaggaaagaggtcacagaaggagctcaaaggcagggggcgggtatcaaagtctcatttatcaacaagcttttcttttctttttttctttttcttttttttttttgagatggagcatcactcttgttgcccagcctggagtgcattggcacgattttggctcactgcaacctctgcctcccaggttcaagtgattctcctgcctcagcctcccaagtagctgggattataggcacctgccaccatgtctggctatttttagtaaagatggggtttcgccgtgttggccaggctagtcttgaactcctgacctcgggtgatccacctgtcccagcctcccagagtgctaggattataggtgtgagccactgtgcccagccgtcaccaagctttttttatggctggaaggacacattggccagaaaggtagagtattatgtaggaaattagactcagtttcccctttagggagcagcca

SEQ ID NO: 88124 - DNA, 676 bp, Homo sapiens
tctctcggcagcctccatctgtcttggggaggaggggctcagcaagcaatggcggccgtgtacttacccgggccatgttacagatgcggaatattctgtggatgatgtcctcgtcgatgtctgcggagacgaactccacctggatgggcccatagcacccggaggtcttctcaggccagtactgcatacagaactgagataaggaaagaggtcacagaaggagstcaaaggcagggggcgggtatcaaagtctcatttatcaacaagcttttcttttctttttttctttttcttttttttttttgagatggagcatcactcttgttgcccagcctggagtgcattggcacgattttggctcactgcaacctctgcctcccaggttcaagtgattctcctgcctcagcctcccaagtagctgggattataggcacctgccaccatgtctggctatttttagtaaagatggggtttcgccgtgttggccaggctagtcttgaactcctgacctcgggtgatccacctgtcccagcctcccagagtgctaggattataggtgtgagccactgtgcccagccgtcaccaagctttttttatggctggaaggacacattggccagaaaggtagagtattatgtaggaaattagactcagtttcccctttagggagcagcca

SEQ ID NO: 88125 - DNA, 676 bp, Homo sapiens
tctctcggcagcctccatctgtcttggggaggaggggctcagcaagcaatggcggccgtgtacttacccgggccatgttacagatgcggaatattctgtggatgatgtcctcgtcgatgtctgcggagacgaactccacctggatgggcccatagcacccggaggtcttctcaggccagtactgcatacagaactgagataaggaaagaggtcacagaaggagctcaaaggcagggggygggtatcaaagtctcatttatcaacaagcttttcttttctttttttctttttcttttttttttttgagatggagcatcactcttgttgcccagcctggagtgcattggcacgattttggctcactgcaacctctgcctcccaggttcaagtgattctcctgcctcagcctcccaagtagctgggattataggcacctgccaccatgtctggctatttttagtaaagatggggtttcgccgtgttggccaggctagtcttgaactcctgacctcgggtgatccacctgtcccagcctcccagagtgctaggattataggtgtgagccactgtgcccagccgtcaccaagctttttttatggctggaaggacacattggccagaaaggtagagtattatgtaggaaattagactcagtttcccctttagggagcagcca

SEQ ID NO: 88126 - DNA, 676 bp, Homo sapiens
tctctcggcagcctccatctgtcttggggaggaggggctcagcaagcaatggcggccgtgtacttacccgggccatgttacagatgcggaatattctgtggatgatgtcctcgtcgatgtctgcggagacgaactccacctggatgggcccatagcacccggaggtcttctcaggccagtactgcatacagaactgagataaggaaagaggtcacagaaggagctcaaaggcagggggcsggtatcaaagtctcatttatcaacaagcttttcttttctttttttctttttcttttttttttttgagatggagcatcactcttgttgcccagcctggagtgcattggcacgattttggctcactgcaacctctgcctcccaggttcaagtgattctcctgcctcagcctcccaagtagctgggattataggcacctgccaccatgtctggctatttttagtaaagatggggtttcgccgtgttggccaggctagtcttgaactcctgacctcgggtgatccacctgtcccagcctcccagagtgctaggattataggtgtgagccactgtgcccagccgtcaccaagctttttttatggctggaaggacacattggccagaaaggtagagtattatgtaggaaattagactcagtttcccctttagggagcagcca

SEQ ID NO: 88127 - DNA, 769 bp, Homo sapiens
tgtgtgtgaatgcacactctacttctcggcagcarcatcggcaagcctgttcctggcaaggaaagataatggaagggaacacctgaccttcctgctttctaggtgaccaacttgtcccagtttgactgacaattttccagttttaacattgaaagtacagctgttgggaaacctctcagtcatgggcacacaggaatggttggtcaccctaatgctttcacttatatctgtggttggagtaggggataaatttttcactttgcagccttctgcctgcctccacctaccaagggaggagaggctactaatctgactggtctgactttgagacactgatggggtcgtacctaattagtaggtggggtcatcgtaggcagagtgtggtctctaaaacttcctaattcagggtggtaggtaaacatctccaaaggagagactgtcctttggggaccagccaaataacccctggactgcttacagaaagatttctaagatttagatttatgcacaagaaagaagggcctaggcaagtcgttagcaaaaccttcctgactgcacagagaaatactgcttactttttctcccgggattttaggtaatagctagtacatgttcactggcattgcttaaatgtaccacttggcaaacatgggggtgttccctttctccatcaaccccttggtttcatgagttcgacttactgagaacccactctgtgccaaggactatggtaggcagtggcaatgcagacagaaatactgattccacc

SEQ ID NO: 88128 - DNA, 769 bp, Homo sapiens
tgtgtgtgaatgcacactctacttctcggcagcagcatcggcaagcctgttcctggcaaggaaagataatggaagggaacacctgaccttcctgctttctaggtgaccaacttgtcccagtttgactgacaattttccagttttaacattgaaagtmcagctgttgggaaacctctcagtcatgggcacacaggaatggttggtcaccctaatgctttcacttatatctgtggttggagtaggggataaatttttcactttgcagccttctgcctgcctccacctaccaagggaggagaggctactaatctgactggtctgactttgagacactgatggggtcgtacctaattagtaggtggggtcatcgtaggcagagtgtggtctctaaaacttcctaattcagggtggtaggtaaacatctccaaaggagagactgtcctttggggaccagccaaataacccctggactgcttacagaaagatttctaagatttagatttatgcacaagaaagaagggcctaggcaagtcgttagcaaaaccttcctgactgcacagagaaatactgcttactttttctcccgggattttaggtaatagctagtacatgttcactggcattgcttaaatgtaccacttggcaaacatgggggtgttccctttctccatcaaccccttggtttcatgagttcgacttactgagaacccactctgtgccaaggactatggtaggcagtggcaatgcagacagaaatactgattccacc

SEQ ID NO: 88129 - DNA, 526 bp, Homo sapiens
cactcagtatctgggtggcccaagaaagtgctgaarcctctctgagcctcagcttcctatcaataatgatagctaacatttactgactgtgtactctgtctaccacggctcacaaagtgttctgcgaatactttacatgtattaattctaatgacttatcaacacaactttatgaagtagatattatcatccccattttgcagacgaggaagcataggaaagctaagaaaattgcccaaggtcaactgttggtaagggatggggccaggatgcaaacccagggcacttgaataataactaggaacatgggctcctatgatggttgtaggtttcggtaatgcacaataagcacctggcacagtgtttggcactagcaggagcttatctaagagactgctttcctccccaaatccaatttagatttatggtctatccatcaagggaatctgtttccaatgggggatatattgtagaacaggctggaatttgcctctgaatccctgaatcctgggctggcctttatgtc

SEQ ID NO: 88130 - DNA, 1202 bp, Homo sapiens
actccctactaagcttaaaattttttttgtcacagagctcagcacaatgtgagactcagagcaaatacccaataaacaagctgttgacaaaccaactaggcaggcaacacagcatggtggttatgcgtaccatggactccggaactcagctgcctgggtttgaacgctggctctgtcccttctagggtgtgtggtctagggcaagctacttagtctcattgtgcctcagttttaaaattcacaataacaaagatatgaaatcaacctatgtgtccatctcaatggatgactgaataaagaaattttttatatatatatatatatatagtattccatatatatatggatatatatgaagagatatatatatatagatgtagtattccatggtgtgtgtatatacatatatatgtgtaccatggaatactactaagccataaaaaataatgaaatcatgacttttgcagcaacrtggatacatggatgggcctggaggccattatcttaagcaaaaaactcccagaaacagaaagtcaaataccgcatgttttcacttacagtgggagctaaataatgtgtacatatggatgtaaagtgtggaatcgtagacattggtgactcagaaggttggcagggtaggagggtggtgagagggatgagaaataatttaataggtgcaatgtatactattcaggtgatggttacactaaaagcctatacttcaccactgtgcaatacatacagtaacaaaactgcacttgtgctctctaaatctataaaattaaaaaattaatggggataatggtatttacctcatagtgttgttgaccagattaaatgagttgatatataacagttactatgtgccaggcactattctaagatttaacatatatgtctttgctattgttattttattgtttatttggcaaatatttatttactgagtgcctatcaagactaaaagtgtatgcaggcctctcaggggacactgggatgatgagaccttctttgtgttaatgtaataactgagcccttccctgtgacacaaggggtaggaagacctatcccttcctccaagtcaagtggacagggctgctcaggctaaaagaaagaattaaacccaagggttgtcttgagtagctttgggaatagaaaatagtcccctagatcctggaaagatgcagtttctcaagtctgcc

SEQ ID NO: 88131 - DNA, 2874 bp, Homo sapiens
cttgagctcaggagttcaagaccaacctgggcaacatagtgagaccctgactctaccaaaggggaaaaaaaaataaagaaaaaaataataattaaaaaaaaactcttgttttgcttattctgttaaaaaaaaaaaaaaaaagggaggcagtggtcaaataatttggtaaacctcacatcctgtactgcatcttaaagattcacatgcctgttaatatataaaggatttttgggtgtacttcaatcccttctctttctcttattctctctctgcctgattccaatttaggacccttcatctgatacctgcaggtgagggatgggtcacagcagctgtaacaccatataaatgacagccccacagttctcttgctcacttatttcttaggttcatctattggagatgggaccctatgggaactgaatagctcagcttcaaaatgcatttcaaaactttttcccccctttttctcttttctctccagtctcaagatgtaaccttgaagcctactgcagaaacccttttttcctccttagtattaggacgtagccttgaaatgtactttatttgaaacaccgcgtctctccctttcttaccatacactcccttacaccatgcacatttatctaattgtacttggatctaattatgtgcttacttagaagttccagggtctaatcttgacataaaccagacatggaggcccagctgcaaaatgccagagattacctcaaggctgttagtctacaacccggccatcgttcagatgacatcagatcaccctgacagtcaccagggaaacaagagacacagaccttgaactcagcaccactcctgcatacttcccattccaagttcccctttttaagtccctctccctagcctaaagttgggaatggtcttttaaaggcatgagcctggctattccccaacttctagcatttgaataaagttgctttcctttcaccacacctcgcttcttgtgcttttgacctctgagcggcgagcagcaggacttgagctggttacactgcatctgaagcaccctgggctgccctcatcactactgttgtaactcatgttctgcaggaactgagagcctgagcaaatgaacctgaaattcagttttttcttcctttttkgtcctccttacccccttctattatatgaatgatatagtcatagaatttgcctataaaatccagaaaacttagttccagcctatcaaagtcacccagttatgggattaagatgataatgatggagcaactttgtaaagggctttgaagatcagactgagactcagatattcctggagagtggaggctggtaaccccctttaccttgtagctatttgcattcactgatttgcaacagaattaaggagccctctgaataaaatacttgaacactgtccacgattaggattaagacatatacagacatatctgattgactaggggccccaagtggaagctagatgtttggagaatgaaatggtcagtatgaggaatctggtgcagggaatagaatagtgagtggacacaaagctgaacatgcagctgggagaggcggctcacgcctgtaatcccaacactttgggaggccaaggtaggaggatcacttgaggtcaggagtttgagagcagcctggctaacgtggtgaaaccccatctctactaaaaatacaaaaattaggccgggcgtggtggctcatgcctgtaatcccagcactttgggaggccgaggcgggcagatcacgaggtcaggagatcgagaccatcctggctaacatggtgaaaccccatctctactaaaaattcaaaaaattagctgggtgtggtggcgggcacctgtagtcccagctgctggggaggctgaggcaggagaatggcgtgaacccgggaggcggagcttgcagtgagccgagatcgcgccactgcgctccagcctgggcgacagagtgagtctccatctcagaaaaaaaaaaaaaattagacaagtggctcacccctgtaatcccagcactttgggaggtcaaggtgggaggatcccttgagcccaggagttcaacaagctgggtgcctgtaatcccagctactcaggaggctgagacacgagaatcgtttgagcctgggaggcagagattgcagtgagccgaggtcgtgccactgcactccagactgggcaacagagtgagactcaaaaacataaataaataaaaattaaattaaataaataaataaaataaataatataaaaaaatctcaaaaaaaaataaatagaaattttaaaaaaatgaacatgtttgtcctggagtcagaatgactttattcaaaacccacctctactgcttactatatgcgtgaccctgggcctatttcttggtctttctaaaccttctttctctcatgtggaaaatcgatgcagttatagttcctacttcatagggatagttgaggatagctgatataagtcctcagcaaatgttcatgttatcagcaacaagactttaccatcagagagtggttagtgagccgctctggatagaatggatgtctacacaggaacgtccactccatttgtgtactctggggagaaaatgcctgtgtgtgtgaggtgaaggttctgagacctgttgatgctcaagattcctttctgtggacgtctctcctgacatcactacttccaccccagtttcagagaatatacgctactgccgtcaccaaattctagacaaataacgtaggtaatactcaggtacgttcattttgcaagagcaatgacatggatttcaactattaagatgcaaaggctccagtattcaggcattggcaaccttggtggtgatggcaagggtaatgcctctctgggt

SEQ ID NO: 88132 - DNA, 2874 bp, Homo sapiens
cttgagctcaggagttcaagaccaacctgggcaacatagtgagaccctgactctaccaaaggggaaaaaaaaataaagaaaaaaataataattaaaaaaaaactcttgttttgcttattctgttaaaaaaaaaaaaaaaaagggaggcagtggtcaaataatttggtaaacctcacatcctgtactgcatcttaaagattcacatgcctgttaatatataaaggatttttgggtgtacttcaatcccttctctttctcttattctctctctgcctgattccaatttaggacccttcatctgatacctgcaggtgagggatgggtcacagcagctgtaacaccatataaatgacagccccacagttctcttgctcacttatttcttaggttcatctattggagatgggaccctatgggaactgaatagctcagcttcaaaatgcatttcaaaactttttcccccctttttctcttttctctccagtctcaagatgtaaccttgaagcctactgcagaaacccttttttcctccttagtattaggacgtagccttgaaatgtactttatttgaaacaccgcgtctctccctttcttaccatacactcccttacaccatgcacatttatctaattgtacttggatctaattatgtgcttacttagaagttccagggtctaatcttgacataaaccagacatggaggcccagctgcaaaatgccagagattacctcaaggctgttagtctacaacccggccatcgttcagatgacatcagatcaccctgacagtcaccagggaaacaagagacacagaccttgaactcagcaccactcctgcatacttcccattccaagttcccctttttaagtccctctccctagcctaaagttgggaatggtcttttaaaggcatgagcctggctattccccaacttctagcatttgaataaagttgctttcctttcaccacacctcgcttcttgtgcttttgacctctgagcggcgagcagcaggacttgagctggttacactgcatctgaagcaccctgggctgccctcatcactactgttgtaactcatgttctgcaggaactgagagcctgagcaaatgaacctgaaattcagttttttcttcctttttggtcctccttacccccttctattatatgaatgatatagtcatagaatttgcctataaaatccagaaaacttagttccagcctatcaaagtcacccagttatgggattaagatgataatgatggagcaactttgtaaagggctttgaagatcagactgagactcagatattcctggagagtggaggctggtaaccccctttaccttgtagctatttgcattcactgatttgcaacagaattaaggagccctctgaataaaatacttgaacactgtccacgattaggattaagacatatacagacatatctgattgactaggggccccaagtggaagctagatgtttggagaatgaaatggtcagtatgaggaatctggtgcagggaatagaatagtgagtggacacaaagctgaacatgcagctgggagaggcggctcacgcctgtaatcccaacactttgggaggccaaggtaggaggatcacttgaggtcaggagtttgagagcagcctggctaacgtggtgaaaccccatctctactaaaaatacaaaaattaggccgggcgtggtggctcatgcctgtaatcccagcactttgggaggccgaggcgggcagatcacgaggtcaggagatcgagaccatcctggctaacatggtgaaaccccatctctactaaaaattcaaaaaattagctgggtgtggtggcgggcacctgtagtcccagctgctggggaggctgaggcaggagaatggcgtgaacccgggaggcggagcttgcagtgagccgagatcgcgccactgcgctccagcctgggcgacagagtgagtctccatctcagaaaaaaaaaaaaaattagacaagtggctcacccctgtaatcccagcactttgggaggtcaaggtgggaggatcccttgagcccaggagttcaacaagctgggtgcctgtaatcccagctactcaggaggctgagacacgagaatcgtttgagcctgggaggcagagattgcagtgagccgaggtcgtgccactgcactccagactgggcaacagagtgagactcaaaaacataaataaataaaaattaaattaaataaataaataaaataaataatataaaaaaatctcaaaaaaaaataaatagaaattttaaaaaaatgaacatgtttgtcctggagtcagaatgactttattcaaaacccacctctactgcttactatatgcgtgaccctgggcctatttcttggtctttctaaaccttctttctctcatgtggaaaatcgatgcagttatagttcctacttcatagggatagttgaggatagctgatataagtcctcagcaaatgttcatgttatcagcaacaagactttaccatcagagagtggttagtgagccgctctggatagaatggatgtctacacaggaacgtccactccatttgtgtactctggggagaaaatgcctgtgtgtgtgaggtgaaggttctgagacctgttgatgctcaagattcctttctgtggacgtctctcctgacaycactacttccaccccagtttcagagaatatacgctactgccgtcaccaaattctagacaaataacgtaggtaatactcaggtacgttcattttgcaagagcaatgacatggatttcaactattaagatgcaaaggctccagtattcaggcattggcaaccttggtggtgatggcaagggtaatgcctctctgggt

SEQ ID NO: 88133 - DNA, 807 bp, Homo sapiens
taacctttgatttgaggattctttgagccagatttaatttattgtgattattttttgatatttatttatttttatcttcattttttgagagacgaagtctcactctgtcagctaggctggagtgcagtggcgtagtctcagctcactgcagcctctacctcctgagttcaagtgattctcctgcttcaccttcccaagtagctgggactacaggtgtgcatcaccacacgagctaatttttgtattttttagtagagttggggtttcactatatgttggccaagctggtcttgaactcctgacctcaggtgatccgcccaccttggcttccaaagtgctgggattacaggctgtgcctggcctattttttgatatttaaatgtcagtattattttatgtaaatttgtcatctgttttcactttcaaattatcagtgcttagtttactatgtggcacatagtaggtgctcaataaaatacatatattggacaatataagtgtttttatttaatatatgggatgaaatttatgggaaaaatatataggatgaaaaatggattttgtctttctcaaaatactgagtagttcatattttaagttcaaaataggattgattatttctttacagaattgtgcttatttttgctaacagaaagcttgttttttttttttgttyttccccagggagccacagtagcagaaattaaaaaacaatatcgtttgctgtcacttaaatatcatccagataaaggaggtgatgaggttatgttcatgaggatagcaaaagcttatgctgcgtaagtatca

SEQ ID NO: 88134 - DNA, 807 bp, Homo sapiens
taacctttgatttgaggattctttgagccagatttaatttattgtgattattttttgatatttatttatttttatcttcattttttgagagacgaagtctcactctgtcagctaggctggagtgcagtggcgtagtctcagctcactgcagcctctacctcctgagttcaagtgattctcctgcttcaccttcccaagtagctgggactacaggtgtgcatcaccacacgagctaatttttgtattttttagtagagttggggtttcactatatgttggccaagctggtcttgaactcctgacctcaggtgatccgcccaccttggcttccaaagtgctgggattacaggctgtgcctggcctattttttgatatttaaatgtcagtattattttatgtaaatttgtcatctgttttcactttcaaattatcagtgcttagtttactatgtggcacatagtaggtgctcaataaaatacatatattggacaatataagtgtttttatttaatatatgggatgaaatttatgggaaaaatatataggatgaaaaatggattttgtctttctcaaaatactgagtagttcatattttaagttcaaaataggattgattatttctttacagaattgtgcttatttttgctaacagaaagcttgttttttttttttgtttytccccagggagccacagtagcagaaattaaaaaacaatatcgtttgctgtcacttaaatatcatccagataaaggaggtgatgaggttatgttcatgaggatagcaaaagcttatgctgcgtaagtatca

SEQ ID NO: 88135 - DNA, 807 bp, Homo sapiens
taacctttgatttgaggattctttgagccagatttaatttattgtgattattttttgatatttatttatttttatcttcattttttgagagacgaagtctcactctgtcagctaggctggagtgcagtggcgtagtctcagctcactgcagcctctacctcctgagttcaagtgattctcctgcttcaccttcccaagtagctgggactacaggtgtgcatcaccacacgagctaatttttgtattttttagtagagttggggtttcactatatgttggccaagctggtcttgaactcctgacctcaggtgatccgcccaccttggcttccaaagtgctgggattacaggctgtgcctggcctattttttgatatttaaatgtcagtattattttatgtaaatttgtcatctgttttcactttcaaattatcagtgcttagtttactatgtggcacatagtaggtgctcaataaaatacatatattggacaatataagtgtttttatttaatatatgggatgaaatttatgggaaaaatatataggatgaaaaatggattttgtctttctcaaaatactgagtagttcatattttaagttcaaaataggattgattatttctttacagaattgtgcttatttttgctaacagaaagcttgttttttttttttgttttyccccagggagccacagtagcagaaattaaaaaacaatatcgtttgctgtcacttaaatatcatccagataaaggaggtgatgaggttatgttcatgaggatagcaaaagcttatgctgcgtaagtatca

SEQ ID NO: 88136 - DNA, 754 bp, Homo sapiens
agattgttcaaccaagtccatgatgatctgtgaggaagcatggagaacagaaataacactggaaaggcggaggagggggcacaggtgcactttggtgcggaaaagtttgggaagcattgtttgaaagaagttgatatctttaaatattcagggctagttgctagcaacttactatggctagttgttgaaagctgcagtgagtctgttcattagctagtgggcagcccacatttagaagaatgtaggtgtgagatgggagagactttggcataagaatggttcagatggaatgggaacaccagggggtgattcgatcattaagctttcctctgagaatgtgatttrgtatctttgaaactaggccagagatttatttggatctttggttttccatttgtgaagaggtcatttagtctcatttccagatgaagaaatttgggttcagagaggatgggagtgactttccctaagccactgagctgtttggtgaccaaggcaggctggatgctcacctgctttctcgctgctctcttcttactgcagctcacctgtggacttgtggactgggccatcaggagtctctaggaggcagcattgattttgggataggcctacctgggttcaaatcccagctctgacacttaatctgtaacagtgttacattattctgaggattagtgaaaagggaacacttagcatataggaagggctaagtgtatgttcttgcctctttctagttaggcttgaaatcttt

SEQ ID NO: 88137 - DNA, 713 bp, Homo sapiens
tctatatttaaatactttatactgtctagggtatttaggcaaaggattcaactacagggcttttagaaatcctttccagctctaaaattataggatttaattgtttttgaaaaagatgccttctaccttcctcctcctccagctgcacacgtagtttactggttactgtggtaactgcactctaataatcctgtcaggaaatctgatgcaactatctgtctaatcttattttccagacacaaaacaagcacacggcttccttctaagaatccttctaaagcgctccagcctaagcattgtttcttcttgttctgatgttttttaagattgcacttagagaagaatgcacctcattgggtgtttcctcaatgtggaatgttttatagtatccagtgaccagtgcatcactctaaagcggtgtgtgttttcatgcactctcctggagttgatgaaattttgggtagtttgaattataattttaaaaaatgcagaatagggattagagaggatttaaatttattttgcacatagaggattgaacgtaattmctcagagagttagctaaaatcagtatttttgcttttttttttttttttggacaagccagttttacaaaatgtccctctgctgatccatgaacaagggataagtctgtaccttttcatcctccctcccttcttcagccattcaccttccttagtaggggtcaagtg

SEQ ID NO: 88138 - DNA, 1761 bp, Homo sapiens
agaggttgaaggtcaataactggaaaggctggcctttaatttgttagattaggatacaatttagtttctaacatgtataatttaagaatttttacagtttggcaatatagttctttcactgaattcaataagctttattttcattgtctactatgtgtcaaattggtactactttctagtgatataacgatgatcaagatattgctgatggctttgagtgactcacacttaatggaggagccagatatctaaactaatgatagtgcagtatattaagtgctacatccaagatagggagaaaactctgtagaggcccagaggagggaataattaattctgcttggaagagttcaggaaggcatctcaaaggagatggcattttagcctagccaaatgtgttcaggttgagaaggaatggaatataaaaaacattcaacaaaggtattccgcaaaggtatacagccttgggatgtcctgattttgtctaatagtgagtaatctggtttgggtagagcattgggacaccagggtgctattaagttaatttggagccagattttaaaaggtactaaattccctacttattacttaagctttatcatctacatagggagaaaaaataaggataagtaataatatcttaacattttaaaaagataaccccagtaatgaatgtgtagaagaaattggagtaaaggggaggaaaaaaatgcaaaacaaaacaaaaatcggagtgactactgtaatttcatagctcttctatacaccctaatacattgttatagctgttcatttgtccatctgaaagcaaagactgtgctttaatcttttctttctttttaattttatttatttatttatttatttatttgtttattttagcgacagggtcttattccgtcacccaggccgccatacctggctagtttaatttttttttttttcacttttgtaaacatgaggtcttattctgttgtctgggctcaaaggatcctcccgcctcggcctcccaaagcgctgggattacagktgtgagccaccacacctggcatttaatcatttttgcatttacattgcttgtatatgatcatgcgtgttataactgtagaataagtgaattaatgaatgaaagatctaagcaataattattgagggctctaaacagggcagtagaaatttaggcagaattttgcaggtagagggcaggcttagggagagaagattcaaaaatggcttgaacatttcttatttctatgctatatattttgttatgatgcctttcactggagtagggaacagacacaacacttctcaggtaactgagaatgagttcatgttggagcatatttatttggaggtcctgtggaagagataagagttggatttatgggtctgcaacccagagggaaaaacctgggctgaagatacagatgcaagaaacataagcacatagattaatgattgaagtcagggtagtggattgcacagggcaaaaaatataaagtaaaaaggctagagcatggggactttggggtcactaatatataaggagtaggtagaagtagagaatacaatatggaaaacagactagtcagaagcataggattgtttatcagagaagtctggtctttgaagtcattgagaagaaagtttcaagaaaaaaactattagtaatttaataaattcagtagcttcctatatcgatgtatatacatataggtaaatatgtaacatacttatattaatacagagttgaatgat

SEQ ID NO: 88139 - DNA, 2009 bp, Homo sapiens
tttgtacagctttgcaatgtgtttgtattttaagtgtgattacaagagtcaaaagtttaaaaaaaacaaaaagtttataattactataagctaagtttaagttattattgaagaaagaacatttctgtgaatttggtgtagcctatgtgtacagcctatgtctatagtggtgtacagtaatgtcttaggccttcacattcattcaccacttactcactgactcacccagagtactgtccagttttgtaagctaccttcatgctaagtgctgtatgcagctaaaccattttttatcttttatatcataattttactgtaccatttctatgtttaaatatgtttagatatacaaataccattttgttacaattgcctacaatattcagtacagtaacatgctgtacaggtttgtagcctaggagcaataggctactaacctgtgaagtaggctataccatgtaggtttgtgtaagtgaaccgtataatgttcgcataatgacaaaatcatctaaagaagaacttctcagaatgtatccacatcattaaacaagatgtaagtgtactactttgaggtaaagaccatacttcagttttggtatttaagttaccacttcaaacaagggaaattcttccctaaaacctctaagacaactttatttgtccttcctaaaatatgcattacctgctgagttattgaggcccatttgaaaatacacaacattagctatgcacgctgttaaacataatgttctggtgacatttagcagtgttcagtaattggcttaatgaacaggtgtgcaagtatattagttatgcagatgttaatttgcagtaacatgtgcttcctgatttggggtgttcttgtataaactacaaccagtaagatttgttccttaattaggaaatcactacaaagtatgtctgtgttatccctaccattacaaccattagtcttgtttaatgtgctctgaacttcagaaacattcttagtaatgccattcctattgcttcaggtactatgcaggtgtcagaatgaaatctacctttctgtgggatgccttggttagtgtgcagctgtaggcaacatggagaggggaagcttcgcagctgtaatatgtagcatgtgcaaggagacagaaatggaatctcttcctgcctattgcatcagctttccctcctaaggtttggtgaacacatgtgttattcctcacaaaacagactcgataacaattgaacacaaaatagtggttccttacaaacagattcatctttaccagcatttttaattattcttttccatattgtttgtaattcctgtctacacttggcccttgggatttccaaggttaacagtttgtaaactataaaaatggataggaatgtttgtgagatttattcatatgatttttatttttatgtcaaaaaataggaaattacaaaggctaatttagcaaacgcccatctaccagccacccaaaatgaacacatgttaacatttagtcatatttactccagrtctttgcttttaaggaaataaaacattaaagttaaaatggaagtttccaaggttctacctattccagcattagattcctcctcttaggcaaccactgtcattaactggtgaatatctagtctatgtttttataattttgctacatatatactcatccatcaacaatacgcaagattagtctccgttttatttttaatttagatgaaaattatactgcatgtaccattttccatagctttaatttttccactcagcattgtatttggcatcaatccttgttgaaatatatagctgtaatacaatcactgtaaatgctgtgtgatattacattgtattaatatgccacaatttatccatttcataacccctgggcacatgggctgtttataacttttctactgttataaacactgttgaagtgaacatttttgtctccttgaccacttgacctacaagcagaaatgttgggctatgtttatgacaagcatacctt

SEQ ID NO: 88140 - DNA, 3302 bp, Homo sapiens
gctcattatatgtataatgattttgtcctacaaggtcacctagtaatttttttttcattttaattaaaaagcaagactattgaggggcctatactagggcaaagtctctttggatatgttgccataactcaaagcacacataacggcctgcttcagtatgtcagggaaagaggccacctgagaaaggcagagtgaatgcatatttcagaatactcctaatatgcagaggaaaaaagaggaaaaaaggaaaaaaatcagtctcacccaacaaaggctaaaagctagactttctctagcttgtaagacaggaccaagggtttcgcacttaattttgcttgacaatatttttatgagagaagtccaaatcaaaacaatggaatgaaatggttaagagaaagaaaatagcattgtagttcatcttgattattgtcgactatacgaaacaaggttcttctctgaagaaggcattttatgagtggcatatttatttaaaagtgcacttgatacagaaagctgactatatcaagcattgtttgaagggcagagcaccaattttaaatctaatttaaaaccaccggatttggttcgatgttattaaaggttacaaaatgtgatttataaatagttcatgattcatgtccttaggttagtttttgatttgtttatttttgctactgttttacagcgctagcatatgactgctaaaattctgtttttatatgttataaaataaatttgcataataagaaagcttatcacaggagaaaaccaatggttagactactaagtaagtgcacttgatgttttttattaccattgttttaatcagaagtaaacctcactggaatgcaattcacttgtaatttactgagttttttggatgactacaagtgaggaagcttactaacttgctgtgtgaccttgcaaaatttgcataagttacttaacctctataggcttcagttttctcttctgtgaagtacaaaacatccttaacacatgatctctaatgacccttgcagctataatactctatgaatttctttagtggtaagtataaaatattaactcagaacatctctagatagtggtagataaagcacggttcattcagccatgttcaaaaaaatctacaattatttattaccacctcacacatttatgcttcctccttcaattaaaatgttatatattaagaaagagaaaatgtttatacaataaactacaagataaaggaacacatatgttaaggttactgttaaggagctataagatggtagaatgcagaaatatgactctgccgaggatgatattcagtaaagattatgtgaacagaaaaatacaaagttatagttagacagaacgaatgagttctggtcttctactaacaatgtactctgtatttcaagatagctagaagagaagattttgaatgttgtcacccccccccccgccaaaaatgatgaatatttaaaatgatggatacaataattaccctgacttgctcattacacagtgtatatatgcattgaaacatcacactgtatcccataaatatatactattattatgtgttaattataaataaaaaattattgatgaagaaaaagatatgtagagaaagttgcacacagtgctctctccaagaacagaagctttgtttaatataaggaatgtaaaggcaatgacacgggtgagatgctgcctataaataaaatgctgctacaggtatggagagggtgaggctaaaggcaggcatttccttcgggaagcaattccagtaatccaggaaaaaggtaagaagtgtttgaactagggtgctggtagtaggaaagtaaagaataaggctgaagtcatggatatttggaaaaaagaagggatgagttttggtggaacaataaaaaaagatgatagacggacaaagaggaataaagaaagtcttgtgagatttggaaactgagagtaaccttaaagaacaaagaaacacatgtattaagggtactgataaggagctataagaaggtagaatgaagaaatattctgccaaggatcatgcagtgaagacagagacatcaagaaaaggatctgaaattggcacagcaaaaaaaaaaaaaaagaaaaaaagaaaaaaaattgtttgtacgcatgatgcaggaaagttctgtccaggttttcagtcagatagaaatgtccartaggcaattagaaatgagaaacacttcactctggaatccatgacacagaagtgatcattgaaggcttgaaaacaaatgataatcataaaggatagggtagcaggagaaaatatcagaggcatgaggccataaatagatgatatatcttggagtagtgtgatacttaactattaccaggtatgcatgtatacaaatggccccgacttactatggttaaacttgtgattttttttttcctttgctgtagtgtgaatgtgacacaaattcagtagaagctgtacttggaagttagaagtttgatcttttcccaggcgagccatatgtggtgtgatgctcccttgctacgctgggccgcacagagagccacggctcccagtcagctatgagatcaggagggtaaacaatctgtatgctgcagtgtattgtgttgccagcctcttttgaatactgtgtcttgtgtttttgcatcccatcatgtccataaaatgcccatctgtgtacagttttcaacactttattacaaaataggctttgtgttagatgattttgcccaactataagataatgtaagtgttctgagcacatttaaggtaggctaggctaagctatgatgcttggtaggtcaggtattttaactgcgtttttgacttacgatattttcaacatatgatggggttatcagaatgtaactccactgtaagctgaggagcatctacagtctccttcatgactggtgatagataaatcacatgtttgtgttttagacaacctagattacccagttagatagataacaaatggaattataaaccccaaaatctcagacaggtctcagctaatttagaaagcttattttgccaaaagttgaggacgcatctccatgacacagtcccaggaagtcctgacgacatgttcccaaggtggtcgggggacagcttggttttatacatattagggagacatgagacatcaatcaatatatgtaagaagtacattggttgcatccagaaagttggggacacctggaagcagagagggggcttccaggtcacaggtaggtgagagacaaacggtttcattctttggagtttctgataagcctttcca

SEQ ID NO: 88141 - DNA, 1083 bp, Homo sapiens
aaaaaagagagagagagagagctgtgtggtgtctctatttataaggacactaatcctatcgaattagggccccacccttatgacctcatttaagcttaaatatttttcttaaaggctcgatttccaaatatagtcacactgggagttagggcttgaacaaatgaattttgcggggacacaatattcagtccataacagatgcagagggcagacacattctgctggaaggtgacattctatctgcctgtaggtatgtagtgaaagccaakgagatgaccactcagttgttcttagctgattaataatttctactgccctacaaataagaacatagaaaaatcaaattatagagttttaagatttaatatgtttttgattatggaacaagaatcttcacctaagataagatgtagattgatgaaataatcattatctgatcaaatcacaagaagttttaaagtgtaacggtgtttaagaagtgcttttttttctgagataggattttcagataaaaagatacataagtcaatataaatatggccttttaaggataccatagatccttaaagagagatggatttttattaaatacttcctatctcatattactccttggctagtaaaccttccattgttttccaaccttgacagatcgaagttcaaactgtctaaccccagcctatcttcctaaaattctctcctagtttttcttttcatgttttttgaaatggaacttcactctcgttgcccaggctggagtgcaatgttgtgatctctgctcactgcaatctctgcctcctggtttcaagtgattttcctgcctcagcctctcaagtagctgggatcacagctgtgtgccgccatgcccggctgattttttgtgttgttagttgagatagggtttcaccatgttggccaggctggtctcaaactcctggcctcaggtgatctgccctgctttggcctcccaaagtgctgggattacaggcatatgccaccacgcccggcctctcctagtttttctatgctagtaatagtagtaataaaagtcattacttactgaacactcactgtgtgctaagc

SEQ ID NO: 88142 - DNA, 1183 bp, Homo sapiens
tctagatctaccagcttgagctgagcagtcaaatgaatgtagccctatcagtgatcctgactatgactggtagaagaaccatttggataaggaaaccacaaaccatgagaaataacaaattattcttgtaaaccactaaattttggagttatttgtcacacagcagtagatagtgaagacatcatcctacaaagtctcttctctgaccagtcaaaacattgtgaacatatattactgctatttctgtattagctttttacttccactaagccatatgcttttttttttttttttttttttttttgatgaagtttcactgtcacccaggctgcagtgcagtggcacgatctcagctcactgcaacctctgcctccctggttcaaccgattctcctgccctagcctcccaagtagctggaactacaggcgggtgccacaactcctggctaattttttgtgtttttagtagaggcggggtttcaccatgttagccaggatggtctcaatctcctgacctcgtgatccacccgcctcaccatcccaaagtgctgggattacaggcgtcagccaccgtgcccggccaagccatatgctttttgaggcctctttatacatctagtacatctcagatgattcctcttgaacatctcagagcaaatatcaaaatgccttcatatagtagacactgaaaaaccatgtactttaaaataacgcagttataggttgcagtgagcagagatcgcaccactgcacttcagcctggacgacagagggagactccatctcaaaaaataaaaattaaaaaaaaaaaaaaaggccaggcgcagtggctgacgcctgaaatcccagcactttgggaggttgaggcgggcggatcacgaggccaggagatcgagaccatcctggctaacatggtgaaatccagtctctactaaaaatacaaaaaattggccaggcatggtggcgggcgcctgtaatcccagctactcgggaggctgaggcagcagaatggcgtgaacccgggaggcggagtttgcagtgagccgagatggcgccactgcactccagcctgggcaatagagygagactccctctcaaaaataaaataataaataaataaataaaaataatgtggattattcaacattttataatcaaagggtcacacaacacaagttttcact

SEQ ID NO: 88143 - DNA, 973 bp, Homo sapiens
tcccatatctaccaaccaagtatcatactgaccagttccacctgcctaaacttctcctgtgcatcccttttgaggtcaatcaccgcasttctacaaagctcctagcaactgtcttctgttttcagttcctatacttttaacttttccaatttgtcatatgattagcttcataaaatactgacttaaaagtgtgcctgtactattttttatcacaactagcaaggaatgagaatttctgttattctatatcctctcttacattgagtattttagattttcaggttttagccattctcataagcatgtattggaaccttctttggtttttgtttgcctcttcttaatgacatatgacattggtcatctttttatatgctttttttccgtttgctatattccctttcgtaaagtgtctattcaaatcatttgcatcgttttatagatgaataaacttcatttttagagcattgctaattcaaaaatacaaagagaaatcttcatcagaattagagttcctacataatctacaccacccgccctgccctgattgctgcacacacacacaaagtctatctttttatttacattttgtattattatgacatgtttgctacaactgatggaactgtattgatacctcacacttaagtccatggtttacatcaggactcactcttaacgatggggatattatacatttcgataagggtgtaatggcaagtattcatcattgtattgtcccacagaattgtttcaccatcttagagctcctgtgtgttccacctaatgaatcaattccccttgccccaaccccagccctcagcccctggaaaccagtaatatttttagtgtattcatcattgcatgttccagaatgtggtatgctaggaagcctttttagattttcttctttcatttagcaatatgctttcatgattcctccaggtctatcccactaacaatgactgaaagt

SEQ ID NO: 88144 - DNA, 957 bp, Homo sapiens
tttattgactatttctttattgaatgtaataaaagtataaaagtataaaactataaggctggaagaaatcatagggatcacctagttaagcttgcctctctccactcgccattttacagatgagaaacccaagacccaaagaggtgaactgacttgctcaaggtcattcaacttggatactttttcctgcccatgccagatgatttctttactctttttctgtacgtgtttttgtaaattaagtgacattttaacagatagactgaacttaaaactctcccccacccccatgggttatgttatctgaaatcccagtactctgcccagcactctttccattatgctacttcggaacataaacatgactctcttctatgactttaacatttactatttttgccataaatttgatccctgagttggcaatattatagcatccccatcatattctatgtgttttgccttttctcccaaaatagactgcatgtttcttagaataaggtttccttctacttctcctgtatgctgtatgacattgagcaaagtactgggtacagagcaagatctctaaaatcttttgctaatagaagagrgtttgactggatcatgggacccagataatcaccttctgtgttccctttggctctcattctgatgtagccactggctatctattcaattgacagagaagtaggttttccccttgaagatcttagtggaatgcctcccagagccatgacaaaggacaatgatactctgaagaaggtgcttaaaatgatgccccttcatgatgtgaaaaaagcaccagtgacacactacagatctactgtctaatgccacgtgtgggagagcacttaatgacccgagggaagggaggaaaaggtgcaagtccaaggttagaagaaaaagaggagtcaatttgaggtcttgtgctcagaacccctctaaacaacatgc

SEQ ID NO: 88145 - DNA, 608 bp, Homo sapiens
ggtttcccatgcaaggcagggcttacatagtttgaacaactcccacccccaccttgctaggacaccaagggagagagcatccaaactttcttatcagctgtccagatgtggtacagaaaggaagaagggttggcttgaaagctgtcggcagtcaactatcataaaaggaaacagacaattacaggtagtttctgcatkatgggccaataacttgtagaaaagacgtgaaagtggatttgtagcaagtgtgaaggacagagggccagtagctgaagtaaagcatgattttgaatatccacatcctgtttgatatttatacaatcctctttctcagctgcctgaactgcagaaagaaggaacagtaataaagactaaggaaaatttcttaattaaagagctgcttcttaaaaaaaatctctattagccgtttaaggcaaagggaacatccctgctttgtagcacaagtaacaaaagatctcaagagatgatgacaggccttttctgagataggagaggctgcagggagaggggtcttttttgtgccttcttcttggaacgctctttctcccagatctttctgtggtttcctcttctcatccttcaggact

SEQ ID NO: 88146 - DNA, 599 bp, Homo sapiens
tcaaaaacaaagaggagccgtccatgtgcagcgtgttcacccttggatgatttatattggcccagtgctccagttcatggcaattacaaagaaggagggagtgtcagaaggaatcttccatgaataccaacagtaccagccaacatctgtcccttggggtgggcaatctgctccagcctgttcagaattctacttagaattctcaaatgggacagtgaacacagaggcactctgtaggttagaaaacagtgcatactggyagaatgttgttttcatcaggcattcccttcgctcctccattggcgctcatgaagtgagttaagtccctcggcccctgccccagggtatgtgcccacattgccatagaacctgcctggtagggagagggctcacagaccttctcccacatgagaagggattaggatgggggtgggcaggggccacttctgctgatgagaacacagcagttccaatctccctggaactggcccccaagccccctctccccagttgcatttctgcattgatttcctgcccagagatacttcacccgcagttgccacgtctttggctaaggagttgctttaaaagagaataca

SEQ ID NO: 88147 - DNA, 599 bp, Homo sapiens
tcaaaaacaaagaggagccgtccatgtgcagcgtgttcacccttggatgatttatattggcccagtgctccagttcatggcaattacaaagaaggagggagtgtcagaaggaatcttccatgaataccaacagtaccagccaacatctgtcccttggggtgggcaatctgctccagcctgttcagaattctacttagaattctcaaatgggacagtgaacacagaggcactctgtaggttagaaaacagtgcatactggtagaatgttgttttcatcaggcattcccttcgctcctccattggcgctcatgaagtragttaagtccctcggcccctgccccagggtatgtgcccacattgccatagaacctgcctggtagggagagggctcacagaccttctcccacatgagaagggattaggatgggggtgggcaggggccacttctgctgatgagaacacagcagttccaatctccctggaactggcccccaagccccctctccccagttgcatttctgcattgatttcctgcccagagatacttcacccgcagttgccacgtctttggctaaggagttgctttaaaagagaataca

SEQ ID NO: 88148 - DNA, 599 bp, Homo sapiens
tcaaaaacaaagaggagccgtccatgtgcagcgtgttcacccttggatgatttatattggcccagtgctccagttcatggcaattacaaagaaggagggagtgtcagaaggaatcttccatgaataccaacagtaccagccaacatctgtcccttggggtgggcaatctgctccagcctgttcagaattctacttagaattctcaaatgggacagtgaacacagaggcactctgtaggttagaaaacagtgcatactggtagaatgttgttttcatcaggcattcccttcgctcctccattggcgctcatgaagtgagtyaagtccctcggcccctgccccagggtatgtgcccacattgccatagaacctgcctggtagggagagggctcacagaccttctcccacatgagaagggattaggatgggggtgggcaggggccacttctgctgatgagaacacagcagttccaatctccctggaactggcccccaagccccctctccccagttgcatttctgcattgatttcctgcccagagatacttcacccgcagttgccacgtctttggctaaggagttgctttaaaagagaataca

SEQ ID NO: 88149 - DNA, 599 bp, Homo sapiens
tcaaaaacaaagaggagccgtccatgtgcagcgtgttcacccttggatgatttatattggcccagtgctccagttcatggcaattacaaagaaggagggagtgtcagaaggaatcttccatgaataccaacagtaccagccaacatctgtcccttggggtgggcaatctgctccagcctgttcagaattctacttagaattctcaaatgggacagtgaacacagaggcactctgtaggttagaaaacagtgcatactggtagaatgttgttttcatcaggcattcccttcgctcctccattggcgctcatgaagtgagttmagtccctcggcccctgccccagggtatgtgcccacattgccatagaacctgcctggtagggagagggctcacagaccttctcccacatgagaagggattaggatgggggtgggcaggggccacttctgctgatgagaacacagcagttccaatctccctggaactggcccccaagccccctctccccagttgcatttctgcattgatttcctgcccagagatacttcacccgcagttgccacgtctttggctaaggagttgctttaaaagagaataca

SEQ ID NO: 88150 - DNA, 599 bp, Homo sapiens
tcaaaaacaaagaggagccgtccatgtgcagcgtgttcacccttggatgatttatattggcccagtgctccagttcatggcaattacaaagaaggagggagtgtcagaaggaatcttccatgaataccaacagtaccagccaacatctgtcccttggggtgggcaatctgctccagcctgttcagaattctacttagaattctcaaatgggacagtgaacacagaggcactctgtaggttagaaaacagtgcatactggtagaatgttgttttcatcaggcattcccttcgctcctccattggcgctcatgaagtgagttaagtccctcggcccctgccccagggtatgtgcccacattgccatagaacctgcctggtagggagagggctcacagaccttctcccacatgagaagggattaggatgggggtgggcaggggccmcttctgctgatgagaacacagcagttccaatctccctggaactggcccccaagccccctctccccagttgcatttctgcattgatttcctgcccagagatacttcacccgcagttgccacgtctttggctaaggagttgctttaaaagagaataca

SEQ ID NO: 88151 - DNA, 559 bp, Homo sapiens
gggccaacagtgctctcaaatgggtttcatgaaagcatctgtgactcatccctgttcaagaatgttttcattacgattcagcagaagcgatgtgccaggtcagcaaatacaactgcaaaaccggggcctgccagcctggccaacacagcaagaccccgtctctactaaaaagtaaaattaaaattagctgagtatggtggtgcgtggctgcagtctcagttactcaggaggctaaggtgggagggtcacttgagtccaggaggccggggctgcagggagccgtgatcgcaccactgcactccagcctgacgccgtctcaaaaacaaaacaaaaaaaacccagggcctgaatgcaaagtgaacacttgctcctgttaatcgtagcacttgcattacaggcctgstggctcctagcatccgtccgcagcacaaggccatgttgtgtagtggcacatccccagtccagccgcggggagctgcctgcaaggggaggtggtgagcaaacagctgcgcagcagcagggaagcgtcatctccatctcacttcatggccctccccag

SEQ ID NO: 88152 - DNA, 847 bp, Homo sapiens
tgcacctgggcggcaggtggagctgcctgccagtcccacaccgcgcacccgcactcctcagcccttgggtggtygatgggaccggggcgccgtgtagcagggggcggcgctcgtcggggaggcttgggcggcacaggagcccacggagcggggggaggctcaggcatggcgggctgcaggtccctagccctgccacgcggggaggaagctaaggcccggcgagaaattgagcacagcagctactggcccaggtgctaagcccctcactacccggggcttgcgggcggacctgcagcacttgcggggcccgctgagcccacgcccacccggaactcgcgctggcccgcaagcgccgcgcgcagcccgggttcccgcttacgcctctccctccacaccaccccgcaagctgagggagcgggctccggccttggccagcccagaaaggggctcccacagtgcaacggcaggctgaagggcacctcaagcgtggacagagtgggcaccgaggccgaggaggcgctgagagcgagtgagggctgtgagggctgccagcatgctgtcacctctcactaccgcttagaagcaagtcactgggctactccagaggaggggattgcacgggacgtgaacactaggagggggtccctggggccatgttggaggctgcctagtgcaaaacggcagataacaatagcacacagaggaggggctggtgagtgaacattaaagcattctcatgtccttgacctggtctttttcagggaggagagtaaagacaatgtttatttatgcaagacgaaaaagttctagaaatctgtggcccaacaatgtgaatatactgaagact

SEQ ID NO: 88153 - DNA, 847 bp, Homo sapiens
tgcacctgggcggcaggtggagctgcctgccagtcccacaccgcgcacccgcactcctcagcccttgggtggtcgatgggaccggggcgycgtgtagcagggggcggcgctcgtcggggaggcttgggcggcacaggagcccacggagcggggggaggctcaggcatggcgggctgcaggtccctagccctgccacgcggggaggaagctaaggcccggcgagaaattgagcacagcagctactggcccaggtgctaagcccctcactacccggggcttgcgggcggacctgcagcacttgcggggcccgctgagcccacgcccacccggaactcgcgctggcccgcaagcgccgcgcgcagcccgggttcccgcttacgcctctccctccacaccaccccgcaagctgagggagcgggctccggccttggccagcccagaaaggggctcccacagtgcaacggcaggctgaagggcacctcaagcgtggacagagtgggcaccgaggccgaggaggcgctgagagcgagtgagggctgtgagggctgccagcatgctgtcacctctcactaccgcttagaagcaagtcactgggctactccagaggaggggattgcacgggacgtgaacactaggagggggtccctggggccatgttggaggctgcctagtgcaaaacggcagataacaatagcacacagaggaggggctggtgagtgaacattaaagcattctcatgtccttgacctggtctttttcagggaggagagtaaagacaatgtttatttatgcaagacgaaaaagttctagaaatctgtggcccaacaatgtgaatatactgaagact

SEQ ID NO: 88154 - DNA, 847 bp, Homo sapiens
tgcacctgggcggcaggtggagctgcctgccagtcccacaccgcgcacccgcactcctcagcccttgggtggtcgatgggaccggggcgccgtgtagcagggggcggcgctcgtcggggaggcttgggcggcacaggagcccacggagcggggggaggctcaggcatggcgggctgcaggtccctagccctgccacgcggggaggaagctaaggcccggcgagaaattgagcacagyagctactggcccaggtgctaagcccctcactacccggggcttgcgggcggacctgcagcacttgcggggcccgctgagcccacgcccacccggaactcgcgctggcccgcaagcgccgcgcgcagcccgggttcccgcttacgcctctccctccacaccaccccgcaagctgagggagcgggctccggccttggccagcccagaaaggggctcccacagtgcaacggcaggctgaagggcacctcaagcgtggacagagtgggcaccgaggccgaggaggcgctgagagcgagtgagggctgtgagggctgccagcatgctgtcacctctcactaccgcttagaagcaagtcactgggctactccagaggaggggattgcacgggacgtgaacactaggagggggtccctggggccatgttggaggctgcctagtgcaaaacggcagataacaatagcacacagaggaggggctggtgagtgaacattaaagcattctcatgtccttgacctggtctttttcagggaggagagtaaagacaatgtttatttatgcaagacgaaaaagttctagaaatctgtggcccaacaatgtgaatatactgaagact

SEQ ID NO: 88155 - DNA, 1368 bp, Homo sapiens
ttaggttgtttccacttttttgcaattacaaactgttgtgaatatccgttatttatgtctcctgtgtcagaaaatgtttaccggcccagtcctttttttctttctccagttttcagcagcttaagcctgggcaaaagtatttagactaattgctctagttgtatcagttttgtccagtaatgtttccatgcacactaacagtttttaaatgttctgaagacacatgaacagatggcaaaaaaaggctgaacaatatccaaacggttacagcaatggtgttacagagaagggcatagcgttgagccaggccttctttaaactttgctgtgaagcagaagaaactcacacgtggtgtttaacttgtgtgcaggtctgcgggggaaggacggctgtgattgttcaacgggtgaactcttctcctttattcatccgaaatccratttcctgtcttatttttcatggcagcttgctatctttcaatataattctttttatatctttagcaaaagtattttttattcccctaatcaggaagggaatgctagggtgtgttgattctggaggcagagaaatgagtcctttccttggttaggaatgtattttgctggcagagagaccaagccaaccgcagctctgcttttcccctccagcatccacctgtaagagcttgtaatcttttattgttcatggccccgggatcctattcccggatggtctatgtgaaatgaagagaaagtacaagcaagttcagatttcccatagaaacacctccctccttcctgtccaggagagctctattgcagagttggagcatccagcagacccaccctggcttcatctcattgacataagagatgcagaaagaaatggcgaattggctttgggaatgaagaatttgacttccctggttccagttcaagacatacgggtgggaactcccactgggtatccactctgctttcttgggaaagcttcacggtatctttaggaaggaagcctgggattccacaccctggagatactggatctcttattctctatgcacttccttacacactttctcttccttcaagggcctctcagttgaggcactactccaccttaaatccaggtggccacattcagaagcactgtcacgctggcctctcagcaacatgctaacacagaaaaggaggctgtttatgagtcagctctgccaacaggattgcttcctaggaaaagtgcaaattgatttttttcctcctgttggtctgctgggggattggaggcagccacggacaattcattagcacatgtaggaaggccagggagaaaaataagctaagttgctctcatactagaaagcatttaggaagcaaacccataaac

SEQ ID NO: 88156 - DNA, 1102 bp, Homo sapiens
cacccagtcttcaaccaaagcaatgtggctttgacctgttttctgtcttggacttgaataatactttatttgaaagaagtgttaaattgtttattaaaaaaaaagacaagtttgaaaaccactgtttccaagtcgcttattttgccaataaagaatctggggtcaaagggtaaatgccttgctgattgtatctgtctcaggaccagggctatgagatttaaagtcaaccagatctggattttcaaacctagctctaccatgttttagcggagacactctggacatgttcactatcctttcatcatcacaggcaagggtctgtccagtgccctaagtcctagggctctccagttgctaaccacactgaagggatgaaatgtatgagtgggccctccactggtgtgatctgtaatcagaatgggaaagactctctttgctccaccatgtccgtgggatgagatggaaaagtgcaccattcctggtggtgatgcttctatttaaaatactgctaaactgagtttccttccttgctcttctctctccctttctttgacaaacctatgcatgactcgagtatacagctatctcccctagtggagcacaggctttttggaggataagggtcactctttccatgtttatttcttcccacgcctacacctcacacctcattccaactccacagcacaataaccatcctatyttcacagcagcagagattatgtaaatggttataaattaaataatatgttttcttctccatgaccctagtgtagcattttggagaagacatggcttcaggaatgatttcccagaaattttgaaggtccttaaaactaaagaagaaagtcctgtgatatctgcaaaggctcatttgcagaaactggcccagcccaagtgtacagaaacaaagaaatgctacagccagtcaaaaccatttggctcactggttcttatttcaaatcagcagaataaacaaacttcagtccaagtaggaactggttctgctgtcctcttcttttaagccaaggcacaatgtttgaatgtttcagaagtttctttctaatgggtttccttttattgtctgtgccagatggccaat

SEQ ID NO: 88157 - DNA, 553 bp, Homo sapiens
ttaacaaatttattcaactaggaagggacaaattaagaatagatcccagatattcactaattgatgaaagaaataagaaagggtgaatgaattgataaacagagattattctctattttatgaatatctagtaagcctctcatctgggctcatttgcaaaacatactctaccacaatgccagagagatatctagaaaaatccattggaccccaaaacatgtgctctatctttttactaatgccagagatttcaccatcagaatccattgccctctcttgaagttttgctctcctaagttaccaatgcactttggaagacaaataattttggttactcactgtcatgtattctttagtgtggatgaatgaggttaggatgggtggagttgggatgggaaggatcatgagagctgtggtcttctaagttgggtggtgatatgtcatgttgaattgtaactcccacaattcccacgtgtcatgggaggaacgtggtggraggtgattgaattatggggatgggtctttcctgcactgttcttgtgatagtgaatga

SEQ ID NO: 88158 - DNA, 1269 bp, Homo sapiens
tgtatggctttttcacatgtcagaggcaggatataaagaacacataaaagtgctcaaggtctcttgaagtctaaactcagaaccatgcaccatcacttccaccacattctattggtgaaaataagccaaaaggccagcccagataaagaataaaaggagcctccaatgtcacaaggaaaaagatgtagacacagggttgttactaaggtaatcaatccagcaatgccttgttatttcttccacatagagagtgcatgccaactccatgtaatggccttcttactaaatacatcctccatggacacctttgatgtcagatgtcatgtctcatttacgatgaatctgcacactcaccctaatgtcataacttaataaatattgcatttacagtgaataaatccatttgcttatctagctattagtgctacattagaggaaaataaacaattggctaggtacaaaggctcatgcctgtaatcctaacactttgggaggcagaggtggttggattgcttgagctcaagagttcaagaccagcttgggaagcatggtgagacccaatatcatttttcctattttaaatataatttttttccctttcctaaaatagaaaaaattagctgggcatggtggcatgcacctctagtcccagctacttgggaagctgaagttaagaaaatcacttgagcccagaaattcaatgctgcagtgagccatgattgtaccattgcactctaacctgggagacttagagcaataccctgtctcaaaaacaaacaaacaacaacaacaaaaacaaacaaacacaaagcaagaccagaaaaagaaacaactgatatctcaattatctcaataataaatgtcattaagtcaatgctacaatgctatttaggtactttctgagtcagcaacactataatagtaaggctagactacacaggagccacactctttgcctttgacttagggtaccaactccaaaacatgaaagagctagtaactgatgaaaccaaatattattttctgagacattggtgaagaaagtggggcttaccttagatcctggggttaccaagcagmctctttttgcccataagagaaaattcaggagcaattcttgcccctgaacattcatgtattgttaaattgcttctttgaacactctggatattgtatctgtttgtttgttttatgtttctctctgattctggatcttttattctttttaatattgtatttaatttttttagaggcacggtctctaaaaaa

SEQ ID NO: 88159 - DNA, 621 bp, Homo sapiens
gctgatcccttttcctggaagtccccagttgaggagagcggtagctgatgagggcaggtacccaggatcatgattggttttggtttgatttcttccctgccatacccacaagttcaaaggaaccatttttattttaattgtaacacagtgaagtctgtgacacatgtgggattatttttcctttttaaagttttaaaacatttgattgacaaaattatatgtattcaaggtatacagtgtgattatgtgtgaaatgattaccacagtcaaattaaattaacacatacactatcatacatagttactctttttgtgtatgtggtgagaacacttaaaatttgctcccttatcaaatttccagtatgccatacagtattaactatagttaccatgctgtgcattagatccccagaacttattcrtcttataactgcaagtgtgtatgctttgatcaacatctccttatttcccctacaccccagcctgtgggaacctcagttctattctctgtttctatgagttcattttttttagattccacatataagtgagatcatacattttttgtctttctgtgtctggcttatttcagttagtgagatgtgtttttgtctccatata

SEQ ID NO: 88160 - DNA, 1448 bp, Homo sapiens
agcaatgctacattaaaagaagtggcaagtgaagacactctgatatgtagttaaaatgtgtatatcatgccacagaagctttgtgtgtgagggcccaaaaatgaatgaataaatgcatccattaattaaaatacacatggtattcagaaacaatgacaaatctatagttaagtcctttacaacagatgtcttagtcaacaggtttaagaaaactagacattttacagtcagaaaagcatattaacatgactgtaaggagttygactgatttgggaaaataaaaatccatgagctcctctgcctctgtggtggcacaaaatgtctatatgaacaatgaactgaagtgcaagaacctgtggtggaaagagcaatccaggaaagccccaggatgttttccgtttgatttccaaacagcaagtatggctgccatcacctcactcctgggagagaagtagaacacccttgttcttgttcttttttttttttttcagagctactttaagctatccctttatttcaatgtattgcagcacttggccatgcaccttttttttttaatttaatacaactgaagcaacacactaaagttgaaataccttcattttattccatatcatttcaataattacatattttagaagtaggatagaatggtatttctgtctttaggtcttaggccagcatccttagcaaactaacacaggaacagaaaatcaaataccacatgtcctcacttataagtggaggctaaatgatgagaacacatggacacatagaaaggagcaacacatacaggggtcttctggagggtggagagtgggaggagagagatcgggaaaaataaccaatgggtactagccttaatacctgggtgatgaaataactggcacaaccaccacccacaacacaaatttatctatgtaacaaacttgcatttgtacccctgaacttaaaataaaagtttaaaaaaagaagtagggtacatgggtgtgtaggtggatcaggttggtgcttggagaaaagtattccaagagcaaggctttaggctgtatgtgccacgtagtaaccccacctactaaaaaagtgaaaaccatgaaggatattcatcttttcaatagtaatacttatattaaatacttatattaaatacttatattaaatacagatatttaatacttatattaaacatatctcttaaaaagcaggcacaaataaatttcagaacatagcaagaacgtaaaagataaatttgctcgttgattttagagaattcatttttccacactccaaagcaaaaagtaaaaaattaggaagaaatattaggaaaaatttaagtgacattcattgatgttgctctgaaatagaaagttaatggcaaaatgttttttaaggaaaaactgcacattgtgccaagatcctgagttttataagaagcaggtttaaatgca

SEQ ID NO: 88161 - DNA, 672 bp, Homo sapiens
atccctcttaggtgtgtgtcatactgtagagaaggccattcccagcctcttcagctactgcaatgactcagagaaggccacatggtccacatggtggctarcccagggatgtggagggatgaaaacgagtggacagacttgagatatattagagcagataaaatggataggactaggtgctggattcaatattgagatgctcattctaaaccgcccctacatcaaatccttcgaaggcaggggctatgccacatgactatgatacccaggtcccagaacaactcctgacacatggtagactcaatacacatttcccgaaagggtggaaatgattagcagtctctcaagtaatcctttgaccactaagcgtatttaatttcttctagcatgtgtcagtaatcaacctccttggtacatcatagggagaaatattgccgagttccaaagagtatactctggggcaagttaatacaagaataaggtctcacttaccctataacatgaagagtaacagtaaactcgtaagaacaggacctggtgaagcaaggagtaggcacaggaagatggctcatcaaataggggcgccgggtgtagtgtgaacacctgaggcaggaagaacccagtagcctctgggggttgggtgggattagttgggggactaggatttgatgg

SEQ ID NO: 88162 - DNA, 643 bp, Homo sapiens
caattacttgtttagtgcccagctacctgccaggccatatacctgagagcaggaactgtttctgtcttgttcacaatgatatctctagtgcctgaaccagttcctggcacgtactgattaataaatgatattttattatttgtgttattttgttctattttattaataaatatacacatatttgtaatattaataacttattaaatgaatgcataaatgactgtcggttggtacctgactccagcagaaaatatcatttcttaaaatacaaaccaggcttctggcccttaacaytgagggcttctcccaacactgtctcatcaataaataaattttcatgtaaaatctgggtgaagtttatgagtaagacaataatattgatagttacaataatactaactacatttcttctttctttttttgagacaggatctcactctgttgcctagactggagtgtactggcctgatctcagctcactgcagcctcgaactcctaggctcaagcaatcctcccgcctcagcctcccaagtagctgggactacaggcacacaccaccatacctggctaattttgttcattttttgtagatataggggtctcactatgttgctgaggctggtcctgaactcctggacttaag

SEQ ID NO: 88163 - DNA, 643 bp, Homo sapiens
caattacttgtttagtgcccagctacctgccaggccatatacctgagagcaggaactgtttctgtcttgttcacaatgatatctctagtgcctgaaccagttcctggcacgtactgattaataaatgatattttattatttgtgttattttgttctattttattaataaatatacacatatttgtaatattaataacttattaaatgaatgcataaatgactgtcggttggtacctgactccagcagaaaatatcatttcttaaaatacaaaccaggcttctggcccttaacattgagggcttctcccaacactgtctcatcaataaataaattttcatgtaaaatctgggtgaagtttatgagtaagacaataatattgatagttacaataatactaactacatttcttytttctttttttgagacaggatctcactctgttgcctagactggagtgtactggcctgatctcagctcactgcagcctcgaactcctaggctcaagcaatcctcccgcctcagcctcccaagtagctgggactacaggcacacaccaccatacctggctaattttgttcattttttgtagatataggggtctcactatgttgctgaggctggtcctgaactcctggacttaag

SEQ ID NO: 88164 - DNA, 643 bp, Homo sapiens
caattacttgtttagtgcccagctacctgccaggccatatacctgagagcaggaactgtttctgtcttgttcacaatgatatctctagtgcctgaaccagttcctggcacgtactgattaataaatgatattttattatttgtgttattttgttctattttattaataaatatacacatatttgtaatattaataacttattaaatgaatgcataaatgactgtcggttggtacctgactccagcagaaaatatcatttcttaaaatacaaaccaggcttctggcccttaacattgagggcttctcccaacactgtctcatcaataaataaattttcatgtaaaatctgggtgaagtttatgagtaagacaataatattgatagttacaataatactaactacatttcttctttctttttttgagacaggatctcactctgttgcctagactggagtgtactggcctgatctcagctcactgcagcctcraactcctaggctcaagcaatcctcccgcctcagcctcccaagtagctgggactacaggcacacaccaccatacctggctaattttgttcattttttgtagatataggggtctcactatgttgctgaggctggtcctgaactcctggacttaag

SEQ ID NO: 88165 - DNA, 538 bp, Homo sapiens
tcaagcagtcctcccacatcagcctcccaaagtgctggggttacaagcatgagccaccacacccagcctcttttcttttaacaactttttatgggatttgacctcagtgttyttgtcagaattttatttttatgtgaagttagttttctgaacttttggaagaaggcccagttaggaatatagcttcttttccttcacagtgtaccttttgcttccttgtgtatcgtgttcaaagataaggtagcttgcttcctggctggctccatccccttcccctgtttttatcagggcctcctcatctttcatcacacggctcccaggggctggactctccatgcccttcattccttattgcagcatcccatgtactcacctactattgacattgcagcatcccatgtactcacctactattgatagggcaaggccctcccacttacagctgctgttctcagaggaacagctgtggactatttggggttctctgttattgggtataccacacggcccgttgctgccccctgcttcctctcacaca

SEQ ID NO: 88166 - DNA, 551 bp, Homo sapiens
ctgggctggggtgggcaggcatctgcaactgggcaggaagccatctgctggaagacactgccccagggaccctgggactcagagcccagagcgtggcaggactggtgctaagctgtgggcacagctccctaaactctctgtctggggggctgggagggacttgaaggggcctcagctgggggcattggaggattcgcttccactcccaggggaagccaggctctccctccactggcgtttgtatcayggatctcaccttcttcaagttctttgtttaatgcctgttcttgctgttcgactctaagtgcacagggactcagtcagtgtctaattgccctagatcaaggcaagcagggcccaggctttgaccctggatctggctatggttacttctggcccacaccccgtcccacagggtaaggggccaagagtaggtgcccacccagagcccagaccaccccggcttgtagagcacactctggatgctggaatggcctgctccaaaggcctgagcctgctccggggcctgtgtggctcccttcctgtgaccc

SEQ ID NO: 88167 - DNA, 631 bp, Homo sapiens
cctcctgaatagttggggctacaggtgtggctaattttttaatttttttgtagagacrggggtctcactatgttgtccaagctggtctcaaactcctgtgctcaagtgattctcctgtctcagtccctgagagtcagcctttttaacaacattgacaatttaaagtgcttgcttaggccatgtactttacattaacaagagctctgctaacccttagtttttgtgttccatttacatgcatttaatccacgcagcaaaatcctaggaagacagtattatagaccctattttgcagtgagtagactgagacctagagaggctgagccacttgttcaagggcatacaactacctggtgggggaacaggactggaaaccgcagttctcttctcaagatcctggcagcctttccccctcggacagttgtctccatcctccccgtcctagtccgcctggcccagagtgtccctgcctctctggagcactgagtcttacttcagtttggtttgacagtgctcagtgctgagagaggatcatgacaattctcacgttcatatgagtttaagtgtttttctttggcagttgttttattttttggagaatttcacaaaaagcccttgagacagaaaggga

SEQ ID NO: 88168 - DNA, 631 bp, Homo sapiens
cctcctgaatagttggggctacaggtgtggctaattttttaatttttttgtagagacaggkgtctcactatgttgtccaagctggtctcaaactcctgtgctcaagtgattctcctgtctcagtccctgagagtcagcctttttaacaacattgacaatttaaagtgcttgcttaggccatgtactttacattaacaagagctctgctaacccttagtttttgtgttccatttacatgcatttaatccacgcagcaaaatcctaggaagacagtattatagaccctattttgcagtgagtagactgagacctagagaggctgagccacttgttcaagggcatacaactacctggtgggggaacaggactggaaaccgcagttctcttctcaagatcctggcagcctttccccctcggacagttgtctccatcctccccgtcctagtccgcctggcccagagtgtccctgcctctctggagcactgagtcttacttcagtttggtttgacagtgctcagtgctgagagaggatcatgacaattctcacgttcatatgagtttaagtgtttttctttggcagttgttttattttttggagaatttcacaaaaagcccttgagacagaaaggga

SEQ ID NO: 88169 - DNA, 631 bp, Homo sapiens
cctcctgaatagttggggctacaggtgtggctaattttttaatttttttgtagagacaggggtctcactatgttgtccaagctggtctcaaactcctgtgctcaagtgattctcctgtctcagtccctgagagtcagcctttttaacaacattgacaatttaaagtgcttgcttaggccatgtactttacattaacaagagctctgctaacccttagtttttgtgttccatttacatgcatttaatccacgcagcaaaatcctaggaagacagtattatagaccctattttgcagtgagtagactgagacctagagaggcygagccacttgttcaagggcatacaactacctggtgggggaacaggactggaaaccgcagttctcttctcaagatcctggcagcctttccccctcggacagttgtctccatcctccccgtcctagtccgcctggcccagagtgtccctgcctctctggagcactgagtcttacttcagtttggtttgacagtgctcagtgctgagagaggatcatgacaattctcacgttcatatgagtttaagtgtttttctttggcagttgttttattttttggagaatttcacaaaaagcccttgagacagaaaggga

SEQ ID NO: 88170 - DNA, 700 bp, Homo sapiens
tcccctccccacctctctaccttggcaagaccaggtgcccaggtctcagctctcaatgcactggtcctcggcccttgcagcaattctcacyatatttgccttctctgttgataggtcggctctgcaaggtaggaggtgtgttcttgcctttgctatgtgttggtggcatctacacagtgcctggcaaaaagcaggtgcttgagaggaaggaccgagtggtggacagccaggctggcatctgggcacaagcagggtccacggggagtttgggtcccacgtggttgaggtctcagctccacagcaggtgcattgactggaagcaggatagtgggtggggccattaagggaggcaggaaagacaggggagtttctgcaagaagatttgcctgacttattttgaatcttctaaaagcctttgtcttgagttcacactaaagattataaaataagtgccgtcagggaatggaattcagggacaaatgacttctctggggaattctagcccccaaagtgccctaagtgggcactcttgttatctcaatttttcagaggaggaacttggggctcagagagggtcttggccaagctgagaccagaacctgagcatgcctttcccatggagccatcgtcccctcagggttggttgaactggaggaggaaatgtcagcctcactccccaggaccagggaccttgaacttg

SEQ ID NO: 88171 - DNA, 1378 bp, Homo sapiens
agaaagaaaaagggttggggtggccgtattgggacctcctagtccccagggccttggcttgaagtcttacctccttagctctctgagctgatggacaggaagggacaaaggctcagcccccaactggggttggggtcagctgagggggctttccggggcagcagcragggcagggggagccctgcctggctttgtgattcagggatttgctgtaatcccagtccttccctgcagcctgtctaatccccacccgtggggctgagccttttcaagatctgactttggcctgaaaggctcccagaggggcccacattcctgcccacggcatccccgctcctaggaggaaactcatcagggtctctccccaccccggcatggggcttctcatccttgggaaaaagagacagtgctcataaatccagggaaagttaagatggccgtgagagaatctggagtgtttgacctgcttccttggaggagacggtggtctttgatgcctgggtcctgggccttgtgccatcaaggaaatgggtgaaggagatgctggcaagaatgaagacctgttgggggcagcggttaaccacctccaaggcctgatgtgagcttcctctttaacctcattgttcacttgacaagctccagccacctgtctttcggatcctaaggctccccaagctgcttcctgcctcaggaccttcgtacagacttccccttggcttggagattctctcccctgatccttgcatgctgctcttgcttgtaactgagatctctactttgggaggccaaggtgggcggatcgcctgaggtcaggagtttgagacgagcctggccaacgtcgtgaaaccctgtcttcactaaacaacaacaacaacaacaacaaaaaacaaaaaaacccaaaaaccaaaaagaaaaaaaccaacaacaaaacctagctgggtgtggtggtgtgtgcctgtaatcccagctacttgggaggctgaggcaggagaattgcttgagcccaggaggcagaggttgcagtgagttgagattgcgccactgcagtccagcctgggtgacagagcaagactccgtctcaataataaaaaacaacaacaacaacaaaataactgagatctcagctgcaatgttacttcccccaaggccccatggtcccactctgtcatgtcaccccgtgtctcagttttatttcttgcctttccttgtctcctccgactggaaagtgagaccttgaagagcaggggccccgtccgctgggctcctggccataaccccctctaagaataatacccagtgattcatggttctcagtgcatgtgcagagtaagtgaatgaatgaatgggaaaggacagagttacttgaagaagaaggaga

SEQ ID NO: 88172 - DNA, 1378 bp, Homo sapiens
agaaagaaaaagggttggggtggccgtattgggacctcctagtccccagggccttggcttgaagtcttacctccttagctctctgagctgatggacaggaagggacaaaggctcagcccccaactggggttggggtcagctgagggggctttccggggcagcagcgagggcagggggagccctgcctggctttgtgattcagggatttgctgtaatcccagtccttccctgcagcctgtctaatccccacccgtggggctgagccttttcaagatctgactttggcctgaaaggctcccagaggggcccacattcctgcccacggcatccccgctcctaggaggaaactcatcagggtctctccccaccccggcatggggcttctcatccttgggaaaaagagacagtgctcataaatccagggaaagttaagatrgccgtgagagaatctggagtgtttgacctgcttccttggaggagacggtggtctttgatgcctgggtcctgggccttgtgccatcaaggaaatgggtgaaggagatgctggcaagaatgaagacctgttgggggcagcggttaaccacctccaaggcctgatgtgagcttcctctttaacctcattgttcacttgacaagctccagccacctgtctttcggatcctaaggctccccaagctgcttcctgcctcaggaccttcgtacagacttccccttggcttggagattctctcccctgatccttgcatgctgctcttgcttgtaactgagatctctactttgggaggccaaggtgggcggatcgcctgaggtcaggagtttgagacgagcctggccaacgtcgtgaaaccctgtcttcactaaacaacaacaacaacaacaacaaaaaacaaaaaaacccaaaaaccaaaaagaaaaaaaccaacaacaaaacctagctgggtgtggtggtgtgtgcctgtaatcccagctacttgggaggctgaggcaggagaattgcttgagcccaggaggcagaggttgcagtgagttgagattgcgccactgcagtccagcctgggtgacagagcaagactccgtctcaataataaaaaacaacaacaacaacaaaataactgagatctcagctgcaatgttacttcccccaaggccccatggtcccactctgtcatgtcaccccgtgtctcagttttatttcttgcctttccttgtctcctccgactggaaagtgagaccttgaagagcaggggccccgtccgctgggctcctggccataaccccctctaagaataatacccagtgattcatggttctcagtgcatgtgcagagtaagtgaatgaatgaatgggaaaggacagagttacttgaagaagaaggaga

SEQ ID NO: 88173 - DNA, 841 bp, Homo sapiens
tcagctagaggcaagcccactcacaggtgttattaagcagacagagatttcaaacagtggagaccacttggtggggcggggccctgtaaagggtgagaagttaaggggtcggctaagtgaccttaaataaatgatttcaactctcctgaccctgaaagccagtgagtctacaaagaagtctatcctcaaagaactgacagttttcagagaaacaaacgtatgaatgggaaagatccagaaagcagcacgtaaagaaggaggcgccgatgggatgcagtggagggattcagaagctcccccaagaggagaaccacctgcctgacccttgcaccaaatcctagtgaccgaagtctaatgtcacagggtttttaccccaaaaagacaaggatactcagcctccgcattgtgaaaagttcctgactcctcctcctgtttaaaatctagaaacggtggtgcccatgacttggagaagactcagcaccacccagctctgctctggtccacttccttggcgtgtgaacatgcttgaattctaaggttttatcctcaagttggaagatttgtggttgcagccaagaacacactcacgtggacacacacgcatgcatgcacacacagaatatactatatctatgtagttattttcattctgatgatcaccagtctttttgtttgtttgtttgacatgcaacctgccagtgttttactttaattcataataaacacagtaccttctaaagtctgtataaggcggggcgcagtggttcacacctgtaatcccagcactttggaaggccraggcgggtggatcacctgaagtcaggagtttgagaccagcctg

SEQ ID NO: 88174 - DNA, 684 bp, Homo sapiens
gcggactgagcaggaaacctttctccatgtgcgggtttctctggggtccgctgtcagctttattgtctcctcactcgatgctgcctctgactttatcatacttttcctcatcttaaactgtgatctctgattattttccaaaagccccagcgtgtctcctttagacccatttgctccgggcattcccccggcagcgctgctgtgctcacagtccggactctgagccaggccaggcatttccttcccgggctgtggcctcctcycctcctgacttgtcacctgcaactcccagagcctgagcaggagccgtggagccctcctgcaagctcatcctctatctcatcggcctcctcacccctcgctgttccttatttcacttctgcagattgtacagattttttcttttttaaccagtttctatgtctcaaatgtccctgagcctaaccttccgtccagctcccactggtctcactgtgatgcccatgtgccctccccatgtcccctccaatctcccctatcctgtgcccggggcactcacgcagcctggcacagagtggagaggctggagcttgtcatcctgcagagttggagtcacctctgtgcctcccttgggccccccttctgttctcagaagcccctgacacagctgtaggtgctctacactcccccatatgctgccttagg

SEQ ID NO: 88175 - DNA, 684 bp, Homo sapiens
gcggactgagcaggaaacctttctccatgtgcgggtttctctggggtccgctgtcagctttattgtctcctcactcgatgctgcctctgactttatcatacttttcctcatcttaaactgtgatctctgattattttccaaaagccccagcgtgtctcctttagacccatttgctccgggcattcccccggcagcgctgctgtgctcacagtccggactctgagccaggccaggcatttccttcccgggctgtggcctcctctcctcctgacttgtcacctgcaactcccagagcctgagcaggagccgtggagccctcctgcaagytcatcctctatctcatcggcctcctcacccctcgctgttccttatttcacttctgcagattgtacagattttttcttttttaaccagtttctatgtctcaaatgtccctgagcctaaccttccgtccagctcccactggtctcactgtgatgcccatgtgccctccccatgtcccctccaatctcccctatcctgtgcccggggcactcacgcagcctggcacagagtggagaggctggagcttgtcatcctgcagagttggagtcacctctgtgcctcccttgggccccccttctgttctcagaagcccctgacacagctgtaggtgctctacactcccccatatgctgccttagg

SEQ ID NO: 88176 - DNA, 684 bp, Homo sapiens
gcggactgagcaggaaacctttctccatgtgcgggtttctctggggtccgctgtcagctttattgtctcctcactcgatgctgcctctgactttatcatacttttcctcatcttaaactgtgatctctgattattttccaaaagccccagcgtgtctcctttagacccatttgctccgggcattcccccggcagcgctgctgtgctcacagtccggactctgagccaggccaggcatttccttcccgggctgtggcctcctctcctcctgacttgtcacctgcaactcccagagcctgagcaggagccgtggagccctcctgcaagctcatcctctatctcatcggcctcctcacccctcgctgttccttatttcacttctgcagattgtacagattttttcttttttaaccagtttctatgtctcaaatgtccctgagcctaaccttccgtccagctcccactggtctcactgtgatgcccatgtgccctccccatgtcccctccaatctcccctatcctgtgcccggggcactcacgcagcctggcacagagtggagaggctkgagcttgtcatcctgcagagttggagtcacctctgtgcctcccttgggccccccttctgttctcagaagcccctgacacagctgtaggtgctctacactcccccatatgctgccttagg

SEQ ID NO: 88177 - DNA, 2617 bp, Homo sapiens
gatctccctccgccacctagactggagtgtagtaagcctatctccgctcactgcagcctcaagcagtcctccaacctaagcctcccaagtagctgggactacagagacataccactacgctaattttttagtttttgtttgtttgtttgtttttgtagagacagggtctcactatgttgcccaggctggtcttgaacccctgggctcaaatgatcctccttcctcggcctcccaaaattttgggattacagacatgagcgaccacatccagtgcaaatttttttataccaaggcaaagatgatcatgcaaaagaaactaatgaatgaacaagccgttggaacaaaaacaatttgttaatgcttccctggccttacaaatactggagtggtaatgggtggaatccattctattaaaatagaatggattttaaatgtgtgggggtttagatattcttctaccacctctgatttttctggaaaccattacagttccacaatccttttccctccaggtgatctgggtcactttcatcactttcatcactatcagttcatccactatttgcaccatttggccagctaagagttggctaaaagtgcagccaggtgtgtcgtaatgatgcaagactatagcagtataatccccatgatgcattcacaggatgcattacagagaaggggaaggaaagagtgcaattccaagatgaactttgacttgcaacccacactcccttcaacaaacagctttaagtaaatcttggaaatattgttcaaaatacatgtgacaaaacgtgaccatctttcctctgttacgtggcgggtatgatcctttctgtattcctaacatctctcaatttgggttgaatgtgcagtccctaagtcataagcaagtgccagtcaccacttatggttgctccgaagagaaaattagaccttgctttagttttttcttccaaaagaacaacttytcatttcttaaccattgtcagcaatttccataggctggattgacttaccttcatgatgtttggaagttaagacaatgtatttggcaccagaggcctgaaaaatatctgcccactggttggcattaaaaaattttgctgtaaatagtggtccaaaatcttcatatttgaaactaggagggtaattatctttcataaattccacatacttcggtatcttttccttttgccaataccacctaaggggaggaaaggaaagagtgcataaacagcacatacacacatatttaaaagaactgctccagctccccttaccatttacccctcacacagataggacccagattctctttctcacttccccattagtttgacttggctttaaagatagcttatgcaaactaaaccccctctcattttccacctatccccctgtgatatccactcagctcataaactagagcattctaggcaactcagctacccattctctcttttttttaagacagggtctcactctgtcactcaggttggaatgcagtaatggaatcatggttcactgcaaccttgacctcctgtgctcaagcaatcctctcgccttagcctcctgagtagctaggaccacaggcacgtgccaccacacctggctattttttttttctttgtagagatgtggtttccatatgttgcccaggctggtcttaaactcctgggctcaagcgatcttcctgcttcagtctcccgaagtgttaggattacaggcatgagtcaccgtgtccagccccattctcttttaattcttcacttttaaatcacaacatgtagtatatgtctttacacattgtcccttgtaacataagtgattagggcttctaaaaggaagactacatgcctaaaacataatatgcatctattatattcagtagtagagaacactttggaggcacaggacagaaagggaggcaaaagtaaaattaaaaagatgctgttattttaataaatggactcaaccttcaacaattacttgctatacgcattcattctaagcaatggtatattgaccctaaactgcgtaagcaagacttcatgaggaaaagcacatctacacattttagataaacacagcagtaactatcctcatgaaatagatgcaacccccatttttgacccacctcctgctttttctatcaccattcctttcatatgagtatttctacaggataagcaaatccataatcagcactatatttcccaagacgatcaggagactctgctaagaagaaataattgaagggcatactatgcggcaggcatgctgtttgcctgcccaaaagtcgtatttacgtaatttcccagcttccactacagctgcgacagggatgtgagatccatgctggccaagggaacttgagggaaagccaactttggggactgtggaaatggtttccctcctaatgaaaagagacactggccttcctgcctttgggcagggttgtgtgaagttatggtgcctggctgccatcctgtgaccatgaagggacaagtccccaggctgaggatgaaagaaagagcccgtgtctttgatttcatcaatgaaccgactactctaaatttcctgttatgtgagataacaagcccctatcattatacct

SEQ ID NO: 88178 - DNA, 573 bp, Homo sapiens
tgaaggataagtggttcttagaaggttcctaatgttcaatctgctctcatttgcaatctataattcttcattcacatcttcacacattctgaatgttaatattgcatagcctcttagaatgcaaatggcaaaaacatacaaatgatgatggtcattcactacctaaccctttcccctcaataactgcctggtatcaggaaaagggagctttaatggggaaagaagaaggataaggagtgtttgtgtgctactgatggttggtggctattgaaagcctgagttcagaatgggaggctgtgtacatatgagaaagggggaagaaagatgaggaaaggaatgatgttggtccctaagataaagattaagagggtatgttaattggaatattgggacagatgagaaggttaaatcctgttttatttatttacttgtttgcttatttatttatttgagayggagcctcggtatgttgcccaggctggagtgcagtggtgcgatctcagctcactgcaacctccgcctgccgggttcaaatgattctcctgcctcagcctcccaagtagccgagactac

SEQ ID NO: 88179 - DNA, 533 bp, Homo sapiens
ctcatggagtctaccrctctcaaggtcattgccctgtgtgtggaactgccacatctcacctctacctgcagctgagtttgcttctctgtgagtcttcactgttcctggcctctcctagtttctcctgtagactgtgtttaatgcttttctgtcaaaatgttttaagagattcaccacgatgagaagaatgcaaaaggcaagggatactgcttaagggtgtgagcccctgagctgactgctgaagttgaactccagctgtgtgatctttggcctcagttacttaacctgtgaaatggggataatcatagtattgatttccttacattgttggcagggttaaatgagaagatatctgtaaagcatttagcatggtgcctgacacctttgaaactgtaaatgttagctatcatcatcactcttattattactagtgctcttatcatcattaattgttatattatttttactaggaagtaggagaaggatatagaagatagggcaggagaagatcctttatcttttaaaaaatttgc

SEQ ID NO: 88180 - DNA, 533 bp, Homo sapiens
ctcatggagtctaccactctcaaggtcattgccctgtgtgtggaactgccacatctcacctctacctgcagctgagtttgcttctctgtgagtcttcactgttcctggcctctcctagtttctcctgtagactgtgtttaatgcttttctgtcaaaatgttttaagagattcaccaygatgagaagaatgcaaaaggcaagggatactgcttaagggtgtgagcccctgagctgactgctgaagttgaactccagctgtgtgatctttggcctcagttacttaacctgtgaaatggggataatcatagtattgatttccttacattgttggcagggttaaatgagaagatatctgtaaagcatttagcatggtgcctgacacctttgaaactgtaaatgttagctatcatcatcactcttattattactagtgctcttatcatcattaattgttatattatttttactaggaagtaggagaaggatatagaagatagggcaggagaagatcctttatcttttaaaaaatttgc

SEQ ID NO: 88181 - DNA, 533 bp, Homo sapiens
ctcatggagtctaccactctcaaggtcattgccctgtgtgtggaactgccacatctcacctctacctgcagctgagtttgcttctctgtgagtcttcactgttcctggcctctcctagtttctcctgtagactgtgtttaatgcttttctgtcaaaatgttttaagagattcaccacgatgagaagaaygcaaaaggcaagggatactgcttaagggtgtgagcccctgagctgactgctgaagttgaactccagctgtgtgatctttggcctcagttacttaacctgtgaaatggggataatcatagtattgatttccttacattgttggcagggttaaatgagaagatatctgtaaagcatttagcatggtgcctgacacctttgaaactgtaaatgttagctatcatcatcactcttattattactagtgctcttatcatcattaattgttatattatttttactaggaagtaggagaaggatatagaagatagggcaggagaagatcctttatcttttaaaaaatttgc

SEQ ID NO: 88182 - DNA, 772 bp, Homo sapiens
atagagagcttctttatgcacttgagataactgggaacacaactacatcagtgacctctaaattcgccatccctgtctactgtcaagtacaattaccttgttccatcctaaaggaaaaaaatgatttaccctttccccagtgataacgttcttttaagtgttcaaagcattaatcagggaggctgtctttaatattctatccttggattttattctattgcagcaggatttataatcacacacttaaaaatctttagtacttcayttcttaatttaaaaatgccttgggttgtaggccacacatatctattaaagatgataaatgaggaaacccagaaaaattaatttatgggggaggaaataaattggttagctgcccttaggctcaattctggggtgtttctgcatttccagtttattcctaatgcaagtgtttaagagaagtttcctcacaagccaatttttatctgcgatgttttgttttccgtaattctctgttgttaggttatgggagaataacctgctctactggaaattcccccctataatttgataagtgtatttcatcataatacactaaaaccagtctgggccctttaaactagttaattatgtaatttgaaggatttgcatgggaagaagcttcactgtggattaagaaacaattgtagtctctccaatctggttacaacagttctccagttgtcaaatcatctctggatcctagactactgtttcaaaagctttccctgccttatttaaactgaaaaca

SEQ ID NO: 88183 - DNA, 1329 bp, Homo sapiens
tcgccccatcctccagcccccacatcaaagaggaaagaaatcaaagctgcagcggcaggagaacacagcccatccctggtcccagagggagctctcgtgtggtacatttcatccctggcagatgaggaggtagatggaggcaggatactagcagtatgtggccagcaccggctgaacagaatgaccaccaggacaagagccaagtcgagggmcagcatcatctccagggagcacagcactttaccatttgcagcacagcacgtgaaggcagggctggaactgagaggctcacggcagatgagaaaatcaaatcagagcgtaccaaggtcacagagctagctagagagccgaggctctcaggtcccctgcccagtgtgtttcccgggagtacaaggtggtttccacaccagcagctgcagacggactaatgaagacacaagggctagacctcccacctgcaccacttagtagctgggatctctgggtagtcaatgacctccctgaccttgacccctcaagggtgccaagtgcagtgtgtggtgcatggtaaatattcaacaaatggtagctcttcttaccctgatgccctagaaaaaacccactggagaggtgtcacctaacagcaaactcacctacgccaggtggcctggactgaaacactaggaggtgagggcagcagcgggcagggtgttggggttcaatcaggctggtgggaaaaatattaaagatagttacagtaatagccaaaaactatcttggaagacctgagagtttgcatagcttcagattgcttggctgaaggcagccagggtctctttgcaggagccagaaagattaaggtgcaagtacaaaggaatgtgggaagtctatcttactaacctgtttatttatatgggctttagactgacctttgtcctaccgggtactttactgcctcctactcagggaggtctgcaaaagtgtattactcacaaacggtgtttgctttaggcctcagaaactggcctttaatctttaccctctagtggtgtttacttgcaacttttgttaattagtgttgctgaataaatgcgagcctcactagctgatcagggccgagtctcaactgtttacagaactcagcttggagcctgtaagtggaccctcagctggaccggcagagcagaatatctgtgtgccagtgtactttattcatctgtcaccgaatcaggggtctgcaggaacagactccctgcagctaacgccccccgcaaaaggagcgctgcctcagcagggccccttaggggtagccccagatatggcaggctgccccaggcctcagagaggatc

SEQ ID NO: 88184 - DNA, 956 bp, Homo sapiens
tgcatactgctattttttaattatyagggttaaaaatatctacaaacaatagttataagcgattgtgttaacaccaaagatatacattttcaatactcatttaagtgaacagttatttagttaatcactaatttattcaacacacatttattgattgcctattgtgccccaaatatatatagatatggaaatagctctaaatttataattagagctaaatgaggtttttttttcttttttaaagatagggtcttgctatgttgcccagacgagactagaactcctgggcttaaagaatcctcccacatcagccttttgagtagctgggactacaggcacatgctgctgggtccagtttgagatttagatatgtagatgatagatacatagatagataaacagatagctaggcagatatagaaatagagataaagatagagaaagatagagatagatatagagatggcgatagagatacggtaaagtcccacttctcagagtacaccacacttcagtgatcaatgaaatacatgtaagcaaataatgatttaatatgatacatgctaatgaaagtatgtattaactaaagaacatagggtaactaaatagtcaaaagaatgaaaaaagtcttcaaagtcaaagatggaccatatgtaccaagattttacctatctgcatcagtttcttatgcgaaggctaataaaagaaaataagaatccagattttcttgtaggatgacgtgcatctgtttgtgtttgctgaaatagcagggctttttctgctcctgttcagtgtgggaatggaaagcagaacatcccctgtgttccatgtactgtgttaggtactttctcatgtcacttctaaacactaagagaagtaaaaaaagaagattcaaaaacaagtcttaagctgaatttacttaatgcaaggcaggaataacatgatcccacacagat

SEQ ID NO: 88185 - DNA, 956 bp, Homo sapiens
tgcatactgctattttttaattatcasggttaaaaatatctacaaacaatagttataagcgattgtgttaacaccaaagatatacattttcaatactcatttaagtgaacagttatttagttaatcactaatttattcaacacacatttattgattgcctattgtgccccaaatatatatagatatggaaatagctctaaatttataattagagctaaatgaggtttttttttcttttttaaagatagggtcttgctatgttgcccagacgagactagaactcctgggcttaaagaatcctcccacatcagccttttgagtagctgggactacaggcacatgctgctgggtccagtttgagatttagatatgtagatgatagatacatagatagataaacagatagctaggcagatatagaaatagagataaagatagagaaagatagagatagatatagagatggcgatagagatacggtaaagtcccacttctcagagtacaccacacttcagtgatcaatgaaatacatgtaagcaaataatgatttaatatgatacatgctaatgaaagtatgtattaactaaagaacatagggtaactaaatagtcaaaagaatgaaaaaagtcttcaaagtcaaagatggaccatatgtaccaagattttacctatctgcatcagtttcttatgcgaaggctaataaaagaaaataagaatccagattttcttgtaggatgacgtgcatctgtttgtgtttgctgaaatagcagggctttttctgctcctgttcagtgtgggaatggaaagcagaacatcccctgtgttccatgtactgtgttaggtactttctcatgtcacttctaaacactaagagaagtaaaaaaagaagattcaaaaacaagtcttaagctgaatttacttaatgcaaggcaggaataacatgatcccacacagat

SEQ ID NO: 88186 - DNA, 956 bp, Homo sapiens
tgcatactgctattttttaattatcagggttaaaaatatctacaaacaatagttataagcgattgtgttaacaccaaagatatacattttcaatactcatttaagtgaacagttatttagttaatcactaatttattcaacacacatttattgattgcctattgtgccccaaatatatatagatrtggaaatagctctaaatttataattagagctaaatgaggtttttttttcttttttaaagatagggtcttgctatgttgcccagacgagactagaactcctgggcttaaagaatcctcccacatcagccttttgagtagctgggactacaggcacatgctgctgggtccagtttgagatttagatatgtagatgatagatacatagatagataaacagatagctaggcagatatagaaatagagataaagatagagaaagatagagatagatatagagatggcgatagagatacggtaaagtcccacttctcagagtacaccacacttcagtgatcaatgaaatacatgtaagcaaataatgatttaatatgatacatgctaatgaaagtatgtattaactaaagaacatagggtaactaaatagtcaaaagaatgaaaaaagtcttcaaagtcaaagatggaccatatgtaccaagattttacctatctgcatcagtttcttatgcgaaggctaataaaagaaaataagaatccagattttcttgtaggatgacgtgcatctgtttgtgtttgctgaaatagcagggctttttctgctcctgttcagtgtgggaatggaaagcagaacatcccctgtgttccatgtactgtgttaggtactttctcatgtcacttctaaacactaagagaagtaaaaaaagaagattcaaaaacaagtcttaagctgaatttacttaatgcaaggcaggaataacatgatcccacacagat

SEQ ID NO: 88187 - DNA, 560 bp, Homo sapiens
aagttgtattactactagaaattctcatctgatctatatattaaaatatagtcaaatatttaaggttgcctacattacagtgggaaaaggtaaattgaagttgcagcttcttatgacatataacctatacatggtatcatgggtcattttgcttgtttcatttcccattagaggaattttaatgaaggaggccagtaaaatrttgattaataagtgttgatgtgaaatacacttactgggccatataaaagtggcaagcttatgtagactaccccccaccattattatattttttaattctatgagtatggaactccagaagactggaaaccatagcttttatctttttcccatgagagttatttatccagcattttcttcaataattctacaagatataactagagacatagatcctattagtttggtaaacagttataattattacagtagccttccttatttttcacctctttgtcccaattcattcttattaagatttaaatgttggggataatttattttaccaaatgttatagaagacagagaaattaaaagca

SEQ ID NO: 88188 - DNA, 2119 bp, Homo sapiens
tagcttcaggcattaccataaagactgacagaacaataaaaaaggaagaaaatggaaggctttaagattagaaataaactttcaaagtatatttaaggtttaacaaactctaagatgctctttccacaatctaaccttgacactttttgattcctaacactttatgtttacaactaatgattagacacgatggtcaaatttctggttgagaagctgccttccagacagttcacttctgcttgagtctgtagtaactgaaccttcagatctgctgccactctgtgctggttttcagtgccaaaggcttatgacacttgaaaaatattatgtgccttcattcttacaaaaaggaaagctcatgacttgaaaaatgaccagtgaatgttagagtagaccatataaaacacagaggcatagaacaacttaatccttttaaaaagttaatcaaatccctggctttcttacacactacttcatgaagtaggaaaagattgccaaacattatgaaaatggtatttcccttagggacttgaggattagcagaatatacaggtcatgtgtttagtgatcctattagaggatacattttacaatcatgtcactggtaattctgctagagtaagagagagataccaaacactacacattatcgtacatagggcatgtgattacagaataattaaaactgtgctacattaaggtatcacataaatggtttttaatatcctttgtcagtgaatcagtgatatacaaaatttccctttccacacatattttccttttttaccttctgcctgcactacccaaatttctgcactttgatctatagttatgcaatgtagtcatccttttaaaaatgaattttaaaatctctgatagcggccaggcacagtggctcatgcctgtaatcccagcactttgggaggctgaggcaggtagatcaactgagatcaggagtttgagaccagcctgaccaacatggtgaaaccctgtctctacaaaaaatacaaaaattagcctggcgtggtagcatgtgcctgtaatctcagctattccggaggctgaggctggagaatcgcttgaacccgggaggtggaggtttcagtgagctgagattgcaccattgcactccagcctgggcaacaagagcgaaattccatctcaaaaaaaaaaaaaaatctctgatagctcccatgcatatcaactctgaattgtcttctatttcaaagtacaacagtactgagaaacctgtggaggagttcagggtgctgctgtactgacttctggaaactgtatggaagtaattattttgaatttatttttgtgtcatatatcgattacttgtgttcaaaaatatttgggaattcccaatattttcactgaatcagattttttttttcttctttgtaaggcgggactcaaagccagtgcttcagaagtaaatgcttttatatagtagaaaaatatgaagaaaacatagtatttcaggtcrtttgctcccttatatcacttatcagattttggggactttaaggacctaaattttcaaaaaaatcaagttagatcatggatttttttgaaaacttgggtcattaaagtcctgaagaaaatttgaaaatttaagtccttaacgtccagaagacgtttattttagactgtaaagtaaagtaaaaccaagggttaagggtaggtaactttcttttgttttaaacaatggtatgtctatatctatatctattatcatctataggtatatagcgtctatgtgtgctaacccagcaccaattgcctcccctagcttatagaagagaccagtgaattagaagtaggagatgtgagttctaaccccatttctaccactaattagataatagaattcgaaaaactcattgacttctttcagcattgggtccctttgctgtaacatgaagacattgaaagaagtaactttatgttagttgtttctccaatatgttgtgtgtgtacctggtgtggacctcacggtcacccttgccagagacaactagattttttttttaagtctatactaatattctttcctcactagaaaggatagtggggtgtttactctcagttgtaaataactctgttttctctg

SEQ ID NO: 88189 - DNA, 2119 bp, Homo sapiens
tagcttcaggcattaccataaagactgacagaacaataaaaaaggaagaaaatggaaggctttaagattagaaataaactttcaaagtatatttaaggtttaacaaactctaagatgctctttccacaatctaaccttgacactttttgattcctaacactttatgtttacaactaatgattagacacgatggtcaaatttctggttgagaagctgccttccagacagttcacttctgcttgagtctgtagtaactgaaccttcagatctgctgccactctgtgctggttttcagtgccaaaggcttatgacacttgaaaaatattatgtgccttcattcttacaaaaaggaaagctcatgacttgaaaaatgaccagtgaatgttagagtagaccatataaaacacagaggcatagaacaacttaatccttttaaaaagttaatcaaatccctggctttcttacacactacttcatgaagtaggaaaagattgccaaacattatgaaaatggtatttcccttagggacttgaggattagcagaatatacaggtcatgtgtttagtgatcctattagaggatacattttacaatcatgtcactggtaattctgctagagtaagagagagataccaaacactacacattatcgtacatagggcatgtgattacagaataattaaaactgtgctacattaaggtatcacataaatggtttttaatatcctttgtcagtgaatcagtgatatacaaaatttccctttccacacatattttccttttttaccttctgcctgcactacccaaatttctgcactttgatctatagttatgcaatgtagtcatccttttaaaaatgaattttaaaatctctgatagcggccaggcacagtggctcatgcctgtaatcccagcactttgggaggctgaggcaggtagatcaactgagatcaggagtttgagaccagcctgaccaacatggtgaaaccctgtctctacaaaaaatacaaaaattagcctggcgtggtagcatgtgcctgtaatctcagctattccggaggctgaggctggagaatcgcttgaacccgggaggtggaggtttcagtgagctgagattgcaccattgcactccagcctgggcaacaagagcgaaattccatctcaaaaaaaaaaaaaaatctctgatagctcccatgcatatcaactctgaattgtcttctatttcaaagtacaacagtactgagaaacctgtggaggagttcagggtgctgctgtactgacttctggaaactgtatggaagtaattattttgaatttatttttgtgtcatatatcgattacttgtgttcaaaaatatttgggaattcccaatattttcactgaatcagattttttttttcttctttgtaaggcgggactcaaagccagtgcttcagaagtaaatgcttttatatagtagaaaaatatgaagaaaacatagtatttcaggtcatttgctcccttatatcacttatcagattttggggactttaaggacctaaattttcaaaaaaaycaagttagatcatggatttttttgaaaacttgggtcattaaagtcctgaagaaaatttgaaaatttaagtccttaacgtccagaagacgtttattttagactgtaaagtaaagtaaaaccaagggttaagggtaggtaactttcttttgttttaaacaatggtatgtctatatctatatctattatcatctataggtatatagcgtctatgtgtgctaacccagcaccaattgcctcccctagcttatagaagagaccagtgaattagaagtaggagatgtgagttctaaccccatttctaccactaattagataatagaattcgaaaaactcattgacttctttcagcattgggtccctttgctgtaacatgaagacattgaaagaagtaactttatgttagttgtttctccaatatgttgtgtgtgtacctggtgtggacctcacggtcacccttgccagagacaactagattttttttttaagtctatactaatattctttcctcactagaaaggatagtggggtgtttactctcagttgtaaataactctgttttctctg

SEQ ID NO: 88190 - DNA, 755 bp, Homo sapiens
aaaatgttaatgtccagaagatactaaaaaactcctacatctaaagaacaaaaaaatcaaacccaatttaaaactagggaaatgaattgaatagatatttctccaaagaagacataggaatacaaaaagcacttgaagatattcccaacatcactaattataagagaaatgcaaatcaaaaccataacaaaataccacctcacacccattagaaaggctactattaaaaaatcaaataacaagtgttgctgaggatgtagagaaattggaactcttgtccattattggtgggaatgtaaaatggtgcagccactagagaaaacagtatggtggttccttaagaaattaaaaaatagaattaccatatgatccagcaattcatctcctggatatacatccaaaagaactgaaagcaaatggtgagtttcatgttttatagatatttttgaaaaacattatttttttttaacttttatttttggtycagggaaacatgtgcagatttgttatataagtacattgggtgtcacggggctttggtgtacaaattactttgtcacccaggtaataagcatagtatctagcaggtagtttttcaatccccaccctcctctcactatccactctcaagtaggccccagtgtctgttgttcccttctttatgcccatgtgtactcagtgtttaacccccgcttataagcaagaacattcagtatttggttttctcttccttaattagttcacttaggataatg

SEQ ID NO: 88191 - DNA, 962 bp, Homo sapiens
tttttattttaaaagctcataaatacccaaaagtcaactagtaatatcctctctatttcacaaatgaggaagctgaggctcagagattttaaatagcttaccgaaattaacacattcaagacatggagctgaggttcagtgaaagttgtggactttgaaagtccgttttttctactatatacaagtgactctctagagagataaggtgatatggtttggctgactctccacccaaactgcatcttgaattgtatttctcataactcccacgtgtcatgggagggacccagtgggaggtaattgaatcattggggtgatctcccctatgccgttcttgtgatagtcagtgagttctcatgagatctaatggtttaatagcacgtggcattccccctgctggcacttattctctctcctgtcaatctgtgaataggtgacttccaccatgattgtaagtttcctgaggcttccccagccatgcagaactgtgagtcaattaaacatctttcctctrcaaattacccagtctcaggtatgtccttatagccatgtgagaatggactaatacataagatttagatagataagacaaagccggttgttccatgagtagatgctgcgtatagacaaacaagccattattgcatgtgagagcaatacagtaggaataaaaataatgtcagtgaagtcctcagaattctaacagaactcacattcagaatggatgattactgacatctttttcatatgaaaactgagtggcagctagaggaattctttcatgtgaatctaagacgatgggagaaagaaatattttcattttgtatttatgatcttatttccacacaaaaaacactccattttataaaagttgagattaagcactaacgcttctatagcgttgagatgttctgcaaagcaaagaactattaaatagagcccacttggatcaaaagctcctg

SEQ ID NO: 88192 - DNA, 1000 bp, Homo sapiens
gtatgtatgtatatacagctttttaaaaggaccggagttagttttattatcttgccctcaacgttgtattcctgaattaaactctcttagactcacttaatcctagactcctatcaactaagtttttctttgttttttctaaatatctttattttcatgaaattatacacacacacacacacacacacacacacagagggagataacacatgtgaataatttgttgatgggtttcatttctcaatatgacagttctggacagaataatatggttctcaagatccaactgcatttgcagcaatgtcggtatattgtaaaataattgaactgcaattggtgatgctagttttgtctatctttgtaatcatacattcaggctgtatcatgtctggttaaactgcaagctgttggccggtgactggatgggttttgctgtatcaggaggcaatttgtcatagacatgcctaccagttgaacaaaataaataaataaataaataaataatactttatgtaattctggggttaaaaatggattaaatatttccacctaatattgcaaaatttattaattaaataaatggagatcattttttaaggttaattttaagggctaatacacttttttttgctctaaatatttccaaatgaatggggtatttattacctagacatattttaatggtggcatatttcatcagatttgtttaaaacgggcccttatgccagatagtagaagaatatattctgaatgatttcaattttttcccaatttttttgagatttgctttatggtccagaatatgctctatcttcgtaaatgtcccatttatacttaaaaagagtgtgtgttttcttgtggttgagtggagtgttctttaaatatttggatacagtagttgaaaagrttcatatatgcaatatccttattgattttctatacacttgtttctgataatcactaatatttgtttcattttccttttgattctgtcaatttt

SEQ ID NO: 88193 - DNA, 586 bp, Homo sapiens
tgatatgagaaattacctttcccctcatggctttatgcaaaacatatcattacaatcaaacatcattcacaaraatttcacctttgagaagtcagggacgattgtctatctctttcagcaaatataatatacctctgtgtgtgtgtgtgtgtgtgtgtgtgtgtgtgtgtgtataatatatatataatatatataaaatatatatataatatatacatataatacatatagtgataactcaattgatttgcatggaattagttagtgagggtcttatgtagaatatattcgtgttaacacccaaaggtgcttctcatcagttatggatataccagggccggtgacaagtcaaagaagtccatcttctgtcattttttctcttctttttcatcctctcttaaggctcagtaggccaccttgactaaaagccaggaggcaatgcatgaggctggctccccaatcacccattgaccttccacctcctcctactggttctaggtcaactcttggtccttctggttattgttcaatacagagggatgactggcccaggttagcagcagtggcagatgataattgctttgtg

SEQ ID NO: 88194 - DNA, 1309 bp, Homo sapiens
atagaatgcaggtctgccccaaatacctcttttttcatacttcacaccaatggcaaatatgccataaaatattcaaagggwtaaagagatcaacttgcagaaatctattttcccaactttcaaaaatacctctttggatgttctaaagggatactaaaggtaatatttaaagatgatgtactttaaaaagacctttgtttcacaaacctgcaagatgtccatatatatatagcatactaaaatgtattttaactggtgtctattatacaattaaataatggattaaacattaaaagtaataaggtttttataagaggtggcactctgctaacattaataattaccatcattaatcctgcaagactttcttgcaggattttatattatttccttctgccagactcttcaaacactcccaaggaaacagtcctcagttatattgagtccactgctacatagcttaaattaatttgtctttacattgccactatcttgaaacttttctctgcaggacccattcattacctgaatatgtaggagaagcagaatgagtaatgggcaaaccactgcaccttcaattaatcctaaatactccttttccaacttgagttagaaatttggatcccagacaaattttgatttagcaggagtatacagcacagaactgggagttgggaaagtcggacattcaccaaggagtaaacaacaatagggatatccatagggttttgttttacactccagctcctcctaattaatggtaactgcatacagtgctgtgtggagaagggttctgagtcaaatcagattcaagagaaaatagtgctgggaagcactatcaataattctgatatgcatgggaagggcagcagacagcattcttgtcatatatttaccattcgatatcagtggttattagcaggggggcaattttgcctttctgacctccaagtgaggtttggtaatgtgtggagatgtgtttggttggtaagagctctgctgtcattgaatggacagagtccagggatgctgctcaacaccacacacacaggacagctgcccacaataaaggttagcttgtacaaaatatcaatagtgataaggctgagaaatcttttcctgcataatttttaaacatattttgttaaattcaacatatctactgccacacacaacttcactaacttatttttttctttcatctacatttttaagtgattagcattctcagcaaaaccagaagtaacagttttagaagaaacaattatttttcattaagataatgcaagtagctaggcacggtggctca

SEQ ID NO: 88195 - DNA, 1044 bp, Homo sapiens
caaagtctttgttgaaaatggttttgtttttgcttctacactaaaaaaggcgagttttccgggtctaaaattcttaagtggcaaacttttccagactgtgtctagatattaatctcttcattgatgcttgaaatcagatatctgaaatgtagatatccttataatcttattacagatcatttctctagtctgggaaaacattctcttctttttcttcttattgcttctgttctgttctggtatctcttgaaaatgaataagttatctttatgttgcattttgccattttctgtcctccatttctattatcttctttatcataatgtttgtcattgtctttttctccttaattctgggaaagctagtatttttaaaaatcagtatcactgaatgttttattcagtataaygttttattcttttttcttccattatttaaaaatttgttactgcgttttactttttcacttttcagacttttaacgcttttttgcccaactgtaccgagaaaaagctatactgcctaaaatgagccaggattgaggtatctctgaaagtcttttcggagactcatttactttctccccagatggatcactctctgtttggagagagaatttcaaactctgtgctttctgtatggtcctatctcctcagtatctatgaggactcttgaagtttctggcatgtatttatttagcaaatacttattgaatacctattattttccaggtattcttctaggtacttgtgatccatcagtgaatgaacagatagataaatacccctgtttttttaaaaaaaattatttgcgatagcggtaaaatatatgtaacataaaatttaccatattaaccactcttaagcacacagttcaatagtgttaagcacattcacactggtaggcatccaatctccaaaattcttttcatctttcaaaactgaaactctgtacccattaaacaacaacttaagtattttctcttcttcccagcccctggaaacgaccactttactttttacctctatggattagactactctg

SEQ ID NO: 88196 - DNA, 1044 bp, Homo sapiens
caaagtctttgttgaaaatggttttgtttttgcttctacactaaaaaaggcgagttttccgggtctaaaattcttaagtggcaaacttttccagactgtgtctagatattaatctcttcattgatgcttgaaatcagatatctgaaatgtagatatccttataatcttattacagatcatttctctagtctgggaaaacattctcttctttttcttcttattgcttctgttctgttctggtatctcttgaaaatgaataagttatctttatgttgcattttgccattttctgtcctccatttctattatcttctttatcataatgtttgtcattgtctttttctccttaattctgggaaagctagtatttttaaaaatcagtatcactgaatgttttattcagtataatgttttattcttttttcttccattatttaaaaatttgttactgcgttttactttttcacttttcagacttttaacgcttttttgcccaactgtaccgagaaaaagctatactgcctaaaatgagccaggattgaggtatctctgaaagtcttttcggagactcatttactttctccccagatggatcactctctgtttggagagagaatttcaaactctgtgctttctgtatggtcctatctcctcagtatctatgaggactcttgaagtttctggcatgtatttatttagcaaatacttattgaatacctattattttccaggtattcttctaggtacttgtgatccatcagtgaatgaacagatagataaatacccctgtttttttwaaaaaaattatttgcgatagcggtaaaatatatgtaacataaaatttaccatattaaccactcttaagcacacagttcaatagtgttaagcacattcacactggtaggcatccaatctccaaaattcttttcatctttcaaaactgaaactctgtacccattaaacaacaacttaagtattttctcttcttcccagcccctggaaacgaccactttactttttacctctatggattagactactctg

SEQ ID NO: 88197 - DNA, 953 bp, Homo sapiens
tgcatcatcaattacgtcattgttaccacattattagacatttattttatattgttttcagtgtcgcttttctaaaataggaaatgctgcattgaacacctycatatacataatattttatctgttactggaatagttctgctatcagaatattcaatagagaaactaggggtgggattactgagcactgttatgactttttaatttcccaaaggtctgtgctagtttattttttcaattaattaaaaaaattgttgctaagccctttcctttttattgagttgtaacataattacaataatgtgcatagatcttaagtttacagcttgatgaatttttacgtatataaaatacaacaactatggcccagatgaagaaatggaacattttcagcatcttggaaacccttctgcttcttccagactgtactatgcctcacaaaaggaactactattttgacattaatcccataaaatgattgtacttgtgtttatacttcatataagtgaaatcatatactttactagccctggctttgacttgcctttccattggccttccctgggcaaccaacattcttactgtcttccaatatggtaaaacattcagtgtaataagagtagtcttgactcgcagtatagttattgaatccatgctgtttatttattttcatttgtaagatttaaaatataaaatagaacttttattccaagtccaatcttaatttttgatattgatggggaaaacctgaagcatatttaacaaaaataatggtcaccatttggtgagctcagaaatggatactaggtgctatttaaggaatttatatccataatttcatttaatctttttaataatccaagaaaaagatacaattatacccatttttctgtataagaaatctgaagctaaaagatataaaattaccttactaaatcttacagggctagtat

SEQ ID NO: 88198 - DNA, 953 bp, Homo sapiens
tgcatcatcaattacgtcattgttaccacattattagacatttattttatattgttttcagtgtcgcttttctaaaataggaaatgctgcattgaacacctccatatacataatattttatctgttactggaatagttctgctatcagaatattcaatagagaaactaggggtgggattactgagcactgttatgactttttaatttcccaaaggtctgtgctagtttattttttcaattaattaaaaaaattgttgctaagccctttcctttttattgagttgtaacataattacaataatgtgcatagatcttaagtttacagcttgatgaatttttacgtatataaaatacaacaactatggcccagatgaagaaatggaacattttcagcatcttggaaacccttctgcttcttccagactgtactatgcctcacaaaaggaactactattttgacattaatcccataaaatgattgtacttgtgtttatacttcatataagtgaaatcatatactttactagccctggctttgacttgcctttccattggccttccctgggcaaccaacattcttactgtcttccaatatggtaaaacattcagtgtaataagagtagtcttgactcgcagtatagttattgaatccatgctgtttatttatttycatttgtaagatttaaaatataaaatagaacttttattccaagtccaatcttaatttttgatattgatggggaaaacctgaagcatatttaacaaaaataatggtcaccatttggtgagctcagaaatggatactaggtgctatttaaggaatttatatccataatttcatttaatctttttaataatccaagaaaaagatacaattatacccatttttctgtataagaaatctgaagctaaaagatataaaattaccttactaaatcttacagggctagtat

SEQ ID NO: 88199 - DNA, 696 bp, Homo sapiens
ctcctggctatactaccactgaggagggcatgtgtgatttgagatgcttctctcatgcagtgcccatcttctttgccttctttctctccatactgactatcccaccaacttcaaatctctcactctcttatgtagtgcaattcagcaatgttctgaatcctggccctaaacatacatgcccaccttaacaaaacaaagagcacttaacaggcctgtgttaggctgtttttgcattgctataaaggaatacctgagactttttatttatttatttattttgagacagagtttcgctcttgttgcccaggctggagtgcaatggcctgatctcggctcactgcaacctctgcctccygggttcaagcgattctgctgcctcagcctcccgagtagctgaaattacaggtgcccgccaccacgcctggctaattgagactgagtaatttataaagaaaagaggtgtaattggctcatgtttctacaggctgtacaagcatggcaccagcatctgctcagcttctggtgaggcctcagggagcttacaatcatggtggaaggcaaagggggagcaggcatgtcacacggcaagagtgggaacaagggagaggtcccaggctcttttaaacaaccagatctcccgtgaactaagtgaaaactcacttatcaccaaggggatgttgccaaaccattcatgag

SEQ ID NO: 88200 - DNA, 2322 bp, Homo sapiens
atccgtgaatgaatatttgtgaagtgtttagagcagtgcctggtacatggtaagcaataagtattagcgttaggtttaaaatcatgacaaacaacgccatgtgccatgatgcatggatacacacatatatacatgatgaaactataaagccactgsaggccgggcacggtggctcacacctataatcccagcactttgggaggccgaggtaggtggatcacctgaggtcaggagttcgaggccagcctggccaacatggtgaaaccccatctctactaaaaataaaaaattagccagttgcggtggtgggcacctgtaatcccagctactcgggaggctgaggaaggaaaatcgcttgaacccgggaggaggaggttgcagtgaactgagatctcgccattgcactccagcctgggtaacaaagtgatacaccgtctcgaaaaaagaaaaaaaaaaaaccactgcatagaaatgataacacaccaaactcaggctgatggtttccttcgcggcagaacagaaggagatacaatcaggcagggatagacagggggcttcagttgtatctgtacttttttacttaaaaataattgtgaacaatcatgatagtgttttatttcctgtggcatctttttcaaacacctcctccccgcaccccagctctggcacccagatttggtagattggcccggtttcctctccctggcatggtggtggagaatgggatcagaatttggagccggcagagctgggtgtgggtcctgctgctgccatgtcctcagtgagcaaggccatcttgccttagagttctggggatgatccaagatcacctttgggggctgctctgaggatttagtgagtggagagttttgtgaactgggaggggcttgcaaaggttatctcattccactgcgggctgcacgcgtggcaactggcaagaacaagtgaggctgagtggctgtcacaccacagagagtcatggggactgtggtttgaggagggcgtgccctgtctgaaggggtggctgctcctcagcccagctaataggtgccaggaggcactctgggctcagtgatagctcaagggaagccaaccacctggatttttgtgggaacatttccctggcttttgctctggtctaacaaagcacatgtaggccagtggcacccatggccacctccaagagactctagagggacacagtgctgtgtacccttcctcaagccccctcggcagcacctccctgggccctgcagtgccaaggtcctcagaccatgacctttatccccgcccccaccccacccccagcgaaggggagtgggatttctactggtgtgacgtcagctggctccgggagaacttcgaccacacctacatggatgaacatgtgcggatcagtcacttccggaaccactatgaggtgagctgggcaggcgggagggactgtgccaaccaactcatgtcactgggtgtggccatgagctggagctggtacaaggatcagaaaagtgtattagaatgtgggatgcaacgccgagtgggaagtctgcgggctagacctatggagagccaaatggtttcagggtatagggatccaaggcctgaggactggaggtcacaggctggttggagtttcagcaccaagatttgaggagcaagatggtttgagggtgcagggtctgaagggagaggatgcatgaatgattatggtgatttcagggtggaggcaagttgagaagtttggggtctaaagatgggaaggaggtctagaagggacaggactggaggaggcagtggtgggagatttttaaaggttagtgtagcttagcggttgaaagcatgatttttttttttttttttttttttttttgagacagagtcttgctcttgtccctcaggctggagtgcaatggcatgatctcggctcattgcaacctctgcctcctgggttcaagtgattcttctgcctcagcctcccaagtagctgagtagctgagattacaggtgctcaccaccatgcccggctaatttttgtatttttgttagagatggggtttcatcatgttagccaggatggtctcgaactcctgaccttgtgatccgcccaccttggcctcccaaagtgctaggattacaggcgtgagccactgcgcccggccaaaagcatgaattttggagtcaagacaggccctggtcaaatcctggggcagtgcagcaccttcgttggatagctctgagcaattgacttaatctttctaagccccagtttcctcatctgtgaagtggggataattcttgactagcaagctctttctgggtcaa

SEQ ID NO: 88201 - DNA, 2322 bp, Homo sapiens
atccgtgaatgaatatttgtgaagtgtttagagcagtgcctggtacatggtaagcaataagtattagcgttaggtttaaaatcatgacaaacaacgccatgtgccatgatgcatggatacacacatatatacatgatgaaactataaagccactgcrggccgggcacggtggctcacacctataatcccagcactttgggaggccgaggtaggtggatcacctgaggtcaggagttcgaggccagcctggccaacatggtgaaaccccatctctactaaaaataaaaaattagccagttgcggtggtgggcacctgtaatcccagctactcgggaggctgaggaaggaaaatcgcttgaacccgggaggaggaggttgcagtgaactgagatctcgccattgcactccagcctgggtaacaaagtgatacaccgtctcgaaaaaagaaaaaaaaaaaaccactgcatagaaatgataacacaccaaactcaggctgatggtttccttcgcggcagaacagaaggagatacaatcaggcagggatagacagggggcttcagttgtatctgtacttttttacttaaaaataattgtgaacaatcatgatagtgttttatttcctgtggcatctttttcaaacacctcctccccgcaccccagctctggcacccagatttggtagattggcccggtttcctctccctggcatggtggtggagaatgggatcagaatttggagccggcagagctgggtgtgggtcctgctgctgccatgtcctcagtgagcaaggccatcttgccttagagttctggggatgatccaagatcacctttgggggctgctctgaggatttagtgagtggagagttttgtgaactgggaggggcttgcaaaggttatctcattccactgcgggctgcacgcgtggcaactggcaagaacaagtgaggctgagtggctgtcacaccacagagagtcatggggactgtggtttgaggagggcgtgccctgtctgaaggggtggctgctcctcagcccagctaataggtgccaggaggcactctgggctcagtgatagctcaagggaagccaaccacctggatttttgtgggaacatttccctggcttttgctctggtctaacaaagcacatgtaggccagtggcacccatggccacctccaagagactctagagggacacagtgctgtgtacccttcctcaagccccctcggcagcacctccctgggccctgcagtgccaaggtcctcagaccatgacctttatccccgcccccaccccacccccagcgaaggggagtgggatttctactggtgtgacgtcagctggctccgggagaacttcgaccacacctacatggatgaacatgtgcggatcagtcacttccggaaccactatgaggtgagctgggcaggcgggagggactgtgccaaccaactcatgtcactgggtgtggccatgagctggagctggtacaaggatcagaaaagtgtattagaatgtgggatgcaacgccgagtgggaagtctgcgggctagacctatggagagccaaatggtttcagggtatagggatccaaggcctgaggactggaggtcacaggctggttggagtttcagcaccaagatttgaggagcaagatggtttgagggtgcagggtctgaagggagaggatgcatgaatgattatggtgatttcagggtggaggcaagttgagaagtttggggtctaaagatgggaaggaggtctagaagggacaggactggaggaggcagtggtgggagatttttaaaggttagtgtagcttagcggttgaaagcatgatttttttttttttttttttttttttttgagacagagtcttgctcttgtccctcaggctggagtgcaatggcatgatctcggctcattgcaacctctgcctcctgggttcaagtgattcttctgcctcagcctcccaagtagctgagtagctgagattacaggtgctcaccaccatgcccggctaatttttgtatttttgttagagatggggtttcatcatgttagccaggatggtctcgaactcctgaccttgtgatccgcccaccttggcctcccaaagtgctaggattacaggcgtgagccactgcgcccggccaaaagcatgaattttggagtcaagacaggccctggtcaaatcctggggcagtgcagcaccttcgttggatagctctgagcaattgacttaatctttctaagccccagtttcctcatctgtgaagtggggataattcttgactagcaagctctttctgggtcaa

SEQ ID NO: 88202 - DNA, 2322 bp, Homo sapiens
atccgtgaatgaatatttgtgaagtgtttagagcagtgcctggtacatggtaagcaataagtattagcgttaggtttaaaatcatgacaaacaacgccatgtgccatgatgcatggatacacacatatatacatgatgaaactataaagccactgcaggscgggcacggtggctcacacctataatcccagcactttgggaggccgaggtaggtggatcacctgaggtcaggagttcgaggccagcctggccaacatggtgaaaccccatctctactaaaaataaaaaattagccagttgcggtggtgggcacctgtaatcccagctactcgggaggctgaggaaggaaaatcgcttgaacccgggaggaggaggttgcagtgaactgagatctcgccattgcactccagcctgggtaacaaagtgatacaccgtctcgaaaaaagaaaaaaaaaaaaccactgcatagaaatgataacacaccaaactcaggctgatggtttccttcgcggcagaacagaaggagatacaatcaggcagggatagacagggggcttcagttgtatctgtacttttttacttaaaaataattgtgaacaatcatgatagtgttttatttcctgtggcatctttttcaaacacctcctccccgcaccccagctctggcacccagatttggtagattggcccggtttcctctccctggcatggtggtggagaatgggatcagaatttggagccggcagagctgggtgtgggtcctgctgctgccatgtcctcagtgagcaaggccatcttgccttagagttctggggatgatccaagatcacctttgggggctgctctgaggatttagtgagtggagagttttgtgaactgggaggggcttgcaaaggttatctcattccactgcgggctgcacgcgtggcaactggcaagaacaagtgaggctgagtggctgtcacaccacagagagtcatggggactgtggtttgaggagggcgtgccctgtctgaaggggtggctgctcctcagcccagctaataggtgccaggaggcactctgggctcagtgatagctcaagggaagccaaccacctggatttttgtgggaacatttccctggcttttgctctggtctaacaaagcacatgtaggccagtggcacccatggccacctccaagagactctagagggacacagtgctgtgtacccttcctcaagccccctcggcagcacctccctgggccctgcagtgccaaggtcctcagaccatgacctttatccccgcccccaccccacccccagcgaaggggagtgggatttctactggtgtgacgtcagctggctccgggagaacttcgaccacacctacatggatgaacatgtgcggatcagtcacttccggaaccactatgaggtgagctgggcaggcgggagggactgtgccaaccaactcatgtcactgggtgtggccatgagctggagctggtacaaggatcagaaaagtgtattagaatgtgggatgcaacgccgagtgggaagtctgcgggctagacctatggagagccaaatggtttcagggtatagggatccaaggcctgaggactggaggtcacaggctggttggagtttcagcaccaagatttgaggagcaagatggtttgagggtgcagggtctgaagggagaggatgcatgaatgattatggtgatttcagggtggaggcaagttgagaagtttggggtctaaagatgggaaggaggtctagaagggacaggactggaggaggcagtggtgggagatttttaaaggttagtgtagcttagcggttgaaagcatgatttttttttttttttttttttttttttgagacagagtcttgctcttgtccctcaggctggagtgcaatggcatgatctcggctcattgcaacctctgcctcctgggttcaagtgattcttctgcctcagcctcccaagtagctgagtagctgagattacaggtgctcaccaccatgcccggctaatttttgtatttttgttagagatggggtttcatcatgttagccaggatggtctcgaactcctgaccttgtgatccgcccaccttggcctcccaaagtgctaggattacaggcgtgagccactgcgcccggccaaaagcatgaattttggagtcaagacaggccctggtcaaatcctggggcagtgcagcaccttcgttggatagctctgagcaattgacttaatctttctaagccccagtttcctcatctgtgaagtggggataattcttgactagcaagctctttctgggtcaa

SEQ ID NO: 88203 - DNA, 850 bp, Homo sapiens
cctttgccatggaactgaccactcaatctctactctcagccccccatatgcctatttaaacttgtcacagttcctgtgacattttattataccttgcttggctgcataaatagggattttgtcttctttgtctttgtagcccaaattcccaagacagttcctggaactgtcaggcacttaatgagggaatgaatggatgagttggtggcagagtgtggctggagtaagtacaaatagaacaaaatacgataacaataatatagtcatgtttctcaagtggctcgtgtgtattaggtaccatggacatggcttatatttattttgaatttaatggtcacaatagctctgtgaagtagatatagctattcttgttttataggggaggaaactgaggcattgagaagtgaagtaatttcctacagtttcacagctataaaaaggcagggctgtcccctgaacctaggcataygattatggggactgtctgggaactactgcttgagtcatgagaatgtagcgttggccttgctgagaaattcaaatgctgttcctgtcctttctactcttcttttaattggttttcaagggtgattacatgtgtggggtggccatgagtatttctcctccatgtggagatactgatactagaagagttcaagtgaattgataacataggtgaagccactaaaaaatgctttggccaagtcactgaatttgtgtgatcccaatcatttgtgataaggtcataatacttacatttaaggtatgcacaatgtctgctatgtggctgtgaatgaatgattttgcggtttcatcataaggtaaagcttggctgagagaagacagatct

SEQ ID NO: 88204 - DNA, 619 bp, Homo sapiens
tcccttccttacacactgtacttttgactgtgttggcttactcctggctaaagtgttgtggctcaggaaaattcccttgggaayccttgctttccattatggtttaagaaaatgttgtcatatttgagtcaaaatgttgaatagaaatttggaaatattgacccagggaatggcctacttgtttatttacgcttcccccacaacacatataccttaccccccgccaaccactagattaaaaaggcagcaagtctttcttctcaagtctttccagatagtctggtatacagttggttgttcaagggttatttttgatgaattaatgaatgctttgtggcctgaatcaaagaaactttgaacactctctccctgctatactttttgctcaggggctcttgaatggcctgtggataagtcgatgcagtggtgtcctcacagtggctctgtccatacccagtctcccaaaagacaatttttctctactctaacagttttttttaagagttgagatataattcacataccacaaaattcaaccttttaaagtacacaatctagtggttttagtatattcacaaggatgtgcaaccatctaattccactaatccccaaatatttt

SEQ ID NO: 88205 - DNA, 772 bp, Homo sapiens
cattctttcacagcctatgctctgggaagygcatatccattgagaaggatttgtgctggtaactgttttctctttttcctcttcttcttcctccacatcctctcccttatgttattattatgtttgcaaagctttatccccttcatatactctctgtccttctctgtaccttataaagtcaacctccatagatcccatcaactggctcccttgctattgtctccaaattgggattggcccgtgggagcttccagctggtgattggaaggaaggagtagggagaggtcagagtgtttcttccccactcccccttggtgtcctgtttctggcaatagcttcctcccattgtgactacagctctcacctgtaggacccttctccaataatacatactccgattattcttgcagcctagggatggtaataactttgcattgcaaatcctgagtaccccttgcttattcccttaactttggcccctgaacctcctatattctggtgatgctgaggatctcacctgagagtgctgctccaggtttgcctgatggtgggcgtgggcagtgggagagaaatcacagcattgacggtcttctcttctccaactcagcaccctgaatcgagttctggtcttgagtgctaattggtctgctctcctgctgaaaagtggccaaagtgaatttgtttgcaatgtgaagggaaccttgagctctggaggcccagtataatgccagtgcttaatggctctgtggagttctgctggatacaaaggagg

SEQ ID NO: 88206 - DNA, 772 bp, Homo sapiens
cattctttcacagcctatgctctgggaagtgcatatccattgagaaggatttgtgctggtaactgttttctctttttcctcttcttcttcctccacatcctctcccttatgttattattatgtttgcaaagctttatccccttcatatactctctgtccttctctgtaccttataaagtcaacctccatagatcccatcaactggctcccttgctattgtctccaaattgggattggcccgtgggagcttccagctggtgattggarggaaggagtagggagaggtcagagtgtttcttccccactcccccttggtgtcctgtttctggcaatagcttcctcccattgtgactacagctctcacctgtaggacccttctccaataatacatactccgattattcttgcagcctagggatggtaataactttgcattgcaaatcctgagtaccccttgcttattcccttaactttggcccctgaacctcctatattctggtgatgctgaggatctcacctgagagtgctgctccaggtttgcctgatggtgggcgtgggcagtgggagagaaatcacagcattgacggtcttctcttctccaactcagcaccctgaatcgagttctggtcttgagtgctaattggtctgctctcctgctgaaaagtggccaaagtgaatttgtttgcaatgtgaagggaaccttgagctctggaggcccagtataatgccagtgcttaatggctctgtggagttctgctggatacaaaggagg

SEQ ID NO: 88207 - DNA, 1378 bp, Homo sapiens
gtttatatacatttctaattcgacccttgctttatacagaccttgggttgtatattcctatccttytgtggacagtgaaacccctgccatctgttcctgactctgaaagcatcctgaaccattgcagtgtcagctcatacatttcctgcctttatcttagcatcttgagatatatttttctttctttcaagagcttctatgaatttttacataaaaatttatatcttggattttactcaggatttctgtcagtttgttatgggagggagtacttttttcagaactcctggtatgtcatttttctagaaattcaaaatctcttcattttatttttaacttttataattatattatctctgcaatttttcttgatcttaaattacctttgtgtctgactgcagtagttttagtagtttgattcttttccctaatacttttttgcccttttacttatttaatctgattcttctgaatgcccattttttttttaattgaagtatctctttttagattcagggtcttttgactcttgacaaaacataaaaccctttagagcagtgcttctcaacctgctgtctagaggctaccagcattagaaccatcttgattctttcttagaattgaaaattccctggcgttcctctcattcaagatgatcaaaatcatggaggcaggatcctagaatctatatttcaaacaaagattctatacacttggagaattgctattaaatgaaaagatcaatcttatccagtatcagttcatagttaaataaggtttaagttttcttatttgtgtttctacatgtttttacacagtcctctagcccgaaagtaggaagacaaatgtccaggttttctctgaattccagttcccaacttggacatccagaagcctctggtgagtcaggaaggagctaaggctagaaaccctggtggatctggtggtggcacagaggaggccttcatcagtgggacatccaacatcttctccacatttgacatggtgtccagaattgtcccattcttttttttttttttctgagatggagtcttgctctgttgcccaggcttcagtagagtggcacaatctcagctcactgcaacctctgcctcccgggttcaaatgattgctgggcctcagcctcctgagtagctgggattacaggagtacaccaccatgctcggctaatttttgtatttttagtaatgatggagttttgctatgttggccagtctggtcttgaaattctgacttcaagtgattctcccaccttggcctcccaaaacgctagattacaggcatgagtgagccaccgtacctggcccaggagtgtcccattctcaggccttacatactagtaggtcctttatctgcc

SEQ ID NO: 88208 - DNA, 1378 bp, Homo sapiens
gtttatatacatttctaattcgacccttgctttatacagaccttgggttgtatattcctatccttctgtggacagtgaaacccctgccatctgttcctgactctgaaagcatcctgaaccattgcagtgtcagctcatacatttcctgcctttatcttagcatcttgagatatatttttctttctttcaagagcttctatgaatttttamataaaaatttatatcttggattttactcaggatttctgtcagtttgttatgggagggagtacttttttcagaactcctggtatgtcatttttctagaaattcaaaatctcttcattttatttttaacttttataattatattatctctgcaatttttcttgatcttaaattacctttgtgtctgactgcagtagttttagtagtttgattcttttccctaatacttttttgcccttttacttatttaatctgattcttctgaatgcccattttttttttaattgaagtatctctttttagattcagggtcttttgactcttgacaaaacataaaaccctttagagcagtgcttctcaacctgctgtctagaggctaccagcattagaaccatcttgattctttcttagaattgaaaattccctggcgttcctctcattcaagatgatcaaaatcatggaggcaggatcctagaatctatatttcaaacaaagattctatacacttggagaattgctattaaatgaaaagatcaatcttatccagtatcagttcatagttaaataaggtttaagttttcttatttgtgtttctacatgtttttacacagtcctctagcccgaaagtaggaagacaaatgtccaggttttctctgaattccagttcccaacttggacatccagaagcctctggtgagtcaggaaggagctaaggctagaaaccctggtggatctggtggtggcacagaggaggccttcatcagtgggacatccaacatcttctccacatttgacatggtgtccagaattgtcccattcttttttttttttttctgagatggagtcttgctctgttgcccaggcttcagtagagtggcacaatctcagctcactgcaacctctgcctcccgggttcaaatgattgctgggcctcagcctcctgagtagctgggattacaggagtacaccaccatgctcggctaatttttgtatttttagtaatgatggagttttgctatgttggccagtctggtcttgaaattctgacttcaagtgattctcccaccttggcctcccaaaacgctagattacaggcatgagtgagccaccgtacctggcccaggagtgtcccattctcaggccttacatactagtaggtcctttatctgcc

SEQ ID NO: 88209 - DNA, 841 bp, Homo sapiens
aagtttaacttgatgggttcaataatttaaaaattttaaagaagcaatgggttagtaaatttgtagttattttctaggtaaaatagtaaatgatattattttaagattaaataaaattttcacattgtttcatttatactgaaaaaaaggatagtagaatttcaaaagactgaaaaaatttatctataggtgggttgaaaaataaatattacagctatttaatttcccaatttctttttttgtgtgtgtatttttacttcttttctcatggcatcaacatttctgagccttttgctgctagttgtctaaaagccatttggcctttcagctcaaatcacaaaccccaatctctaacttccttgaggttgcaacttgagcacctgaaaatgtggccagcttcaagccagagtgaaaatgtttttttctttcatcccttttgacagcatcccaactaacaccactgcaagagggaaatgtcaaattgaggtgaacacccagctcaggtctgatctctgagccatactgcctcgtttgaatagggaaactaggaaaggaggggtgataactcagccatttctaaaaaaggaaaatgataacaacctttggagggccagccatagaaaacagccctgtgagtgcatgtcaaagcagccaatctgcttctgcttaggcagatgtcatgggcctggatcaaaggaaggcctgctccgtgccatgtgctcctatgaaagagaaagtgggtggaaactggaggcttttgttggtcttyggtgttttcttaacaagagaacagcctcctagagaaacagcgaaagagccaggtttctgcaggagaggatcc

SEQ ID NO: 88210 - DNA, 1312 bp, Homo sapiens
tcataacttgcattttacatcagcctgggcccatatcacaccgggaaaaggaaataaagtcatctgaataaaggatacatttctgcaagaagttctctgtccaaggagtcagtagaaggaaacactatgaatgacactgtattctaaattttgtcactgtcactttctcttccccccacaaggtcattttcttaattcaacaaacactgactgtgcatgcacctcctatattctagaccaacattagggttctaggtgcacagagatgacaaatgcagtatggttcttgttctcagtggctcattgtgtgggtgcagaaggagatgttcaggaggcattagataatccagtgccaaaagtgccacatttaaggtaccagggtacactgaagatatgcagraggaggagggactcttctgtggggatcaggaaactgtgactctcagactagttttgtatgggtcatgagttaaaaatgttttccaaattttatattgttgaaaaatactcaaaagtagaatcatatttcatgatacatggaaatcacatgaaattcaaatttcagtgtctatacagaaaatcttattggaccacagccatgctcattagtttacatatcatctatggctgctttcacacaccaccaccagggttgagtagttgcagcagaaagtgtataccacctgtaaggcagaaagtaagatatttactctctggccctctacaggaagtttgccgactcttgggttagtgcaatcaaggaggtctatctgtaaagagttgcctctgaactgggttttaaagcatgaaagggaattttccaggcagaaaaggaccagatgaaggtaactctggtagaagaaacagcatgtgcggaggcatacaggcaagaggcaggaggcaagaaaggaatagtatgcataaataataagtatttcaggctgggagaggtggcttacaccggtaatctcagagatttgggaggccaagataggaaggtcacttgaagctaggagttagagaccagactgggcaacaaagtgagaccccatcgataaaataaataaataaataaattagctgtttgggaggctgaagttagaggatcacttgagcccaggagttcaaggttgtagtaagctgtgaatgcaccactacattccagcttgggcagcagagggaaaccctatctcttacaaaaaaaaaaaaaaaatgttggtgcatttgggacattttgtttggagtgaggtaggaagcaagtatgaaaaactggattttcatgctaaggaatttattcttcatttcttaaaca

SEQ ID NO: 88211 - DNA, 2060 bp, Homo sapiens
atgcacttcttctgacaggcaaaaaagcagcacttctggtattccttgcagtcaaaatctgtgttacatgagtccggaagttcagtggtacaggtgagcctctctttgggacataaccctggtttgtctgcaagaaagaaatgtccaaactcacattctttcggaatttcagctctttttctcctatggcaaaggtgtgtagtgaaattctctcagccctatcctctaccttcgattcttagttcttgctctgcttatattcaggggctagttctgtttctcagcactcagattcattcaaatggatctgaatcaggaatttgtgtccaagaagaactgaaggagaagcatgttggataccagggaaaggggttagaaagggaccaaggccctttccctaaattcaaaagattttctcycttcttgaaacctaatattttaatgcttaattcctttgtctccagttgataaaagaaattagtaaagactggtgggaacatcatggaagtagaggtcaggagggctgatttgacccttgactcctggtaaactcaagaccaatctgaactcattgtatgatttttaatttacctctaaggagtaagaaacagtggagtggaagaagcattgtagtcaggcagacctggctcgggagcctggctccaacactaaccaactaaataatcttgggaaagtatttcccttcatctgagttatattttccatctttaaaatgagaatgacaattcctgccttacaggctgattataagagttaaatggggtgatgtctataatgcctggggtaagaccttggcagatgtggcgttgctttctaccttttatttttatttttatttttttactaaaaactagaagaggcaaggggaaaaaaactacagcacccagtgtttccagtcagtctcccatccaagtactaaccaggtctgatcctgcttaccttttgagatcagacaagatcaggaattttcagggtggtatggccatgcttccttcctttttaaggctagacatggcttcctgatttcagtgcttgtggtaggtagaatctaaagttgcaccctcaagattcccatcttctgattattgaatcaaacactaagctaggcaatgctgtgaagggattttgcagaaaaattaaagacccaagttagttgactttaagattagagattatctctaattttaaggtctaatctctggcccagacctagtcaattaggtccttgaaaagcagagttttcttctggttggtagagaagaattgattagagagattcaaatgatgagaaggatccaacttgctattcgtagctttgaagatggttgaggccaagtgccaaggaataagggtggcatctagaagtgacagccagtaaaggagcctcagtcctacaactccaaggaaatgactctactacaaccagggagcttgggagaggacagtgcatcccaaatgagaactacagccctggctgacatttcaatcttggcctggtaagacccggagcaaagaacccagatgcacaatgccagacttctgacccacagataatttgttacgtagcaaaggatagctcatacagcgcttaatgtgtctccatgattctaaactgagcatccctccagtggaatctggccagagaggcatgatcctttcagatactactgagtcttggaactgtagaactttggaatggaaagaactctatttatcattggtaccaaacttctgatttcatagatcaaaagtaatgaggtcagataggataatacaatgcattaggggcaagtctgggacttacaatccaggactcacttcaggagccccacgtcttccctgaggactggccactgagactttgagtactttccaacaatacttcttgtcattaatgaccccctccaggaatggactgaagctaagaagagtatgtggttcctaatttggagtgtacatcaaaatcatctatgcatctttcagaaaatatagactctaggctgaatcagaatctctagaaagtgcatccttgggactcc

SEQ ID NO: 88212 - DNA, 2060 bp, Homo sapiens
atgcacttcttctgacaggcaaaaaagcagcacttctggtattccttgcagtcaaaatctgtgttacatgagtccggaagttcagtggtacaggtgagcctctctttgggacataaccctggtttgtctgcaagaaagaaatgtccaaactcacattctttcggaatttcagctctttttctcctatggcaaaggtgtgtagtgaaattctctcagccctatcctctaccttcgattcttagttcttgctctgcttatattcaggggctagttctgtttctcagcactcagattcattcaaatggatctgaatcaggaatttgtgtccaagaagaactgaaggagaagcatgttggataccagggaaaggggttagaaagggaccaaggccctttccctaaattcaaaagattttctctcttcttgaaacctaatattttaatgcttaattcctttgtctccagttgataaaagaaattagtaaagactggtgggaacatcatggaagtagaggtcaggagggctgatttgacccttgactcctggtaaactcaagaccaatctgaactcattgtatgatttttaatttacctctaaggagtaagaaacagtggagtggaagaagcattgtagtcaggcagacctggctcgggagcctggctccaacactaaccaactaaataatcttgggaaagtatttcccttcatctgagttatattttccatctttaaaatgagaatgacaattcctgccttacaggctgattataagagttaaatggggtgatgtctataatgcctggggtaagaccttggcagatgtggcgttgctttctaccttttatttttatttttatttttttactaaaaactagaagaggcaaggggaaaaaaactacagcacccagtgtttccagtcagtctcccatccaagtactaaccaggtctgatcctgcttaccttttgagatcagacaagatcaggaattttcagggtggtatggccatgcttccttcctttttaaggctagacatggcttcctgatttcagtgcttgtggtaggtagaatctaaagttgcaccctcaagattcccatcytctgattattgaatcaaacactaagctaggcaatgctgtgaagggattttgcagaaaaattaaagacccaagttagttgactttaagattagagattatctctaattttaaggtctaatctctggcccagacctagtcaattaggtccttgaaaagcagagttttcttctggttggtagagaagaattgattagagagattcaaatgatgagaaggatccaacttgctattcgtagctttgaagatggttgaggccaagtgccaaggaataagggtggcatctagaagtgacagccagtaaaggagcctcagtcctacaactccaaggaaatgactctactacaaccagggagcttgggagaggacagtgcatcccaaatgagaactacagccctggctgacatttcaatcttggcctggtaagacccggagcaaagaacccagatgcacaatgccagacttctgacccacagataatttgttacgtagcaaaggatagctcatacagcgcttaatgtgtctccatgattctaaactgagcatccctccagtggaatctggccagagaggcatgatcctttcagatactactgagtcttggaactgtagaactttggaatggaaagaactctatttatcattggtaccaaacttctgatttcatagatcaaaagtaatgaggtcagataggataatacaatgcattaggggcaagtctgggacttacaatccaggactcacttcaggagccccacgtcttccctgaggactggccactgagactttgagtactttccaacaatacttcttgtcattaatgaccccctccaggaatggactgaagctaagaagagtatgtggttcctaatttggagtgtacatcaaaatcatctatgcatctttcagaaaatatagactctaggctgaatcagaatctctagaaagtgcatccttgggactcc

SEQ ID NO: 88213 - DNA, 2060 bp, Homo sapiens
atgcacttcttctgacaggcaaaaaagcagcacttctggtattccttgcagtcaaaatctgtgttacatgagtccggaagttcagtggtacaggtgagcctctctttgggacataaccctggtttgtctgcaagaaagaaatgtccaaactcacattctttcggaatttcagctctttttctcctatggcaaaggtgtgtagtgaaattctctcagccctatcctctaccttcgattcttagttcttgctctgcttatattcaggggctagttctgtttctcagcactcagattcattcaaatggatctgaatcaggaatttgtgtccaagaagaactgaaggagaagcatgttggataccagggaaaggggttagaaagggaccaaggccctttccctaaattcaaaagattttctctcttcttgaaacctaatattttaatgcttaattcctttgtctccagttgataaaagaaattagtaaagactggtgggaacatcatggaagtagaggtcaggagggctgatttgacccttgactcctggtaaactcaagaccaatctgaactcattgtatgatttttaatttacctctaaggagtaagaaacagtggagtggaagaagcattgtagtcaggcagacctggctcgggagcctggctccaacactaaccaactaaataatcttgggaaagtatttcccttcatctgagttatattttccatctttaaaatgagaatgacaattcctgccttacaggctgattataagagttaaatggggtgatgtctataatgcctggggtaagaccttggcagatgtggcgttgctttctaccttttatttttatttttatttttttactaaaaactagaagaggcaaggggaaaaaaactacagcacccagtgtttccagtcagtctcccatccaagtactaaccaggtctgatcctgcttaccttttgagatcagacaagatcaggaattttcagggtggtatggccatgcttccttcctttttaaggctagacatggcttcctgatttcagtgcttgtggtaggtagaatctaaagttgcaccctcaagattcccatcttckgattattgaatcaaacactaagctaggcaatgctgtgaagggattttgcagaaaaattaaagacccaagttagttgactttaagattagagattatctctaattttaaggtctaatctctggcccagacctagtcaattaggtccttgaaaagcagagttttcttctggttggtagagaagaattgattagagagattcaaatgatgagaaggatccaacttgctattcgtagctttgaagatggttgaggccaagtgccaaggaataagggtggcatctagaagtgacagccagtaaaggagcctcagtcctacaactccaaggaaatgactctactacaaccagggagcttgggagaggacagtgcatcccaaatgagaactacagccctggctgacatttcaatcttggcctggtaagacccggagcaaagaacccagatgcacaatgccagacttctgacccacagataatttgttacgtagcaaaggatagctcatacagcgcttaatgtgtctccatgattctaaactgagcatccctccagtggaatctggccagagaggcatgatcctttcagatactactgagtcttggaactgtagaactttggaatggaaagaactctatttatcattggtaccaaacttctgatttcatagatcaaaagtaatgaggtcagataggataatacaatgcattaggggcaagtctgggacttacaatccaggactcacttcaggagccccacgtcttccctgaggactggccactgagactttgagtactttccaacaatacttcttgtcattaatgaccccctccaggaatggactgaagctaagaagagtatgtggttcctaatttggagtgtacatcaaaatcatctatgcatctttcagaaaatatagactctaggctgaatcagaatctctagaaagtgcatccttgggactcc

SEQ ID NO: 88214 - DNA, 2060 bp, Homo sapiens
atgcacttcttctgacaggcaaaaaagcagcacttctggtattccttgcagtcaaaatctgtgttacatgagtccggaagttcagtggtacaggtgagcctctctttgggacataaccctggtttgtctgcaagaaagaaatgtccaaactcacattctttcggaatttcagctctttttctcctatggcaaaggtgtgtagtgaaattctctcagccctatcctctaccttcgattcttagttcttgctctgcttatattcaggggctagttctgtttctcagcactcagattcattcaaatggatctgaatcaggaatttgtgtccaagaagaactgaaggagaagcatgttggataccagggaaaggggttagaaagggaccaaggccctttccctaaattcaaaagattttctctcttcttgaaacctaatattttaatgcttaattcctttgtctccagttgataaaagaaattagtaaagactggtgggaacatcatggaagtagaggtcaggagggctgatttgacccttgactcctggtaaactcaagaccaatctgaactcattgtatgatttttaatttacctctaaggagtaagaaacagtggagtggaagaagcattgtagtcaggcagacctggctcgggagcctggctccaacactaaccaactaaataatcttgggaaagtatttcccttcatctgagttatattttccatctttaaaatgagaatgacaattcctgccttacaggctgattataagagttaaatggggtgatgtctataatgcctggggtaagaccttggcagatgtggcgttgctttctaccttttatttttatttttatttttttactaaaaactagaagaggcaaggggaaaaaaactacagcacccagtgtttccagtcagtctcccatccaagtactaaccaggtctgatcctgcttaccttttgagatcagacaagatcaggaattttcagggtggtatggccatgcttccttcctttttaaggctagacatggcttcctgatttcagtgcttgtggtaggtagaatctaaagttgcaccctcaagattcccatcttctgattattgaatcaaacactaagctaggcaatgctgtgaagggattttgcagaaaaattaaagacccaagttagttgactttaagattagagattatctctaattttaaggtctaatctctggcccagacctagtcaattaggtccttgaaaagcrgagttttcttctggttggtagagaagaattgattagagagattcaaatgatgagaaggatccaacttgctattcgtagctttgaagatggttgaggccaagtgccaaggaataagggtggcatctagaagtgacagccagtaaaggagcctcagtcctacaactccaaggaaatgactctactacaaccagggagcttgggagaggacagtgcatcccaaatgagaactacagccctggctgacatttcaatcttggcctggtaagacccggagcaaagaacccagatgcacaatgccagacttctgacccacagataatttgttacgtagcaaaggatagctcatacagcgcttaatgtgtctccatgattctaaactgagcatccctccagtggaatctggccagagaggcatgatcctttcagatactactgagtcttggaactgtagaactttggaatggaaagaactctatttatcattggtaccaaacttctgatttcatagatcaaaagtaatgaggtcagataggataatacaatgcattaggggcaagtctgggacttacaatccaggactcacttcaggagccccacgtcttccctgaggactggccactgagactttgagtactttccaacaatacttcttgtcattaatgaccccctccaggaatggactgaagctaagaagagtatgtggttcctaatttggagtgtacatcaaaatcatctatgcatctttcagaaaatatagactctaggctgaatcagaatctctagaaagtgcatccttgggactcc

SEQ ID NO: 88215 - DNA, 621 bp, Homo sapiens
ctgggcacactctactggatcttggtgcaccagaagcaagaacaatctcagatgaccttgggttaacagagaaattccttttattccttctgtgactatccaagcctaggatcttatgatactcccagacaaccagatgaacagatgagcttcccccgcctactcaagcccccatttcccatatgtgtcttcatgatccttatgtattttttattttaaggtgtgaaaaactaataatcctttactgtattaactcttagagtgcatgcatttcaaaaatgcaagaggtgggtagagggagaaagaggaagcaagagacagagaaaacatctttatgccaaaatatacatctgtattggtggaacttccgatactgagaaagctatgaaggtatcttggaatagagtatcttccagagttcctgaagccataccatgtggctgcctaaaagtaaagacttgtgacaatttatctccccaamcttttttgttgggggagttctaatcatgtatcctcttcaaattttacaatagtgcctatactctctggtcatggaaattatgaccccaaacatagtgatcttgattttgggcctcgctcaatcccttataacagcatatc

SEQ ID NO: 88216 - DNA, 621 bp, Homo sapiens
ctgggcacactctactggatcttggtgcaccagaagcaagaacaatctcagatgaccttgggttaacagagaaattccttttattccttctgtgactatccaagcctaggatcttatgatactcccagacaaccagatgaacagatgagcttcccccgcctactcaagcccccatttcccatatgtgtcttcatgatccttatgtattttttattttaaggtgtgaaaaactaataatcctttactgtattaactcttagagtgcatgcatttcaaaaatgcaagaggtgggtagagggagaaagaggaagcaagagacagagaaaacatctttatgccaaaatatacatctgtattggtggaacttccgatactgagaaagctatgaaggtatcttggaatagagtatcttccagagttcctgaagccataccatgtggctgcctaaaagtaaagacttgtgacaatttatctccccaaccttttttgttgggggagttctaatcatgtatcctcttcaaattttacaatagtgcctatactctctggtcatggaaatyatgaccccaaacatagtgatcttgattttgggcctcgctcaatcccttataacagcatatc

SEQ ID NO: 88217 - DNA, 725 bp, Homo sapiens
catattaggaaaagcgttactatcccgttgagcagctagagagtcaaatgaagaaggaatttggaacataatatcrgaagtaatttttcatatccaaatcttaatttttacaaattggcttcaacaatctctatcctttcccactagtttcaatgccacaggctcacataatcattagcagagctccgtcttggaaatatattcactaattatctgagattatctgtatttgaaattcattatcagattgatagggagaataaggaaacaaaccaattttttaaatgggcaagaggcttgagcagatacttccacaaagaagctatccggatggcagatgagtgcacaaaaggatgctcggcttccttagtcattaggggatgcaaattaaaaccaccaccattagaagagcaaagacacactacaaagctgacataccaagtgctggcaaggacaggaagccacagaaaccctcacgcattgtgggtggagatgcaacaatggcacatcgctttggaaagcagcttggtcatttcttataaagtatgcaaggaagaacagctcataattctcaagagaaaataccgaagaaaatggtcaaggatgcggtttacatcctcacatgtctaaatattggcatttacagtacaagtaaaatatcagaagaagaaacttcagatgagaatacaaggcaggagtggggagtggaccctggtggccgccct

SEQ ID NO: 88218 - DNA, 637 bp, Homo sapiens
ctgaaggattaactggaagctccggcgagccctgcccacccatagttgaatggtattccttccactgagggcctccacgctgttcagagccaccccgaggtcctgtaaagattccaccctctgcgtcccttgcagtgcttggccaaatgctccagtgagccccgagcttcctgcctgtcttgcctgccgccctgcctcaggggggataggtgactcacacctcactaggccctggggagcaccaccaacattcatgtcactgtccccttctgcacaccctggcacctcggcaggccaggatgccggtctttgcacgttgtgccaggcagcttygtgtttctgtgttacgtcagcagcaagatcattcttagggtctcctggtccacggggctcatgtttctcgttttaggtaaattactacgaaagggaaattgcggcactgaaaaggaactttgagaaggagaggaaggacatggagcaggctcgcaggcgcgaggtcagcgtgctggagggtcagaaggccgacctggaggagctccacgagaagtctcaggaggtcatctggggcctgcaggagcagctgcaggacacagcccgcggccccgagcctgagcagatgggcctggcaccctgctgc

SEQ ID NO: 88219 - DNA, 1306 bp, Homo sapiens
acagggaacctacgcaaggatgcatgccaccaaaaagagggaataagtcaaaataggaatacacaggacacagaaaataggaaatttaacataagaggcaaagagaatcaccagggtggtggtatgcgaaagtcaatggaactacagagatctcgcacatggctgagaccatgaaggtattatgttcctaacacaaatggcttaaacacaagctgcatgactcttagattatctgagcaagaatgctgtttcctaaactgaaatacagaaattaaaaatctgcctgaattcaactgattctatatagtcttatacacttctatatgcaggtatacatgaagctggtaacagcactggcsttggctgggtgacatggctcatgcctgtaaccctagcacttttggaggctgaggcaggtggactgcttgagctcaggagtttgagactagcctgggcaacatagcgagaccttgtctctatttttaaaaataaaacaaaaactaaacagtagtggcctttagggcaagtgggttgtgggcccctagcaaagagatgaggagaatgacttttcaccattcacccttttatttttttgacttgtgtactacaagtagtacttgttcaacaatgaatatattccctaattcaaaaaagaatggaatgaaaaatatcatcacacgtaacaagaatgttttatgaaaattaaacatataaaactggatcccatacacatattaatgttatactataaaatgttatatttatatttatttatatacatgtgttatatttatatttatatatagttacagtgttatctaacactataaatgtgttaaagaggttatgatagaaaatgtttcttactgaaggttgcaaagaagtttgaaagcaataaaccaagaactttggtaaagacctgctttcctacaatactgagcatccactgggtcctgggcactcccagatctgagatgttcgtgccttgtatgtggaggtgcacatggaaccaaacctccccaccaggtgctggtattccaggtgcagtgtccattcatgtctgttctaggcccacctctgtaagcagtgttagggagggcctctggctttgtgtgagaaggccactacagggaaactttgaaaaaaaataaagatgacaaaacatcacccataattttaaggaatattattctaaaacaaaaaatattaataaaatcataggtttattccaatattttaaaatattttctgtaacattccactcagaaggtagataaccacaaagttcttccctaaggaagggtgc

SEQ ID NO: 88220 - DNA, 584 bp, Homo sapiens
ctactctggaggctgaggtaggagaatctcttgaacctgggaggtggaggttattgtcagccgaggttgcgctactgcactccagcctgggtgacagagcaagactccgtctcaaaaaattaaaaaaaaaaaaagaaaagaaaaaatgaatgaataaatgcagtgtttcttattcaatgctgttgactttaaaaaacagatttcttattagtttctgttgaaaacgaaacaatcttctgttttcatatgtcaaactcctttgtccatttgggaaaatcacttaaaaaaaaagagataaatccaactcctccattatcacaaggtttgaatttgtacaaaggatgagagaattgaggctacagctcagactattagtggaatttgtaaagggaraaaattaactgttcatcatatatatatatatatctacatatatatatatctctacatatatatatatatatatatatttgcagtaatgtcagtactagaagccttttgttcttatttaattgttgtagagtctgcctgacgaaagtgctgtgaagaagttgtcagttctataaaatcaaaggacttggatc

SEQ ID NO: 88221 - DNA, 555 bp, Homo sapiens
gggctatgacagcaaagaggaaacaaaagctgtagtgatgagtgttagacaattgatgagctgggagagaatttgttgatccaaatgcaatcttctcatccttactgtgttccagaaagttaataggaaagctgaagttcaaaaacagtctccaaaatttatttaaaaagcaatgaataaaaatatatatgtcaagaaataataaatactctgcagagtactaaaccatagtgtattagtrtgttctcacattgctataaggaaatacctgagactgggtaaattataaagaaaagagatgctgggcatggcggctcatgcctgtaatcccagcactttgggaggccaaagtgggcagatcacttgaggttaggagttcaagaccagcctggccaacatggtgaaaccccgtctctactaaaaatacaaaaattagccaggcctggtggcaggtgcctgtaatccctgctactcgggaggatgaggcaggagcatcacttgaacttggaaggaggaggttgcagtgagccaatatcatgccactatactccagcc

SEQ ID NO: 88222 - DNA, 769 bp, Homo sapiens
ctgcctcccaaatgctgaagaactagcacgttggctcagaagagaagtggagcctacgtgggcagagggtaaggagatggttctgctcagaatgaggtagaaccttctcatagaagaggcagagcaagcactgtgcaggcttctaggagacaagagagggagcgggtgagcataccatcactaatacatgccgctgcaagatcttccgcatcagatgggagttagatgagaggacacagcgtaggcgctcaacaagtatttgtcraaggattgacacattttctttgtaactggacaccaggcatgcacagagacaacttacagctggttagcagtggggaggtaggtgccagagacatggctgataccagtaaaccctggaatgatagagtaaaggtcatgtccagtgattttcatttcagctacgtggcactaaaactcatcctgtcaacatgtgtcctgactgaatccatcccagtttgcacatgcaggctggaaaccactatctgaggccacagcagcctccttgtcccatgaatgccacacacgggcctggcttgggcgtgagtcctgcaagttcatcctgtcagagggtgagaaacagagaagcaggcccacacgaccaggggtgactatgagaacacagggctgtgcaggtgcctggggcacacagaaggcagggccccatccctgaggtgccaaagacgtaggttagaactgtggatcagggctagagccaagcctaggggaaatctggacctccccatga

SEQ ID NO: 88223 - DNA, 977 bp, Homo sapiens
tgcatattttttagcagcttattaacatgacttatgacttttaaatatttgcataccaaattcataaractccgtttctactcctgccccagcctggcaattgctaagggcaggcctagtaagtgtgtaagtcattaataaaaagtaaaaataaaaatactttctttaaaagggggaaaaacattttctcgtttcaccttttagtaagctgattagaaaaagtgaacttcggggccaggcatggtggctcacacctataatcccagcgctttgggaggctgaggtgggaagatcacttgagaccaggaggtcaagcaatgtgcagcatagtgaggccctgtctctaaaaaaaattttttttttttaaattagacaggtgcggtggtgagtgcctgtagtcccaactacttgggaggctgaggcgagaggactgcttgagcccaggagttcaaggttacaatgagctatgatggtgctactgcactccagcctgggcaacagagtgagaccctgtttctaaagaaagaaaaaagtgaactttatttttatttcattttttctttgcatgtttttgaaagactcatgaggaatatgacgggtggtccacttggagaatgaggcctggtgtcagttcagagctgggtctggcttctcataaaagatagatattattgcttagtatgatgctaagaaaaagtgggcagttgccttaaagaaatatattaagtaacaaaattaagtaaatagaatattctagggccatggaagaataagaagcacaaggaatctgcctcctcacctaggcaacaattgaactgccagactctgtctgatataactattttgaaactctggagtctacctaaggcttgtaaatgccaagagaaggtttggatggtaaattgcaattaattttactaaattttagcttttagtgcagtagcaactacccattctccatggtaggaaactttgca

SEQ ID NO: 88224 - DNA, 977 bp, Homo sapiens
tgcatattttttagcagcttattaacatgacttatgacttttaaatatttgcataccaaattcataaamctccgtttctactcctgccccagcctggcaattgctaagggcaggcctagtaagtgtgtaagtcattaataaaaagtaaaaataaaaatactttctttaaaagggggaaaaacattttctcgtttcaccttttagtaagctgattagaaaaagtgaacttcggggccaggcatggtggctcacacctataatcccagcgctttgggaggctgaggtgggaagatcacttgagaccaggaggtcaagcaatgtgcagcatagtgaggccctgtctctaaaaaaaattttttttttttaaattagacaggtgcggtggtgagtgcctgtagtcccaactacttgggaggctgaggcgagaggactgcttgagcccaggagttcaaggttacaatgagctatgatggtgctactgcactccagcctgggcaacagagtgagaccctgtttctaaagaaagaaaaaagtgaactttatttttatttcattttttctttgcatgtttttgaaagactcatgaggaatatgacgggtggtccacttggagaatgaggcctggtgtcagttcagagctgggtctggcttctcataaaagatagatattattgcttagtatgatgctaagaaaaagtgggcagttgccttaaagaaatatattaagtaacaaaattaagtaaatagaatattctagggccatggaagaataagaagcacaaggaatctgcctcctcacctaggcaacaattgaactgccagactctgtctgatataactattttgaaactctggagtctacctaaggcttgtaaatgccaagagaaggtttggatggtaaattgcaattaattttactaaattttagcttttagtgcagtagcaactacccattctccatggtaggaaactttgca

SEQ ID NO: 88225 - DNA, 977 bp, Homo sapiens
tgcatattttttagcagcttattaacatgacttatgacttttaaatatttgcataccaaattcataaaactccgtttctactcctgccccagcctggcaattgctaagggcaggcctagtaagtgtgtaagtcattaataaaaagtaaaaataaaaatactttctttaaaagggggaaaaacattttctcgtttcaccttttagtaagctgattagaaaaagtgaacttcggggccaggcatggtggctcacacctataatcccagcgctttgggaggctgaggtgggaagatcacttgagaccaggaggtcaagcaatgtgcagcatagtgaggccctgtctctaaaaaaaattttttttttttaaattagacaggtgcggtggtgagtgcctgtagtcccaactacttgggaggctgaggmgagaggactgcttgagcccaggagttcaaggttacaatgagctatgatggtgctactgcactccagcctgggcaacagagtgagaccctgtttctaaagaaagaaaaaagtgaactttatttttatttcattttttctttgcatgtttttgaaagactcatgaggaatatgacgggtggtccacttggagaatgaggcctggtgtcagttcagagctgggtctggcttctcataaaagatagatattattgcttagtatgatgctaagaaaaagtgggcagttgccttaaagaaatatattaagtaacaaaattaagtaaatagaatattctagggccatggaagaataagaagcacaaggaatctgcctcctcacctaggcaacaattgaactgccagactctgtctgatataactattttgaaactctggagtctacctaaggcttgtaaatgccaagagaaggtttggatggtaaattgcaattaattttactaaattttagcttttagtgcagtagcaactacccattctccatggtaggaaactttgca

SEQ ID NO: 88226 - DNA, 977 bp, Homo sapiens
tgcatattttttagcagcttattaacatgacttatgacttttaaatatttgcataccaaattcataaaactccgtttctactcctgccccagcctggcaattgctaagggcaggcctagtaagtgtgtaagtcattaataaaaagtaaaaataaaaatactttctttaaaagggggaaaaacattttctcgtttcaccttttagtaagctgattagaaaaagtgaacttcggggccaggcatggtggctcacacctataatcccagcgctttgggaggctgaggtgggaagatcacttgagaccaggaggtcaagcaatgtgcagcatagtgaggccctgtctctaaaaaaaattttttttttttaaattagacaggtgcggtggtgagtgcctgtagtcccaactacttgggaggctgaggcgagaggactgcwtgagcccaggagttcaaggttacaatgagctatgatggtgctactgcactccagcctgggcaacagagtgagaccctgtttctaaagaaagaaaaaagtgaactttatttttatttcattttttctttgcatgtttttgaaagactcatgaggaatatgacgggtggtccacttggagaatgaggcctggtgtcagttcagagctgggtctggcttctcataaaagatagatattattgcttagtatgatgctaagaaaaagtgggcagttgccttaaagaaatatattaagtaacaaaattaagtaaatagaatattctagggccatggaagaataagaagcacaaggaatctgcctcctcacctaggcaacaattgaactgccagactctgtctgatataactattttgaaactctggagtctacctaaggcttgtaaatgccaagagaaggtttggatggtaaattgcaattaattttactaaattttagcttttagtgcagtagcaactacccattctccatggtaggaaactttgca

SEQ ID NO: 88227 - DNA, 666 bp, Homo sapiens
tggtaccaaggcaggatcatgactttcccaggacccttagcaaaatgtcctatttaacttttttttaaaatgtaaaccgatttttaggtagggtgtgctgtctcatgcctataatccaagcattttgggaggccaaggcgggaggctcacttgaggtcaggagttcaagactagcctgggcaatatggcgagatcctgtctataaaaaatgaaaaaatcagccaagtgtggtgatatgtgcctgtagtcccagctactcaagaggctgaggtgggaggatcgcttgagtctggatgtttgaggctgcagtgagccatggttgtgcctatgggctccagcctaggtgacagagtgagatcctttctcaagaaaacaaacaaacagataaaamacacacacacacacagctgctactctggttgaagtaggggaattacttggaattctccctccagggaccaccacccccttacatgcatcctttttttcttttatgtccctggggacatagcccaaaagttcctggtttatacattgtgctattcaaaatgctgcagtctcccacaaatgaaatctaattccgtacacgtcattaggtctcatagatccaatcctgttatgtaaaagttgagggagttacacagtccttttatgaaacaagaattt

SEQ ID NO: 88228 - DNA, 666 bp, Homo sapiens
tggtaccaaggcaggatcatgactttcccaggacccttagcaaaatgtcctatttaacttttttttaaaatgtaaaccgatttttaggtagggtgtgctgtctcatgcctataatccaagcattttgggaggccaaggcgggaggctcacttgaggtcaggagttcaagactagcctgggcaatatggcgagatcctgtctataaaaaatgaaaaaatcagccaagtgtggtgatatgtgcctgtagtcccagctactcaagaggctgaggtgggaggatcgcttgagtctggatgtttgaggctgcagtgagccatggttgtgcctatgggctccagcctaggtgacagagtgagatcctttctcaagaaaacaaacaaacagataaaaaacacacacacacacagctgctactctggttgaagtaggggaattacttggaattctccctccagggaccaccacccccttacatgcatcctttttttcttttatgtccctggggacatagcccaaaagttcctggtttatacattgtgctattcaaaatgctgcagtctcccacaaatgaaatctaattccgtacaygtcattaggtctcatagatccaatcctgttatgtaaaagttgagggagttacacagtccttttatgaaacaagaattt

SEQ ID NO: 88229 - DNA, 550 bp, Homo sapiens
tgagtgccaggaggacttactggagccttggacgggcttgtaggaactcttgggctgacagctagccagaaacrtaaggagcccagagtccaggaagcctggtgtttttcaccccgggctgggggcggggccagaggaggcctaagggactgaatttctcccagatagagccaggaatcttcactcctgttgatcttacatactgggcttctagaaatggagttccactcctttaaaaagttacaaaaccggccatgtgtggtggctcatgcctgtaatcccagcagttcaggaggccgaggtgggtgggtcacttgagaccagaagtttgagaccagcctggccaacatgatgaaaccctgtctctactaaaaatgcaaaaattagccaggtgtggtggtgcatgcctgtaatcccaggtactcaggaggctgaagtaggagaatcgcttgaacccgggaggtggaggttgcagagagacaagactgcgccaccggactgcagcctgggtgacagagactctgtctcaaaaagaaaaaaggttagaaaa

SEQ ID NO: 88230 - DNA, 644 bp, Homo sapiens
cattgggaacggagaaactgtgggagtccccgtgttaggcattttacttcatcttatctgggcgtcagttttcctatagataaactggaggccaggcacagtggctcgcgcctgtaatcccagcactttgggaggccgaggggggtagatcacctgaggtcaggagcttgagaccagcctggccaacatggtgaaaccccatctctactaaaaatacaaaaattagccaagcrtggtggcagacacctgtaatcccagatacttgagggactgactgagacaggagaatcgcttgaacccaggaggtgggcgttacagggagccgatatcgcaccattgcactccagcctgggagacaagagtgacactccatctcaaaacaaaaaaaacaaacaaactaacaaacactggagataataagtatatatcgcaaggttattgacaggatgaattaagtgaagataaatgcagtatttagaatggtacctagtgcataacaatagctgcatatatgtggttattattacacagaaaggccaaattggtagttgtaattatcacagggaaaatgtctaaaatgcagcaaagaacaattttccaacattctcttttttattaataatgtaattaccatataccaagta

SEQ ID NO: 88231 - DNA, 644 bp, Homo sapiens
cattgggaacggagaaactgtgggagtccccgtgttaggcattttacttcatcttatctgggcgtcagttttcctatagataaactggaggccaggcacagtggctcgcgcctgtaatcccagcactttgggaggccgaggggggtagatcacctgaggtcaggagcttgagaccagcctggccaacatggtgaaaccccatctctactaaaaatacaaaaattagccaagcatggtggcagacacctgtaatcccagatacttgagrgactgactgagacaggagaatcgcttgaacccaggaggtgggcgttacagggagccgatatcgcaccattgcactccagcctgggagacaagagtgacactccatctcaaaacaaaaaaaacaaacaaactaacaaacactggagataataagtatatatcgcaaggttattgacaggatgaattaagtgaagataaatgcagtatttagaatggtacctagtgcataacaatagctgcatatatgtggttattattacacagaaaggccaaattggtagttgtaattatcacagggaaaatgtctaaaatgcagcaaagaacaattttccaacattctcttttttattaataatgtaattaccatataccaagta

SEQ ID NO: 88232 - DNA, 644 bp, Homo sapiens
cattgggaacggagaaactgtgggagtccccgtgttaggcattttacttcatcttatctgggcgtcagttttcctatagataaactggaggccaggcacagtggctcgcgcctgtaatcccagcactttgggaggccgaggggggtagatcacctgaggtcaggagcttgagaccagcctggccaacatggtgaaaccccatctctactaaaaatacaaaaattagccaagcatggtggcagacacctgtaatcccagatacttgagggactgactgagacaggagaatcgcttgaacccaggaggtgggcgttrcagggagccgatatcgcaccattgcactccagcctgggagacaagagtgacactccatctcaaaacaaaaaaaacaaacaaactaacaaacactggagataataagtatatatcgcaaggttattgacaggatgaattaagtgaagataaatgcagtatttagaatggtacctagtgcataacaatagctgcatatatgtggttattattacacagaaaggccaaattggtagttgtaattatcacagggaaaatgtctaaaatgcagcaaagaacaattttccaacattctcttttttattaataatgtaattaccatataccaagta

SEQ ID NO: 88233 - DNA, 644 bp, Homo sapiens
cattgggaacggagaaactgtgggagtccccgtgttaggcattttacttcatcttatctgggcgtcagttttcctatagataaactggaggccaggcacagtggctcgcgcctgtaatcccagcactttgggaggccgaggggggtagatcacctgaggtcaggagcttgagaccagcctggccaacatggtgaaaccccatctctactaaaaatacaaaaattagccaagcatggtggcagacacctgtaatcccagatacttgagggactgactgagacaggagaatcgcttgaacccaggaggtgggcgttacagggagccgatatcgcaccattgcactccagcctgggagacaagagtgacactccatctcaaaacaaaaaaaacaaacaaactaacaaacactggagataataagtatatatcgcaaggttattgacaggatgaattaagtgaagatawatgcagtatttagaatggtacctagtgcataacaatagctgcatatatgtggttattattacacagaaaggccaaattggtagttgtaattatcacagggaaaatgtctaaaatgcagcaaagaacaattttccaacattctcttttttattaataatgtaattaccatataccaagta

SEQ ID NO: 88234 - DNA, 644 bp, Homo sapiens
cattgggaacggagaaactgtgggagtccccgtgttaggcattttacttcatcttatctgggcgtcagttttcctatagataaactggaggccaggcacagtggctcgcgcctgtaatcccagcactttgggaggccgaggggggtagatcacctgaggtcaggagcttgagaccagcctggccaacatggtgaaaccccatctctactaaaaatacaaaaattagccaagcatggtggcagacacctgtaatcccagatacttgagggactgactgagacaggagaatcgcttgaacccaggaggtgggcgttacagggagccgatatcgcaccattgcactccagcctgggagacaagagtgacactccatctcaaaacaaaaaaaacaaacaaactaacaaacactggagataataagtatatatcgcaaggttattgacaggatgaattaagtgaagataaatgcagtatttagaatggtacctagtgcataacaatagctgyatatatgtggttattattacacagaaaggccaaattggtagttgtaattatcacagggaaaatgtctaaaatgcagcaaagaacaattttccaacattctcttttttattaataatgtaattaccatataccaagta

SEQ ID NO: 88235 - DNA, 1094 bp, Homo sapiens
tgaaacccacaacgtttacccaaacccagctacgaaatgactccctggaggcaggaagagaatgttgcctggtctcaggaaygttgggtcatggggaacaagtccctataagacaccagcagactattttaaactctgtgtctagggttacattcaagtcgtaacatataccaaccatctcattctctattcaatatccgcctgtcagccatttagtcaaataaaaccttttaggaaagaatacagctttgagctgcaaaaagctgctatcctactgggaggggtcaccctacgctaatgttttccagggcttatattgaaagtgtgtaaatatttgtaattaaattgaaccatgtagctgtccttcccatgtgatgttattgggtagctgtgaccaccagagtgttatagcaacatgagacatatttactgaaaatcataatggctttcaataactgaagtactactttgttttgtgggggatgtcaaaaattagagccaaaaacagagacagaaacttaaaaagctcattccagacttttaggacaatgacaaaatagtgaaaaaatcttgaaactttataatttagttctccatgctattcatcaagagttccagtattgagggctaaatgatctacttgatcaacaattcattctggttaacagccaaaaaatggctcttgttttcaattcttagcaaaactgtctgatacaaatcttccgttctcccatttggatagggactcataaaaggtgtgaagtgtcaacattaattctacaaatctactgggctgctcctgacagaatggtcagaaaagatcccagaagttctcaacagagaatttcaagtttttgatggttgagaaaaaaaaaaaaaaatgtatatttgagtttagcttctttttgaagttcatcatctatatcaattcatctgacatttatcttttttcttttcttttctttttttttttttttttagacagagtattactttgtcactcaggctggagtgccgtggtacgatctcggctcactgcaatctccaccttccaggttgcagtgattctcgtgcctcagcctcctgagtagctg

SEQ ID NO: 88236 - DNA, 1515 bp, Homo sapiens
catcagcttcccacgtagctgagaatacaggcttaccaccacacytggctgatttttttttatttttagttttgtagaggtggagttttgccatgttgcccaggctgatcttaaactcctgagctcaaagcgatcgtcccgcctcagcctcccaaagtgctcggattacaggcatgagccaccatgcccggctcacttacaaataatttaatacctctcactattgccggtgctctcactattgctggtgctctctaggtactttgcatctttacatctactacgcaccatcggtagtggtggctctgacagtctgctactgtacacctcctcccaacgccttattcaaggtcacgactttgttactttgagactggctctgggcaagtatttacaccattgaaaatcaacaatctctaaaactgggccctttcattttccaggagagccgtatattaatcatttaccggcataccactggcacaaaccttaccctctttcatggtacagggttttcccagtatttatctggagttcctgttgcagctttccatggttgaaacattattacccatcctttaaaaacaaaatgaaactttttactgaaataaattaccttctttaaagcttttttttctgtttcctccattagacagagcctgtactgctctgttgatctatgaactttcaggccctcagtataaaatgttttaaggacaacagaaaagtcccctaaaacttacacctagcattgacaacatttttctagccccctcagcaatgtcttctacctaaaattgcctcagctgtaacgtaacatacctcctgctgctagtactagctcacagctaatactaagcgtaacacctgactccattttacaggggccactttttttcctctaaaagttttatgtagcagtaagtgaaatagaatagatgctggggtaaacagcagtttccagattaaatgttattttctgtaggaaacatttctctccaatgttgccccttcacaccatccccaaacaagtaaaaagttgctcagactttgaaaatgtaataccatctggcagaactcacattcgaccttttattaaaactacaattatgtcacacctgtgaggtttaaaattcaaggctccggaagttaaagcgacgtgtccaaggttacatggaaaattcttgagagctcacagtttcctgccctggcctttcacttcggatgtacaccatagtacgtgtgttttctgattagagctctcttcagttatgatttattttaccatcataacattttgggaggctggtatgagggagagtatagaagaaggaattcaagcagaaaaggttaaatgatttacagttttcgccctttctccaagggaaatttatgtgcccccaaattttagaatcatgaatttagattgaatgagaatggataaaatccatttacagtcaatttagattgcataagaatggatgaaatccttggcatatctaaagaatggaaaag

SEQ ID NO: 88237 - DNA, 1515 bp, Homo sapiens
catcagcttcccacgtagctgagaatacaggcttaccaccacacttggctgatttttttttatttttagttttgtagaggtggagttttgccatgttgcccaggctgatcttaaactcctgagctcaaagcgatcgtcccgcctcagcctcccaaagtgctcggattacaggcatgagccaccatgcccggctcacttacaaataatttaatacctctcactattgccggtgctctcactattgctggtgctctctaggtactttgcatctttacatctactacgcaccatsggtagtggtggctctgacagtctgctactgtacacctcctcccaacgccttattcaaggtcacgactttgttactttgagactggctctgggcaagtatttacaccattgaaaatcaacaatctctaaaactgggccctttcattttccaggagagccgtatattaatcatttaccggcataccactggcacaaaccttaccctctttcatggtacagggttttcccagtatttatctggagttcctgttgcagctttccatggttgaaacattattacccatcctttaaaaacaaaatgaaactttttactgaaataaattaccttctttaaagcttttttttctgtttcctccattagacagagcctgtactgctctgttgatctatgaactttcaggccctcagtataaaatgttttaaggacaacagaaaagtcccctaaaacttacacctagcattgacaacatttttctagccccctcagcaatgtcttctacctaaaattgcctcagctgtaacgtaacatacctcctgctgctagtactagctcacagctaatactaagcgtaacacctgactccattttacaggggccactttttttcctctaaaagttttatgtagcagtaagtgaaatagaatagatgctggggtaaacagcagtttccagattaaatgttattttctgtaggaaacatttctctccaatgttgccccttcacaccatccccaaacaagtaaaaagttgctcagactttgaaaatgtaataccatctggcagaactcacattcgaccttttattaaaactacaattatgtcacacctgtgaggtttaaaattcaaggctccggaagttaaagcgacgtgtccaaggttacatggaaaattcttgagagctcacagtttcctgccctggcctttcacttcggatgtacaccatagtacgtgtgttttctgattagagctctcttcagttatgatttattttaccatcataacattttgggaggctggtatgagggagagtatagaagaaggaattcaagcagaaaaggttaaatgatttacagttttcgccctttctccaagggaaatttatgtgcccccaaattttagaatcatgaatttagattgaatgagaatggataaaatccatttacagtcaatttagattgcataagaatggatgaaatccttggcatatctaaagaatggaaaag

SEQ ID NO: 88238 - DNA, 1515 bp, Homo sapiens
catcagcttcccacgtagctgagaatacaggcttaccaccacacttggctgatttttttttatttttagttttgtagaggtggagttttgccatgttgcccaggctgatcttaaactcctgagctcaaagcgatcgtcccgcctcagcctcccaaagtgctcggattacaggcatgagccaccatgcccggctcacttacaaataatttaatacctctcactattgccggtgctctcactattgctggtgctctctaggtactttgcatctttacatctactacgcaccatcggtagtggtggctctgacagtctgctactgtacacctcctcccaacgccttattcaaggtcacgactttgttactttgagactggctctgggcaagtatttacaccattgaaaatcaacaatctctaaaactgggccctttcattttccaggagagccgtatattaatcatttaccggcataccactggcacaaaccttaccctctttcatggtacagggttttcccagtatttatctggagttcctgttgcagctttccatggttgaaacattattacccatcctttaaaaacaaaatgaaactttttactgaaataaattaccttctttaaagcttttttttctgtttcctccattagacagagcctgtactgctctgttgatctatgaactttcaggccctcagtataaaatgttttaaggacaacagaaaagtcccctaaaacttacacctagcattgacaacatttttctagccccctcagcaatgtcttctacctaaaattgcctcagctgtaacgtaacatacctcctgctgctagtactagctcacagctaatactaagcgtaacacctgactccattttacaggggccactttttttcctctaaaagttttatgtagcagtaagtgaaatagaatagatgctggggtaaacagcagtttccagattaaatgttattttctgtaggaaacatttctctccaatgttgccccttcacaccatccccaaacaagtaaaaagttgctcagactttgaaaatgtaataccatctggcagaactcacattcgaccttttattaaaactacaattatgtcacacctgtgaggtttaaaattcaaggctccggaagttaaagcgaygtgtccaaggttacatggaaaattcttgagagctcacagtttcctgccctggcctttcacttcggatgtacaccatagtacgtgtgttttctgattagagctctcttcagttatgatttattttaccatcataacattttgggaggctggtatgagggagagtatagaagaaggaattcaagcagaaaaggttaaatgatttacagttttcgccctttctccaagggaaatttatgtgcccccaaattttagaatcatgaatttagattgaatgagaatggataaaatccatttacagtcaatttagattgcataagaatggatgaaatccttggcatatctaaagaatggaaaag

SEQ ID NO: 88239 - DNA, 1658 bp, Homo sapiens
tgcccaaataaattccctcgttaactatccctaatgttaggagatttctcttctaaatttagattcctgaaatttctttgaatatcttttgcaggtatatagtatgaacttcttgacaataaataatgttttgcaacatgaagttctctaatcaacagcattaatttttacataaaaatcttttcttcaaagttgaataattagggaaatggaaataaatgcagtggatttaaattttgttgctatcttttgaggtcacagacagttcttgtcttcctcagggcttatttagctgtcaagaatatttttaatttcagatatttagtgagcattaacagagcgttgtgtaagacattgctcttaagtatctttaaacatcaactcataacatttttaaaataaaaattaacattttatttttaaaataaaatgttatttgtggttttaaaaaaaagtgtatcgtttagaagacataactttcaaaagcaaaagtatcccttagttctatttctatatatatatatagcattttaatgaattgtagcatcaaaagaagtgaaaaaaagccttttaagtttaaattattgctccacttaattttctatactatagtatataaattactcttatcagatagcctatttttcatatgttggctaaccaatggacaacgtattgccaaagataatccaacgaccttcacagctctaggaaatcttatgtagaattggttgtacatttactgaaaacttttttggaatcattgtcatcagctgtctcagtaaagattatctcaaaagcttgactgataataattgccactgagaaataaaatttcattctttaactgaaaactttattaattaccctgaaactatgtaagtatgtaagtgacctgtcaatgagcaaagtataagacatattacatccttcctttactgaataatcttcttttgatgccaagttatagagataagatgcattttttagatttatattgtgacatatgatttaacacatgcttaaattgaaagcactatcaaaacctaatacttgggctttaaaaagtaataaaatcatctcttttttttttgttttttgtttttgagatggagtctcactctgtcatccaggctggagtgcagtggtgcgatctcggctcactgcaagctccgcctcccgggttcatgccattctcctgcctcagcctcctgagtagctgggactataggcgcccrccaccacgcccagctaattttttgtatttttagtagagacggggtttcactgtgttagccaggatggcctcgatctcctgacctcgtgatccgcccacctcggcctcccaaagtgctgggattacaggcgtgagccaccacgcccagccaaaatcatcatttcttaagcctggaggatccttaaaggccatctaggtgatatttgtcactttttcaaggaggaagctgaaagctaaaggtattaccatttacctgtagttacacagccagttcaagcaaagcttggcctaaaacttctcctgaatttctgctttagtcttatgtactatgaaccccaaaaatctgagacagttaatttagcaagtttatttagtaagttcatttttccaaggttcaggacatgcgcctgtgacagcctca

SEQ ID NO: 88240 - DNA, 1258 bp, Homo sapiens
agtaaaataccaaattcatttaagctatgggcattttggaaagtggactggaatccacttattaaagattttataagaattgttcacaagaattccaaataaccctgtttattctttaaatacttaataacttggtccaaactcctctcctacccccaaaatacttcttttctctcccttaaactttcattttttatgcacctctgaacatttttctatgaagttatagtcactttcacatttactgcaagatgtttttcggatctctccactgccgccttgtggctttagaacacaaatctgtttactttgttttgtgacatatttgaataaaaccatgtatcctgtttagggctggcaatgtggtagtgggagggttggaaattggatacaaaaattgagtcaatcaattgtcactgttgctctagtcaagattccatcgttattttgtataaccttcatttataattcattatgtcattatgtgctagacagctggtctaatatcttttctatgttgttaaatagctgggtgtggtggcacatgcctgtagtcccagctacttgggaggctgaggcaggagaatcgcttgaacctgggaggcagaggttacagtgagccaagatcgtgtcactgcactccagcctgggcaacagagtgaaactctgtctaaaaaaataaaaatgcatatactaattgtaaaatatgcacgattttatatatggctgcactcttatttaaacagcatgctgcacaaatctcacttcttacctttctacttggctgtttctgaaatctttacttgttatatctacatgtctttttagtgccatataatattctttaacatgcatccatcacacagccagttttarggaaaaaaaatcctaaatctctacaattccttctgacccaaatctcacatgctccctttagaatgtataacaattttctgggtcacagggcatattatagtttgacaaaacgtacccagattactttctggacatctgtgaattttacactccacccacattacttgtctttcctgcatctcaccactgcttgctaacatttgcattttagttggctccattttggtagttttgtctccttgttttaattctcatttccctaatagtaagatgaagctcacatgatattctcgtcatccactcactattcagcttttttgaattgcttcttcatgttctttgctcattttctaattttttttcttttctttgtggaattgaa

SEQ ID NO: 88241 - DNA, 1258 bp, Homo sapiens
agtaaaataccaaattcatttaagctatgggcattttggaaagtggactggaatccacttattaaagattttataagaattgttcacaagaattccaaataaccctgtttattctttaaatacttaataacttggtccaaactcctctcctacccccaaaatacttcttttctctcccttaaactttcattttttatgcacctctgaacatttttctatgaagttatagtcactttcacatttactgcaagatgtttttcggatctctccactgccgccttgtggctttagaacacaaatctgtttactttgttttgtgacatatttgaataaaaccatgtatcctgtttagggctggcaatgtggtagtgggagggttggaaattggatacaaaaattgagtcaatcaattgtcactgttgctctagtcaagattccatcgttattttgtataaccttcatttataattcattatgtcattatgtgctagacagctggtctaatatcttttctatgttgttaaatagctgggtgtggtggcacatgcctgtagtcccagctacttgggaggctgaggcaggagaatcgcttgaacctgggaggcagaggttacagtgagccaagatcgtgtcactgcactccagcctgggcaacagagtgaaactctgtctaaaaaaataaaaatgcatatactaattgtaaaatatgcacgattttatatatggctgcactcttatttaaacagcatgctgcacaaatctcacttcttacctttctacttggctgtttctgaaatctttacttgttatatctacatgtctttttagtgccatataatattctttaacatgcatccatcacacagccagttttaaggaaaaaaaatcctaaatctctacaattccttctgacccaaatctcacatgctccctttagaatgtataacaattttctgggtcacagggcatattatagtttgacaaaacgtacccagattactttctggacatctgtgaattttacactccacccacattacttgtctttcctgcatctcaccactgcttgctaacatttgcattttagttggctccattttggtagttttgtctccttgttttaattctcatttccctaatagtaagatgaagctcacatgatattctcgtcatccactcactattcagcttttttgaattgcttcttcatgttctttgctcattttctaawtttttttcttttctttgtggaattgaa

SEQ ID NO: 88242 - DNA, 1985 bp, Homo sapiens
cccggagacccacgtccacacacagcccggagacccacatccacacacagcccggagacccacgtccacatagagcccagagacgcacgtccacacagagcccggagacgcatgtccacacagagcccggagacccacgtccacacacagcccggagacgcacgtccacacagagcccggagacccacgtccacacacagcccggagacgcacgtctacacagagcccrgagacgcacgtccacacagagcccggagcatgaatgttctcagcatctttattaccatagccaaaatgtggaggcctccaacaggaggtggctgagcaaaccgcacctggctgcagcttggaatgcaaatccatcccacagagacgccacacactctgctcttgctctttaatcagacagagacgcagcgaggcccccaccctcccttccccggccccttccccaccccggcatcagggaggtcctgggcgctgaggagccagagaagccgggctcaagacggtggcctgcagcggaggccgaagcggagatcgctgggaggaggaaggtcctggtccctcctcagccgacccaggtgggagcccagcccagcctgctcagggcaactccccgacttgctgcaggatccagagcacgtagatctggacgtgggtgtagacgccgggaaagtcccgcagggtacagccgtagccccagctgaccacccccaccaggcgccaggacccccgcagcctgcagaccagagggccgccggagtcaccctgaggaagggaaggaaaggggtcaccgctgagctctgcggtgggagcagggcaggcaggcagggcgggccgggggcactcacgtagcaggagtctcggccctcgctgccggcacacagcatgtcatccaggatgagctgccggtcgccagtgtgccctgaggcgttgcggtagggctgctcacagacggcgttctccagcacctgcacactcgcctgctgcaggcggtagggcggcggcagcgactctggggagagaggtgaccccggctggcacagcggagacgcccctgccgtcaacccagcagccccagcacctccccaggttgggaagtaaggtggctcccttgtggccaagggcccctagtcccggcctgaacctcccagcctgagcacggtgtgtgggaccccaggaggtgggagggctcgtgtctccctctaaactcccagggctcgcagtcggacggaccagagaaaagtggagggatgagtttttctgttttttttcctccaaaaaatgccttttggttttgaggtgttttcgtttgcggtgttttttcttttcttttcttttttagagatggggtcttgctatgttgcccaggctggcctcaaactccccggctcaagccattctcctgcctctgcctcccaaagtgctgggatcacaggtgtgagccaccgcacccagcaaaaaaatttaaaaacctttcctaagtagaaaaaaatgagaagtattttcccctctgaataatgagtctggagcttggtgtggccattggcactcgcaggacccccgagtctctgggcccgggcagcacagagctgtggggaaaagcagccggaggtgctgcatggcggtgagcagctccgtctcttccctttctggaactcacccaccccaccaccacccccggagccctggaatgaggcgttttgggcccacagcccgagtccttccccagcctccacccaacacgccccgaacatcctgatcgctccccagccagtcacccagcactggtccttcggggtgagctccagcgagaccggggagagcttgaccgtcctgacattagcggctcagatcatggggctcaccagctggagcagggccacatccgcacccagccccgcagtgacatagttggggtggacgatgatccggctgacgttcagcagcccccggcccccgtagagatacacgtccccagc

SEQ ID NO: 88243 - DNA, 1985 bp, Homo sapiens
cccggagacccacgtccacacacagcccggagacccacatccacacacagcccggagacccacgtccacatagagcccagagacgcacgtccacacagagcccggagacgcatgtccacacagagcccggagacccacgtccacacacagcccggagacgcacgtccacacagagcccggagacccacgtccacacacagcccggagacgcacgtctacacagagcccagagacgcacgtccacacagagcccggagcatgaatgttctcagcatctttattaccatagccaaaatgtggaggcctccaacaggaggtggctgagcaaaccgcacctggctgcagcttggaatgcaaatccatcccacagagacgccacacactctgctcttgctctttaatcagacagagacgcagcgaggcccccaccctcccttccccggccccttccccaccccggcatcagggaggtcctgggcgctgaggagccagagaagccgggctcaagacggtggcctgcagcggaggccgaagcggagatcgctgggaggaggaaggtcctggtccctcctcagccgacccaggtgggagcccagcccagcctgctcagggcaactccccgacttgctgcaggatccagagcacgtagatctggacgtgggtgtagacgccgggaaagtcccgcagggtacagccgtagccccagctgaccacccccaccaggcgccaggacccccgcagcctgcagaccagagggccgccggagtcaccctgaggaagggaaggaaaggggtcaccgctgagctctgcggtgggagcagggcaggcaggcagggcgggccgggggcactcacgtagcaggagtctcggccctcgctgccggcacacagcatgtcatccaggatgagctgccggtcgccagtgtgccctgaggcgttgcggtagggctgctcacagacggcgttctccagcacctgcacactcgcctgctgcaggcggtagggcggcggcagcgactctggggagagaggtgaccccggctggcacagcggagacgcccctgccgtcaacccagcagccccagcacctccccaggttgggaagtaaggtggctcccttgtggccaagggcccctagtcccggcctgaacctcccagcctgagcacggtgtgtgggaccccaggaggtgggagggctcgtgtctccctctaaactcccagggctcgcagtcggacggaccagagaaaagtggagggatgagtttttctgttttttttcctccaaaaaatgccttttggttttgaggtgttttcgtttgcggtgttttttcttttcttttcttttttagagatggggtcttgctatgttgcccaggctggcctcaaactccccggctcaagccattctcctgcctctgcctcccaaagtgctgggatcacaggtgtgagccaccgcacccagcaaaaaaatttaaaaacctttcctaagtagaaaaaaatgagaagtattttcccctctgaataatgagtctggagcttggtgtggccattggcactcgcaggacccccgagtctctgggcccgggcagcacagagctgtggggaaaagcagccggaggtgctgcatggcggtgagcagctccgtctcttccctttctggaactcacccaccccaccaccacccccggagccctggaatgaggcgttttgggcccacagcccgagtccttccccagcctccacccaacacgccccgaacatcctgatcgctccccagccagtcacccagcactggtccttcggggtgagctccagcgagaccggggagagcttgaccgtcctgacattagcggcwcagatcatggggctcaccagctggagcagggccacatccgcacccagccccgcagtgacatagttggggtggacgatgatccggctgacgttcagcagcccccggcccccgtagagatacacgtccccagc

SEQ ID NO: 88244 - DNA, 641 bp, Homo sapiens
agggcacataggtctggactcacgtgtagacgccaatgctgggccgatcactgtaaaatccccagctcactactcccgcctggagccaggtacccttcttcttgcagaccagggggcygcctgagtcaccctgtggagcagagaaggcccagcttgaccagagacccaggaccctgcacatccaagtccagcatcggagccgcagacaggaaaagagatggcaggagagaggcgccaggtctcaccttccaggtgcggcggcccgtgcggccggcacagatcatgtcatcctggatgaactttctgtctccagcaccaggaaaagcatcgtaggtctgccgctcacagtctgcattgctcagtgtgaggaccttcacctgctgcgggcggtaaggaggcggcagcatatctgcagagacaagccacgggtggcgggagcagctcaggaggggcccccaaccagcaccatggcaggacccctccctgcccccagcctcagctcaggacctgggatgctcagcctacacagcctaaggtggagtcaaaggggctccacctctaaagctgcaggaacccagaagggaaatgccagggtagggtacagtggcataatcatagctccctgcagcctccgcctccca

SEQ ID NO: 88245 - DNA, 688 bp, Homo sapiens
tctgccccaccctgggccccaccccacactgtcctcagatcccctcccgtaccccagcggggccccatccctgcctcctgctcctcttctgaaggccccagctctccccaaaaccttgtcctctggtcacaatgctcagggtccttagtgtctccctgtgcaccccagctcccctgcgtggagtctggaaagtcatccctggtatggagaggagggtgacttcccccatggctaccacctctggctcctgagaatctgaccctgcggggctccctccttggaatgtcaccacgtcactggccggagtgggcgaggctgcagggcccacagggctctcactgcagtcccctgcccagttcaccatggacccctggggctcctggagtgagggccctgcctgtccttcttgcctctccaggccaggagcagaggtggcacctagaggacacctcaacaaagctgtgagccggggtcaccctgcccagagcagctgtcctgggctcctctcaccacggctggtttggtttgaggtgggctatgaggcaggggtgggaccagccttgatgccaaggctgatgtggggcgggggsggggggccctttttgctcccagcaggccccacctcctgcctctgcgggagggaaggggcgcttcccgtgagcaggtgggggtgcaggtacaggtggtg

SEQ ID NO: 88246 - DNA, 883 bp, Homo sapiens
ccaggtggcagatagtggctgaaagccaaattagaaagagtttaagagaaaaaatggcacaactaagagattagcacagctcttgactacaaagctgcaaacacaaaattcagtgcagggcctggagagtgctcatgtgagtgaggggccctgatgcttaagctttgtcagcawctgtgcacacccacctctgtacaagccaaggcccctggcctggtcagttgggtggatggtgaggtgcttaccaagttgggtacccaggagtagataagagtttgcaagcaggaagaagacagatcatgcatttcactgtgagatttttgagattcagaggtcagtgcaacatctaagtgaaaatggccaggctctttctgctcctaacaatactgccaagagctatcaggatgacctttctaaaaggcacatctgatcaagtcactttcctgcttaaaaacctcagtgcttccctttgcccatattcctttgaaaagaaacagtttctcacagtctagccctggcctgtctttccaactatgtcttcctccattccatgcctggcacactgttccctctgacttgcaactccctctgtctacagtgtccttctctaactactaaactcctcctctccctacactgccctgatctaataacttctgtgaaaccacgtcccctcctgcaccttcttcaaggcaggactaaccacttcctctctgctgacttaaagccctctgtacacagttccatgaaatctgcacccagaaatgcgaacccataagcctgagaggcagggttgacagcggaacaattatgggttttagaattagattaacctgggttaaaacacacacacttgcttgctgtatataactttaagcatgtt

SEQ ID NO: 88247 - DNA, 833 bp, Homo sapiens
ccaaaaattatcatttccctccagaccctgttcctcttgggcagaaaatgtgtttaatttatattctatatgtcccattgtcactggtcacccagcacataatagatgcttgatagacattaacctgaatgaatggaccctgtcttctcagaaacatttacatatacgttttagaagtacatgggttcagaggttaggatagaaattctaaagtggaccttggcatgtaaatccccttgggtctaatatcaaaccaattgcttccccttggcagcagcagcagagcccttctgtgtctctggggagcattcagccatccagtctgtgaagatttctctcattgctctccagagcttccgttacatcgtgctcttctcacttccttctcagctgtgctcccactcctcagccttgtttgttctgttttcctccgccatttttcaccacacaccatatggccttcccttgcctgccttaagcttggaacttcacagccttctccaggcttccccagggcaacctgggccctctgggcctgctgaccaccccctttaactagcagccctgccctgatgcctactttgaaacccagcactgttcctaaggagackcaggacacagagccttttagtaaattcacttcaggggctggttctgccagttaactatgagcctagagtgttttgaacaggtggtgatcttccaaacacaatgtgatcgtgtgtttaatcttagaatcatgagaggctagtagggcagatacagaaaaacacaattttacctatttgtttcaacctcctccagcatccagtgaggcagcctcctggtgcaga

SEQ ID NO: 88248 - DNA, 631 bp, Homo sapiens
ataagagaataggaaaccccatcaaggtcaaatgtatttattattaacaagaagataatgtatataaatcttacgattccatcaagtttaagttagcgttacttgtaaatatactgacaaatcttaagggacaaggaaatacaaaatccagtgaagtgatcaataagaatgggaactacaggcttcctctgagtaaacaaagaatcagatggaatgacaaaggctgtgggagaccagcctctttagtgtgaaaacctatgactctataagcattaaataaggctaagtcccatcatggtcaccargaagaccatcttctgggcaaaactaacttcatttacctgtgatggcaaatgccttcccttaggtaggttatgtgtttcctaacaccaggaagattgagaattaagtatggaaagatttgagagacccaaaccatagtattgataattttgtattaaagaataaaattgtgtatagttgctattttgtgtatttgcaatttttaatagaatcagacctattagaatgatagccttgtaaggcccatttaaaatacaattgagtaattgatgtgaaattttatggttttgagttcttaagtttactggaacatacaagagaaccttag

SEQ ID NO: 88249 - DNA, 631 bp, Homo sapiens
ataagagaataggaaaccccatcaaggtcaaatgtatttattattaacaagaagataatgtatataaatcttacgattccatcaagtttaagttagcgttacttgtaaatatactgacaaatcttaagggacaaggaaatacaaaatccagtgaagtgatcaataagaatgggaactacaggcttcctctgagtaaacaaagaatcagatggaatgacaaaggctgtgggagaccagcctctttagtgtgaaaacctatgactctataagcattaaataaggctaagtcccatcatggtcaccaggaagaccatcttctgggcaaaactaacttcatttacctgtgatgrcaaatgccttcccttaggtaggttatgtgtttcctaacaccaggaagattgagaattaagtatggaaagatttgagagacccaaaccatagtattgataattttgtattaaagaataaaattgtgtatagttgctattttgtgtatttgcaatttttaatagaatcagacctattagaatgatagccttgtaaggcccatttaaaatacaattgagtaattgatgtgaaattttatggttttgagttcttaagtttactggaacatacaagagaaccttag

SEQ ID NO: 88250 - DNA, 959 bp, Homo sapiens
tcttggcttggtaatttgcagtctttcctaccgtgcatcggttgagccttttactcctgggaatagtcaggctctgcgagactacatttgtctctcccgtgtcctgagtccttaaaaaaaaaatgagatctggggtcttgagagaacctcgtgaggtgatgggatctaatgcagacgaggttgtgtgttacagcatctttcttctagtctaaatacgtatctcaaaagagaggaaagagaagggtggagaggaatccatccacaytgtagtatttcacagcgatggctaaggatttccctccatgacctcccctggagtcatcaccacccagaaatggttcaataagctccatttcaggactccgattcttagctttggcccgaaacctggcaaagtctggttgttttcaaggtctacacagacagttgtggatcagtcagtaggttgggttgattatggtgaagggaatataaacgcagagcagctgatcttaaaatattttgtgcagcctgttgcttggttggatagacttttttccatcgaaaattagatttcttgttttcagcctctccggaaaggtgacttttttttttttaaaaaaaaggtcattttgaagggcagagttgtaggcgaatctatgagtcgtgactgcgtgagggaaggagggagggaactccccctgctgcatcactgccccctcctcctccaacatcatcatcatcatcatcatcatcatgaccatcaccaccaacaccactggcaccaccactgcagtcattcagggagtcctgaacagaggccgattggtgttcctgcttgggaggatctgtgggaatcggcaggagaatgagtcagggaaatagtgcttagctgacattttgaaatggaagaagctggaatatatgaatttttgtaaagaaaaaaaaatgcagcctgtgagtctctcttgattgaaaat

SEQ ID NO: 88251 - DNA, 959 bp, Homo sapiens
tcttggcttggtaatttgcagtctttcctaccgtgcatcggttgagccttttactcctgggaatagtcaggctctgcgagactacatttgtctctcccgtgtcctgagtccttaaaaaaaaaatgagatctggggtcttgagagaacctcgtgaggtgatgggatctaatgcagacgaggttgtgtgttacagcatctttcttctagtctaaatacgtatctcaaaagagaggaaagagaagggtggagaggaatccatccacactgtagtatttcacagcgatggctaaggatttccctccatgacctcccctggagtcatcaccacccagaaatggttcaataagctccatttcaggactccgattcttagctttggcccgaaacctggcaaagtctggttgttttcaaggtctacacagacagttgtggatcagtcagtaggttgggttgattatggtgaagggaatataaacgcagagcagctgatcttaaaatattttgtgcagcctgttgcttggttggatagacttttttccatcgaaaattagatttcttgttttcagcctctccggaaaggtgacttttttttttttwaaaaaaaggtcattttgaagggcagagttgtaggcgaatctatgagtcgtgactgcgtgagggaaggagggagggaactccccctgctgcatcactgccccctcctcctccaacatcatcatcatcatcatcatcatcatgaccatcaccaccaacaccactggcaccaccactgcagtcattcagggagtcctgaacagaggccgattggtgttcctgcttgggaggatctgtgggaatcggcaggagaatgagtcagggaaatagtgcttagctgacattttgaaatggaagaagctggaatatatgaatttttgtaaagaaaaaaaaatgcagcctgtgagtctctcttgattgaaaat

SEQ ID NO: 88252 - DNA, 556 bp, Homo sapiens
aggatcatgagtccaggaggctgaggctcccgtgactgtgccactgcactccagccagagcgacagagtgagatcccatctcaaaaaaaaaaaaaaaaaaaaaaaaaaaaagctgggaaaagtggctcacatcttaaattgcagaattttsggacactggggcaggaggattgcttgaggccagaagtagtagcctgagcaacatgtgagaccctgagtctatgggtgggggggaaccttaaaattaagagatctttatgtattctaagccctttatcagatatgtgtattacaaatatttcctcccattctgcggcttgcctttttgttttcttaatggtgccattcaaagagcaaaagtttttaatttttatcaaatccagtatatcagttttctttgaaacttgctttttgtattccccaaaatcttttctgactccaaggtcacaaaggattttctcttacaggtttcactttttttatttattttttacatgaaggcaatttattaacagaaaatattttgaggaatcttgttcacagacggcgaccacgg

SEQ ID NO: 88253 - DNA, 829 bp, Homo sapiens
tctcccctgctagaatgtggctgatgcttaaagggaaaacacacactcacgatcaccaggcactgtctgttttgtcccctctgtgtcaccagcccctggctcaggcctyggcatgtagaggtgcccagtacatgttaggagctgattcactcgtgagggacacaaaggcagccatgaagtttgctgtgagggcttcttgcaggggaccatgctcgaggcctttgggtgcggcaaggctcgaactgccttggcaaagtggactcctcagcccccaaggcctgggccagctggttgatctattgcccagacttcccagtgaccacgctgtgctcggcccgctccattccagactgtccatcgggcttgatcggctggcacacacacacagcctgggtaacgactctgcccactcaaaaccaagacaaaacatgcacctgccaaatgattgtgcctttggtcaggaaaccagcatagtcagaattcctagcaatgaacaatccccctctagcaacagtccaagtcccagcatagggcatgaatttgctttgggagtgactgaccctgtccccaagggtatttctgaccccagtgcgtgccaagggcagggaggtggtgcctgctgccaggaacagccagcatctgagcactcactatgggaccctgggccctgatcacaagggggcattcatcttttctatatttttgcttttaaaagtctttgaaaaattaagtagttggaaagcaaactcaattccaactgacttgtagtagctggctgagctgagaaatggccataggaaatcaattgctgcttcaggttatttatgca

SEQ ID NO: 88254 - DNA, 829 bp, Homo sapiens
tctcccctgctagaatgtggctgatgcttaaagggaaaacacacactcacgatcaccaggcactgtctgttttgtcccctctgtgtcaccagcccctggctcaggccttggcatgtagaggtgcccagtacatgttaggagctgattcactcgtgagggacacaaaggcagccatgaagtttgctgtgagggcttcttgcaggggaccatgctcgaggcctttgggtgcggcaaggctcgaactgccttggcaaagtggactcctcagcccccaaggcctgggccagctggttgatctattgcccaracttcccagtgaccacgctgtgctcggcccgctccattccagactgtccatcgggcttgatcggctggcacacacacacagcctgggtaacgactctgcccactcaaaaccaagacaaaacatgcacctgccaaatgattgtgcctttggtcaggaaaccagcatagtcagaattcctagcaatgaacaatccccctctagcaacagtccaagtcccagcatagggcatgaatttgctttgggagtgactgaccctgtccccaagggtatttctgaccccagtgcgtgccaagggcagggaggtggtgcctgctgccaggaacagccagcatctgagcactcactatgggaccctgggccctgatcacaagggggcattcatcttttctatatttttgcttttaaaagtctttgaaaaattaagtagttggaaagcaaactcaattccaactgacttgtagtagctggctgagctgagaaatggccataggaaatcaattgctgcttcaggttatttatgca

SEQ ID NO: 88255 - DNA, 829 bp, Homo sapiens
tctcccctgctagaatgtggctgatgcttaaagggaaaacacacactcacgatcaccaggcactgtctgttttgtcccctctgtgtcaccagcccctggctcaggccttggcatgtagaggtgcccagtacatgttaggagctgattcactcgtgagggacacaaaggcagccatgaagtttgctgtgagggcttcttgcaggggaccatgctcgaggcctttgggtgcggcaaggctcgaactgccttggcaaagtggactcctcagcccccaaggcctgggccagctggttgatctattgcccagacttcccagtgaccacgctgtgctyggcccgctccattccagactgtccatcgggcttgatcggctggcacacacacacagcctgggtaacgactctgcccactcaaaaccaagacaaaacatgcacctgccaaatgattgtgcctttggtcaggaaaccagcatagtcagaattcctagcaatgaacaatccccctctagcaacagtccaagtcccagcatagggcatgaatttgctttgggagtgactgaccctgtccccaagggtatttctgaccccagtgcgtgccaagggcagggaggtggtgcctgctgccaggaacagccagcatctgagcactcactatgggaccctgggccctgatcacaagggggcattcatcttttctatatttttgcttttaaaagtctttgaaaaattaagtagttggaaagcaaactcaattccaactgacttgtagtagctggctgagctgagaaatggccataggaaatcaattgctgcttcaggttatttatgca

SEQ ID NO: 88256 - DNA, 2747 bp, Homo sapiens
cccagcactttgggaggcggaggtgggcagatcacctgaggtcaggagttcgagaccagcctgaccaacatggtaaaaccccgtctctatcaaaaatacaaaaattagctgggcgtggtggcgggagcctgtaatcccagctattcgggaggctgaggcaggagaattgcttgaacctgggaggcagaggttccagtgagccaagattgtgccactgcacactccagcctgggtgacagagcaagactctgtcaaaaaaaaaaaaaaaaaaaaaaaaaaaaaggaaagaaagaaagagagaaaggaaagaaagagaaagaaagaagagaaagagaaaaagaaaatgtagtataaagagaacggggtgggatcattttttctccacagaaacagaaaaataatactttccaaatcgaaggctcctgcgctgtccccaggggctttgttgtacggttcctactcctccagttatttattccgacccctacaataatgctgagaggtagacgttaaactggggttcagagaggccaagggccttgccccagatcaccagcagcaagtggtgaagtggacctgaaacccagatctgctcgatgcccatggcaaagagagcccattacagatggtcaaaaacctcccctcaggcacctcagagcctgcagcacccacccgccaactctaagctgctatttggtgctcagagccccagccttgcccacagaagcatcttttaagcagatagaggaggcctgtccttcctccttgccaccacactgcaccactgtgacgatttctgccatgcccccaaggaacagaacgtagtacagcaagcctgggcagagagtcagaaacacatggcttgggatccccgctccatcccagctctgggattacagggccagtggctccatctccttgggtcacagctttctcttctgtaatagttagcagaacaatatggcacccacctcacagagtagctgaggggattaaatgacactgatgtaatctgtgtctttgatactatgttaacactagctggccgggcacagtggctcacgcctgtaatcccaacactttgggaggccaaggcgggcagatcacctgaggtcaggagttcgagaccagcctggtcaatatgatgaaaccccgtctctactaaaaatacaaaattagccaggtgtagtgatgcacgcccataatcccagctactcaggaggctgaggcaggagaatcacttgaacccacaaggcagaggttgcagtgagctgagatcacaccactgcactctagcctgggcaaaaacagcgaaactccatctaaaaaaaaaaaaaacaaaaaaacaaaaaaacaaaaaaaaaacctagctcttggctttagtgttcccatcagcacaatcgtaatgcattcagctctgtgctaactccttgagcccagggatttctgacgtgaacagctgcaaccctgagaggtgctgtgtggaaggattttggagcccagcatcctgggttcatcatccagagtctgccacttgctctgtgaagttgtgcaaagcctctyaaattctctgctgctatgaaaccaaggcagtggagctgtgaatgagatgagtaaaaaattttgcctgataaatgttgctttgtaaaaatctgtaggtagtgcatagaatattagtctttctgctttcacttttcccacaatacttgatatcttttattttaaaaaaaagacctaaagattagctgagcgtggtggtgcacgactctagtttcagctacttgtgagactgaggtgagaggattgcttgaggccaagtgttcaaggctgcagtgagctatgatcacacgtgtgaatagccactgaacttcagcctcggtgacagtgtctcaaacaaacaaactaactaaagaaaacctggcaataactttaacatttgttcattctgggtgatggatccgctgatgtttgttataatgcgctctgtgctaaaatttaaaattttattttaagattgggccagggttatggtgccaccttgtggccatactgttattatcttgaacttgagactttttttttcttttttagagacaagagtctcgttctgtggcccaggctggaggcagtgatgctatcatagctcagtgtaacctcgcactcctgtgttcaagctaccttcccacctcagcctcccaagtaggtaggactagaggtgtgcgctaccacacccagctaaattttttaagttttttgtagagacaaggtcttgctgtattgcccaggctggtctcaaactcctggcctcaagtgatcctcctgcctcagcctctcaaagcactagagttacaggcatgaggcccgcacctggctgggacctttatagacgcttcatgtgtgctctcctataactgtcatttgggtcatgaaataacgaagtcctagacctcttaacatttcagggttggccaggcgcggtggctcacgcctgtaatcccaggactttgggaggctgaggtgggcggatcatgaggtcaggagatcaagaccatcctggctaacacagtgaaaccccatctctactaaaaatgcaaaaaaattagccgggtatggtggcgggcgcctgtagtcccagctactcaggaggctgaggcaggagaatggcgtgaacccgggaggcggagcttgcagtgagccgagattgcaccactgcactccagcctggccgacagcgcaagactccgtct

SEQ ID NO: 88257 - DNA, 569 bp, Homo sapiens
aactgccagggaacattcccccggcagtggcaccctcttctttgacaaacactgacatagaaactttgactggtaaatggatttaacaaaaccaagtgggtcagtaactgtggtggctagagccatgtctgggattgcagaggattcacagagcacagtttgcagagcagggccctagaggggaggatgtaggttaactagggacagcagggaacacaggaaaggacggctcaggcacatggtgaaatgccagcctttcaggtgctccgcctgagggctgagcagtgggctttgatgacaagagctacctgctcagagagttgccgccagagaattcatctagcagctgaatccaggatggattagagcacaaggctgccgacagggaggttactgcaatrgtccaagggaaggattatgagggcctgatttctgggcggcagtgggaacggaatgaaacagacagatgtgaaaaaagattggaaaggggaagaaaatctgctcaactgactgcatgccctcaagtgagggagaggaaagagctgaagatgacttgaaaaatttctact

SEQ ID NO: 88258 - DNA, 592 bp, Homo sapiens
gcaccgagaagagggttagagacctgctgacggccaggccctggtgcagggacctcaggggtgctgagctggagacctggtgaccagcttcctctcttgcctaactctgtccttcctgcccccgtgaagttggcggatactgggaaacctgagcagccagattcctttgcttctagaacwcaggtccaccactgtcagaagctgtttctcaggagcaccagcagagctgcctgaaggtgatctctctgggaagcatgtgattctcagaatcaggcctcttctcagcttatcagacttagtcaaaggtgcaatggaaatgttcacatcagataccctacctactagagtgatgcatcctttaaaaatcagtatataagtgggctgggtgtggtggtgcccgcctgtaatcctcgcactttgggaggcataggccagcagatcacttgagcccagaagctgcaggagcctggttgaagacatggcaaaaccctgtctctacaaaaaatacaaaacaaggtgtggtggtgcatgcctgtagtcctagctactaggaggcttgcctgagcccaggaggtgggggttgcgatgagcc

SEQ ID NO: 88259 - DNA, 592 bp, Homo sapiens
gcaccgagaagagggttagagacctgctgacggccaggccctggtgcagggacctcaggggtgctgagctggagacctggtgaccagcttcctctcttgcctaactctgtccttcctgcccccgtgaagttggcggatactgggaaacctgagcagccagattcctttgcttctagaactmaggtccaccactgtcagaagctgtttctcaggagcaccagcagagctgcctgaaggtgatctctctgggaagcatgtgattctcagaatcaggcctcttctcagcttatcagacttagtcaaaggtgcaatggaaatgttcacatcagataccctacctactagagtgatgcatcctttaaaaatcagtatataagtgggctgggtgtggtggtgcccgcctgtaatcctcgcactttgggaggcataggccagcagatcacttgagcccagaagctgcaggagcctggttgaagacatggcaaaaccctgtctctacaaaaaatacaaaacaaggtgtggtggtgcatgcctgtagtcctagctactaggaggcttgcctgagcccaggaggtgggggttgcgatgagcc

SEQ ID NO: 88260 - DNA, 828 bp, Homo sapiens
agtcagcgccgacatccttaacacagaaggtctctcccaggaagagtgacttcattgttgttatgaaggaaaactatatctgagcaagatcttcacctcatgaccttcaacactgtgaatcaacaatttgggggatttcaaagacaaagggcaaaaattaccatcctgtttgtcacacacacaacaagaaaccagaccaggatgacagaggtatgactggaattcctccctggacccagtgatattttggaaaatcccatcgatggcatgatttataaattatgattttccaaaatgttgaatatttgaatattctttttcttttcttttcttttyttttttttttttgagacagagtcctgcttgttcctcaatctggagtgcaatggcgcaatctcggctcactgcaaccttcgcctcctgggttcaagcaattctcctgtctctgcctcccaagtagctggaattacaggcatgcaccaccatgcctggctagtttttgtatttttagtagagacagggtttcaccatgttggccaggttggtctcgaactcctgacctcaggtgatccacccacctcccaaagtgctgggattacaggcgtgagccaccacgcccagcctgaatattctttttaaccaagtaaacatttactgagtatttactacgtcccagacattgtgtgggtcatacaaagatgagcatgattcagtctcggtggcaggagcagtccgtggctgatgcatgtgttacataatcatacgtactctctgttagttgtagatatttttgtgatgaatgaatgccaggaatcttgtctgccttcg

SEQ ID NO: 88261 - DNA, 1555 bp, Homo sapiens
gagcattagagtatatgcttgtgtagaacttgggaggcaggccaacctggcaacagattccatctctgacgcttatcagggctgtggtcttcagcgatccattgagcttttctatgccttcatttcctcaaatggaaaaaggagaaaaatatatgtatacaaaatatcattccatttaaataaaaatgaaaaaagctccaaaaaatgaaaaataagacaaagtcttgcagagtcgttatgatgcttgaacaagtcatgtatgtaaagtgcccaccatagggcttggccactgtgtttactcatggcctggcaggagctaacagtgggaggcaatcattactgggagcagcacgttaacctgcttgtctttggttctaacccactaacctatcatttttccttaggtggaatattcactttaatttcttaggaattcagtttgctarattgtaaaatgagaatgatggtaaacagactttttttacaacacagtctaatgtgttgtaaatgcagtagaatcagaggccccaaagggctcatttattttatttaaaaaaatccattctttttagcctgagcagtactattttgaataaattggacaacagtgctaaagttttctggaggccataaaaccttttgaaaatctgatgaaagctatgtccactccctagaaaaatgaacatgttcacatagttcacacaacgttcagagctgtattagtctgttctcaagctgctgataaagacatacctgagactgggtaatttataaaggaaagagctttaatggactcacagttccacatggctggggaggcctcacaacaatggctgaaggtgaatgaggaggaaagtcatgtctcacatggtggcaggcaagacagcgtgcgcagcggaactcccatttataaaaccatgagatctcctgagacttattcactatcacacgaacagcacagaaaaacccacccccatgattcaattacctcccaccaggtccctcctgcaacatgtgggaattatgggagctacgactcgagatgagatttgggtggggacagagtcaaaccatatcaagacccttcacgatttcttgatggccagggtctgctgacattatgtataaaacctattgtttaaggcctatattggtaagtgttgttgttgttgttgttgtttttgacatctaagaaatgagatttcacagaatgctgaaacatccccttctcccaataagggaggtttgtactcaaggtggagggtgtcatccacatagaatatggagcttcatagaaggcagattcacgtagatgtgaagagaatgtaaaaggcaggccacgtgtgggatctctccctttatccaataggactcaatgacaggtgaagagacaaatctatacttttcccagaatcttcctgaagatgaggtttgcatggccctctcctcagttgcttcttcctatatcacagcaaggtttgaagtcagagtgtttgtcctccaagaatcctgtggaactgtgcagttccctccacattagaactctgctccctgg

SEQ ID NO: 88262 - DNA, 555 bp, Homo sapiens
caggaaatatgactttgaatagctggttaaaggaagcagaaacatcttagttagakaatttttttggattattggcctggctcaatattgctgtttaattgtgttttaccattcaaaaccttattaccagatgctcaggtctgggaaacccaattgttaacatcattgcacaaaattaaattaaatttccaaagccacataaatattaagacaaagctatgggtatgtctgaacataaattagactgaaacttagactgaatactctaagaatgctaggcttctaaatgtcattacttaattcaccgatcatctaaggtggggagtggagtctgttcagcaccaccagctgattttggcattgttgttaagacccagactagaaatcaaatctacagcagacaatgaattagggctatgtgttaggcttttatctgaagccacagaccaaatcttggaatcattcttaaaggtctgactgcaatgggaggccacacacaacacataggcacaatagcattagggccttccaagttaagcatgagaaatttagtca

SEQ ID NO: 88263 - DNA, 1300 bp, Homo sapiens
cccagtcttcaacaaactcacattctgtagagacagataattaaaccagactctctcaaacttaaatgtgcaaacaaatcacctgaaaatactgccaggtctgggacagaacttgagcttctgcatttctaacaagcccctaggtgatgccgatgttgttgactggaggaatgtactgtgagttacaattaaaagacagagtgagaagcactgtgataaaactgtagctcagaggggtgaaaaagctcactaaaactcacaataatttgaataactgggatcggacccaagatatatctgactccaaagtctgtgtatgctctttcctgcctcccttaaggagaagaaaggggactgtggaaacaggtagtgtctcagtctgatttatgttgctataacagaatacctgagactgggtaatttataaagaaaagaggtttatttagttcatggttctgcaggctgggaagttcaacagcatggcattggcttctggtgaaggcttttgtgctgcatcataacacgaaggaaggtcaaagggggaacaggcaaaagggaccaaaaaagaggaggaacctcgctttataacaacctgctctctcaggaactaatccattcctgcaagagtgagaactagctcactcccacaagatggcattaatctatttatgaaggatccacccccatgacccaaacatcttccactaggccccacctctcaacacagctgcactgagttttgcgggggacaaagcatatccaaaccatagcaggtagtgggcatttagtccagcctctgggcaatgytgcccaagctggatcttaatagatgaataggagcttgcctgacaaagaaataaggcagggagaaggctcccagtgcaataactggcacaaaaacacaaagggtgagggtctggatttgaatctcattccaccactgatgagctttaaaattgtggacaacttacctaattgccatgtctcagtttcctcaactataaaatggagataatcataacagcactcacctcattgggttggtgtgagaattaaatgagctggtatgtataaagggtttcgaacagtgtgtggcacagtgtaagtgctcaataaacattagctctgattattccagcagttgctcaatataaaggataagcagtggaaggaatgagggtgtttcaggcagatgattcctcctgtgcctgggactggcctatcagggtgggggactgggaaagcactacagttactgcccagaaggactgctgctctgttctggtggggagggacccag

SEQ ID NO: 88264 - DNA, 673 bp, Homo sapiens
ggggctcagagaaagcctgtgggctgactgggttggtcagtgaaggtttgtgtcacggataaagagattttgactgggccatggagggtgagttaatttaaaagccaaagcaaatgtgagaggtaatgtaggcaaaaaggtgtgaaggtggaagagaccaagatatttttgttaattatttgatcaatttgctgtttctattagactgcaaactccatgaaagcaaggttcacttttgctctattcatgaccrtatgctgacactgggcataatgaaaacactcagcaaatatgcaccaagtgggcagggagtatgaccaggagagttaagatgacaactaggttcaaacaagaacggaggagcggtgacagatgaatgaaaaggtgacttaggaaagggtccttgaggctgaagttctcttgtaggcattttgaagagttaaaattatttaggagaaaacttgagttccattgagatgtaagtagtatttgagaaatttatctcatagctgaattaatctagttcatttagaatcattttctgtggttggtctcatcactgaatcacatacctgtgcccaccccagtaggaaatgcaaatcacgacaaatcatggacatccagacaaattgctggagctgctcagctgagactgagcatcttcggtgcctca

SEQ ID NO: 88265 - DNA, 673 bp, Homo sapiens
ggggctcagagaaagcctgtgggctgactgggttggtcagtgaaggtttgtgtcacggataaagagattttgactgggccatggagggtgagttaatttaaaagccaaagcaaatgtgagaggtaatgtaggcaaaaaggtgtgaaggtggaagagaccaagatatttttgttaattatttgatcaatttgctgtttctattagactgcaaactccatgaaagcaaggttcacttttgctctattcatgaccatatgctgacactgggcataatgaaaacactcagcaaatatgcaccaagtgggcagggagtatgaccaggagagttaagatgacaactaggttcaaacaagaacggaggagcggtgacagatgaatgaaaaggtgacttaggaaagggtccttgaggctgaagttctcttgtaggcattttgaagagttaaaattatttaggagaaaacttgagttccattgagatgtaagtagtatttgagaaatttatctcatagctgaattaatctagttcatttagaatcattttctgtggttggtctcatcactgaatcacatacctgtgcccaccccagtaggaaatgcaaatcacgacaaatcatggacatccagacaaattgctggagctgctcagctgagactgagcatcttsggtgcctca

SEQ ID NO: 88266 - DNA, 1322 bp, Homo sapiens
gtcacacactaagtgatcaaatggaaatgaacatggcagtttggttccagagccagggctctaaaccacagcagattactcttagagatagatattccacacataaacaaaatcacattaaattaaaagagtttacattgggtgttctgaggtctgaaactgcatatctggttctacaactttcatagagttcctgattttgactgcttgggtaaatggctgcacatcatggcctctcctgcaagccattagcttccatgtaacacctagtgtgagaagttactaaaggagattagtctgttggctagatcattcttctctgtagttttctcccattcatcctagactgatctggtagatcatataaatgacaagtaatcactttccagtagttgaagagcagtctgcctttctggggtgctctttgccttggtccaaacactttcagcttttccaaccattgctttgagctatcaggaataatccaatcatttttgagttctgtgattgtgcatggatattttctccttgggcataaacctgtctgtagaaattttcttatcataaaactttagtctatgttcaaataaaaaatatagccttttacgggatactgaaaaaaatccttcttcgtgggcctttggaaaggaaattctgtccttgtaatttcccacggtgattctaagtgtatggtcttttccatagcaattattggcaatgaacagtaaaaatggtaaaaatactttcttttatattttaagcctgctacagttttaaagagtttaagtatagggctttatggtgaaagcaaattatgaaatccccatgtttatcttctgcatgccagatgagggtgtatccctaattctttccctgtttgtctttcccaatttcccctttgaaaggcaaacctttaaactgaacagacattttgaacttctacttgcatagcctagcatcagaacttatggaaacatgtgagggagcagataaactaagacaaggaacctggcttacctgatcactgatgttaccaaggacaagcagtggctggagaaagtttggtacatgtgactaagattagcctctgaggaatgtctgatggtggtcggagtgtaaggactaatggttttgaaagtattcatcaccattggtgatgaaatttcactgcagttttggttactttcaataaaccacgtagactcactgtggcttcccttaatgtgatgtagctaacattcagcaaagtacgtaccagcaagaccatgcattaagggtagtgtgtgtgtgtgtgtgtgtgtgtgtgtgtgtgtstgtgtgtg

SEQ ID NO: 88267 - DNA, 1322 bp, Homo sapiens
gtcacacactaagtgatcaaatggaaatgaacatggcagtttggttccagagccagggctctaaaccacagcagattactcttagagatagatattccacacataaacaaaatcacattaaattaaaagagtttacattgggtgttctgaggtctgaaactgcatatctggttctacaactttcatagagttcctgattttgactgcttgggtaaatggctgcacatcatggcctctcctgcaagccattagcttccatgtaacacctagtgtgagaagttactaaaggagattagtctgttggctagatcattcttctctgtagttttctcccattcatcctagactgatctggtagatcatataaatgacaagtaatcactttccagtagttgaagagcagtctgcctttctggggtgctctttgccttggtccaaacactttcagcttttccaaccattgctttgagctatcaggaataatccaatcatttttgagttctgtgattgtgcatggatattttctccttgggcataaacctgtctgtagaaattttcttatcataaaactttagtctatgttcaaataaaaaatatagccttttacgggatactgaaaaaaatccttcttcgtgggcctttggaaaggaaattctgtccttgtaatttcccacggtgattctaagtgtatggtcttttccatagcaattattggcaatgaacagtaaaaatggtaaaaatactttcttttatattttaagcctgctacagttttaaagagtttaagtatagggctttatggtgaaagcaaattatgaaatccccatgtttatcttctgcatgccagatgagggtgtatccctaattctttccctgtttgtctttcccaatttcccctttgaaaggcaaacctttaaactgaacagacattttgaacttctacttgcatagcctagcatcagaacttatggaaacatgtgagggagcagataaactaagacaaggaacctggcttacctgatcactgatgttaccaaggacaagcagtggctggagaaagtttggtacatgtgactaagattagcctctgaggaatgtctgatggtggtcggagtgtaaggactaatggttttgaaagtattcatcaccattggtgatgaaatttcactgcagttttggttactttcaataaaccacgtagactcactgtggcttcccttaatgtgatgtagctaacattcagcaaagtacgtaccagcaagaccatgcattaagggtagtgtgtgtgtgtgtgtgtgtgtgtgtgtgtgtgtgtrtgtgtg

SEQ ID NO: 88268 - DNA, 857 bp, Homo sapiens
tccttagcaaatacatgcaggtcttcattgcgtttattttgtgtattaccctgcctctagtctatgatcccatcattgctttccctttgcctttctcacttgtttctaatggacttgtttctattctaatattgtacctctttttgttcccctctgtaaatccttttgaagaaaggcatgagaataaagatgtatctgtatctttctctcaccaggctatgagctccttgagaatgtcctggggttgtttctctatcattttgcacttggatgtggcacagacttcaccgtatgttcagtaaatatttttgaaagtaaactaaatgaagttgccattgaaaaataaaaagaaatcatctggtaatttgagcaatgccagttttctatttcatggtaagacaaaaggaaaagactgagaatccaattgtcacctacaaacaagaaggcagaagatattccttatctaagtcaaggataaatagatgaccttaaaaaagttccttgtttttttaacctgttgatggtgtraccatgacaatgttgtggcttataaaccaagaaaaatgaaagatgcttgtaatccatctatcacagagctttgcacatagttgatactggataaatacatgttgaacccagtttctctgaatactagtttgagaaatagagtcatttagaacgcttggcaggaaatatctggtacttatttttcctcagattgaaatctaaaaacatctcaggaaaccgttgaactcaggattgttaacttgaaccagagtcatacaaaagacatctagctcactgggcaatgctttttaatgacagaatgccctatttcacctagaactttcttcttt

SEQ ID NO: 88269 - DNA, 2767 bp, Homo sapiens
tgtgctttattttgttttcgcagagaagtgagcaatagggtgggtgaggtttgggggaaggaaacctaggatagaggtataatttttttgaagtttatatcagagcatgagttgatcagggaaattgaagaatgagaaggcaagtgtagatgtacagaacagagtggcttcctcagttccttggagttctttatacttctggaagtttctaaggggaatgttccattgtaccatctgccaccttttgtcttttggtatgctgtctctctctctcaccttcagaaatggtgggaaaacggctaggacagcaggatagaacataggaaatggagtcctttaacttcacctacattttgttcctaacatcttgattttagtatattgtctttgtagcaataaaatcggaactattgcctctgcaccaaatttgactaaggctaaaaatagattagcgaggttgagcatggaagaagtggcaagcttctccttcctccttttcattttgtttcagtttgaatagaaggaggtagctcacacaattaaccagaacagcaactggctggatgtctgggtgctttgagccaattaggatatttttgtggaaagtttccaattcttaattctcagttatgtagaggtgggaggcagctggtgtgaatgtctgtctgcagggtacatgcatactaactctgatccaatatggcatgacagcaatgtgcttattcaagaaaataattatctcaattttcttgtactctaacctaaaatgtcttcgccttcacgacttaaaaaaacaaaacaaaaaaccagaaaaaaaaaaagaaacgccaaagctaacatcacccacatattttgagacctctagtggtatcaataatgaaattaagctaagtctgaatgggcaacagtaattcattatcttcctccacggacccactgccctccccgggaagtctccctttaattaactaccktcatcatttcttctgattttcagaatttcttgacttcactctctctttcacccctcatttttggtgtccaagtggccaccaaagcaatatcccagtgtgtaagctgctatggtgaggaaggtgcagggagtatctggggacaagtctagttttgggttgtcacagatttcctagagaattgatgatttagctgagactttaaggttcagaataatgtagccagaagaagagtgctttaggtatcttccatgcaacaaatttttattgaatacttactgtgggtcaaggtttatgccagactctgtagcgttagaaagctaggcacaatccctgctctcttagcacctaggggatttcaaggttggggagaaatagacatgaaaatataagcacaaaatatctatctatcaatagggccttctaaagggtcactatcctctaatacatattagggaatttaaaatttcaactttttttttctactaaagagtccaaccagcaatttcccctgagtatccagtgcttgctccttcttgccgttccaggctctgttatgcattctgctatggttgcccagagctcgcaatcagaatctcctctccattacctgaatgtgggggagagtattgtttcttgtactttcctgtctatctgtatagttcacaatgaggcagagaacagagtctggaggcagggaacctaagggcgtttcaccccacttcctaaactaaattgaaaggaaaaccctaactttccacacctgagtaacaaaaggaccagaagctgctccctttgcaaaccctcaccttttctgcgtggcagatgggaaactggctgtcagcaaccaatgagactgattgcgggtggagtctttgcatagaagtgcaactttgtaacttcaccttagcctctgattggttgctttttaaacagaagtgtgcaaaaagtgtgattgcacagaagtgtgacctttgttaactccacttcagcctctgattggttgacgaaagcaaccaatcagactaattgtgcgtcaccacttcatttacatgagaaacctccagggggtatttggacctcagaagattctgcatccggaaccttgagccaccgctggggccgcttccatactgtggagtgtactttcattctcaataaatccctgctttcttctttccttgctttgctgggcgtttggtccaattgtttgttcaaaatgccaagaacttggacgacttgcagtcaagaccctctaatggtaacaacaacaccgtgacagagcttttactaaagggctgaattaaagattacactataaaaggggaacactgtaaagctgtcagctaaactagtctttcctccacagttcgtgaggaaggaacctaatttatacattcaacaaatttatgccagctgttctctgatgtgcccaaggcagataaaatctatccatggaggtttcatttcagtgagagggagatatacaagaaataagtaaacacctacattgccaacataattagagatggaggaggaaaataacagggtggaacttctgacagctctcctgggaaggtctctgtggaagtgatgtatttgagctgagacctgaaggaagggaaggagttggccgaaaaggtagaatagaattgcagaaagagatcaaggggagctcttcccaggggtcccctgccctcatattgcctgtcttcactggtgtcacctaatctcctactgctcataacctggctacctatctttcactatctttcaggacaactcagccctatgca

SEQ ID NO: 88270 - DNA, 2767 bp, Homo sapiens
tgtgctttattttgttttcgcagagaagtgagcaatagggtgggtgaggtttgggggaaggaaacctaggatagaggtataatttttttgaagtttatatcagagcatgagttgatcagggaaattgaagaatgagaaggcaagtgtagatgtacagaacagagtggcttcctcagttccttggagttctttatacttctggaagtttctaaggggaatgttccattgtaccatctgccaccttttgtcttttggtatgctgtctctctctctcaccttcagaaatggtgggaaaacggctaggacagcaggatagaacataggaaatggagtcctttaacttcacctacattttgttcctaacatcttgattttagtatattgtctttgtagcaataaaatcggaactattgcctctgcaccaaatttgactaaggctaaaaatagattagcgaggttgagcatggaagaagtggcaagcttctccttcctccttttcattttgtttcagtttgaatagaaggaggtagctcacacaattaaccagaacagcaactggctggatgtctgggtgctttgagccaattaggatatttttgtggaaagtttccaattcttaattctcagttatgtagaggtgggaggcagctggtgtgaatgtctgtctgcagggtacatgcatactaactctgatccaatatggcatgacagcaatgtgcttattcaagaaaataattatctcaattttcttgtactctaacctaaaatgtcttcgccttcacgacttaaaaaaacaaaacaaaaaaccagaaaaaaaaaaagaaacgccaaagctaacatcacccacatattttgagacctctagtggtatcaataatgaaattaagctaagtctgaatgggcaacagtaattcattatcttcctccacggacccactgccctccccgggaagtctccctttaattaactaccttcatcatttcttctgattttcagaatttcttgacttcactctctctttcayccctcatttttggtgtccaagtggccaccaaagcaatatcccagtgtgtaagctgctatggtgaggaaggtgcagggagtatctggggacaagtctagttttgggttgtcacagatttcctagagaattgatgatttagctgagactttaaggttcagaataatgtagccagaagaagagtgctttaggtatcttccatgcaacaaatttttattgaatacttactgtgggtcaaggtttatgccagactctgtagcgttagaaagctaggcacaatccctgctctcttagcacctaggggatttcaaggttggggagaaatagacatgaaaatataagcacaaaatatctatctatcaatagggccttctaaagggtcactatcctctaatacatattagggaatttaaaatttcaactttttttttctactaaagagtccaaccagcaatttcccctgagtatccagtgcttgctccttcttgccgttccaggctctgttatgcattctgctatggttgcccagagctcgcaatcagaatctcctctccattacctgaatgtgggggagagtattgtttcttgtactttcctgtctatctgtatagttcacaatgaggcagagaacagagtctggaggcagggaacctaagggcgtttcaccccacttcctaaactaaattgaaaggaaaaccctaactttccacacctgagtaacaaaaggaccagaagctgctccctttgcaaaccctcaccttttctgcgtggcagatgggaaactggctgtcagcaaccaatgagactgattgcgggtggagtctttgcatagaagtgcaactttgtaacttcaccttagcctctgattggttgctttttaaacagaagtgtgcaaaaagtgtgattgcacagaagtgtgacctttgttaactccacttcagcctctgattggttgacgaaagcaaccaatcagactaattgtgcgtcaccacttcatttacatgagaaacctccagggggtatttggacctcagaagattctgcatccggaaccttgagccaccgctggggccgcttccatactgtggagtgtactttcattctcaataaatccctgctttcttctttccttgctttgctgggcgtttggtccaattgtttgttcaaaatgccaagaacttggacgacttgcagtcaagaccctctaatggtaacaacaacaccgtgacagagcttttactaaagggctgaattaaagattacactataaaaggggaacactgtaaagctgtcagctaaactagtctttcctccacagttcgtgaggaaggaacctaatttatacattcaacaaatttatgccagctgttctctgatgtgcccaaggcagataaaatctatccatggaggtttcatttcagtgagagggagatatacaagaaataagtaaacacctacattgccaacataattagagatggaggaggaaaataacagggtggaacttctgacagctctcctgggaaggtctctgtggaagtgatgtatttgagctgagacctgaaggaagggaaggagttggccgaaaaggtagaatagaattgcagaaagagatcaaggggagctcttcccaggggtcccctgccctcatattgcctgtcttcactggtgtcacctaatctcctactgctcataacctggctacctatctttcactatctttcaggacaactcagccctatgca

SEQ ID NO: 88271 - DNA, 1508 bp, Homo sapiens
cagttcataagagaacagagttgactaattcatcattttttaasccaaattaagtggcacaattcagcccccagttctgaaagttttaaatgttcaattttgaaatttggtgaaagccaggattatcatgctctttaagtgttttatattgcgtctagcacatattagaacttaataaacatttaataatccatatagaaccacatttacttctctgctttttgacacacaagacacagatacagtcccagggattttcaaggagtcagtggttttcatgaaagcgtaaaagtgaaagcaaagttttcctttctaggcagtgaatcatttaacttctgagttcaggaaaatttaaagtttaagaaggctagtctagaaatcccttctttgcatatccaagctgttcatctctcaaaagtcaaagtggatgccagaattccatagatttcatttttcaagatgaacagtcatatttgaacatatttcaagccagatggtttacagttcatgtatttgttggcgttttcctgccacaacaactaaatattgaagacacatatttgtgatgaggagcgcacttccaaccatcttttcctgttgctctttcaggctgcgtgctcagcccctcccccagcgccacatcactgcatgccgcaggggaaggctcccagcactcacacgatgaagtacatccatttgatttaatagacaggggataggagaaatcacataaaacaagcctcctccaaatacatatttcttgtaacagccatgaattttccggtaacaaataagaaagcaaatgaacagctattgaaatattcccattttcaccatccctttagacaagctggaaagtttactttttatcctcctagtaccttataagccagtttgccaaactttgagactatttgatcagagttcagaaaagaacaggaacatccaacaaaggtttagtattttttttaatgccatcagatatgaaaatagcagctggagaaagcactgcacatttgttctgaaggatgccaacgtcactcagcaggttcagtgatatctcccttccaggatgatatgacttgcagttcatttgtcatcttatgcacaattttttattattctactcagttgtcaatgtttgcattattacagtcttaaagattcattttaatgtgaaagggccattgggaagttggaccaaagcaatatggaaatttaaaacatggaaaatagaagaaagaatgtaagcacataaaagaattatgtttgcttagtaccataacaagatttctatgaattttccataagcacttcacaagaaactggcaaaacggaataaagcaaacccgtccactgccatcattataaccgtcacccaatgacccagaacacatacacacaaaaagacccagtaatttttttttagatatggtttgtagagtcccatattttgaatgaaaatttcccctagaatcatgaccctcaaaaacggagggagatcgcag

SEQ ID NO: 88272 - DNA, 1304 bp, Homo sapiens
ggagtgcagtggtatgatctcggctcactgacacggccgcctcctgggttcaagtgattttcctgcctcagcctcccgagtagctgggattacaggcacctgccaccacacccggctaatttttttctatttttagtagagatggggtttcaccattttggccaggctggtctggaactcctgacctcaggtcatccacccaccttggcctcccaaagcgttgggattacaggcctgagccactgcgcccggccagagctcatgcattttaaaggtgagaaagccaaggcatgtcttctccccctcccccagctcagccccctcacaaaacatgcacaggtgcacacaagcatacatgcatgaacatttgcctatgcacacatgctgaccgtgcacacacacatgcacatgcacactggacaactgcacacactcccgccccagaccctggctgtgccctcctgtgagtcacaaggtgactcacaggcacctccctcctctctgatcttcagggtaggggagagacagtaaaagggagagggagaagagatgtctcaaagccaaacctaagaaagtgactttgggtccagctggggcctgagggacaatcagggtcagggctggggatccagggtgtcctgcctgtgccagcccggaaaacaaggcacatcagcaccaagtcamcaaggccctccttctctcacaagctcccctccctgtgggctctttccccgcctgctggacccaggttccagctggaggggaggaagccactaagatgcagtgggggaaagtgatgccctcacaaacataataccacgacaccacaccccgggacaccccccagtcaccacccacagcctcccagtggcttcgtgggggatgtgggttgttcagactgcagccagcaatcaccaataaccacctggccccaacacatccctggcctagacacaaagtcttcaaatacccaggcctttttttttttttcagacagagtttcgctcttgttgcccaggctggaatgcagtggcgcgatcttggctaaccgcaacttctgcctccctggttcaagcaattctcctgcctcagcctcccgagtagctggattacaggcatgtgccaccacacctagctaattttgtatttttagtagagatggggtttctccatgttggtcaggctggtctcgaactcccgacctaaggtgatctgcccacctcagtctcccaaagtgttgggattacaggcatgagccaccgcgcccaacctacgctttttttttttcagcttcaatcacctgg

SEQ ID NO: 88273 - DNA, 1304 bp, Homo sapiens
ggagtgcagtggtatgatctcggctcactgacacggccgcctcctgggttcaagtgattttcctgcctcagcctcccgagtagctgggattacaggcacctgccaccacacccggctaatttttttctatttttagtagagatggggtttcaccattttggccaggctggtctggaactcctgacctcaggtcatccacccaccttggcctcccaaagcgttgggattacaggcctgagccactgcgcccggccagagctcatgcattttaaaggtgagaaagccaaggcatgtcttctccccctcccccagctcagccccctcacaaaacatgcacaggtgcacacaagcatacatgcatgaacatttgcctatgcacacatgctgaccgtgcacacacacatgcacatgcacactggacaactgcacacactcccgccccagaccctggctgtgccctcctgtgagtcacaaggtgactcacaggcacctccctcctctctgatcttcagggtaggggagagacagtaaaagggagagggagaagagatgtctcaaagccaaacctaagaaagtgactttgggtccagctggggcctgagggacaatcagggtcagggctggggatccagggtgtcctgcctgtgccagcccggaaaacaaggcacatcagcaccaagtcaccaaggccctccttctctcacaagctcccctccctgtgggctctttccccgcctgctggacccaggttccagctggaggggaggaagccactaagatgcagtgggggaaagtgaygccctcacaaacataataccacgacaccacaccccgggacaccccccagtcaccacccacagcctcccagtggcttcgtgggggatgtgggttgttcagactgcagccagcaatcaccaataaccacctggccccaacacatccctggcctagacacaaagtcttcaaatacccaggcctttttttttttttcagacagagtttcgctcttgttgcccaggctggaatgcagtggcgcgatcttggctaaccgcaacttctgcctccctggttcaagcaattctcctgcctcagcctcccgagtagctggattacaggcatgtgccaccacacctagctaattttgtatttttagtagagatggggtttctccatgttggtcaggctggtctcgaactcccgacctaaggtgatctgcccacctcagtctcccaaagtgttgggattacaggcatgagccaccgcgcccaacctacgctttttttttttcagcttcaatcacctgg

SEQ ID NO: 88274 - DNA, 1304 bp, Homo sapiens
ggagtgcagtggtatgatctcggctcactgacacggccgcctcctgggttcaagtgattttcctgcctcagcctcccgagtagctgggattacaggcacctgccaccacacccggctaatttttttctatttttagtagagatggggtttcaccattttggccaggctggtctggaactcctgacctcaggtcatccacccaccttggcctcccaaagcgttgggattacaggcctgagccactgcgcccggccagagctcatgcattttaaaggtgagaaagccaaggcatgtcttctccccctcccccagctcagccccctcacaaaacatgcacaggtgcacacaagcatacatgcatgaacatttgcctatgcacacatgctgaccgtgcacacacacatgcacatgcacactggacaactgcacacactcccgccccagaccctggctgtgccctcctgtgagtcacaaggtgactcacaggcacctccctcctctctgatcttcagggtaggggagagacagtaaaagggagagggagaagagatgtctcaaagccaaacctaagaaagtgactttgggtccagctggggcctgagggacaatcagggtcagggctggggatccagggtgtcctgcctgtgccagcccggaaaacaaggcacatcagcaccaagtcaccaaggccctccttctctcacaagctcccctccctgtgggctctttccccgcctgctggacccaggttccagctggaggggaggaagccactaagatgcagtgggggaaagtgatgccctcacaaacataataccacgacaccacaccccgggacaccccccastcaccacccacagcctcccagtggcttcgtgggggatgtgggttgttcagactgcagccagcaatcaccaataaccacctggccccaacacatccctggcctagacacaaagtcttcaaatacccaggcctttttttttttttcagacagagtttcgctcttgttgcccaggctggaatgcagtggcgcgatcttggctaaccgcaacttctgcctccctggttcaagcaattctcctgcctcagcctcccgagtagctggattacaggcatgtgccaccacacctagctaattttgtatttttagtagagatggggtttctccatgttggtcaggctggtctcgaactcccgacctaaggtgatctgcccacctcagtctcccaaagtgttgggattacaggcatgagccaccgcgcccaacctacgctttttttttttcagcttcaatcacctgg

SEQ ID NO: 88275 - DNA, 1304 bp, Homo sapiens
ggagtgcagtggtatgatctcggctcactgacacggccgcctcctgggttcaagtgattttcctgcctcagcctcccgagtagctgggattacaggcacctgccaccacacccggctaatttttttctatttttagtagagatggggtttcaccattttggccaggctggtctggaactcctgacctcaggtcatccacccaccttggcctcccaaagcgttgggattacaggcctgagccactgcgcccggccagagctcatgcattttaaaggtgagaaagccaaggcatgtcttctccccctcccccagctcagccccctcacaaaacatgcacaggtgcacacaagcatacatgcatgaacatttgcctatgcacacatgctgaccgtgcacacacacatgcacatgcacactggacaactgcacacactcccgccccagaccctggctgtgccctcctgtgagtcacaaggtgactcacaggcacctccctcctctctgatcttcagggtaggggagagacagtaaaagggagagggagaagagatgtctcaaagccaaacctaagaaagtgactttgggtccagctggggcctgagggacaatcagggtcagggctggggatccagggtgtcctgcctgtgccagcccggaaaacaaggcacatcagcaccaagtcaccaaggccctccttctctcacaagctcccctccctgtgggctctttccccgcctgctggacccaggttccagctggaggggaggaagccactaagatgcagtgggggaaagtgatgccctcacaaacataataccacgacaccacaccccgggacaccccccagtcaccacccacagcctcccagtggcttcgtgggggatgtgggttgttcagactgcagccagcaatcaccaataaccacctggccccaacacatccctggcctagacacaaagtcttcaaatacccaggcytttttttttttttcagacagagtttcgctcttgttgcccaggctggaatgcagtggcgcgatcttggctaaccgcaacttctgcctccctggttcaagcaattctcctgcctcagcctcccgagtagctggattacaggcatgtgccaccacacctagctaattttgtatttttagtagagatggggtttctccatgttggtcaggctggtctcgaactcccgacctaaggtgatctgcccacctcagtctcccaaagtgttgggattacaggcatgagccaccgcgcccaacctacgctttttttttttcagcttcaatcacctgg

SEQ ID NO: 88276 - DNA, 1301 bp, Homo sapiens
ctgctcagcctcctgatgccttccctctgtcctggatcagattcacccctgcctgggccttctgagctgctcctgccctgagtaccacccctcagtgccccccacctcactgcctcttccccactttcctgaccctgcctgtgagaggctgctttctgcctccatagcaacctctatccaccccccagtctccttcctcccatcctgggggcccctagcctggctccttccatctcctcawcatacctaaatcttgtcattgaactgatataaataggtagtagaaatatacataagtgtgaaagttaagttttgagaaacaccttttgtaaaaaaccgatggtaagtattgggtcattcttgtcacacccaactcaaacagaggccaggagccaggaggggaaaccactcagtttgcaaaacgtcgcttccacaagcctgatggctgaaactgctcactgtaccctgaaaccagctttacctacagcttctgagataaactgctgcaactctgggacccacgatgcctatcacagtggctcatcaatggaacctgccggctcccaacccttcctagggcccatgaactctctgaaaagaggaacagaaatatttctcctttttgtaaaatctttaaccttccctttgttcttcatgtacacgctgaactgcaattcttcttcccaaataaaacattaaatttagaaatttctctccatagttttattttgacttcaacatacgtggggtcagaagtgggatccaattctcacttccctccaggggaatcagcagcccacagaacgatggtgggaggtacccacgctggtaacctcttctgccccctggcagatctttcttggacaaaactccagaattgggtttgcattctgtttcatttgggataaggctggggaggggtctttccccttcctgtttgggagattttctgttaggagggttgttttcctcccgttgatctgggctgtgaggtttggacctcgacaagtttggaagaggtgattccccctcatttggagaaagctatcatccttcctggtaaacacctactttatttcccatcagtgcttgcatttattgtgcttttgtgtatttgatgtcaaactaaattacctagataaactgagcaacaggcagggcgcggtggctcacgcctataatcccagcactgtgggaggctaaagcaggtggatcacctgaggtcaggagtttgagaccagcctggccaacatggtgaaactctgtctctactaaaaatacaaaaattagctgggcgtggt

SEQ ID NO: 88277 - DNA, 1301 bp, Homo sapiens
ctgctcagcctcctgatgccttccctctgtcctggatcagattcacccctgcctgggccttctgagctgctcctgccctgagtaccacccctcagtgccccccacctcactgcctcttccccactttcctgaccctgcctgtgagaggctgctttctgcctccatagcaacctctatccaccccccagtctccttcctcccatcctgggggcccctagcctggctccttccatctcctcatcatacctaaatcttgtcattgaactgatataaataggtagtagaaatatacataagtgtgaaagttaagttttgagaaacaccttttgtaaaaaaccgatggtaagtattgggtcattcttgtcacacccaactcaaacagaggccaggagccaggaggggaaaccrctcagtttgcaaaacgtcgcttccacaagcctgatggctgaaactgctcactgtaccctgaaaccagctttacctacagcttctgagataaactgctgcaactctgggacccacgatgcctatcacagtggctcatcaatggaacctgccggctcccaacccttcctagggcccatgaactctctgaaaagaggaacagaaatatttctcctttttgtaaaatctttaaccttccctttgttcttcatgtacacgctgaactgcaattcttcttcccaaataaaacattaaatttagaaatttctctccatagttttattttgacttcaacatacgtggggtcagaagtgggatccaattctcacttccctccaggggaatcagcagcccacagaacgatggtgggaggtacccacgctggtaacctcttctgccccctggcagatctttcttggacaaaactccagaattgggtttgcattctgtttcatttgggataaggctggggaggggtctttccccttcctgtttgggagattttctgttaggagggttgttttcctcccgttgatctgggctgtgaggtttggacctcgacaagtttggaagaggtgattccccctcatttggagaaagctatcatccttcctggtaaacacctactttatttcccatcagtgcttgcatttattgtgcttttgtgtatttgatgtcaaactaaattacctagataaactgagcaacaggcagggcgcggtggctcacgcctataatcccagcactgtgggaggctaaagcaggtggatcacctgaggtcaggagtttgagaccagcctggccaacatggtgaaactctgtctctactaaaaatacaaaaattagctgggcgtggt

SEQ ID NO: 88278 - DNA, 820 bp, Homo sapiens
atgtgtcaaaagaagtgattttttgtccattataactgggtcagtgcaactcgctgtgaaatggttagtttttcacaaaaacgaagcaagaagactctcacttcaggcttcatttatcgttttatttgtattattggtaacctgaaaaggaaaaatcacagttttgtttgtttcaaaacctaacacactgtaaattttaaatgactacattagatttcagacacatttttttgtaaatgcaactatttgcttttaaaagttattttaataataaggtcaaaaatattaacttttagtgactacatgaattttctatagckatgtttggtttccttagaaaatcatgacgtctttttttattccatttactgtaatttaagatgtaattgtcagaaatattttagagattctataggcctttactataagaagcactacggttcaatcttacaaaatattaaatttctctatacttcatttatattatcttttgaggtaatcaatcattaataattcttgctttgtatgggtctcatatttttaatttatacatttatgaaaaaataataagatacacattttttaaaatatttttacatataaaacaatttttggcattttagatttcctttaaatccctgaataattaggacttctgaaagcgtagaaaagaattgttctattattgtattcatatgtccattagaaataatatatgtatcatatattgagtaagaaaacttttcttggattctaagtcataagaaacgttttaaaagttataaatgcaaagaagcagtcaaaatttaacatattaatt

SEQ ID NO: 88279 - DNA, 2167 bp, Homo sapiens
tgcatgcctgagcaaggaccttgagaacagttctgtagatcagagaggggaccctgagctctgctggatggagtgaagcagggtatctggtaaagcaactgtgggaagaactggcaagagccaggctgtcagagaacagcgtcatggggaggttgtgtgagtccgcgggtgaatcagagagggtctggacatgcgtttggcagggaaaatggacaaagattacatcttagagaggccgccaagaaaaaagaatggaatgactggaaaattaaaggtaaagaattaatattactccaagatatttgctgcccggaccataaaatggtgtaactactgtggcactatcctgcaaaatgaacatctggaacttccatcacctagcaaattgtctcctaaatgtgtatgaaattctccctgtgtgccaggagctcagtccaggatgtccacaacaatactgtttatagtggcaaaaaaatgaaaatgcccacgagcaacagaatgttcactgyctgctatttataacagcagaaaaaggcaacttaaaaattaagttaattatctactattagaaaactggtgaaataggccaggtgtggtggctcatgcctgtaatcccagcactttgggaggccaaggtgggtggatcatgaggtcaggagatcgagaccatccggactaatgcgatgaaaccctgtctctactaaaaatacaaaaattagctgggcatagtggcatgtgcctgtaatcccagctactcaggaggctgaggcaggagaatcgtttgaacccgggaggcagaggttgcagtgagccaagattgcgccaccgcactccagcctgggtgacagagcaacactctgtctcaaaaaaaaaaaaagaaaattggtgaaataagatacagtacatccatacaatggaataatatgtgcctatcatacaactagtataaatgcatatttattgacatgaaagttatttccttgaaaaattgttcaacaaaaatagtaagttagaaaaacgttaggtgtagcacgatgccatcaatatgaaactgcgtttgtgatgtaataagactggccagaaagcagagccgccaagatttggtagtgtctctagagagctggactgtgggctatttctactttcttctttatacctatttgaactcttggggttttctatagcaatcacatggtattattttgtagaaaaatataacaacaaaatttaaacaaaataaatgaagacaggcccagccacccttcctcccctggcccttccctcagagacctaccttcatcaaatcaacagcatcttttgcatccctttcaaaaaagtctgctgggaaatcgcgatctgggggcctggaatgtccatagcctcgaggatcccaggcgaccaccgtgaagagcttcttattgaggttcttgagctgaggtccaaaatcagtctctccacttcctaaaaacagccacttggttaccctcaggtgatcgctttcactatcaaacacattacagtgaaaacagaagcaataacaatcttaaaagcaaagtagtttctactcaaagtggtcagaatgtaatcaggaaagcagccttgcaatgacttaatccatccactcgaagaaaggaggcaggctgaccgggtgcgcctgtaatcctagcactttgggaggccgaggcgggcggactgcctgagctcaggagttcgagaccggcctgggcaacacggtgaaaccccatctctactaaaatacaaaaaaaaaaaaaaaaaaaaaatgtagccgggcatggcggtgtgcgcctgtagtcccagctactcaggaggctgaggcaggagaattgcttgaacccgggaggcggaggttgcagtgagcccagatcgcgccattgcactccagcctgagcacagggcaagactcagtctccaaaaaaaaaaaaaaaaggggccgggcgcggtggctcacgcctgtaatcccagcactttgggaggccaaggcgggcggatcgcttgaaccagggaagcagaggttgcagtgaacggagattgcgccactgcactctaccctggtgacaaagtgcgactctgtccctccaccaaaaaaaaaaaaaaaggaggcgcgcttcctttcccggcggagtgcaggcctgcctccgacctcccc

SEQ ID NO: 88280 - DNA, 2167 bp, Homo sapiens
tgcatgcctgagcaaggaccttgagaacagttctgtagatcagagaggggaccctgagctctgctggatggagtgaagcagggtatctggtaaagcaactgtgggaagaactggcaagagccaggctgtcagagaacagcgtcatggggaggttgtgtgagtccgcgggtgaatcagagagggtctggacatgcgtttggcagggaaaatggacaaagattacatcttagagaggccgccaagaaaaaagaatggaatgactggaaaattaaaggtaaagaattaatattactccaagatatttgctgcccggaccataaaatggtgtaactactgtggcactatcctgcaaaatgaacatctggaacttccatcacctagcaaattgtctcctaaatgtgtatgaaattctccctgtgtgccaggagctcagtccaggatgtccacaacaatactgtttatagtggcaaaaaaatgaaaatgcccacgagcaacagaatgttcactgcctgctatttataacagcagaaaaaggcaacttaaaaattaagttaattatctactattagaaaactggtgaaataggccaggtgtggtggctcaygcctgtaatcccagcactttgggaggccaaggtgggtggatcatgaggtcaggagatcgagaccatccggactaatgcgatgaaaccctgtctctactaaaaatacaaaaattagctgggcatagtggcatgtgcctgtaatcccagctactcaggaggctgaggcaggagaatcgtttgaacccgggaggcagaggttgcagtgagccaagattgcgccaccgcactccagcctgggtgacagagcaacactctgtctcaaaaaaaaaaaaagaaaattggtgaaataagatacagtacatccatacaatggaataatatgtgcctatcatacaactagtataaatgcatatttattgacatgaaagttatttccttgaaaaattgttcaacaaaaatagtaagttagaaaaacgttaggtgtagcacgatgccatcaatatgaaactgcgtttgtgatgtaataagactggccagaaagcagagccgccaagatttggtagtgtctctagagagctggactgtgggctatttctactttcttctttatacctatttgaactcttggggttttctatagcaatcacatggtattattttgtagaaaaatataacaacaaaatttaaacaaaataaatgaagacaggcccagccacccttcctcccctggcccttccctcagagacctaccttcatcaaatcaacagcatcttttgcatccctttcaaaaaagtctgctgggaaatcgcgatctgggggcctggaatgtccatagcctcgaggatcccaggcgaccaccgtgaagagcttcttattgaggttcttgagctgaggtccaaaatcagtctctccacttcctaaaaacagccacttggttaccctcaggtgatcgctttcactatcaaacacattacagtgaaaacagaagcaataacaatcttaaaagcaaagtagtttctactcaaagtggtcagaatgtaatcaggaaagcagccttgcaatgacttaatccatccactcgaagaaaggaggcaggctgaccgggtgcgcctgtaatcctagcactttgggaggccgaggcgggcggactgcctgagctcaggagttcgagaccggcctgggcaacacggtgaaaccccatctctactaaaatacaaaaaaaaaaaaaaaaaaaaaatgtagccgggcatggcggtgtgcgcctgtagtcccagctactcaggaggctgaggcaggagaattgcttgaacccgggaggcggaggttgcagtgagcccagatcgcgccattgcactccagcctgagcacagggcaagactcagtctccaaaaaaaaaaaaaaaaggggccgggcgcggtggctcacgcctgtaatcccagcactttgggaggccaaggcgggcggatcgcttgaaccagggaagcagaggttgcagtgaacggagattgcgccactgcactctaccctggtgacaaagtgcgactctgtccctccaccaaaaaaaaaaaaaaaggaggcgcgcttcctttcccggcggagtgcaggcctgcctccgacctcccc

SEQ ID NO: 88281 - DNA, 2167 bp, Homo sapiens
tgcatgcctgagcaaggaccttgagaacagttctgtagatcagagaggggaccctgagctctgctggatggagtgaagcagggtatctggtaaagcaactgtgggaagaactggcaagagccaggctgtcagagaacagcgtcatggggaggttgtgtgagtccgcgggtgaatcagagagggtctggacatgcgtttggcagggaaaatggacaaagattacatcttagagaggccgccaagaaaaaagaatggaatgactggaaaattaaaggtaaagaattaatattactccaagatatttgctgcccggaccataaaatggtgtaactactgtggcactatcctgcaaaatgaacatctggaacttccatcacctagcaaattgtctcctaaatgtgtatgaaattctccctgtgtgccaggagctcagtccaggatgtccacaacaatactgtttatagtggcaaaaaaatgaaaatgcccacgagcaacagaatgttcactgcctgctatttataacagcagaaaaaggcaacttaaaaattaagttaattatctactattagaaaactggtgaaataggccaggtgtggtggctcatgcctgtaatcccagcactttgggaggccaaggtgggtggatcatgaggtcaggagatcgagaccatccggactaatgcgatgaaaccctgtctctactaaaaatacaaaaattagctgggcatagtggcatgtgcctgtaatcccagctactcaggaggctgaggcaggagaatcgtttgaacccgggaggcagaggttgcagtgagccaagattgcgccaccgcactccagcctgggtgacagagcaacactctgtctcaaaaaaaaaaaaagaaaattggtgaaataagatasagtacatccatacaatggaataatatgtgcctatcatacaactagtataaatgcatatttattgacatgaaagttatttccttgaaaaattgttcaacaaaaatagtaagttagaaaaacgttaggtgtagcacgatgccatcaatatgaaactgcgtttgtgatgtaataagactggccagaaagcagagccgccaagatttggtagtgtctctagagagctggactgtgggctatttctactttcttctttatacctatttgaactcttggggttttctatagcaatcacatggtattattttgtagaaaaatataacaacaaaatttaaacaaaataaatgaagacaggcccagccacccttcctcccctggcccttccctcagagacctaccttcatcaaatcaacagcatcttttgcatccctttcaaaaaagtctgctgggaaatcgcgatctgggggcctggaatgtccatagcctcgaggatcccaggcgaccaccgtgaagagcttcttattgaggttcttgagctgaggtccaaaatcagtctctccacttcctaaaaacagccacttggttaccctcaggtgatcgctttcactatcaaacacattacagtgaaaacagaagcaataacaatcttaaaagcaaagtagtttctactcaaagtggtcagaatgtaatcaggaaagcagccttgcaatgacttaatccatccactcgaagaaaggaggcaggctgaccgggtgcgcctgtaatcctagcactttgggaggccgaggcgggcggactgcctgagctcaggagttcgagaccggcctgggcaacacggtgaaaccccatctctactaaaatacaaaaaaaaaaaaaaaaaaaaaatgtagccgggcatggcggtgtgcgcctgtagtcccagctactcaggaggctgaggcaggagaattgcttgaacccgggaggcggaggttgcagtgagcccagatcgcgccattgcactccagcctgagcacagggcaagactcagtctccaaaaaaaaaaaaaaaaggggccgggcgcggtggctcacgcctgtaatcccagcactttgggaggccaaggcgggcggatcgcttgaaccagggaagcagaggttgcagtgaacggagattgcgccactgcactctaccctggtgacaaagtgcgactctgtccctccaccaaaaaaaaaaaaaaaggaggcgcgcttcctttcccggcggagtgcaggcctgcctccgacctcccc

SEQ ID NO: 88282 - DNA, 641 bp, Homo sapiens
tctgaaatgcaggatgcacgaggtctgtgctggactggccaacccttctgccttcctgagatgaccagatgggtttagacagtgtcatctgctggctcctcttccctcrtacctgactcaacctgctcatgatctgggagacagtgtcatatcctagtatcctgggccactccagggacagcagtacaggtggcaggtgacacccaaggttgagctgagcctcctgactcttcattcatctggcctccagggagagtctccgcctgtctgggtttcaatttcatcttctgtaagatggggacttcccactcaccccttagggcggtttgcaggtccacagaggtggtgaggcagaaggccttcctttgtaaactgagcgccagcacctgctacccacctatgctccctggggtgggcctgcttggcttggctgggaggcagcaaggggcaccttgaccaatcaaagtgatgtgctggcacagttgctaattctcacgccagtccccaggagctatctgcctgaggaggagaacaattctgcttccctgggtcaccttccatggaacaatgacttccaagtagaacaggtaaggccacaggtgggcagaatctagaatttatttgtacagactgtgactata

SEQ ID NO: 88283 - DNA, 578 bp, Homo sapiens
ggaaagtcacagcattaaagaattggaagcaagcattgtaaatagatctgcaggtgagaggaaaacttcctcctgacatcctctgacagcccagtcttcatgaccgccaaaaaaaatcctacacccctgatatgagctaacaatgaaagttcagaagccatttaacaaaatacagtagcagcacagggaggggccaagtcaactagaaaaggcagctactatagaagcaggaaagtaagaactttaaataaaatttagtagaaacacatgagattaaaaattagagtacagataaacatttgaaaccaaaagaaatgatacagacattttgaaaacccatgaaagaattataaaagagaataatcacaactaaagactgaatcackgatctggtggataaaatagaagagtctcacatacattaagccaaaaaacaaagaaatacaaattcattcattctttttttttttttttttttttgaaacaaggtcttgctgtgtcacctagcctggagtgcaatggtgccatcatggttcactgcagcctcaatctctggggctcaaaagatcctcctgcct

SEQ ID NO: 88284 - DNA, 1181 bp, Homo sapiens
tcttgtccaaatattaactatttatcagataatctactaccatagtgacacctgggccctatttgctttgccaggagtccaaagtttccagaaagtgtggatgattaaatagcttttcatgctgataagcacctttgctgtatttctatagctggaccaccaaacagaactaatttcaaaatagcaagattaaaagagctcactcttctgttaacgtattttcattgatccctttaaatttattttccaagccagaaaaattctctttctttatgttgccagtcttctcctaatgtcccaagaaaaattcttattctccacaccacatcaacagatatgattaattatgatcattgttccacatatataagtttaaatattaattgtgtactttcaccttaacmctcacactgcattgtatcaaggtctgtgctattaaagctacaagattgactttgaggaatgtggcatatctctcttagaaaggtaaggatgcaatataaatttggctttaataattgttaagcaacaaatcaatatccaaaacttaaacgggcttgacatttaagtcaagcacataagaacattgagttcttaaagaagcacagggtagcattcaggtagttgctagtaagaaaatactagcaacataaagtggtagagaaagcagtaagcatgaagttgaatgattctggtttaaggatttgatacacataagttaggaactttgaacgtgacactctgctctctaatgtagaatggagaaaaatgtgcctaccttgtgaaatatgtaaaactcatgtttaaaatatcttgtaaactataaagcattacatacaaaatgttaataatgcctttccattctctggacaagaggataaaggtaaaattgccttcagatccatggaaaggatagggaatgtatagaccttatgtcagccttacccttgaaggaacaggtggtattggcttgcaattaacaggtaatagggctgacaacaaagtaatagaccagaagacaagtagtgtaatgatattatatgttggagaataaaagaatgataacatcagccctgatgtgtcatggcggacatgcaggggattacacttcctacttcatttaaatttggcatggccatatgacctgctttagccgataaaatatgactgaaaatgacatg

SEQ ID NO: 88285 - DNA, 1181 bp, Homo sapiens
tcttgtccaaatattaactatttatcagataatctactaccatagtgacacctgggccctatttgctttgccaggagtccaaagtttccagaaagtgtggatgattaaatagcttttcatgctgataagcacctttgctgtatttctatagctggaccaccaaacagaactaatttcaaaatagcaagattaaaagagctcactcttctgttaacgtattttcattgatccctttaaatttattttccaagccagaaaaattctctttctttatgttgccagtcttctcctaatgtcccaagaaaaattcttattctccacaccacatcaacagatatgattaattatgatcattgttccacatatataagtttaaatattaattgtgtactttcaccttaaccctcacactgcattgtatcaaggtctgtgctattaaagcwacaagattgactttgaggaatgtggcatatctctcttagaaaggtaaggatgcaatataaatttggctttaataattgttaagcaacaaatcaatatccaaaacttaaacgggcttgacatttaagtcaagcacataagaacattgagttcttaaagaagcacagggtagcattcaggtagttgctagtaagaaaatactagcaacataaagtggtagagaaagcagtaagcatgaagttgaatgattctggtttaaggatttgatacacataagttaggaactttgaacgtgacactctgctctctaatgtagaatggagaaaaatgtgcctaccttgtgaaatatgtaaaactcatgtttaaaatatcttgtaaactataaagcattacatacaaaatgttaataatgcctttccattctctggacaagaggataaaggtaaaattgccttcagatccatggaaaggatagggaatgtatagaccttatgtcagccttacccttgaaggaacaggtggtattggcttgcaattaacaggtaatagggctgacaacaaagtaatagaccagaagacaagtagtgtaatgatattatatgttggagaataaaagaatgataacatcagccctgatgtgtcatggcggacatgcaggggattacacttcctacttcatttaaatttggcatggccatatgacctgctttagccgataaaatatgactgaaaatgacatg

SEQ ID NO: 88286 - DNA, 1181 bp, Homo sapiens
tcttgtccaaatattaactatttatcagataatctactaccatagtgacacctgggccctatttgctttgccaggagtccaaagtttccagaaagtgtggatgattaaatagcttttcatgctgataagcacctttgctgtatttctatagctggaccaccaaacagaactaatttcaaaatagcaagattaaaagagctcactcttctgttaacgtattttcattgatccctttaaatttattttccaagccagaaaaattctctttctttatgttgccagtcttctcctaatgtcccaagaaaaattcttattctccacaccacatcaacagatatgattaattatgatcattgttccacatatataagtttaaatattaattgtgtactttcaccttaaccctcacactgcattgtatcaaggtctgtgctattaaagctacaagattgactttgaggaatgtggcatatctctcttagaaaggtaaggatgcaatataaatttggctttaataattgttaagcaacaaatcaatatccaaaacttaaaygggcttgacatttaagtcaagcacataagaacattgagttcttaaagaagcacagggtagcattcaggtagttgctagtaagaaaatactagcaacataaagtggtagagaaagcagtaagcatgaagttgaatgattctggtttaaggatttgatacacataagttaggaactttgaacgtgacactctgctctctaatgtagaatggagaaaaatgtgcctaccttgtgaaatatgtaaaactcatgtttaaaatatcttgtaaactataaagcattacatacaaaatgttaataatgcctttccattctctggacaagaggataaaggtaaaattgccttcagatccatggaaaggatagggaatgtatagaccttatgtcagccttacccttgaaggaacaggtggtattggcttgcaattaacaggtaatagggctgacaacaaagtaatagaccagaagacaagtagtgtaatgatattatatgttggagaataaaagaatgataacatcagccctgatgtgtcatggcggacatgcaggggattacacttcctacttcatttaaatttggcatggccatatgacctgctttagccgataaaatatgactgaaaatgacatg

SEQ ID NO: 88287 - DNA, 658 bp, Homo sapiens
cctccttctccaaaataatttcaggtattctgctgtgtctgctgaggctggggtccccaaagatgcaggcacagcacatacttccatgctgyagtaggagcaggtcttctgtgttactcccacccagcactctggagtctgttttggccactgtggtgcactgaaccatgtcaccagggacagagtacaccgactcctctccctgggttgtaatggatagcacaaagccctcattttataagtatcatttttctaaataacatgctaggccagaacaaaggccactgcaaagccacaggctcttccacacagtgaggacaccgctctagaatgttccacttttaggtggtcagggggacagtatttgctcttgtgcttccaattagttaatttttcattagtcactttaaaagtagcactcttaatttgggattctaattgagggacttacgctgccacgatctctgctgtagttggggctgtaaaatgctttccccgtgagaaatgcaagcaggaagtggtggacagccggagagctgccagagccttctgcctccccgcatttttattttgatgacctgagaaaaggcatcacatttctggcttattgatttctttttttctttgtgtatgtggttggagtggggaagttggtggg

SEQ ID NO: 88288 - DNA, 362 bp, Homo sapiens
tggcgcgatcttggctcactgcaaggtccacctcccgggttcatgccattctcccgcctcagcctcccgagtagctgggactacaggcgcctgccaccatgcccggctaattttttatattttttatgagagacggggtttcaccgtgttagccaggatggtctcgatctcctgacctcgtgatccacctgccttggcctccttaagttgtgatgatttttctaataatgaaaagtaggaccatggtcartatcttcagtagtagcactaggctgatgatctttatgtaacaacaataatatcctacaaatgcatagcatgttggtgtttatcagtgtggaacatacaggtggacagggtca

SEQ ID NO: 88289 - DNA, 618 bp, Homo sapiens
ttttgggaatgaactcattttccagtgagatgaactagtgtcaggaagggagaagtggttctgaatacaccctcaggtggacaggtcacagaaacctaccaccagccaagccttggggactcatctctgagcctcatgaaagaggagctagaggtactatcttcatgaagaggtggtgagatccagaacccagtgaccaaggatgtgtggggagtacagggtgtctcgggcaaagaaggaccaaagagcacacagggtgcttttgcatcttcaaggctggcagctgcaggaacgctgggagaagacactactggctcacatattgatgtcgtccttgaggatagatcttggtaaggggtcaccctcaaaagctcttcctgcagggaccttgttgtgggctgaattctgttctccttaaaattcatacattgagtcctgacccccaggacctcagaatgtgctgtcttggagatagggtcttaatgaggtaattaaggtaaaatgaggtcataggggtgggccctaatstgatggctgatggcctcatagaaagagattaggactaagacaacacacagactgaggggtgaccatgtgaagacacagggagaagacagc

SEQ ID NO: 88290 - DNA, 2058 bp, Homo sapiens
tgactactagaacagttctcaaactgtgtggtgggtaagaatcacctgggaacttgaccaagtgacatgtctacaccacccgcccctacaggctctgattggggggctgctgtggacccaggggttggcattcttaagtgctctccttggttctgattctgacaacccacccagcgcttcagaggacagctggactagatgtgcagtcagcggcgaggaccctgagcccggggacgggtgaggtcccagctagagggaggggttggggtcactggcatctccggtgtttagaaccaagagcctagaggaggggaccaggcagaggggctggtcccacgttgagccctgggtagccaagcagctggagcctacggaggcaaaaggggacagtgagggaggctgagggctccgaggctgtccccacagctggcaatgcagcccaaggcagggcgggctcaagcaagaggaggctgagggccggccaggcccacgggcagcatcgggctctggtaggtgctcacgtagtttttggagtttgggacagtccctgaggctcattataagctcctgtgtggggtctgggaccccattttccttttctgatggtctttcattttggtggggactgacgacagactctaaagacaccctttgcccacctctagagtcttagcatttcttccattgacgggatttcccaccagcgccccgtagccaccctgcgtattccataccaggattcactggcccaggacgtggaaggacagactcttctgaagtggctccacatttcattgtctcctcacctagctgagacctcaaaaattccagaacattctacttgtttcacctagtttaattttaaagatcttggactttgaattccaggtggcagactgccagtttggagggcaagttgacagtcttgactaaaatggaatgtgtgcaaaaggtaagataagcacgttacaccccttcaccccatcataagcaatgaccaaaaagaccaatcgtttaaaaacaacaacaacaacaaaaaaacaaaaccagaatggaaaacaagaaggtgccagcagctcaggaaatggcggaagccaagaaacaggatgacccaaagccccgggcaggctggactggacgtttccatgttgaacccagtycttggacccacgagcaattcagagtggccgcgcctccgccagggcaggccctatctgctccaaggcaaagaacgccatggggcttccttccttccccgcacctgctcagcagccttggttttctcatctgtccagtggagctaacagtagcaccttttgggactgtgagggttaaatgagcctggggcaggggttgggggaggtggtgagtgtgtgtgtgtgtgtgtaagagagcgagcgagagagacgccagccgttgtgatgatgttaacattctctgggtctacaccagtggccctttctgcctgcatttttattacaacatagtcctaacactgcatttcactgtcaggcacctccgtccactccactcctgcgcactcctcccggctgtgtctcctgtcttttttgggtcccttttggaaatgtgggctcctcagagtatttggagccaccttccccccaacacctccacctctaggggcctggtcctttgggagtgggcagggccctggggcaccctgctggcctccagaagctgttggggagatacgagggaagtctgaggggcagcagcgctgggtacagggcaacaggcccgagccgggaggcccttccatgggaccacaagcgcccaccccgattgacgacactgcagatgtgaccgagggccaaggacactgctcagatgccctgaagtgggcaggggcagctcaggagcctgcaggggttgagggggacagaaacgcaagagggaagtggcagcctggccactcctgaccactgggccagtgggagcgaggcacggacgtggtaagacgtctgctgtatttgtgccattcccggtgatgccctgatgcccacctgtcaccacagccctcttggggcagcagatcac

SEQ ID NO: 88291 - DNA, 569 bp, Homo sapiens
tatgcttagacataaaaatactttattgaaaaaagcctgacaaagaaaagtagtttcccttttgtttgagacaattagggggaaaaaattagtgtgtcagtttctaatgcaaatgataatcaattaagctccttcatctataaaatgagagttgtactagataacagcaaagatagcaactagatattacaactgtacttaaatgtaaatggtaaacttgaggaggcagtagagtggaaakgctttaggggaaagaaaatattggtcaaagtaaaagatagcagaatatcacttctcggccttttggctaagatcaagtgtaaagatggcagaacaatacagaatcactgaacctgtatctctctgaacccaatgaactaaacacaagaaataaaataagcaaagaacaacatcaacagtgttcttaacttgggaagggacccaaactgaaactataagcttttgaacactgtcatctagaagcagagtaggcaaaactaaaaacatttcagtatcaatccaacactactctccatcccctttgtctaatatatccatccaaaatcaga

SEQ ID NO: 88292 - DNA, 569 bp, Homo sapiens
tatgcttagacataaaaatactttattgaaaaaagcctgacaaagaaaagtagtttcccttttgtttgagacaattagggggaaaaaattagtgtgtcagtttctaatgcaaatgataatcaattaagctccttcatctataaaatgagagttgtactagataacagcaaagatagcaactagatattacaactgtacttaaatgtaaatggtaaacttgaggaggcagtagagtggaaaggctttaggggaaagaaaatattggtcaaagtaaaagawagcagaatatcacttctcggccttttggctaagatcaagtgtaaagatggcagaacaatacagaatcactgaacctgtatctctctgaacccaatgaactaaacacaagaaataaaataagcaaagaacaacatcaacagtgttcttaacttgggaagggacccaaactgaaactataagcttttgaacactgtcatctagaagcagagtaggcaaaactaaaaacatttcagtatcaatccaacactactctccatcccctttgtctaatatatccatccaaaatcaga

SEQ ID NO: 88293 - DNA, 569 bp, Homo sapiens
tatgcttagacataaaaatactttattgaaaaaagcctgacaaagaaaagtagtttcccttttgtttgagacaattagggggaaaaaattagtgtgtcagtttctaatgcaaatgataatcaattaagctccttcatctataaaatgagagttgtactagataacagcaaagatagcaactagatattacaactgtacttaaatgtaaatggtaaacttgaggaggcagtagagtggaaaggctttaggggaaagaaaatattggtcaaagtaaaagatagcagaatatcacttctcggccttttggctaagatcaagtgtaaagatggcagaacaatacagaatcactgaacctgtatctctctgaacccaatgaactaaacacaagaaataaaataagcaaagaacaacatcaacagtgttcttaacttgggaagggacccaaactgaaactataagcttttgaacactgtcatctagaagcagagtagrcaaaactaaaaacatttcagtatcaatccaacactactctccatcccctttgtctaatatatccatccaaaatcaga

SEQ ID NO: 88294 - DNA, 576 bp, Homo sapiens
ggaagagggagaagtaggcctggggaggagctaggtggcaagayagaaaagagacagtgtatcaggaggggccttataaagatagacagatgatagctatggagaagaggctgatgggagagtgttgttagctgtccccgaggattcaccgctccaaaaagagaatttggaatgcctgcagcattttggaaagtcctttgttcctccctttctgggggagccagagccttcccaggggattcactgggaccaggtctcagatgggccaggagaggggacaaggggatgagagtacactagtggctgctgtgcagaaacaaagccaggttgaggacatgtccatagctcctcctgttttgcttaagcacctcccaggagtctgggtcccttcctggcacagtgctgtgcaaaccagtctcttccccaaagccatggcccctttcatgcctcagttaactgcagaaaatgcatgaatttatttctgcaaagctaacctgaaacaaaaaacattatattggctggaaggagaaactttgtgggcgggagaggtggaaagtcactgctcctggcccctgg

SEQ ID NO: 88295 - DNA, 253 bp, Homo sapiens
cagatctattgaatcagaatctgtattttaacaaaatccccaggagattcctaagcacattaaaggctaagaaaagttgctgctctacaccattgctttcctggagcagggcaaatggctggcmctcgacaaattatttttaaatcaagcttctttatatctagactttgccctgcctcaggtagcatagatgaattcagagaaacaagcagcagggccattgtttattaatgtagtgaaataagttagctgt

SEQ ID NO: 88296 - DNA, 1226 bp, Homo sapiens
tgatgggtactcaaaaagtattgtttcttgttttgtttttgttttttattttggagacaaggtctcgctgtgtcacccaggctggagcgcagtggagcaatcttgcctcattgcagtctggacctcccaagctctatcagtcctcctgcccagcctcccaagtagctgagtctacaggcgcatgccaacatgcctggctgtttttttattattattattactttgtagagatgggatcttgctatgttccaagrctggtctccaactcctgggctcaagcagtcctcccacctcagcctcccaaagtgttgggattacaggcatgagccaccatacccagccaatgagtactgttgacattttggctgatgcttatccccttaagaatcataccaggtgggaaatagtattccatttataagggaacaatcagaagtccaaagaggttaagaaacctgctcaaaagtcatggagacacttcatggtagaaatggggtttaaacccaggccagtcacttccctaatcagtgtctttgcactgaactaccccacctagctctctttcaagaaaatctggaaaactctattactgtactctgtcattaactgtttaagccatttggaagaaaaaaggtcatgatgggaaatggtacaatcatggagagatgtaaagagaacagctctgtgttcacattatcaatgagaccacttgagaccactactcaaggtctttggtcttcaaatacaaacagaatattatatataataatacaaaaacaatattatagaaacgctgcatcatacgacatataaaatccacagtttttgtttgttatttttatttcttttttctttttttctttttttttttttttttttttttttttttgctttaaatacgtgaaagctataatgcaccgtggtcttttcaagacctatactcagtataggtcaaagccttcttaataatcaagattgttatcatttattgtgtacttgcaattctcttataattgaagccttcaggctaacatttatacaaagcttacagtggatttacaaaggtgaagttatcaaaaaagattttaaaccactcagattagatataaacaccatgaccgaacttaatgaactagagaaaaagaaaagtcaatttttgtcatgtataaagaacaagctagaaagagcatgcatgcacacaacatacacacgcacaccccagatcc

SEQ ID NO: 88297 - DNA, 762 bp, Homo sapiens
atttttagcagagacagggtttctctatgttggccagggtggtctcaaactcctgacctcggtgatccacccacctcagcctcccaaagtgttgggattacaggtgtgagcctccaagcccagccacattgagaggtgaagccacctggacttctgggttgggtggggacttggagaacttttctgtcttacaagaaaattgtaaaatgcaccaactggcactctgtagctaggattgaaaaatgcaccaatcagcgctctgtggctagctagaggtttgtaaaatgcgccaatcagcacactgtaaaatggaccaatcagtgctctgtaaaatgaacccatcagcaggacatgggtggggacaaataagggaataaaagctggccacccccccccaccccagccagccaccacaaccggcttgggtccccttccaagctgtggaagctttgttctttcacttttcataataaaactcgctggtgcttactctttgggcccgtgccatctttaagagctgtaacactcaccgggaaggtccacagcttcattcttgaagtcagtgagaccaagaacccaccagaaggaaccgactctggacacaatatgttcttatttgttgttactccaataagcaattaacaagagtgctrtcagaatgtgtgggatgatcttgtattcaactaacctgtcaaatactcttatcaattctaatgctctgcatgtagatttttattttccaaatagaaaatgaatcatgca

SEQ ID NO: 88298 - DNA, 502 bp, Homo sapiens
tcctatgggataaatgctttatttggtcaaaaactggaagctgacgctccacttaagagtctaggtcacgcggcaagccagacacttgaaggagcttaaagctttctgttcttaatagtattttagacacttattttgaaatccctgatatttatttaatttacactgactcagatgtcggctaagctctatgagcctgagggagtgagttaaccttcctctcagcttattcatatataaaatggggatactcatactttcctatctgtagagttgaaaaggttaaatgaggtcatgtaagtaaatcatccagtgacatagaatctgagaactaaacccttttgaaaattggtattsacgaaaggtctgaaaatatatgccacagactggcatggtgagaatgagaataaaaaataaacagttacggctgttgtggctccatacccatccatgatgcgaaagatgtccttcatactgagcaaccttttcccatacttactct

SEQ ID NO: 88299 - DNA, 3212 bp, Homo sapiens
attttcctttctatcaaccatcacaacctgaaactgtgggcgtccgtgtgtctcttggagtctagtagaatgtaaggccctcaaggcagaggcctcgtctgtcctgtttgtcaccagagcctggtccgcagtggtgcctagtaagttagtccacccattcaccacatccttacagagctctggcgccaggcagcaagtgctggtgctgcggacagagccacagacaagccggtcatagcttctggcctcatagaccttggagtctaacaggggagagcctttcaaagatttgctcccattgctaatgggacaggatgagacagggtgctgggggactgagagctgtgatgggggatgctgcctggagggctggggtggtctgagctctggaggaggaagtgctgctcaggtagtgagggagggggtggtatctgggttaggggaagtggcgtgtgcagaggccccgtggcgcagatgagcttgggctatttgaagaaccccagcgaggaggcagggtgttcaggtggctgtggctgtggcccaggggcaagagggagatggggaggagtggaactggttaagaagtggacagaagtagggtgagaaggcaaagtccaggatctgagacaggaggatggtggccttcctgcctcccttccttcctgccttccctggaaaggagcacgcctggggtgtggtgagtcctgttagagatgctcacggaaccccctctccccaccccgccccgtggcaggggcatggagaggcgggccctgtgcttagggggtcctgggttagggacggcgctggaagttgcaggagggcagaaaccggcctctgaagagagtggggagggagaaggggagctgtccagggccctcaggcatgcatcatgtaagggtcaggggagtcagggaggatcccccaaaggaggctgtagagggtgaaggaggagggcaggaagccagtgagtgtgggggtctgtgggccatggggggtgggggaggcagctctttgrgaactgagggggttcgggtgcagccctgggactcccaggccagtgctctccctccccctgccagccacctcgcagagagagcccggggtggaagcagggtagttggtgctgtgccctgaccttcagaggtggcattgacaagaccagaatgccacagggccatgcacctctccctgcaaactgccctttaatttatttttacctctgttccttgtgggcttgtgtgtcaggttcgatatttttatgttactgggaaaatagaatgtgcttcacagaaatttgccttgtggccaatattgcaggttgcagctgtttcagagtgacaggggacggtatattctggacttgtgcccttttgttcatctctgagaggggccataaactcccatttccgagaggttactgggaccaatgagatcatttattagttttccttgcacaggaaaatcacacactctgtgccattgattgagtccattttattttgtggaatagacatgtcagaagcaggattggccaggtggaattgtgtttggcgggagtcctgtctttccataggtactttcataatggaagcaatctccttctgaagtgtatcacccggtgaactgaatggaaaatctcttgtgaaaaggcttaagaggaaggctggcctggaaaaatgaaactcacatccacagagagacttgtacctgaatgttcatgtcagcaccactcacaatacctaaaaaggggtgataaccgaaataaccatcaaccaagggatggagaaacaaaatgtggtcccccatgagatggaatatgattcagcgtaggcacgaaagaaggacggaaacatgctataacatggatgaaccttgaaaacatgctcagtgaaagaagccacacatgaaagggcagacatcatcggctcctattaatatgaaatgtccagaaagccaaatccgtggagaggggaagtagatcgaatcacacacttttaaaggatgaattgtgtggagtgagaattctatctcaataagggtgcatacaaaatgcagctgacggtggtcacaccaagcctgtcagtaatgatgcataacttccctttgctgtcctgggttagggtgggttgagacttagggtgaccagggaggaatggatatcttgtgggtcaccttgactgtcttggggtgatgagagggcagtattaccaatgcttaatcatttgcccccataccaaggtgaacacgagatgctctggtcctagtggctgcagagttgtgcagcctctgtccctgtgctagctctggacctggtggtggccgcagagctgtgtagcctctgtctctgtgcttgctctggtcctggtggccacagagctgtacagcctctgtccctccgcttgctctggttctggcggctgcagtgctgtgcagcccctgtctctgtgcttgccctgtccttgtggtggctgcagagctgtgcagcctggccccagagctgtgcagcctctgtccctgtacttgctgtggtcccggtggtggctgcagagctgtgcagtctctgtttctgcactttccctggtcactgcctcattgccgtggcgctggtggactgaggccataatgcctgcgtctcctgcaggtcctcctcgactggattaatgacgtgctggtggaggagaggatcattgtgaagcagctggaggaagacctgtatgacggccaggtgctgcagaagctcttgggtgagttcacagcagggacagctctgtcccacccccatctccctgcagcggccctgggctgggccaggattctctgcatagtgacatcggccacaggtcctaggaagacactcaaagctgcagtgtgcatctcccaggtggtgcccaggccctgggctgtggcttcagggtcctctctccccttgccgtttctacagagcacccagccatggggcagcagcaggttggggacagcttccaaaactgcctgcggctcccatcctgttgggtctcaggcccactttgtgtccctgccaccctcttttgacttgaactccttcggttcaggatgggaggcagcaggagggaagcgggtctgcagcaatattctgtgagtgaatgtgtcaccaaatacatgatagctcatgttccctcaccaggggcgggctctagtgtctgcatttgctgggtgaaggcagtttagtg

SEQ ID NO: 88300 - DNA, 3212 bp, Homo sapiens
attttcctttctatcaaccatcacaacctgaaactgtgggcgtccgtgtgtctcttggagtctagtagaatgtaaggccctcaaggcagaggcctcgtctgtcctgtttgtcaccagagcctggtccgcagtggtgcctagtaagttagtccacccattcaccacatccttacagagctctggcgccaggcagcaagtgctggtgctgcggacagagccacagacaagccggtcatagcttctggcctcatagaccttggagtctaacaggggagagcctttcaaagatttgctcccattgctaatgggacaggatgagacagggtgctgggggactgagagctgtgatgggggatgctgcctggagggctggggtggtctgagctctggaggaggaagtgctgctcaggtagtgagggagggggtggtatctgggttaggggaagtggcgtgtgcagaggccccgtggcgcagatgagcttgggctatttgaagaaccccagcgaggaggcagggtgttcaggtggctgtggctgtggcccaggggcaagagggagatggggaggagtggaactggttaagaagtggacagaagtagggtgagaaggcaaagtccaggatctgagacaggaggatggtggccttcctgcctcccttccttcctgccttccctggaaaggagcacgcctggggtgtggtgagtcctgttagagatgctcacggaaccccctctccccaccccgccccgtggcaggggcatggagaggcgggccctgtgcttagggggtcctgggttagggacggcgctggaagttgcaggagggcagaaaccggcctctgaagagagtggggagggagaaggggagctgtccagggccctcaggcatgcatcatgtaagggtcaggggagtcagggaggatcccccaaaggaggctgtagagggtgaaggaggagggcaggaagccagtgagtgtgggggtctgtgggccatggggggtgggggaggcagctctttgggaactgagggggttcgggtgcagccctgggactcccaggccagtgctctccctccccctgccagccacctcgcagagagakcccggggtggaagcagggtagttggtgctgtgccctgaccttcagaggtggcattgacaagaccagaatgccacagggccatgcacctctccctgcaaactgccctttaatttatttttacctctgttccttgtgggcttgtgtgtcaggttcgatatttttatgttactgggaaaatagaatgtgcttcacagaaatttgccttgtggccaatattgcaggttgcagctgtttcagagtgacaggggacggtatattctggacttgtgcccttttgttcatctctgagaggggccataaactcccatttccgagaggttactgggaccaatgagatcatttattagttttccttgcacaggaaaatcacacactctgtgccattgattgagtccattttattttgtggaatagacatgtcagaagcaggattggccaggtggaattgtgtttggcgggagtcctgtctttccataggtactttcataatggaagcaatctccttctgaagtgtatcacccggtgaactgaatggaaaatctcttgtgaaaaggcttaagaggaaggctggcctggaaaaatgaaactcacatccacagagagacttgtacctgaatgttcatgtcagcaccactcacaatacctaaaaaggggtgataaccgaaataaccatcaaccaagggatggagaaacaaaatgtggtcccccatgagatggaatatgattcagcgtaggcacgaaagaaggacggaaacatgctataacatggatgaaccttgaaaacatgctcagtgaaagaagccacacatgaaagggcagacatcatcggctcctattaatatgaaatgtccagaaagccaaatccgtggagaggggaagtagatcgaatcacacacttttaaaggatgaattgtgtggagtgagaattctatctcaataagggtgcatacaaaatgcagctgacggtggtcacaccaagcctgtcagtaatgatgcataacttccctttgctgtcctgggttagggtgggttgagacttagggtgaccagggaggaatggatatcttgtgggtcaccttgactgtcttggggtgatgagagggcagtattaccaatgcttaatcatttgcccccataccaaggtgaacacgagatgctctggtcctagtggctgcagagttgtgcagcctctgtccctgtgctagctctggacctggtggtggccgcagagctgtgtagcctctgtctctgtgcttgctctggtcctggtggccacagagctgtacagcctctgtccctccgcttgctctggttctggcggctgcagtgctgtgcagcccctgtctctgtgcttgccctgtccttgtggtggctgcagagctgtgcagcctggccccagagctgtgcagcctctgtccctgtacttgctgtggtcccggtggtggctgcagagctgtgcagtctctgtttctgcactttccctggtcactgcctcattgccgtggcgctggtggactgaggccataatgcctgcgtctcctgcaggtcctcctcgactggattaatgacgtgctggtggaggagaggatcattgtgaagcagctggaggaagacctgtatgacggccaggtgctgcagaagctcttgggtgagttcacagcagggacagctctgtcccacccccatctccctgcagcggccctgggctgggccaggattctctgcatagtgacatcggccacaggtcctaggaagacactcaaagctgcagtgtgcatctcccaggtggtgcccaggccctgggctgtggcttcagggtcctctctccccttgccgtttctacagagcacccagccatggggcagcagcaggttggggacagcttccaaaactgcctgcggctcccatcctgttgggtctcaggcccactttgtgtccctgccaccctcttttgacttgaactccttcggttcaggatgggaggcagcaggagggaagcgggtctgcagcaatattctgtgagtgaatgtgtcaccaaatacatgatagctcatgttccctcaccaggggcgggctctagtgtctgcatttgctgggtgaaggcagtttagtg

SEQ ID NO: 88301 - DNA, 3212 bp, Homo sapiens
attttcctttctatcaaccatcacaacctgaaactgtgggcgtccgtgtgtctcttggagtctagtagaatgtaaggccctcaaggcagaggcctcgtctgtcctgtttgtcaccagagcctggtccgcagtggtgcctagtaagttagtccacccattcaccacatccttacagagctctggcgccaggcagcaagtgctggtgctgcggacagagccacagacaagccggtcatagcttctggcctcatagaccttggagtctaacaggggagagcctttcaaagatttgctcccattgctaatgggacaggatgagacagggtgctgggggactgagagctgtgatgggggatgctgcctggagggctggggtggtctgagctctggaggaggaagtgctgctcaggtagtgagggagggggtggtatctgggttaggggaagtggcgtgtgcagaggccccgtggcgcagatgagcttgggctatttgaagaaccccagcgaggaggcagggtgttcaggtggctgtggctgtggcccaggggcaagagggagatggggaggagtggaactggttaagaagtggacagaagtagggtgagaaggcaaagtccaggatctgagacaggaggatggtggccttcctgcctcccttccttcctgccttccctggaaaggagcacgcctggggtgtggtgagtcctgttagagatgctcacggaaccccctctccccaccccgccccgtggcaggggcatggagaggcgggccctgtgcttagggggtcctgggttagggacggcgctggaagttgcaggagggcagaaaccggcctctgaagagagtggggagggagaaggggagctgtccagggccctcaggcatgcatcatgtaagggtcaggggagtcagggaggatcccccaaaggaggctgtagagggtgaaggaggagggcaggaagccagtgagtgtgggggtctgtgggccatggggggtgggggaggcagctctttgggaactgagggggttcgggtgcagccctgggactcccaggccagtgctctccctccccctgccagccacctcgcagagagagcccggggtggaagcagggtagttggtgctgtgccctgaccttcagaggtggcattgacaagaccagaatgccacagggccatgcacctctccctgcaaacygccctttaatttatttttacctctgttccttgtgggcttgtgtgtcaggttcgatatttttatgttactgggaaaatagaatgtgcttcacagaaatttgccttgtggccaatattgcaggttgcagctgtttcagagtgacaggggacggtatattctggacttgtgcccttttgttcatctctgagaggggccataaactcccatttccgagaggttactgggaccaatgagatcatttattagttttccttgcacaggaaaatcacacactctgtgccattgattgagtccattttattttgtggaatagacatgtcagaagcaggattggccaggtggaattgtgtttggcgggagtcctgtctttccataggtactttcataatggaagcaatctccttctgaagtgtatcacccggtgaactgaatggaaaatctcttgtgaaaaggcttaagaggaaggctggcctggaaaaatgaaactcacatccacagagagacttgtacctgaatgttcatgtcagcaccactcacaatacctaaaaaggggtgataaccgaaataaccatcaaccaagggatggagaaacaaaatgtggtcccccatgagatggaatatgattcagcgtaggcacgaaagaaggacggaaacatgctataacatggatgaaccttgaaaacatgctcagtgaaagaagccacacatgaaagggcagacatcatcggctcctattaatatgaaatgtccagaaagccaaatccgtggagaggggaagtagatcgaatcacacacttttaaaggatgaattgtgtggagtgagaattctatctcaataagggtgcatacaaaatgcagctgacggtggtcacaccaagcctgtcagtaatgatgcataacttccctttgctgtcctgggttagggtgggttgagacttagggtgaccagggaggaatggatatcttgtgggtcaccttgactgtcttggggtgatgagagggcagtattaccaatgcttaatcatttgcccccataccaaggtgaacacgagatgctctggtcctagtggctgcagagttgtgcagcctctgtccctgtgctagctctggacctggtggtggccgcagagctgtgtagcctctgtctctgtgcttgctctggtcctggtggccacagagctgtacagcctctgtccctccgcttgctctggttctggcggctgcagtgctgtgcagcccctgtctctgtgcttgccctgtccttgtggtggctgcagagctgtgcagcctggccccagagctgtgcagcctctgtccctgtacttgctgtggtcccggtggtggctgcagagctgtgcagtctctgtttctgcactttccctggtcactgcctcattgccgtggcgctggtggactgaggccataatgcctgcgtctcctgcaggtcctcctcgactggattaatgacgtgctggtggaggagaggatcattgtgaagcagctggaggaagacctgtatgacggccaggtgctgcagaagctcttgggtgagttcacagcagggacagctctgtcccacccccatctccctgcagcggccctgggctgggccaggattctctgcatagtgacatcggccacaggtcctaggaagacactcaaagctgcagtgtgcatctcccaggtggtgcccaggccctgggctgtggcttcagggtcctctctccccttgccgtttctacagagcacccagccatggggcagcagcaggttggggacagcttccaaaactgcctgcggctcccatcctgttgggtctcaggcccactttgtgtccctgccaccctcttttgacttgaactccttcggttcaggatgggaggcagcaggagggaagcgggtctgcagcaatattctgtgagtgaatgtgtcaccaaatacatgatagctcatgttccctcaccaggggcgggctctagtgtctgcatttgctgggtgaaggcagtttagtg

SEQ ID NO: 88302 - DNA, 3212 bp, Homo sapiens
attttcctttctatcaaccatcacaacctgaaactgtgggcgtccgtgtgtctcttggagtctagtagaatgtaaggccctcaaggcagaggcctcgtctgtcctgtttgtcaccagagcctggtccgcagtggtgcctagtaagttagtccacccattcaccacatccttacagagctctggcgccaggcagcaagtgctggtgctgcggacagagccacagacaagccggtcatagcttctggcctcatagaccttggagtctaacaggggagagcctttcaaagatttgctcccattgctaatgggacaggatgagacagggtgctgggggactgagagctgtgatgggggatgctgcctggagggctggggtggtctgagctctggaggaggaagtgctgctcaggtagtgagggagggggtggtatctgggttaggggaagtggcgtgtgcagaggccccgtggcgcagatgagcttgggctatttgaagaaccccagcgaggaggcagggtgttcaggtggctgtggctgtggcccaggggcaagagggagatggggaggagtggaactggttaagaagtggacagaagtagggtgagaaggcaaagtccaggatctgagacaggaggatggtggccttcctgcctcccttccttcctgccttccctggaaaggagcacgcctggggtgtggtgagtcctgttagagatgctcacggaaccccctctccccaccccgccccgtggcaggggcatggagaggcgggccctgtgcttagggggtcctgggttagggacggcgctggaagttgcaggagggcagaaaccggcctctgaagagagtggggagggagaaggggagctgtccagggccctcaggcatgcatcatgtaagggtcaggggagtcagggaggatcccccaaaggaggctgtagagggtgaaggaggagggcaggaagccagtgagtgtgggggtctgtgggccatggggggtgggggaggcagctctttgggaactgagggggttcgggtgcagccctgggactcccaggccagtgctctccctccccctgccagccacctcgcagagagagcccggggtggaagcagggtagttggtgctgtgccctgaccttcagaggtggcattgacaagaccagaatgccacagggccatgcacctctccctgcaaactgccctttaatttatttttacctctgttccttgtgggcttgtgtgtcaggttcgatatttttatgttactgggaaaatagaatgtgcttcacagaaatttgccttgtggccaatattgcaggttgcagctgtttcagagtgacaggggacggtatattctggacttgtgcccttttgttcatctctgagaggggccataaactcccatttccgagaggttactgggaccaatgagatcatttattagttttccttgcacaggaaaatcacacactctgtgccattgattgagtccattttattttgtggaatagacatgtcagaagcaggattggccaggtggaattgtgtttggcgggagtcctgtctttccataggtactttcataatggaagcaatctccttctgaagtgtatcacccggtgaactgaatggaaaatctcttgtgaaaaggcttaagaggaaggctggcctggaaaaatgaaactcacatccacagagagacttgtacctgaatgttcatgtcagcaccactcacaatacctaaaaaggggtgataaccgaaataaccatcaaccaagggatggagaaacaaaatgtggtcccccatgagatggaatatgattcagcgtaggcacgaaagaaggacggaaacatgctataacatggatgaaccttgaaaacatgctcagtgaaagaagccacacatgaaagggcagacatcatcggctcctattaatatgaaatgtccagaaagccaaatccgtggrgaggggaagtagatcgaatcacacacttttaaaggatgaattgtgtggagtgagaattctatctcaataagggtgcatacaaaatgcagctgacggtggtcacaccaagcctgtcagtaatgatgcataacttccctttgctgtcctgggttagggtgggttgagacttagggtgaccagggaggaatggatatcttgtgggtcaccttgactgtcttggggtgatgagagggcagtattaccaatgcttaatcatttgcccccataccaaggtgaacacgagatgctctggtcctagtggctgcagagttgtgcagcctctgtccctgtgctagctctggacctggtggtggccgcagagctgtgtagcctctgtctctgtgcttgctctggtcctggtggccacagagctgtacagcctctgtccctccgcttgctctggttctggcggctgcagtgctgtgcagcccctgtctctgtgcttgccctgtccttgtggtggctgcagagctgtgcagcctggccccagagctgtgcagcctctgtccctgtacttgctgtggtcccggtggtggctgcagagctgtgcagtctctgtttctgcactttccctggtcactgcctcattgccgtggcgctggtggactgaggccataatgcctgcgtctcctgcaggtcctcctcgactggattaatgacgtgctggtggaggagaggatcattgtgaagcagctggaggaagacctgtatgacggccaggtgctgcagaagctcttgggtgagttcacagcagggacagctctgtcccacccccatctccctgcagcggccctgggctgggccaggattctctgcatagtgacatcggccacaggtcctaggaagacactcaaagctgcagtgtgcatctcccaggtggtgcccaggccctgggctgtggcttcagggtcctctctccccttgccgtttctacagagcacccagccatggggcagcagcaggttggggacagcttccaaaactgcctgcggctcccatcctgttgggtctcaggcccactttgtgtccctgccaccctcttttgacttgaactccttcggttcaggatgggaggcagcaggagggaagcgggtctgcagcaatattctgtgagtgaatgtgtcaccaaatacatgatagctcatgttccctcaccaggggcgggctctagtgtctgcatttgctgggtgaaggcagtttagtg

SEQ ID NO: 88303 - DNA, 943 bp, Homo sapiens
gcataacagacgtggagtaatattttgactttataaagcctgcttcatgatggcttcttgtgtctttgtgaatagcacaggtgggcagctgtgctggtcccatgtgggcgacaggcaagctgggcctggacggtctgtctctccaagtccaacaggaagatcaggatgggcctcggatctctgctcctaaagccgggccccacgaagccccttccctttactccttatggagtccccttcctcactgagttttttcccctattttaaaatagctcttcacagagaatctttgggggcttttaaacagccctggtcttagcagagttaacacaaccacatcatgagggatctgctgacgaggggggcatcctgcagagccggtccatacttccttttattttcttatcctgagtctcttcccctgagtctccccagagaaactggtgattctcaacacatcctgtggagtttgtgaaaagtggagcttggtgaggtcctcagccaggtgagatgtgccggaatctccaagggtgccctcatagaaggtgtctgaggattgattcaccagaccagacaagtgtggggggcagggacagcatctcactcagcttggtgtccctgagacccagcccatttggcaggacacacaggcattgtaaggaaatgcaatttccttacgccttcctgaaaacgaaccctgactgcccayggggcagctgagcccccgaggctctgttgctgcaactgtgctcatctccaggtggctgtcaaggtgctcatgccttcctcggctcccatggcataaatgaggcaaggagagccttcgagagtccttttagtagagtaggatgtggttaccagggccttaggcagttgtggggatgctggtcaaaggatacacacctatagctaggtggggacagcggaagttcagaatcagcag

SEQ ID NO: 88304 - DNA, 1165 bp, Homo sapiens
atcacaagaaaccctctttgttttttctacaatcagttgtcattgtggcagccaattgttttgagagagaaagtacaacattattatttatgagaaagagctgacacacacaatccatatatttagctgactctgatatgcctggaccagcatattaaattacatagataactacttggaagatagatctagaaggttacaggtaatttttaatgcaggaaccatcagccctgtactgaaatgagaaaatactcatcaactactttataacctgttgccattctgccccatagaacggtaaaatgaacagcgggagaaatttatgctctaggtctgttggtctagaatgagtgacctgataaaagggaaaaaagtggaattttcaaacacacacacacacacacacacacaaaatggctatttaccttgaagaaatttattagtaaaaacaactagtcaatcctctttgacaaatacatgataaagttcttgagtatctttccatttctaaaacaagtataaataaaartgttcatttatattgccaagtttaagaaagactttaaaatgctctgaagtacttcagagcatatgattttagaaaaaaatatatatatagtctacacatctaggaaaaatactggaaagtcaaatggcagtgtgttaacaattcctatctctgattggtgtgactataggcatttttattatttttcctttattagtgaatatcagcattgagcatgtattacttccatacattaatatattattaatataacccactaaacaagtaacaccctaagcatttcgtagactgtgatgggaggttcataaacatcattcagatgatgttaaccaagcacttgcttttgtttgtcaaagaactatcttttgcctttatcttgtattatattgatgaggaaattctttaatctttgtgatttgatctactgcttctgtcactctttgccatggatgcttcttatcctcatgccaaagaccacagcatcggagtactggacagtggccacttagcctgcagctggctcagcccatgtcctcccccagcttcccaaaggcctggactagccagggctgccctggcctcaccaccattgccttggccagttcctagcccatagtccttattatcagctaatga

SEQ ID NO: 88305 - DNA, 1165 bp, Homo sapiens
atcacaagaaaccctctttgttttttctacaatcagttgtcattgtggcagccaattgttttgagagagaaagtacaacattattatttatgagaaagagctgacacacacaatccatatatttagctgactctgatatgcctggaccagcatattaaattacatagataactacttggaagatagatctagaaggttacaggtaatttttaatgcaggaaccatcagccctgtactgaaatgagaaaatactcatcaactactttataacctgttgccattctgccccatagaacggtaaaatgaacagcgggagaaatttatgctctaggtctgttggtctagaatgagtgacctgataaaagggaaaaaagtggaattttcaaacacacacacacacacacacacacaaaatggctatttaccttgaagaaatttattagtaaaaacaactagtcaatcctctttgacaaatacatgataaagttcttgagtatctttccatttctaaaacaagtataaataaaaatgttcatttatattgccaagtttaagaaagactttaaaatgctctgaagtacttcagagcatatgattttagaaaaaaatatatatatagtctacacatctaggaaaaatactggaaagtcaaatggcagtgtgttaacaattcctatctctgattggtgtgactataggcatttttattatttttcctttattagtgaatatcagcattgagcatgtattacttccatacattaatatattattartataacccactaaacaagtaacaccctaagcatttcgtagactgtgatgggaggttcataaacatcattcagatgatgttaaccaagcacttgcttttgtttgtcaaagaactatcttttgcctttatcttgtattatattgatgaggaaattctttaatctttgtgatttgatctactgcttctgtcactctttgccatggatgcttcttatcctcatgccaaagaccacagcatcggagtactggacagtggccacttagcctgcagctggctcagcccatgtcctcccccagcttcccaaaggcctggactagccagggctgccctggcctcaccaccattgccttggccagttcctagcccatagtccttattatcagctaatga

SEQ ID NO: 88306 - DNA, 821 bp, Homo sapiens
tgttccgggatattcctgaagactgccggtatccagtattttacccacttgatcctggtgcatgtacaggaagacatctcagaccacacgctctgatttgagacggtaggccctatagttagcataattatagagtgagcaagataactataacttaaccatgccctgaatgagtatgcagtcagtgcctacagaaggccacgggaacatgtgtaactacgataccagcaggaggcaaggagtgacagggtctggagctaacaaattactaaaggaaggaaatcattgcaactcagaggaaggctctgtaaaaccagtggcatgcctctggttagcttagagcatgagtgaaatttcaacaagtcagtaggtattgggaggaggaatactcttaggccaggtgcagtggctcatgcctatagccccaactatttgggaggctaaggtgggaggattgcttgagcccaggagktagaggctacagtgagctgagattgcaccactgcattcctgcctgggcgacagagtgacaccctgtctcaaaaaaagggatattcttgatggagggggaaagtgaatgtacgtggtatgtttaaagagcagttaagttatgctctcttgtgccttggagttgggtcaaactccaagaagatggaactgcaaaagcagactgggttcaagtttgcaaggcctagaaggtcatgactaccagagcctggctacgtttctcctttcctcgcgtgactcagctggactgcattcccccagcttctcccacagttaagtctgaccatgtgactcaatgctggccaacagaaggt

SEQ ID NO: 88307 - DNA, 549 bp, Homo sapiens
aatacaaattctgagctcattaaattcatatacatctataggttgaggatcatccttagagctgtcagttcttccaactggcatgtctacactacagaaaaggagaaagtagttctagaacactgcccacccaggtttgctcatctctgcctttgtcagtgcacttccagccactccaggctgctgctcagatagttctggcagaagcctgttgaagccccagccctcaggtcagggtggctaaaggctgatgactgtggcagccttcagagtggcaggtggtggcaagcagcaggaggcaggagtttccaggctcagccaccaagacagcatccctggctgtcaggtcagtgctgtcaggtcagtgctgtcaggactaagctgcttgcctccccctacttccactccatccccctatcctagtgaatgcatccttatttgtaagaaagcaacagaggcccaacacraagacacagggccttgagaatgatatcagtagtgattactgctccccaagtgctctcctcagtgagtacagtggaacctttc

SEQ ID NO: 88308 - DNA, 549 bp, Homo sapiens
aatacaaattctgagctcattaaattcatatacatctataggttgaggatcatccttagagctgtcagttcttccaactggcatgtctacactacagaaaaggagaaagtagttctagaacactgcccacccaggtttgctcatctctgcctttgtcagtgcacttccagccactccaggctgctgctcagatagttctggcagaagcctgttgaagccccagccctcaggtcagggtggctaaaggctgatgactgtggcagccttcagagtggcaggtggtggcaagcagcaggaggcaggagtttccaggctcagccaccaagacagcatccctggctgtcaggtcagtgctgtcaggtcagtgctgtcaggactaagctgcttgcctccccctacttccactccatccccctatcctagtgaatgcatccttatttgtaagaaagcaacagaggcccaacacaaagacacagggccttgagaatgatatcagtagtgattactgctccccaagtgctctcctcagtgagtacartggaacctttc

SEQ ID NO: 88309 - DNA, 880 bp, Homo sapiens
ctgttggcctagaagcatggggtgttgtgggatcagccttgcttagcacccattcatgtgcaacccagaaataagaggtgagcccttgatgagtggaagatgggagcctgtggctacattcttcttctccttccagacacatgccttgagtttatgcagggtcaagcagtcagtcgcaaacagcagccaccagatcagcagtgcatctcacgtgggtcctccctccattgtggcatcactgcccctttcyttcactcttgccccctgtggcatcccactgcctggtaaaatcttagtcgctataagactgctttcggggaaaaccagactaaggcttcctggcatcaggcacaaagcctggcatgtggtaggtgctcactaaatgccagggaaaggtaaggtatacgaaaaagatgaccttccagaaatgtcatcctggagtccccatgcacgcatgactcaggggtcagccagagacttgggcagtgtctatacacaggatctaggactcctccctgcctctcccatctataggattccccttcactttttagcagctgagatgattgccctgaaggccgtcatattgttgttcataccagaaagactgtgagtttgccttggggttaccctgcaaggtgcagagtggggctgccccaggctagaagctgtgtaagcaggaagtacatccaggactgtttccttcccccaagcgttgactttcttccagaatctgcctgctttgggtagctctccagtgccttcaggtgtgtgttttggtttggtttggtttgaaatgcacagttgtcatccgcaggaggcttggtcccaaaggagcttactcagcattgccagaagtggaagctccccagggtgaatt

SEQ ID NO: 88310 - DNA, 1004 bp, Homo sapiens
cctattatatgcctggtcttacgtctagggtcttgtaaatatcttcatcatggcttctttcaaactaccaacacaatgtcactaaacacagagttaggaataaattcacacaatcagctcttagaatttaagttgtctctagtacaccattggttgaaatccagtcacctaaatttctgtctattcccttcctcttccctgctacagaactcctagggatccccagaacataggttgaaaatccatgggtgaatatgacacctttagagtatagatgggaacactgaggcctagagaggtgaatgaacccgggtctcctaatgcccattcccatgctctttccactgcattatacaaccaatagtctaattagtctctcagttttctgcttccaatttccccatcctattccattgatattctgcaaacagatttggtcctaagaagctgctttcaaccgcagcaggcccccgtttcaccatagaagtttctayggctcccatagaagtctttaagatcaagtctaggcattttggccttattttcaataccctccacaatctggcttagctttttcttctcctgcctttctaaatatacaccaagctaaagtccaactgactctccctgttcatcagaatcattcttgcctttgattgcctctggactttggctctttctctaccacttacctggaatttttccccatcctctttgcctatccaatgctaaccaaatctcacatcccagcccacactccagctcctctagaaagctttcctaaaccactgaagtccatagggattgctaccacttctcaactcccattgtacaaaacagtttctgccattcctttgtcccttaatatgtaaggcctgttattgttagttttcttctaaaccctcatgtttatctttctatgtatttttaggttgatgtttatatgtgtatttctctgtatatgtatgttatatctgtgtttttatttaagtgttcatatgttt

SEQ ID NO: 88311 - DNA, 959 bp, Homo sapiens
cggaagcttcgcctgccaggaacatcatatttgaaatcagaaagtgtagagtcttctaaaaggaagtctgtatctgagctagttaggaattccacctcacagtctgtgtcatccagagagagggcttcagagattggcaacggtggaagaggcctagaaccccgttcacaaagaggggcacaggggaaaagggaaggggagttttttatgggtgtcagtggaggggtggaagcacaaaccccattcactgtgagtttcttaaaaccacatacaacttgatcctcttcatgtggtcccaagttttcacttgggggaataagaagagggggcaagctggacttttgagatggaccattttctgcaaagcagtggccattcatcggagcagatttggaagcatgccctggaatgaacgagagatattaataaaagatcaacaatcctctctccacctgtgtgagggagagagcaccccagctacctatgcttccacagctttcttcctgagtgaaacacttgactgctgtcaccccgagaacacccatgcaaccaccacaggtgtaattagagagcagaagattcttaacgcacatggtgtggttcaaagaacaaactatctcctctrtctcccttggacatgtgcacagcgcacacccacacatcacaggcaagttttgtgacgtgtgtaaaattcgcggaagatgaatagcatataatttacatgaataccatactgtaccagccttgccatttaagacatgcgaccatactaggcacgtagggtaccaatgagataagacaaagtccttattgctggcacatcataatattgtgagtgaatggacttgcctgcaatgtgttcagttcacacacagctcttgacaaagatccaaggaacagaatattcacattaaaaatactattttttaagttttgaggaacatttatactattttcat

SEQ ID NO: 88312 - DNA, 655 bp, Homo sapiens
tcaaataatccacccccctcagcctcccaaagtgttgggattacaggtgtgagccacctcgtctggctccttttttttggaaacaaggtctcactctgtcacccaggctggagtgcagtggcatgatctgggctcactgcaacctctgcctcctgggcttgggtgattcccccacctcagcctcctgagtagctggggctacaggcacgtgccaccatgccaggctacttttgtattttttgcagaaacggggttcctccatgttgcccaggctggtctmgaacctgtggggtcaagcaatccacctgcctcagccacccaaagtgccgggattatagacgtgagtcactgtgcccggccaggatgtgacttttaagctggatcttgaagaaagaggaaaaattaatccagcctgagcaaaggcttggaggcctggttagtgaacaacaaattatttggtgtggctggagtgagggtcctcacatctttctgggcttcggacctggaccccagattcagttgtccagggtagggcccagggttctgaatttttaactagggcctcaagtgattctggtacaggtgcgaggtcccacagactgggaaactcgggcctgtggcttcagcggcaagaaatgtggatgaatctggaaca

SEQ ID NO: 88313 - DNA, 655 bp, Homo sapiens
tcaaataatccacccccctcagcctcccaaagtgttgggattacaggtgtgagccacctcgtctggctccttttttttggaaacaaggtctcactctgtcacccaggctggagtgcagtggcatgatctgggctcactgcaacctctgcctcctgggcttgggtgattcccccacctcagcctcctgagtagctggggctacaggcacgtgccaccatgccaggctacttttgtattttttgcagaaacggggttcctccatgttgcccaggctggtctaraacctgtggggtcaagcaatccacctgcctcagccacccaaagtgccgggattatagacgtgagtcactgtgcccggccaggatgtgacttttaagctggatcttgaagaaagaggaaaaattaatccagcctgagcaaaggcttggaggcctggttagtgaacaacaaattatttggtgtggctggagtgagggtcctcacatctttctgggcttcggacctggaccccagattcagttgtccagggtagggcccagggttctgaatttttaactagggcctcaagtgattctggtacaggtgcgaggtcccacagactgggaaactcgggcctgtggcttcagcggcaagaaatgtggatgaatctggaaca

SEQ ID NO: 88314 - DNA, 845 bp, Homo sapiens
tagaccctgggtttgcccatctatagtccatacccacccaaataagtcatgcctgtggaaaactttttagacagttttagtccttgtgatgaaggagagcaaaatctctctccagaattgaaaatgcttcagcagagaagtactcttgcagtaaactggctccatctagcagatctacaaaattagtggagggaagctttgcaaacacgaatctttagggcatctcaatgaggatgcttggttctgtccagactcattgccttccaagtaatgaaatcatctgggaaacaaacttattaaaatataaaacccttcyagaatccttcttcaagcttcaaagggagatttgggggaaggaaatactaccccattttaatgattgcaaagatgtttggggtgggagtttgggggtgcacattgtttttggtgtctaattcaaatttggttatgtgctgtaggtcagtttccagggtgcacagcctggactagggtcttcctgagcctggaatttgggacagaaggagctagacccactcatccagctttgggctgcagtgacttagagggattaagaggcaaatcttgctctggccatcccgaaaaggctagaggactcacctctgatgcattttacaattcaaagggatgccccattcctttggagacttagaacaaaagccaactgaagaggttgtctcgggttgggtccccaagacagagattcttgtgcaagtcattcattgttggagagatctccagagaaaaggagtgagagaaacaggatcaggcaggaaaggaggcaacaaaggagtggtgttggctgcagaccagcctcaggtggatcc

SEQ ID NO: 88315 - DNA, 1283 bp, Homo sapiens
ggttccattcattcactaaggtgagyttttttgttttcgttttttttttctttttcgagacagggtcttgctctgttgcccagattggagtgcagtggcacaatcacaattcactacaggcttgacttccctggctcaaactatcctcccacctcagcacctcagcatcctgagtagctggaactacaggcatgcaccaccacacccagtgaatttgagtttgaattttaactatgggagtaagagactcagtcaagaggacctttgcaactctgcccacttaccctgagattcgggtcagactgaaggagcatgttgcatgcaaattccatgctagggctgtcctgtgaggggtcttgcagactctgccctcacctgacctaagaccattcctgacatgaacagcagggctttgattgaaagttaatgggactttttgggggattcccaatgaaaatgcagcctgcaattggccagccttgaaatctggtgatcctgaatgaaatgttaatttccatcatttacattcttttacattttgcacaaaaacgtaagtgatttccatattatttcagggttgcatgatttaaatttgcatagcacaagtgcacagcgctgtaaggacgtgaacatgagggagtgggagaaagcattgcaaaggaaagcaaaggaaagtgcggtctggttcaagggcttcataaatgcacagcttttcttccctgctgacaaagcctaaataatgaacggtgtctgcagggcctctgggagggcctcagagtgacagcttccttctctaggaacatcaggacgcatttcctcaagagcagtcacagcgctcctgaggtggaggcattgcaggagtatttaaaatcccagcatcagagggaaacgcccagtgccgagtgctcactggtgctcaagtctgtgatttcccctgtcccttcaccaacctctcagctcaggctccaactgccgaatgacattggtaagagtctgcttttgagattctgcagtcatcatgtatgtcttttttcttgcccaggctggagtacagtggtgtgatcacagctcactgccgcctccaactcttgaactcaagtgattctcccaccttagcctcccaagcagctgggactacaggtgcatgccacaattctctaggaaattttttaaaaaatggtttgtagggacagggtcttgctatgttgtccaggctggtctgggactcctaacctcaagtgatcctcccacctcggcctcccaaagccactgtgcccagccac

SEQ ID NO: 88316 - DNA, 702 bp, Homo sapiens
gatccgatgttgctggacagataagcagagtggaggaactcactttaggcagattgtggagaaatatggcaggggagtccmtgcactctgcaaggcctttatggtccatccatggaactggaataggaaatcaatggctaagtccagactggggcactgaattcttccacgtaatcattttttccttcctccagtccccggcccctcctctgttgaagacttaacatcgccttgctcatttagagcataattgagactccacttttatttcatcatccttcccctttcattgatcattgctaattttctggctcagtgccatccggggaatgggtttcctaaccccagcagaggtgcaattggagtcatggaaataaaaatgggtttgtactttgtctcatgaaccaagtcagctgatgtgaggagctgaccagggtactcagggatacctcctacccgccacccttctacctctgtgccagcccacccagacttaagaaaatatctccccagcaccctggagcctgcctggcatctcagagcatgtgacctcagcatcttctgccatgtagataaaaacaccagcacaataagggaatgattcctcccccacaggtgcaaaaaagagtggatggccaagtgcagctgtacctccaagtagccagatgtgaaaacagtacatctgtctgcagtttctctgtt

SEQ ID NO: 88317 - DNA, 702 bp, Homo sapiens
gatccgatgttgctggacagataagcagagtggaggaactcactttaggcagattgtggagaaatatggcaggggagtccatgcactctgcaaggcctttatggtccatccatggaactggaataggaaatcaatggctaagtccagactggggcactgaattcttmcacgtaatcattttttccttcctccagtccccggcccctcctctgttgaagacttaacatcgccttgctcatttagagcataattgagactccacttttatttcatcatccttcccctttcattgatcattgctaattttctggctcagtgccatccggggaatgggtttcctaaccccagcagaggtgcaattggagtcatggaaataaaaatgggtttgtactttgtctcatgaaccaagtcagctgatgtgaggagctgaccagggtactcagggatacctcctacccgccacccttctacctctgtgccagcccacccagacttaagaaaatatctccccagcaccctggagcctgcctggcatctcagagcatgtgacctcagcatcttctgccatgtagataaaaacaccagcacaataagggaatgattcctcccccacaggtgcaaaaaagagtggatggccaagtgcagctgtacctccaagtagccagatgtgaaaacagtacatctgtctgcagtttctctgtt

SEQ ID NO: 88318 - DNA, 1447 bp, Homo sapiens
tgagtggactgtgctcagagggaaatttttggggtagattagccaggaggcgattttgcacaagtcagtttgggttggaatcagttaagtttctttttatttggagtgaaaagagcaaaaacatacactcgagaagccacgatggactattcatatcctgggcctgggccaggaactcatgcccaggtcctctagggagaggcctcaggaagagactagtgaggctgagctctcaacagacttgctgagacccagtgcatcagcagcccttgtgacaaagtgtgaccccaagagaggaagcctggacttctcacttctgcaccagacccaaagcagctttaatcaatggggatgccaagaatggtaccaaagtctgggatattgcacaccacacagtgrgcatttgctttcttgcagggagcaccagcagaggtggaagtagtgaggttccctgccgtgatctttgggccgcaggggtcagcaagaaaagaggagcaggagagaaagaatttagcaagtgctgctgtgtggggaatgagatttattcctaaccatataaggggctccacaacaaaattgggagaacttttcataggtccataaatggggctagaacaagtaaaacttggatgatttttgttaatgtgaccctgagtttaaccccaacctggggttccacattttggatccagaatgaagcatgcatccattcagcagaaatgctttcaagatatccttgtagacaggtgggaaaatgtaagcttcgaggtgggtccatgactcgctgaatgtacctaaaaggagagtcttatcttggtgcaaaattagaatcacctggagaactttattttttaactagagacagggtctccctctgtcacccaggctgaagtgcattggcaagatcctggcttactgcagcttctaactcctgccatccctccaagaagtgcaaggtcttaaccagatcctctgactcttaggctgggcctcctgactccacagccccatggctgtctttcctgagttataggatgctctagactgggtatcttgggtagaaaatgaaccacaggactttgaatattgcttccatctctgaatgcctatgctgcctcagaggctgaggctgccccagtgacccacctgtccccaggcctggctcccaccaaggcatgcccacttcctgaggccttctctcaggaaggaaatcccagtcatcataaaaggaaaataaggaaataaaatcttaatgggatttcataggtgatataaaatctctacaactctgggtgacagacactaaaaaagattatttagagagaaaaagctttctaagacttcctgtggaattggttatctgaataagcttgcatggtagtcatatataatgtcagtggagggagggccagaagggtctgggctgactggggcctgagatccaggg

SEQ ID NO: 88319 - DNA, 1447 bp, Homo sapiens
tgagtggactgtgctcagagggaaatttttggggtagattagccaggaggcgattttgcacaagtcagtttgggttggaatcagttaagtttctttttatttggagtgaaaagagcaaaaacatacactcgagaagccacgatggactattcatatcctgggcctgggccaggaactcatgcccaggtcctctagggagaggcctcaggaagagactagtgaggctgagctctcaacagacttgctgagacccagtgcatcagcagcccttgtgacaaagtgtgaccccaagagaggaagcctggacttctcacttctgcaccagacccaaagcagctttaatcaatggggatgccaagaatggtaccaaagtctgggatattgcacaccacacagtgggcatttgctttcttgcagggagcaccagcagaggtggaagtagtgaggttccctrccgtgatctttgggccgcaggggtcagcaagaaaagaggagcaggagagaaagaatttagcaagtgctgctgtgtggggaatgagatttattcctaaccatataaggggctccacaacaaaattgggagaacttttcataggtccataaatggggctagaacaagtaaaacttggatgatttttgttaatgtgaccctgagtttaaccccaacctggggttccacattttggatccagaatgaagcatgcatccattcagcagaaatgctttcaagatatccttgtagacaggtgggaaaatgtaagcttcgaggtgggtccatgactcgctgaatgtacctaaaaggagagtcttatcttggtgcaaaattagaatcacctggagaactttattttttaactagagacagggtctccctctgtcacccaggctgaagtgcattggcaagatcctggcttactgcagcttctaactcctgccatccctccaagaagtgcaaggtcttaaccagatcctctgactcttaggctgggcctcctgactccacagccccatggctgtctttcctgagttataggatgctctagactgggtatcttgggtagaaaatgaaccacaggactttgaatattgcttccatctctgaatgcctatgctgcctcagaggctgaggctgccccagtgacccacctgtccccaggcctggctcccaccaaggcatgcccacttcctgaggccttctctcaggaaggaaatcccagtcatcataaaaggaaaataaggaaataaaatcttaatgggatttcataggtgatataaaatctctacaactctgggtgacagacactaaaaaagattatttagagagaaaaagctttctaagacttcctgtggaattggttatctgaataagcttgcatggtagtcatatataatgtcagtggagggagggccagaagggtctgggctgactggggcctgagatccaggg

SEQ ID NO: 88320 - DNA, 809 bp, Homo sapiens
gtacaagtgatcctcccaccttaaccttcctccccttgtagctaggactacagatgtgcaccaccacacctggctaattggtttttttgttgttggtttttgtttgtttgtttgtttgttttttagaaacaaaaatcttgctatgttgcccaggctggtctcaaamtcctggctgcaagttattctccctccttggcctcccaaagtgctgggattacagagatgagccaccatgcccagcctggtcccaattctttatcccactattataaattatctctccacacatttgctatggcctcatggtgatgaagtgtacttcctttctctatgactttgatcttggccgcatgacttgctttgaggaaagggatggtggtggatgtgttgggagctgaggctcggaatgttcttgcacaaatgggctttccttctaatgttcctcttttttcaccaggagtagagaatgccttaggtagccattgatccaacaaggatgggaaacatatagcgttaagctggacccaacctgcaggccagagccaaaccctacctagatcagctgaacctcagccaaccctcagacacatgaacaggaaataaatgcttgctgctatacatcactgagttttggggtgactggttatatggaattacttgaaaataactgtgtgataaaagctttcaacaaaggagtgatttgatagcctttttgtaaagaccactctggcagtggtgaggagactggattgtgaaagactcatggaaatgagaaaatgagcttgaagcccattgcagttgtctgggtt

SEQ ID NO: 88321 - DNA, 836 bp, Homo sapiens
tttcctttgctggggtcacctccaccagggcttaatagccttggtgaattctcactgatggattgatgttggcccctggactctgagcccctccaggccctgcaagccccattcctatgtcagatccctgacagctcctaacccatccaatgctggggcaattggctgggggtgaggcagtgaatacttatcaagcacctgcaataagcccagcactgtgatatgtactctacagatatttaactccactgagactcagcatcacagttaaaaacaaggggaggtgggtggycttgagtgaggcttccagagttcaaaaataatagttcctacttgaggactaccatagagatcaaaagagaggaggcaaagggtttaccattatgcctggaacttaaaaaatactccatcgtgttattttcaaacaagggcattttacagatgcaaaaagtggagctcagaaaggtgaataaatatgactgataaaatttaggtccaggtctgcctaggtctaagtccttgcagtacccactatattagtgtcactcgaagaatggcatggagatatttgcattagaatcacatgaggagctggtttaagaagcagaatcccagacgtccagaactggaacccctggagggtaaggcccagggatctgcatctttcaccagctccccatgtgacctaatgtgcacgaggccagctcacctctcttggacctgacacaagccagggatttgtgctttggcccctctgttagttcaaatgcaaggcatgggcagcattctctgcagctttctggggcccagctaaggccattatgaccctggactca

SEQ ID NO: 88322 - DNA, 867 bp, Homo sapiens
aaccctgtcacatgtaatcttctgtgtattaaaaagaaaggactagggtcatgtatcttttgaggaatacagtgacccaggcaagagacaggaggggtccatgtgctctatcctgttttgtcttcaaagcatctttccagagagctgcacatcgtcacagagtcaggggctttgtgaagttatcctggcaagcagaaataagcaaacatggcttttgtttgctactttgtctcacatatccaacttttatttcactgaaacagctttttctcaaatttcattgatttgcataaatccaatttacataaattaatttgctttcataattataataacaattataattctaatacatttggtaataaacccagttgactcttggtaagtaaccctgttatcaaggcagaagacgagtgcctgggcttactagagagatgctttggccgaggaacggggatgtttgggtcactgtaggggaagctggctgtagccatcattgactcctgggcccactttggccgtcacctgcagccttgctgtcttcctccctcaagtgcccgtgcctccctacctgagggaagtctggaattgctgtggcgctggaactctcaggcatgagattcatgagggacagatgttgatgggtaaatagtccagcattcttctgcttccttaggactgttctgaaacagattctactcggtccccaagctgtccacagtagtcacctgctcactgatagaccttttcttggttccctttccttctgcctcgccttctccattctcatragtattcctggtatcacttcccaaatcaacaacttacacccaaatctttgtctctagatcttcttctgaggggatc

SEQ ID NO: 88323 - DNA, 626 bp, Homo sapiens
aggagtgggagaaggagattctgggacggacagaagttgctagcctaaataagcagctcagcaaactcaccctgagtatcccctcccctgctgtgccccaccctcctgtcagtgggatgtgggagaaacagaagacagacttgagcatacactcaaggacatctgggtccattgaacctgccccaaccttgggcttgtccgagctaccaagaaaaacttacaaggaggtactcagtgggaacttaggggagccctgggggctactcggttgcacatggcagatcctggttctcactgttgtycaggactggaaccccttacagcctgtggcagatggcattttctaaaaacagccaccacagtatctcccatcccacttgctcttatacaagtgaccttggcacacccctatcgaggggtaaagtcagtgtcccttcatcttgaacctgggcaggcttctgtgacctccttggctggtggagtccaccataaaccatgtcagataacctcatcctcacggctggacaaggccacacagcttctgcaggtttctctctcttggcacatgtgccttcaaagccgtgagccatcatgtaataagttatcccaaagccaccacacacaca

SEQ ID NO: 88324 - DNA, 626 bp, Homo sapiens
aggagtgggagaaggagattctgggacggacagaagttgctagcctaaataagcagctcagcaaactcaccctgagtatcccctcccctgctgtgccccaccctcctgtcagtgggatgtgggagaaacagaagacagacttgagcatacactcaaggacatctgggtccattgaacctgccccaaccttgggcttgtccgagctaccaagaaaaacttacaaggaggtactcagtgggaacttaggggagccctgggggctactcggttgcacatggcagatcctggttctcactgttgttcaggactggaaccccttacagcctgtggcagatggcattytctaaaaacagccaccacagtatctcccatcccacttgctcttatacaagtgaccttggcacacccctatcgaggggtaaagtcagtgtcccttcatcttgaacctgggcaggcttctgtgacctccttggctggtggagtccaccataaaccatgtcagataacctcatcctcacggctggacaaggccacacagcttctgcaggtttctctctcttggcacatgtgccttcaaagccgtgagccatcatgtaataagttatcccaaagccaccacacacaca

SEQ ID NO: 88325 - DNA, 667 bp, Homo sapiens
agcccctgcaatacagcaacaacttctctggtccaaagtgtcattcgtactgagattgagaaactctaaaaggatacacaagaaacrtgttcacagtgaacacccccattgcagggactagggggccagtgtgcatgggtatgcaaaatcattagttttccttgtgtgcccttgtgaggaagggcattttgtagagtctcttatgaagtgcatgtattacttgtttttagaaaagaataactgtgacttgactgagccataattatttagtggtcttctcttgattgctgggggaaggaatttaaagaggaggaaaagcaagggcctgccacagtacctgggacccacagtcctgaatccacctagtcttcctctagaccagagtgttcccacctggcaccagcgcatggtgacccagtctgttctttcctgcagggaccatcctatacattggaggatgttcagcagcatcctggcctctccctccccagatgccagtggcaatctcttccccatttcgacaacccaaaatatctccagagatttccgatgtcctatggggagcaaaaacatccctggttgggaaccactgtgctagatttactctgtgaaaatctaaacacaaagaagtccccactcactgacctcagggacctatggctcagct

SEQ ID NO: 88326 - DNA, 667 bp, Homo sapiens
agcccctgcaatacagcaacaacttctctggtccaaagtgtcattcgtactgagattgagaaactctaaaaggatacacaagaaacgtgttcacagtgaacacccccattgcagggactagggggccagtgtgcatgggtatgcaaaatcattagttttccttgtgygcccttgtgaggaagggcattttgtagagtctcttatgaagtgcatgtattacttgtttttagaaaagaataactgtgacttgactgagccataattatttagtggtcttctcttgattgctgggggaaggaatttaaagaggaggaaaagcaagggcctgccacagtacctgggacccacagtcctgaatccacctagtcttcctctagaccagagtgttcccacctggcaccagcgcatggtgacccagtctgttctttcctgcagggaccatcctatacattggaggatgttcagcagcatcctggcctctccctccccagatgccagtggcaatctcttccccatttcgacaacccaaaatatctccagagatttccgatgtcctatggggagcaaaaacatccctggttgggaaccactgtgctagatttactctgtgaaaatctaaacacaaagaagtccccactcactgacctcagggacctatggctcagct

SEQ ID NO: 88327 - DNA, 667 bp, Homo sapiens
agcccctgcaatacagcaacaacttctctggtccaaagtgtcattcgtactgagattgagaaactctaaaaggatacacaagaaacgtgttcacagtgaacacccccattgcagggactagggggccagtgtgcatgggtatgcaaaatcattagttttccttgtgtgcccttgtgaggaagggcattttgtagagtctcttatgaagtgcatgtattacttgtttttagaaaagaataactgtgacttgactgagccataattatttagtggtcttctcttgattgctgggggaaggaatttaaagaggaggaaaagcaagggcctgccacagtacctgggacccacagtcctgaatccacctagtcttcctctagaccagagtgttcccrcctggcaccagcgcatggtgacccagtctgttctttcctgcagggaccatcctatacattggaggatgttcagcagcatcctggcctctccctccccagatgccagtggcaatctcttccccatttcgacaacccaaaatatctccagagatttccgatgtcctatggggagcaaaaacatccctggttgggaaccactgtgctagatttactctgtgaaaatctaaacacaaagaagtccccactcactgacctcagggacctatggctcagct

SEQ ID NO: 88328 - DNA, 631 bp, Homo sapiens
cttgaggccaggagtttgaggccagcctgggcaacatagccagactctgtttctacaaaaaattagccacacctggtggcacacacctgtgggcccagctggaggatcactgaagccctgggagttgaagcctacagggagccgtgatcacgccactgcactccagcctgggtgaccaagtgagaccctgtctctaagatagatggatggatggatggatggatggatggatggatggacagatagaagataaactgcgaggctagcacgggttgtctggcaggggctggtatgtctccacgatggagcccgaggcagggaggcccggtgcatatggcagcagcttattggggaagcttttcccaggcacggttccaggacacaagggtgtggtgtgagtgacctggagctgtttgtggttcagggatgggggcctggaggtctcattatgcctaggcttttataatatttttgccaaccaaaggtggaacaaaaagcaaaggcaagtgacttggaaaactcggtttcagckgggatttatgccctgaagttttttactcgttctctatctaatcctggccctacctcttagatgggctatatgaccttggagaataacctagtctggatg

SEQ ID NO: 88329 - DNA, 833 bp, Homo sapiens
cctgagaccccagccctggcctccccactctgtcctgggtgctggcgtctgagccttcgggacagcctgtccacatggaaccaagtcctgagcctccaagcttggtgagggggaggctatggggggcagcctgggtggggtacttgggcaagagcatcaccctaagaatgcatcctggggccttggcctgagaacacagagcccatggcgggggaacactgtccctctcatgtccctgcttccctttcaccccacccattctggcttctcccacaggaaagcatgaagggagacaccaggcatctcaatggagaggaggacgccggcgggagggaagactcgatcctcgtcaacggggcctgcagcgaccagtcctccgactcgcccccaatcctggaggctatccgcaccccggagatcagaggtggctgggcagtggggactggggtggtgtcaggcgctgacatagtgagcggtcactgcagacaactggaggctttggggagagtctctgacaacctccaccacaattccccgggarggaagagagctctagcaaggagggatgcagggtcgagcccttcacacctgcccgcagcccttggcctcccctttgggactctcatctcagctgggactctgagcgtgacacaagggtgatggttccctgtcctctgccagtcatgacaggggtggtctcagcatgggcccttggagagcccttctgcagtgggaccctctccccactcagagctgggctggggttgggagggggaggtctggagtgtgcttcctttccaccctgccctgagcagctccagccagctcacttg

SEQ ID NO: 88330 - DNA, 833 bp, Homo sapiens
cctgagaccccagccctggcctccccactctgtcctgggtgctggcgtctgagccttcgggacagcctgtccacatggaaccaagtcctgagcctccaagcttggtgagggggaggctatggggggcagcctgggtggggtacttgggcaagagcatcaccctaagaatgcatcctggggccttggcctgagaacacagagcccatggcgggggaacactgtccctctcatgtccctgcttccctttcaccccacccattctggcttctcccacaggaaagcatgaagggagacaccaggcatctcaatggagaggaggacgccggcgggagggaagactcgatcctcgtcaacggggcctgcagcgaccagtcctccgactcgcccccaatcctggaggctatccgcaccccggagatcagaggtggctgggcagtggggactggggtggtgtcaggcgctgacatagtgagcggtcactgcagacaactggaggctttggggagagtctctgacaacctccaccacaattccccgggagggaagagagctctagcaaggagggatgcagggtcgagcccttcacacctgcccgcagcccttggcctcccctttgggactctcatctcagctgggactctgagcgtgacacaagggtgatggttccctgtcctctgccagtcatgacaggggtggtctcagcatgggccyttggagagcccttctgcagtgggaccctctccccactcagagctgggctggggttgggagggggaggtctggagtgtgcttcctttccaccctgccctgagcagctccagccagctcacttg

SEQ ID NO: 88331 - DNA, 2043 bp, Homo sapiens
cttggtagcccaaccagataagagtcatgaattgattccacattagcatgcagcaggcatgggaaaatgataaactcctattaccactgtcatggcaactgaaaaaatggctgctttggggggaacaaggtccacaggagaagaaaagcgaagccccgtctctttcttctgtttgacatctgttgtttaacatacaaaattgtattatcgtgacgcaagcgagtcagccagggctaaagcctggctaggaattgtcaaaaccatactgccccaactcccattcccctctctctaccatgagagtatataatttgaccccggacatttccacgaagggcagtaaattcccctcccttttcatcccaggtacaaaaagcgtgaagtgccttgggaaggtggaatagagggaggagggtctttttggggggtagtggagaagggagacatgctatcaattatgaagcaaaaataaagctcttctccgtttgcagttgcttctctaaatgattcattcctccctcctcccttcccccaaccttccctcaagaacattttagatttttcttttatttatttatttatttatttttgagacagagtctcactctgtcacccaggctggagtgcaatggcccagtctcggctcagtgcaacctccgcctcccaggttcaagcgattctcctgcctcagcctccctagtatctgggattacaggcacatgactggctgatttttgtatttttagtagagatggggtttcaccatgttggccaggctggtctcaaactcctgaccttgtgatccgcccacctcagcctcccaaagtgctgggattacaggcgtgagtcatcgcagccagccctagatttttctaaaacagcaatttgagcggggcttgtgaacacagacaaaacatgagcagataggctacaagcagggatggcagccttaggcgcagggctgaaggttgaaaatcctgattgcaggtcattgagaaaaggctagaaggaaacacacctgagtgctaaccaggagttggacaagaggtggatttttatttccttcttaatatagcccttttcaaaatgtttaataaagtacctgtgtcagtcactctcatactcagcagaaatatccaataagctttcggaggtccaggaatgggtctcaaaggagctttcaaagggtctcaaagatctcaaagtttctctcaaaggaggattgaggtgtagatgctcacacaaaaattctgttcggcaaatttccatatgatccaaacatatcacttgaagcaaatcctttgcatataaatataaatatatacaaatttatttgtatattatatataatatttatatatcatgcattatatttatacattatatattatattatattatatttatatatttatattatatattatatattatatttatatatttataatatataatatataatatataatatattatattatatttatatattttatattatatattatatattatatattatatttatatattatatttatatattatatattatatttatatattatatatatttatatagtatatacatattatagatttatattatatataaatttatatatttcatgaaatttatataaatatataaatataaataaatatatatatttcatgaggacatttaaatgagtgrctttcaaacacgcttcacttcccacctccccacagttgtgtaaccagaacaaacctagtaccattttgggttgttttcacaacacagcctttaaacagctgtgaaagattggggccatcctaaaatggactaaattgtaatttccagtaagagtgagattaagccccttgataggacaagatcagataagtgcaaacaaaagcaagaacatttatataatcaatctcggccattagcaaagttagcattttaaggtggtaaaacaaaaaaggaacctcttggccaaacccgcaccccatgtgcagtttggaacttcccagtttaaagactatcatctttaaata

SEQ ID NO: 88332 - DNA, 614 bp, Homo sapiens
tgttgatctgtgaccttacccccaaccctgtgctctctgaaacatgtgctgtgtccactcagggttgaatggattaagggtggtgcaagatgtgctttgttaaacagatgcttgaaggcagcatgctcsttaagagtcatcgccactccctaatctcaagtacccagggacacaaacactgcggaagtccgcagggtcctctgcctaggaaaaccagagacctttgttcacttgtttatctgctgaccttccctccactattgtcctgtgaccctgccaaatccccctctgcgagaaacacccaagaatgatcaattaaaaaaaaaaaaaaaaaacgaaaaacaaaacaaacaaacaaaaactggacagtggatggtatcccaggttgaagaaacagcagaaacaaagactgggagggagtaatgtacaagttgtggtctggatagttgggctggagcagaggatgctggaggaggctcagcagggcaggtatgaccgtcacagccactggctggcactagccaatgcagggttcttctgggaactctggggtcctgaaactaaggcagctgaggaacttccagaatgctttaataaattaatatcaaacatga

SEQ ID NO: 88333 - DNA, 614 bp, Homo sapiens
tgttgatctgtgaccttacccccaaccctgtgctctctgaaacatgtgctgtgtccactcagggttgaatggattaagggtggtgcaagatgtgctttgttaaacagatgcttgaaggcagcatgctccttaagagtcatcgccactccctaatctcaagtacccagggacacaaacactgcggaagkccgcagggtcctctgcctaggaaaaccagagacctttgttcacttgtttatctgctgaccttccctccactattgtcctgtgaccctgccaaatccccctctgcgagaaacacccaagaatgatcaattaaaaaaaaaaaaaaaaaacgaaaaacaaaacaaacaaacaaaaactggacagtggatggtatcccaggttgaagaaacagcagaaacaaagactgggagggagtaatgtacaagttgtggtctggatagttgggctggagcagaggatgctggaggaggctcagcagggcaggtatgaccgtcacagccactggctggcactagccaatgcagggttcttctgggaactctggggtcctgaaactaaggcagctgaggaacttccagaatgctttaataaattaatatcaaacatga

SEQ ID NO: 88334 - DNA, 614 bp, Homo sapiens
tgttgatctgtgaccttacccccaaccctgtgctctctgaaacatgtgctgtgtccactcagggttgaatggattaagggtggtgcaagatgtgctttgttaaacagatgcttgaaggcagcatgctccttaagagtcatcgccactccctaatctcaagtacccagggacacaaacactgcggaagtccgcagggtcctctgcctaggaaaaccagagacctttgttcacttgtttatctgctgaccttccctccactattgtcctgtgaccctgccaaatccccctctgcgagaaacacccaagaatgatcaattaaaaaaaaaaaaaraaaacgaaaaacaaaacaaacaaacaaaaactggacagtggatggtatcccaggttgaagaaacagcagaaacaaagactgggagggagtaatgtacaagttgtggtctggatagttgggctggagcagaggatgctggaggaggctcagcagggcaggtatgaccgtcacagccactggctggcactagccaatgcagggttcttctgggaactctggggtcctgaaactaaggcagctgaggaacttccagaatgctttaataaattaatatcaaacatga

SEQ ID NO: 88335 - DNA, 614 bp, Homo sapiens
tgttgatctgtgaccttacccccaaccctgtgctctctgaaacatgtgctgtgtccactcagggttgaatggattaagggtggtgcaagatgtgctttgttaaacagatgcttgaaggcagcatgctccttaagagtcatcgccactccctaatctcaagtacccagggacacaaacactgcggaagtccgcagggtcctctgcctaggaaaaccagagacctttgttcacttgtttatctgctgaccttccctccactattgtcctgtgaccctgccaaatccccctctgcgagaaacacccaagaatgatcaattaaaaaaaaaaaaaaaaaacraaaaacaaaacaaacaaacaaaaactggacagtggatggtatcccaggttgaagaaacagcagaaacaaagactgggagggagtaatgtacaagttgtggtctggatagttgggctggagcagaggatgctggaggaggctcagcagggcaggtatgaccgtcacagccactggctggcactagccaatgcagggttcttctgggaactctggggtcctgaaactaaggcagctgaggaacttccagaatgctttaataaattaatatcaaacatga

SEQ ID NO: 88336 - DNA, 614 bp, Homo sapiens
tgttgatctgtgaccttacccccaaccctgtgctctctgaaacatgtgctgtgtccactcagggttgaatggattaagggtggtgcaagatgtgctttgttaaacagatgcttgaaggcagcatgctccttaagagtcatcgccactccctaatctcaagtacccagggacacaaacactgcggaagtccgcagggtcctctgcctaggaaaaccagagacctttgttcacttgtttatctgctgaccttccctccactattgtcctgtgaccctgccaaatccccctctgcgagaaacacccaagaatgatcaattaaaaaaaaaaaaaaaaaacgaaaaacaaaacaaacaaacaaaaactggacagtggatggtatcccaggttgaagaaacagcagaaacaaagactgggagggagtamtgtacaagttgtggtctggatagttgggctggagcagaggatgctggaggaggctcagcagggcaggtatgaccgtcacagccactggctggcactagccaatgcagggttcttctgggaactctggggtcctgaaactaaggcagctgaggaacttccagaatgctttaataaattaatatcaaacatga

SEQ ID NO: 88337 - DNA, 745 bp, Homo sapiens
acaaagataaacttcatgaacatattgcaaaaatacatacacagtcatttgtagttagtgacttgaggcccacagtttcctttctttctttatttttattattatttttttgacacaaagtctcactctgtcacccaggttggagtgcagtgctgcgatctcagctcactgcagcctcctccttccaggttcaagcaattcttctgcctcagcctctcagttagctgagattataggcaggcaccaccacacctggctaattttcatatttttagtagagacagggtttcaccatgttggccaggctggtctcgaactcctgacctcaagcgatctgcccgccrtggcctcccaaagtgctgggattacaggcatgagccaccatgcccggcccatggtttgctttctaaaagtaagctgaggagagtcaggcccatgatggaaaaattaaacaagaaaactaaacttggaagcctggacatacaaggttagagttgaggagacattaaactggacctcaaagaggttgaaatgggcctctcagtgcacgaaaaccctccctacagttgaggccaagcttttattgaaacctttacaactttttttagtctgtacattttaaaatatgaaaattagtatttgctgtgaggagagctattaataaacacaagcctgaggctcacacaccaagtgggtgtacgtgcacaagcatccggaacaatccagtacagagctatgaggattt

SEQ ID NO: 88338 - DNA, 745 bp, Homo sapiens
acaaagataaacttcatgaacatattgcaaaaatacatacacagtcatttgtagttagtgacttgaggcccacagtttcctttctttctttatttttattattatttttttgacacaaagtctcactctgtcacccaggttggagtgcagtgctgcgatctcagctcactgcagcctcctccttccaggttcaagcaattcttctgcctcagcctctcagttagctgagattataggcaggcaccaccacacctggctaattttcatatttttagtagagacagggtttcaccatgttggccaggctggtctcgaactcctgacctcaagcgatctgcccgccgtggcctcccaaagtgctgggattacaggcatgagccaccatgcccggcccatggtttgctttctaaaagtaagctgaggagagtcaggcccatgatggaaaaattaaacaagaaaactaaacttggaagcctggacatacaaggttagagttgaggagacattaaactggacctcaaagaggttgaaatgggcctctcagtgcacgaaaaccctccctacagttgaggccaagcttttattgaaacctttacaactttttttagtctgtacattttaaaatatgaaaattagtatttgctgtgaggagagctattaataaacacaagcctgargctcacacaccaagtgggtgtacgtgcacaagcatccggaacaatccagtacagagctatgaggattt

SEQ ID NO: 88339 - DNA, 2215 bp, Homo sapiens
cggctgtcagccatagcgtgcggtttgctgtgcagaacactgcaggaggcctcggctcgtgggtctccaccctcagcaggcaaatctgcctgttgccccgagtccgtggcgacttcaggctcagccaatcagcaccaccccctcgtcccgccccctcgggaggactgccttctgattggctgctcggcgctaggcaggccaagattggaagcccaatgggctcggagcagggctctccgaaggaggcctgaagaccggagatacccaggagggtgcggaaaggaagggtcccgctctggcccagcaattggagagcctcgccccgccggcccggggtgcccgggatagccgaacccagggcggggctcccggttatcagcatccttcaggccgccctgggacgcggccgttggtggcctgccagttttgcagacggaatacttagaccctgctgggtggggccttgcgctccatagctatgctttctcagctcttaaaaagtcagcaatcctgggttaaattactctgtacaaaattaaattttgccatacgctaatgtaagtattatttgcaaccaaaggatggatggatgcttttctttttctttcttagctcttcttaacttattcgtggattatcacttactagactagtatactaattatttaatataaaaacactctgaaacgtttatctccgtacagatgggtgttgatttcctcctttaccagagaaaaacaacttaacttagatgggaaaaatgtattcccttgtgatgggaaaaatgtattcaactctggtacactgccaaattggcttctttaaacactggagaaatctgcttccccaaattttacycccaggtaagcaggaattttgaaaagctttgtgtctttaaaaagctatgttgaagagtaaaatacttagtaatatatagtacaatatttagtaagttactgactagtttgtcattgtaatcaaagagtttgaatgatttctacacctcctcaggtgctaggatttatctttaagcaccttaatatatatacatagtatataccatcatcttcaaattaaaagttatcagcttttaattttttccagtacaactacatataatgggtggatatataatagtggaaacttcacatgttgttcttgatcttacaaaagtatgataagaatcttgggcataaaagtggaactttagcagttcattggaaaagaaagccacaaattgatctttagcaccctatacttttcctatattaaaaacaattataaagatgctgttggctgtgtaatttggtgtctttttctacctgcccgatccatactgccaagactgtaaactccatgtgggtcaggatcctcccatccataatttattgagcacttactatataccagggactattctcagctttttgtatatttgcttagttaaccctcccaacaaccctatgagttagatactaatattatcttcattttacagattaggaaacagaggtatagggaggttaaataacttgcccaaagttacacagctattaagggatagtcaggattctagcttcagctgttcatctccaaagtccacagtttgttgaataaataaatgttgaaataatcgagcaaatcatcttcttaactaaccaacacaaatatcaacaaaataaataagagacctggagtcatttcttaacctttattcattatataaaaaaaagcatgtttttttttcctttgtttttgttactatggatttgaattcctaaagaattatttctagagaaagaaatggagaaacaagactggtttctgatcttgtcatatcttgtattttaaaataaagggcaggcttacaagtaatgacaataaatttataatgttacataggaggctgggtgcgggggctcacgcctgtaatcccagcaccttgggaggccgaggcaggcggatcacttgtggccagaagttcgagaccagtctggccaacatggtaaaaccccacctctgctaaaaatacaaaaattagctgggcgtggtggcacacgcctgtagtctcagctactcaggtggctgaggcgagagaatcacttgaacccaagaggcggaggttgcagtgagccaagattgtgccactgcactccagcctgggtgacagagtgaggcttcatctcaaaaaaattaaaaattaaaaaaagtcaca

SEQ ID NO: 88340 - DNA, 752 bp, Homo sapiens
tgtgcctggcttatttcacttaacataatgtcctccaggttcatccatgctgtcacagataacatgtgacactttgtaagttagttaatgagatgtcagtatggtccatctaaatattaatggaaggcaagtgctcccctactgttgaacttcacttctgaaggcaggtatcagaaaaataaaggaggaaaaaactacaatgtatctaactatgacttatgttattgagaaattaaagtgcatattgaagctgtcaatctcaacattgccaaccatcattcaaacataggatgtgtttatgatgaagcatcttaaagcatcctgggaaaattacartgatgactcccaactttccattagctaggaatgtaaagagttacaaatatgtgtccaaccataaagatatttgacatgaatatgttgagctctaaacaagaaaagtaattttggacaaaacaatatcattaaatgctgagagaagttcttctattttaataactgaatttaggaaaaacaagtccctctgctatttgctggctggattgggctaagggcggacctggtttttgtaactctccccacccttcttgggatgtgtccagcccagtgggcagccttgttctggaatatccagttaagctggattgctgtggggggtggagttacagttgcactttttcaacctaagaacaggatgcaccaacacaatccctgattttccttaatttttccagggccttgatcttcttttg

SEQ ID NO: 88341 - DNA, 752 bp, Homo sapiens
tgtgcctggcttatttcacttaacataatgtcctccaggttcatccatgctgtcacagataacatgtgacactttgtaagttagttaatgagatgtcagtatggtccatctaaatattaatggaaggcaagtgctcccctactgttgaacttcacttctgaaggcaggtatcagaaaaataaaggaggaaaaaactacaatgtatctaactatgacttatgttattgagaaattaaagtgcatattgaagctgtcaatctcaacattgccaaccatcattcaaacataggatgtgtttatgatgaagcatcttaaagcatcctgggaaaattacaatgatgactcccaactttccattagctaggaatgtaaagagttacaaatatgtgtccaaccataaagatatttgacatgaatatgttgagctctaaacaagaaaagtaattttggacaaaacaatatyattaaatgctgagagaagttcttctattttaataactgaatttaggaaaaacaagtccctctgctatttgctggctggattgggctaagggcggacctggtttttgtaactctccccacccttcttgggatgtgtccagcccagtgggcagccttgttctggaatatccagttaagctggattgctgtggggggtggagttacagttgcactttttcaacctaagaacaggatgcaccaacacaatccctgattttccttaatttttccagggccttgatcttcttttg

SEQ ID NO: 88342 - DNA, 752 bp, Homo sapiens
tgtgcctggcttatttcacttaacataatgtcctccaggttcatccatgctgtcacagataacatgtgacactttgtaagttagttaatgagatgtcagtatggtccatctaaatattaatggaaggcaagtgctcccctactgttgaacttcacttctgaaggcaggtatcagaaaaataaaggaggaaaaaactacaatgtatctaactatgacttatgttattgagaaattaaagtgcatattgaagctgtcaatctcaacattgccaaccatcattcaaacataggatgtgtttatgatgaagcatcttaaagcatcctgggaaaattacaatgatgactcccaactttccattagctaggaatgtaaagagttacaaatatgtgtccaaccataaagatatttgacatgaatatgttgagctctaaacaagaaaagtaattttggacaaaacaatatcattaaatgctgagagaagttcwtctattttaataactgaatttaggaaaaacaagtccctctgctatttgctggctggattgggctaagggcggacctggtttttgtaactctccccacccttcttgggatgtgtccagcccagtgggcagccttgttctggaatatccagttaagctggattgctgtggggggtggagttacagttgcactttttcaacctaagaacaggatgcaccaacacaatccctgattttccttaatttttccagggccttgatcttcttttg

SEQ ID NO: 88343 - DNA, 747 bp, Homo sapiens
ccagatgcacgtggttgtcagtccaggcagggaagtggatgagtagggaggcacaagggagcttaagaggaatgggggcgtgttctgcctttttttttttttttgaggcagagtctcgctctgttgcccaggctggagtgcagtggcacaatctcggctcactgcaagctccgcctcccaggttcacgccattctcctgcctcagcctcctgtgtagctgggactgcaggcgcccaccaccaagcctggctaattttttgcattttttttttagtagagacagggtttcaccgtgttagccaggatggtctcgatctcctgaccttgtgatccacctgccttggcctcccacagtgctgggattacaggcatgagccaccgcgcccggcctgcctttttttttttttaagagacaggatctcactatgttgcccaggctggtctcaaactcctgggcttgagcgatctacccacctcagcctcccaaagtgctgggattagaggcatgaggcaccgtgcctggcgtgagttctgctttgcagaaaggatgctgggggtgagatgtatcaaagacagtgcagcggagtggatgtcactccctcccacccctatgtggacttctttcctattcttcttttcttgkgggccttcttatattcctgggcaagagggaacatccagggtcaggctagtgagcacctccttacattttgcactttgtcccagacctggcaaaatcatacccat

SEQ ID NO: 88344 - DNA, 843 bp, Homo sapiens
gcatgcaaaacacagatgaaccttgaaaacattttgttaaagaagccggacacaaagagtcacatattgtatgattccatttatgtgaaatgtctggaaaaggcatatccatagagacagaaagaagattagtggttgccaggggcttggagaagggggtaatgcagagtggttgctaatggttacagagtttctttttagagtgatgaaaatgttctggaatttgatagtggtgactgtkggactactctgtggatgtatgaaaaaccactgaattgcagtttaagggtaaatattatagtgtgtgaattatatctcagttttaaaaatgggacggagttgtacctagacctctaatgtgcaagggacttcctcctatgtcctacctctatcacctggacatgtctaagtggccctcctgccatcaccttgacccctcttggtccctgtattagtcaggtttcttcagagaaacagaaccaataggatatcaacatcaatattggcgttgacaccagtatctatattgacaaaaatattgatatatggagagatatagacacatagaaagaccagctgttcacccaacaagctccttcctgtcccctttgggagctctattctttatactcccagtaactagctaggattccatgactagaatcatcacttctatttccttcttgttgtgaggttaatgaggggatacatattgagcccagaacctggccagtccagggactgtggatgtcctggtgagggtgactggcgacagctcctgagatgtagaaaatgagaatctatggttctttgaacagtgcctggctcctgagaccctaacct

SEQ ID NO: 88345 - DNA, 843 bp, Homo sapiens
gcatgcaaaacacagatgaaccttgaaaacattttgttaaagaagccggacacaaagagtcacatattgtatgattccatttatgtgaaatgtctggaaaaggcatatccatagagacagaaagaagattagtggttgccaggggcttggagaagggggtaatgcagagtggttgctaatggttacagagtttctttttagagtgatgaaaatgttctggaatttgatagtggtgactgttggactactctgtggatgtmtgaaaaaccactgaattgcagtttaagggtaaatattatagtgtgtgaattatatctcagttttaaaaatgggacggagttgtacctagacctctaatgtgcaagggacttcctcctatgtcctacctctatcacctggacatgtctaagtggccctcctgccatcaccttgacccctcttggtccctgtattagtcaggtttcttcagagaaacagaaccaataggatatcaacatcaatattggcgttgacaccagtatctatattgacaaaaatattgatatatggagagatatagacacatagaaagaccagctgttcacccaacaagctccttcctgtcccctttgggagctctattctttatactcccagtaactagctaggattccatgactagaatcatcacttctatttccttcttgttgtgaggttaatgaggggatacatattgagcccagaacctggccagtccagggactgtggatgtcctggtgagggtgactggcgacagctcctgagatgtagaaaatgagaatctatggttctttgaacagtgcctggctcctgagaccctaacct

SEQ ID NO: 88346 - DNA, 843 bp, Homo sapiens
gcatgcaaaacacagatgaaccttgaaaacattttgttaaagaagccggacacaaagagtcacatattgtatgattccatttatgtgaaatgtctggaaaaggcatatccatagagacagaaagaagattagtggttgccaggggcttggagaagggggtaatgcagagtggttgctaatggttacagagtttctttttagagtgatgaaaatgttctggaatttgatagtggtgactgttggactactctgtggatgtatgaaaaaccactgaattgcagtttaagggtaaatattatagtgtgtgaattatatctcagttttaaaaatgggacggagttgtrcctagacctctaatgtgcaagggacttcctcctatgtcctacctctatcacctggacatgtctaagtggccctcctgccatcaccttgacccctcttggtccctgtattagtcaggtttcttcagagaaacagaaccaataggatatcaacatcaatattggcgttgacaccagtatctatattgacaaaaatattgatatatggagagatatagacacatagaaagaccagctgttcacccaacaagctccttcctgtcccctttgggagctctattctttatactcccagtaactagctaggattccatgactagaatcatcacttctatttccttcttgttgtgaggttaatgaggggatacatattgagcccagaacctggccagtccagggactgtggatgtcctggtgagggtgactggcgacagctcctgagatgtagaaaatgagaatctatggttctttgaacagtgcctggctcctgagaccctaacct

SEQ ID NO: 88347 - DNA, 843 bp, Homo sapiens
gcatgcaaaacacagatgaaccttgaaaacattttgttaaagaagccggacacaaagagtcacatattgtatgattccatttatgtgaaatgtctggaaaaggcatatccatagagacagaaagaagattagtggttgccaggggcttggagaagggggtaatgcagagtggttgctaatggttacagagtttctttttagagtgatgaaaatgttctggaatttgatagtggtgactgttggactactctgtggatgtatgaaaaaccactgaattgcagtttaagggtaaatattatagtgtgtgaattatatctcagttttaaaaatgggacggagttgtacctagacctctaatgtgcaagggacttcctcctatgtcctacctctatcacctggacatgtctaagtggccctcctgccatcaccttgacccctcttggtccctgtattagtcaggtttcttcagagaaacagaaccaataggatatcaacatcaatattggcgttgacaccagtatctatattgacaaaaatattgatatatggagagatatagacacatagaaagaccagctgttcacccaacaagctccttcctgtcccctttgggagctctattctttatactcccagtaactagctaggattccaygactagaatcatcacttctatttccttcttgttgtgaggttaatgaggggatacatattgagcccagaacctggccagtccagggactgtggatgtcctggtgagggtgactggcgacagctcctgagatgtagaaaatgagaatctatggttctttgaacagtgcctggctcctgagaccctaacct

SEQ ID NO: 88348 - DNA, 989 bp, Homo sapiens
tcctatccctggcccctacctagtagatgccaagagcatcaccctgcccccagtcgtgacaacaaaaatgtctccagactttgcccctggttgagaaccagtgatgtgggaagaaagtttagcgcaggtaaactagaagatggtggtgaagcgaattgcagcaccacagcaggcaccgtgctttctggccagggcttcagtccactgtctcccttcagtaatcctgtatccacagggttgacagtcatcttatttacatggattcaaacctacaggatgatttttcagcatggtttgggagcaacagtaaaaacatatggtaagtgattattaacctaatgagttgtggtaaattgtaattttatatcttaatgaaatgatgttgtatgacacaggataatacattttgatcaatttccctgatatttaaaacttgctgccgtacagttgctaattctggtgcctgccaggatgagcaacctgattgtggtttttcaatatttaatggcctgtttactgctgggtttctcagatgttcaacaggtttttattgagtgcctaytgggtgctggggattcagccctgtcctggaggctcagtaactccagaggaaagttttatttactgggtgaatggctatgtggatttgtaatcaattggcttaaaatgcagagtaataattaaatataaaattggctgagcagtgccaatgccgggagtgtgggaaggtttcacaatggcagtcttacaggaatgccaggtgggctgcctgggggcatgtagagtggtggggggtgttccaggcagagggagcagccattgtaggggtgctttggggatactgtcagcctaaggaggggaaacctgcctgcgtgggagttgggacaccagcagagatggttatgaagagccttgcaccccagcctgtggggctttaagtagaggactgtgcctggaaccaggggtacggtgcacaagtatggaatgca

SEQ ID NO: 88349 - DNA, 1240 bp, Homo sapiens
tgcattgtagcaatgcacaaaagtaggaaaaaagtaggtcaatgtacaaatgttataataaatagaaataatgcagaaaaatgtgtagggtgagaaaatcagaaagtaaaacacattctttggttggcaaaagtcaggaataaaaggatactattgaacactgacaaagtagatggtaaatgtttaaacaggcaatggaaaccggatacagtggctcatgcctataatcccaacactttgggaggccagggcaggaggagggttgcttgaggccaggagtttgaggccagccttggcaacatagtgagacccagtctttacaatcaatcaatcaatmaataaatctagccatgtgtggtgacacactcccgtagtcatagatactagggaggctgaagtgggaagatcccttgagcccaggagtttcaggttacaatgaactacaaccatgcctcatgacactgcactccagactgggtatgaggaagaccctgtctcaaaaacaaaaacaaaaacataggcaatgaaactacaggcatttagaagttataaatgaaaagttaaccactcaaaatatgcaacttcctaaataacactttatttatttaaagaaaaaaacacatgtcacaaagaaacatagtaaataaaaaataatatatataattttaaaacatcacaacagagcagagaccaaacaatgtagtcacatcaaacagtaagtcctcacttaatgccatcaataggttcttggaaaccacaagtttaagcgaaacaactgtagtataaagaaacaatttaccataggttaattgatatgagcaagagttaagttcctacaacatatagtaattcatttcacttaaaactgtgtttccaagaatctatccaggacattaagtgaagccttactgactgtaaagaagcttaactcacctattaaaagaaaaagattttaaatgtggttcacaaagcaacacccaattctattccacataccagaaacatgcctaaagctaaataattcagaatgactaaaattaaaaagagacaaaggagtaacatacaaagaataatccaagccaaaattgaataaatatgaaaagaaaagcacttttgttttttccatgcccagcccaagaagaacactttagagacacaactgacaataaaattagaacatctatagatacctatgcaccaaataacataaaaccaacctgaggctgcaagaagaaatgca

SEQ ID NO: 88350 - DNA, 679 bp, Homo sapiens
ggtactaatgtctttcaactcctagtcctccttaagcaaaattcagttacacaaaaattcactcttgtttatttttccctacagctgcaagaatatgaaacccataaacacaggctgtttctgagttgccatcttgtctgtctacacagaactcacggtccctcagatctgctcttgttcttctacccgctgctctccacactcttgatcaatcttatgaaatctattccttttcacctttgtaccgtgcacgaggcatgaaatgattaaacaggagctgctwttatgtttgttataacactctttttcctaataattgtaatggtatccaaaatcatagtctgagaaaattaatacaacacaaattcttactaagtataaataaaatctttcttagaaaaaaaggatctaatagtaagtatgactactattcattgagcaccaggcatactgtatttaataaaatcaaagttgctgtcaattataagaattttacaatatgtaccacaaataaaggaaaaaattgttgtaattaaataactacagtatgtttacttacagattataagactatcctgatttcagagatattaaaatgtaaaaaaaagtatatctgagagtcaatgaattatgatatatcagatgcttttttacattatctcaaatacccacaggatcc

SEQ ID NO: 88351 - DNA, 2246 bp, Homo sapiens
caaatttatcaattgtgaggttggagaagaaaatgaaccactggagtaaatgagaaaatcaaatgctcagacacaagagaatgcaacccaaaggtgaacttgaaatccgagaagagtattggttgttcttcagggggtttactttgtattttaaatgtgaaaaccgtacaaattatttgattgcttgtatattgatattgtctaccttctttgtagttaacatgatttgaaaaaatttgattgggaaaaaaatcaacaaatgctattttacatttctgtatcaataaatattagtacacaatttagatgaaagtttctctagcttagatgatactcaaaaataagcctgtgaaaagttttattttttcagtttctgaggaagcgtgataagatcatgaccatttcctcctctatgacagataatgccactgtctctccttgagccattgtgagaactaagtaatgaagtctcaagaagaaagcaaggtttcctcgaaaatcagagctcttcattcaatttcagatggaaaccttggaagcacagtatacaaagatatacactgctataaagaactacctgagattgggtcatttatgaagaaaaaaggtttaattgactcacagttctgcaggctgtactgaaagcatggctaggaagcctcaggaaacttacaatcatggcaaaagggtgaaggggaagcaagaaccttcttctcatggcagcaggagagagagagaatgaagggggaggtgccacacacttttaaatcatcagatctcatgagagctcactgtcatgagagcagcatggggaaaacccatcctcatgatccaatcacctcccactgggtccatccttcaattcaacatgagatttgggcagggacacaaatccaaaccatatcaatgctgaaaacacgatgtgtttgaaatccagttcgtctttttttgagtaattgcgttagaagaaatatgcattaactacttgagtaaattaattgttgtgggaattgtacttgctacagaatgaatgtatgcatcccctcccaaatgtgtatgttgaagacccatccactagtatggctgtgtttgaagtaagaaagtaattaatgttaagtgaggtcataggggtgaggccctgctgtgataggatcagtatccttgttagaagagacatgggagagcttgctgtctctcttgccccacaagcatgtgctcataccaaggaaagcccatgtgaggatttagtgaaaaggcagacgtctgcaagctaggaagacagcccccaccagaaagaaactgaccctgtcagacattgatctgtgacttgtagcctccagaaatgtgagaaaataaatttctgttgtgtaagccacttagtctaccgtattttgttatggtacccagagcagactaatacagtgttttacagaacaagctaattatgtttattgatgtcctttgttaaaacctccctttcgaaaatgactcatggagagctttcatatacattagtcttaggtgtccttaaggtgggtattgctcacctatccccttcatttttgtaattctcagccacagaagaagctatgtaagataccagaagttacaaccaaagagactgttacatatttgatcctcccagaatatagctcagactcctgagtttctctttttaattattatttttatctaagatgagataacaaaatgtttacagtggacagtgtagatacttaactcaaatgatccaaaaattctacaggaacatttagtggtgtcagtggaacatttgtgccrttcagtcagtggcagatgagccatttctatgcttgagtagatttgtagctgattaaattcatggcacatgatacctcttccctggaaatatgctaatttcacatagctgttttatgatggtgaggtataagcacagactctcgcatgtgtatacatgtgtgtatgtgtgctttcaacacatacttcctctttctccaggcttactcaggaaagcattttccagagagctttcttctaggcttcacgtgcacatctgcagttttcaaggtgaaaatgattcctcacggattggttttaacaacaagccgggtagtgcaaagtgaaggggattaaggcagacaatgtgaccacacaccaatttcctcccttacaaaccttttatatcacttatcaggattttaattccatctgccaagtaatgcaggtccccagagcagaggttatgc

SEQ ID NO: 88352 - DNA, 703 bp, Homo sapiens
gggatcccgccaaaagctaagccaaaccaatcagatccttttgcttgtgaattgaaactaagaggcacagaggggagttgtcagtcactggtgagtcttgataccgagttggagattcagccactgtgtgcaacaaaaccaaagaagtctgaagagaagcccaggaaaagagcatggatgcaaatactgcccagggaacaagagcctgcaagacccagagatggtaaggaagaggcccagttgccagttccagttctcttgaggttcagccagtttttattttatttttatttttatttttttattttttttgagatggagtcttgctctgtcaccaggctggagtgcagtggtgcgatctcggctcactgcaacctccgctgctcactgcaacctcagcctcctgggttcaagcaattttcctgcctcagcctcccgaatagctgggactataggcgtgcaccaccatgcccagctaatttttgtattattagtatgttggccaggatggtctcgatctcgaccttgtgatctgccccttggcctcccaaagtactgggattacaggtgtgagcctmtgcgcttggcctgaggttcagtcattcttgattttccatcttcagagtcccttataatctgctcccccatttctttgaactagctcaagtgagtctcatgccatgttcccagagtccttgctaga

SEQ ID NO: 88353 - DNA, 584 bp, Homo sapiens
tgtctgtgatgctgactgaccgcacaagacatacctaatagccagytcctgggagcaatgcaacatccttgaggcattgctggataaacaactgctagttcctgcctgaggatgtgaactccccagcctcaccatatggctggtcatgagcaagaggatagcaaaaggatagcaacccagtggttgcaaaccagtggttgctatccccagcaagaggatagcaacccagtggccttgctacctccaagggcccagtagagcttgggaccaagctctattgatcagcatcccccagagttttcacctgcagagaagcaggacaggtgggcactcaggagtgaggagcatgctgcatctctttcctgcagatgcaattcccctgccccgggctcagcaatcatttcctgctcccaccctgggctgacagcacctgtgtactagactgttttcaccggcagttcaagaggaaatcaactgtcactgcacgtcaaaggtaatttctgatcacaagtacaggagaaagacctgatgaagaagcaagattaatttttccggcagtcaaagcatgcagctgtatagctcat

SEQ ID NO: 88354 - DNA, 1403 bp, Homo sapiens
tggaagcctggtaaatctctaaatttgcagagtcctagaattctcctgatccacaattccattatgaggggtatttgtgtttattgctcacgtgccttcatgccacaagaaactgccattccagctgttacaggagttttytctctcacttgatcagtaacttctgaaccggctaaagtcctcacgggaccctcttcacgacggacttgttcttgctttcacagaaagtacatggatgaccttgttggctcggagctgctgaaatcaacactgggcacttcaatctatccaaaactcatgtttagctaatgcgcatccacctactaggctgatcattgcctaagaggccccatgaggaaatgagtcgggaatacaaagccatgctggacagccagctgggctcatccccagccaagggccctgctcctgccctctcactcatcagcttgggagagcacattcaagtcaaatcagtgcatcaacaaaactgcaaattaccatgagccatgggtcgcttgaaaatagtcaaaacttggaatcttcagatgggcatggagccccatgtcccttccctttggcagtggagccagcctccgcccacagatgcataggtggatgtgacctggctcatcccactgaggcatcagccaggctgtctgccttggcccaggggtccgcacatttttctgtaaagggccagataataaatatttttggcttgcagcctctgttgcaacaattcaactctgctgttgcagtgtgaaatcagccataaacatatgtaaacaaatgggcatggctatgttctaatcaaagtttcttttatctttttttttttctttgagacggagtctcaccctgatgccaggctggagtgcagtggcgtgatctcggttcactgcaacctccgccttccgggttcaagtgatcctcctgcctcagcctcccgagtagctgggactacaggcgtgcaccaccacgcccagctaatttttgtatttttagtagagacggggtttcatcatgttgggcaggatggtctcgatctcctgaccttgtgatccacccgccttggcctcccaaagtgctgggattacaggcatgagccactgtgcctggccccagtcaaagtttctttacaaaaacaggtgatgggtcagatttggcccgtgggcccagagtttgccaaactctgcattagcccaaaacaggggccttcacactgggtttctcaaaacttgggattgtttggaagtgcttctgggggttcacaaacgtttggctctaatttaaattatttgtaggtgtttaggaagctataataaaagcatgcactcaaatgtattccagcatttcaccatgcaggaaatcaacatattaactgtcaggtaagtaaactcctt

SEQ ID NO: 88355 - DNA, 699 bp, Homo sapiens
ggcctcaccttctcttttctacattaaatcccccatgtgaaaagatatgaaaagccctctgactaccagctacctctgctgtcaagacttactacagttggctgggtgtggtggctcacacctgtaaccccagcactctgggaggccaatgttgagggggattgcttgagctcaggagttcaagatcagcctggcaacatagtgaaasctctacaaaaaaaaaattaatcaggtgtggtgacatgaccgtagtcccagccactcgggaggctgaggtgggaggattgctcgagcccagcagattgaggctgcagtgagctatgatcctgccactgcactccagcttgggtgacagagcaagacttcatctcaaaaaaaaaaagaaaaaaaaaaaagacagaccacagtgacacttggcggagtatttaattcatgtctgtctttcccaccaagagggtagtggttgggcaggattttttcaccattacgtcccagcatctagctcagggactgcctgcctgcctgggatggtcttcccccagatctttgcagggctggctcctcagaatttaggtctcagctcaaaaatcctcaaggatcccccgcactctacttgaagtcccgatcacacttgtcactatctgaaatcaatcaccctggccactggtgtgtttcttacctcctttcatgacctgtgta

SEQ ID NO: 88356 - DNA, 699 bp, Homo sapiens
ggcctcaccttctcttttctacattaaatcccccatgtgaaaagatatgaaaagccctctgactaccagctacctctgctgtcaagacttactacagttggctgggtgtggtggctcacacctgtaaccccagcactctgggaggccaatgttgagggggattgcttgagctcaggagttcaagatcagcctggcaacatagtgaaagctctacaaaaaaaaaattaatcaggtgtggtgacatgaccgtagtcccagccactcgggaggctgaggtgggaggattgctcgagcccagcagattgaggctgcagtgagctatgatcctgccactgcactccagcttgggtgacagagcaagacttcatctcaaaaaaaaaaaraaaaaaaaaaaagacagaccacagtgacacttggcggagtatttaattcatgtctgtctttcccaccaagagggtagtggttgggcaggattttttcaccattacgtcccagcatctagctcagggactgcctgcctgcctgggatggtcttcccccagatctttgcagggctggctcctcagaatttaggtctcagctcaaaaatcctcaaggatcccccgcactctacttgaagtcccgatcacacttgtcactatctgaaatcaatcaccctggccactggtgtgtttcttacctcctttcatgacctgtgta

SEQ ID NO: 88357 - DNA, 699 bp, Homo sapiens
ggcctcaccttctcttttctacattaaatcccccatgtgaaaagatatgaaaagccctctgactaccagctacctctgctgtcaagacttactacagttggctgggtgtggtggctcacacctgtaaccccagcactctgggaggccaatgttgagggggattgcttgagctcaggagttcaagatcagcctggcaacatagtgaaagctctacaaaaaaaaaattaatcaggtgtggtgacatgaccgtagtcccagccactcgggaggctgaggtgggaggattgctcgagcccagcagattgaggctgcagtgagctatgatcctgccactgcactccagcttgggtgacagagcaagacttcatctcaaaaaaaaaaagraaaaaaaaaaagacagaccacagtgacacttggcggagtatttaattcatgtctgtctttcccaccaagagggtagtggttgggcaggattttttcaccattacgtcccagcatctagctcagggactgcctgcctgcctgggatggtcttcccccagatctttgcagggctggctcctcagaatttaggtctcagctcaaaaatcctcaaggatcccccgcactctacttgaagtcccgatcacacttgtcactatctgaaatcaatcaccctggccactggtgtgtttcttacctcctttcatgacctgtgta

SEQ ID NO: 88358 - DNA, 804 bp, Homo sapiens
tggtgaataaaaatgcagtgggaaatccagcgaaatcaaaataaagtctgtagtttagttagttgtgatgtcaatttcttagctttgataagtataatacgattatgtaagatgccaacattaggccgggcatggtggctcacgcctgtaatcccagcactttgggaggccgaggtgggcggatcacctgaggtcaggagttcaagaccagcctggccaacatggtgaaaccctgtctctactaaaaatacaaaaattagccaggcatggtggtgcatgcctgtaaatcccagctactcgggaggctgaggcaggagaatcacttgaccccaggaggtggaggttgctgtgagccgagaccrcgccactgtactccagcctgggtaacagagtgagactttgtcccctcccccctccccccccccaaaaaaagccaacattaggggaagttgggtgaagggtagacaaaaatgccccatattacctttgcaacttttctataaatctaaaattattccaaaattaaacaaaaatttatttaaagggtcgtggctaggaccatctctggacagattaaaaacaaaatggctttctaattttgttgctattattacaaaaaataacagtctcgaaactaactccttatactcattaactgttttcttaggataaacttctagaattgaaattatggtgttttctaaagcctctgggcagtctagaaagaaaagcagaaagaacaggaaggaaaaaagccgccaaagttcctggctttgagcaggggtacgaggtaggtgggggtgg

SEQ ID NO: 88359 - DNA, 2036 bp, Homo sapiens
cttgagtccaggaggttgaggctgcagtgagccgtgattgtgccactgtactccagcctgagtgacagagggagaccctgtctcaaaaaacaaaacaaaacaaaacaaatatgattagagaaaatgcaatcttatttattatggctgatattcaatctcttctcagaatctacattgcaaaaccagctcagcaagctctagactatgccttccctaaatcagatctaaatcggtgacagaaaactatatctattgacataaggaagaaatcatcaggcttttatgtgctccagagagctccagaaagacaggtcagatctgggcttaaccttcaggttgaaattcatttaggagtaattctggagcagtcgtctccagtaagaaatgtttccttctcttacccctgagtcatccccccaggtcttccagggtgaagtgaagatgatgttggctattctaactgcctttgttgatcatgaatgtgcctggataaagcaggactttggctctggatgcgcagggctctggagaaacttgacaaggcctgttagagaggattggcaacaggtcacagggaagagcttgggttctggcttagatttcaggtcctggtgggaggccccaggggcaggaaacaacatgtggacttagagatgtgtttggtagacaggtgctagaattggggtttaggtggggccttatccaccagatggttattaggattggggtgggagttctagaacagtccccaacctttttggcactaaggactggtttcgtggaaggtaatttttccatggaccggggattaggggacggttttgggttgaaactgttctaccttagatcatcaggcattagattctcataaggagtgcacaaccttgcatgcatacttcacaatgcgctcctgagaatctgatgccaccactgatgtgataggaggtggaactcaggcagtaatgctcaccgctgctcacttcctgctgtgtagcccagctcctaacaggccacggactggtaccagtccacagcctggggtttgggagaacccctgttttagaggaatctgcggctgggatgactagatactaaagactccagagcccaagatgttctatgtctcactccttccctactaaagtcaaaatggatcccagaatatccagaagggctgagtctgagtaggagggtgaaaggtgccaagtggttccagttttcaaggccagcgggcatttggtcattgggtcaggccctcagttatactgcatgcccacttggacactctggaaagttggtctttccccacgtgccctgtgttcatggcttgaagacgaatcccttcccccaagagcagagcaacttccactctggctgatcaccccctggcctgtttctggaatctgactccacatctctgctaatggcacctcatctcccatctctctgagtcttgtcaattcctgcctggctgtcgctcctgcttgcaggcaggatccagggtctttccagtccacctccaaaatctctatctgtctccctctcattgctttttcttttctgattataaaaataatgtggccaggcacagtggctgatgcctataatctcaacactttgggatgctgaggcaagatgatcactttaggaattcaagaccagtctgggccacatagtgacatcctgtcctacaaaaaaattaaaaattagccaggaatggtggtgcacgcctttagtcgctgctacttgggaggttgaggtgggaggaccgcttgagcccaggagttcaagactgtggtgaactatggtgacaccactgcactgcagcctgggcaacagagtgagaccctgtctcttaaaaaataataataatatatgctaatcaaagggaatgtagaaactatagaaaagcatgctggatttkggttaatggattggtcacacacaatgaaatcccatgccctcctgaaacatcactcaagcacagcaaggtagtaggggggctttgttttgagagacgtgacaataatgaatca

SEQ ID NO: 88360 - DNA, 1571 bp, Homo sapiens
agccaggatgatctcgatctcctgaccccgtgatcctcccacctcggcctcccaaagtgctgggattacaggcacgagccaccgtgcctggccacacccggctaatttttgtaattttttttttgtagggatagggtcttgctgtgttgcccaggctgatttccaactcctgggctcagatgatcctcctgcctcagcctcccaaaacgctgggactacaggcatgagccactgtgcctggtctaaaacttctaatatgatcaaattaacaacattaatacttaatgttattttaataaaaacaacattttatktaacccaatatgtccagaatattttcacatgtaatcaatatgaaacattaatgagatattttacattttcaaatatgaagtcttcaaaatccagtgtgtatttttcatttccagcaatctctgataggatgctaaattttcatcagaaatccttaatatatatttagatttcataaaatatacagccagaaaagtagatttgtgtacccaagttgttctaaacatatttaggccttttccagtaactgaaacaagtatgtagttttaaatttaaattggttaaaattaaataaagttggctgggcacggtggctcacacctgtaatcccagcactttgggaggctgaggagggcagatcacttgaggttgggagcttgagaccagcctggccaacgtggagaaaccctgtctgtactaaaaatacaaaaattagctgggcatggtggaaggtgcctgtaattccagccgggaggctgaggcagaagaatcgcttaaacccaagaggcagaggtttctgtgagctgagattgcaccactgcactccaacctgggcgaaagagtgggattctgtctgaaaatgaaagaaaagaaaagaaaagagataagaaaagaaaaggaaaggaaagaaaagaaaagaaagaaggaaggaaggaaggagttaaaaattcagctcctcattcatactaaataccatatttcaagggctcaggtggctagtggctacaatattggccagtacaaatcaagatgacaatctaagtgactcaggaagggacacacaaatgtctataatcttgttcgaaggaaggatcagggaaagcctacacaacttaaggactttcgaagcttctctggcaagcaccacagggctgcgctgctggctggaggcctgttttaagaggcagccaccacttggcttcagccaattgtcacttagagacacagacccaggattatcatctctactgattattttttcccaagggaaattggaaattagaggacttaaaaatgtgagacctcctcattttcaaatgatggcaagctatttaaaaggtgtgaaaatccattgtgtgtgttggggacgtggtggggggatgcagtttgctatctcagatggagattggtagatcctgatcttctgttgggaatatttgtcgtctcagaggtcatgggcagtaccttaatctcccccatccatctaaaaaatgcaggctgcccctcccagagtgctatgtgagaattctgatgcaatc

SEQ ID NO: 88361 - DNA, 1571 bp, Homo sapiens
agccaggatgatctcgatctcctgaccccgtgatcctcccacctcggcctcccaaagtgctgggattacaggcacgagccaccgtgcctggccacacccggctaatttttgtaattttttttttgtagggatagggtcttgctgtgttgcccaggctgatttccaactcctgggctcagatgatcctcctgcctcagcctcccaaaacgctgggactacaggcatgagccactgtgcctggtctaaaacttctaatatgatcaaattaacaacattaatacttaatgttattttaataaaaacaacattttatgtaacccaatatgtccagaatattttcacrtgtaatcaatatgaaacattaatgagatattttacattttcaaatatgaagtcttcaaaatccagtgtgtatttttcatttccagcaatctctgataggatgctaaattttcatcagaaatccttaatatatatttagatttcataaaatatacagccagaaaagtagatttgtgtacccaagttgttctaaacatatttaggccttttccagtaactgaaacaagtatgtagttttaaatttaaattggttaaaattaaataaagttggctgggcacggtggctcacacctgtaatcccagcactttgggaggctgaggagggcagatcacttgaggttgggagcttgagaccagcctggccaacgtggagaaaccctgtctgtactaaaaatacaaaaattagctgggcatggtggaaggtgcctgtaattccagccgggaggctgaggcagaagaatcgcttaaacccaagaggcagaggtttctgtgagctgagattgcaccactgcactccaacctgggcgaaagagtgggattctgtctgaaaatgaaagaaaagaaaagaaaagagataagaaaagaaaaggaaaggaaagaaaagaaaagaaagaaggaaggaaggaaggagttaaaaattcagctcctcattcatactaaataccatatttcaagggctcaggtggctagtggctacaatattggccagtacaaatcaagatgacaatctaagtgactcaggaagggacacacaaatgtctataatcttgttcgaaggaaggatcagggaaagcctacacaacttaaggactttcgaagcttctctggcaagcaccacagggctgcgctgctggctggaggcctgttttaagaggcagccaccacttggcttcagccaattgtcacttagagacacagacccaggattatcatctctactgattattttttcccaagggaaattggaaattagaggacttaaaaatgtgagacctcctcattttcaaatgatggcaagctatttaaaaggtgtgaaaatccattgtgtgtgttggggacgtggtggggggatgcagtttgctatctcagatggagattggtagatcctgatcttctgttgggaatatttgtcgtctcagaggtcatgggcagtaccttaatctcccccatccatctaaaaaatgcaggctgcccctcccagagtgctatgtgagaattctgatgcaatc

SEQ ID NO: 88362 - DNA, 902 bp, Homo sapiens
caaaacaaaactgggcacaaggtatcaccatgttacccaggctggtctcgaactcctgggctcaagtgatcctcctgcctcggcctctcaagttttcatctttttaggtcaaaggttgtaatacaatttgacagtaaaatgtatattttattggtagattagcaaagtttataatttgtcttggggacagaattactcaaggattgatttttctttttttttttaatgtcttgaaagattgattcagtgttgctttggccaaaatcaccttacctatatagaaagaaaattcattgggttgcaaaaagaccccaacatgtagcatcacaaataacatgtaatattagatgggttggcctatccctggtgtgtaatgagtaactcgcccctccataggagcagttgccaactttagcatctgctgcctkgccagaggctgtgagggctttggccctgccacagtgcggccatttatcaccatagccgagaaggacatttgcagctggcttagattaatggctctcccaacgtccttccccaccctgaaaaaaaattatatcggggattcctgtcatgggccgaagctgtgttcctgcttctcctctgggattatcagccttgactatgctgaaattccttgtactctggccggccacacttttgttccctataagaagaggaactaaagtgaaagtcccatagctggttgctaaattcttaactccatgcagcagagtactcttggcctctccttccacccagtgtccctattggttttccaagcatatatattttttcagctcctttctgttagcttagaaagcttgacccagtaatggacctttaggaccagatgttatagggggtagcagcatagattcccagaaagcagattctgagca

SEQ ID NO: 88363 - DNA, 980 bp, Homo sapiens
tgggctacattcttcattcagaaagggcgtgtaatttcaacttgttcatgctccactgggtgatagggagtccctgctttacaacatctttaatctctgaaatctaaggatcttgtctgtaggtggtatttctccgggctctaatagaaactttcttgcccaagtgtgtataaggtggaagtgtgattgtcaaaatccaagttttgtagcaaaattgacatctagtaatgtagagttagatgctttttcattatcacaaggcaacaggaccataatgcttaaattctgtggatattgtccacatagataaatcaggggctgctgtagtaacctcagagcaactagcaaacagagaaagaatgttagtttacacaccagacatatgtccctgaaagaatcctatctagtagtaggtgtactatgacactgagcaatgtaccttgatacaatctttgagaatttctgtaacattaaattctgaggttaaatcaaataattttcatgttaaaagtcttcaccctggccctgrccctgtaagtcctgaccatgaacccacttattaatatatgggaatcacaaccagccaggtcataaaaccaagctatacataagagtaaacattctaggtaattctctttgccttattttctacttgcctctgtctcccttcagttttgaaaatcattatctgattatccttcacctcccaaagtaggataatatttcccattgcattttttaccccacccaactcccatccttgtgtaaccatccattggaacaggagaagaggatggcctaaagatttgctcctatcttctgcgtgctctccacaggagctgtgcctggtcctgttgtcattggaagctcacacttttctcactatattaagtaaaagacagctcctgttggcattttctctgatgaattctgatatgatgttcccagtgatagtccccttctctcttcaacttgctatt

SEQ ID NO: 88364 - DNA, 652 bp, Homo sapiens
ctttccagttcatcacagtctcctgtggtcctttgtctcaaatagcccacttccttcatttacattacctgacagacctctgtagtgtttgagtttataatttcttctttacacacacacacatacacgcaaaccttatgttgagatagctrtctattctttgacagaatgaaacaaatagctcatcaagaaatgtacattttatctattttgtgattatttttgaaatttggaggtacaaaacttgtctccaaaatgcaaaaataaacctctcacataggtttataaaattcacaaaaatattctctattatttaccaataggacttcctaattgtttgaatccttcccaaagtgctttgctttccaaaatcttcaagaaagaggaaaacatgatgtccacttacctcccctgaaaattttcctcagaagaagagtcatttttcacttgcccctaatttctttcagctcttaaatctgtcagtttatttattcagcatgttctgtggagacatcttatttggttctgcacactttactgagtgcccttgtagttttctaggactcttccttcagaacattatgttgaaaaagaaaaagaacattatggtgaatggagtgagatgtaagctcacaacttactattcctcaca

SEQ ID NO: 88365 - DNA, 1053 bp, Homo sapiens
agggcacarcctgcatttccacagctgtactggcattgccgcatttaatagttaaaataaaaaaataaaaacaagcaaaaaacaaaacttttgttcctcatgtaggccgttgagatctgggcagcatgaatctctgttttaaaagactcctgcaaggttccgatttgtaaatctcattatatacccagggcccaccttacaaagtctctgcagaacttgatgtgctccttggcagggagagatttcactttacataatagagttatgggcattcaaaagaataactagtgtagccccttgtcaccaagtcatccaggaaaactgttgctcactatacatataaaagacccttcaaaatagaatttttgtaatgtctccacgtaaaacatcgcaatattgcctttaactttttttttttaaattactcctgctgtcaggaaatgtctttatatgtcttatttcaattttatgtcttgttttattgaactcacatttgcttcttatctcagattccctcatctcttgggttaggaaacacctagacccactctccctgtgtcggagctaaaaaacaatggctacattaagtcttattgattgtgtattaaatcatcccaggtcttttcgcctctcttcctaaggttccattttatattcctggattcccttctattttactttattcttcttttaacatggattccaaacaggactggagcacgtatctacagggtgtgttaggatttctgctgccgtctttacattacagatctcggaaccttgtttttaacagtcagttcattctgtagttaaccagtgacccaccaggacttagtctgccagggctgccataacaaagtgccacagactgggtggcttaaaaaacagaaattgattttctcacatttgtgaggccagaagtcaagatgttggaggggtcagtttcttttgaggcctccctccttgacttgtagacggccatcttctccccatgtcttcacagggtcttccctctgtgcccatcagtgtttttggtttttctttttataagga

SEQ ID NO: 88366 - DNA, 1053 bp, Homo sapiens
agggcacaacctgcatttccacagctgtactggcattgccgcatttaatagttaaaataaaaaaataaaaacaagcaaaaaacaaaacttttgttcctcatgtaggccgttgagatctgggcagcatgaatctctgttttaaaagactcctgcaaggttccgatttgtaaatctcattatatacccagggcccaccttacaaagtctctgcagaacttgatgtgctccttggcagggagagatttcactttacataatagagttatgggcattcaaaagaataactagtgtagccccttgtcaccaagtcatccaggaaaactgttgctcactatacatataaaagacccttcaaaatagaatttttgtaatgtctccacgtaaaacatcgcratattgcctttaactttttttttttaaattactcctgctgtcaggaaatgtctttatatgtcttatttcaattttatgtcttgttttattgaactcacatttgcttcttatctcagattccctcatctcttgggttaggaaacacctagacccactctccctgtgtcggagctaaaaaacaatggctacattaagtcttattgattgtgtattaaatcatcccaggtcttttcgcctctcttcctaaggttccattttatattcctggattcccttctattttactttattcttcttttaacatggattccaaacaggactggagcacgtatctacagggtgtgttaggatttctgctgccgtctttacattacagatctcggaaccttgtttttaacagtcagttcattctgtagttaaccagtgacccaccaggacttagtctgccagggctgccataacaaagtgccacagactgggtggcttaaaaaacagaaattgattttctcacatttgtgaggccagaagtcaagatgttggaggggtcagtttcttttgaggcctccctccttgacttgtagacggccatcttctccccatgtcttcacagggtcttccctctgtgcccatcagtgtttttggtttttctttttataagga

SEQ ID NO: 88367 - DNA, 1053 bp, Homo sapiens
agggcacaacctgcatttccacagctgtactggcattgccgcatttaatagttaaaataaaaaaataaaaacaagcaaaaaacaaaacttttgttcctcatgtaggccgttgagatctgggcagcatgaatctctgttttaaaagactcctgcaaggttccgatttgtaaatctcattatatacccagggcccaccttacaaagtctctgcagaacttgatgtgctccttggcagggagagatttcactttacataatagagttatgggcattcaaaagaataactagtgtagccccttgtcaccaagtcatccaggaaaactgttgctcactatacatataaaagacccttcaaaatagaatttttgtaatgtctccacgtaaaacatcgcaatattgcctttaactttttttttttaaattactcctgctgtcaggaaatgtctttatatgtcttatttcaattttatgtcttgttttattgaactcacatttgcttcttatctcagattccctcatctcttgggttaggaaacacctagacccactctccctgtgtcggagctaaaaaacaatggctacattaagtcttattgattgtgtattaaatcatcccaggtcttttcgcctctcttcctaaggttccattttatattcctggattcccttctattttactttattcttcttttaacatggattccaaacaggactggagcacgtatctacagggtgtgttaggatttctgctgccrtctttacattacagatctcggaaccttgtttttaacagtcagttcattctgtagttaaccagtgacccaccaggacttagtctgccagggctgccataacaaagtgccacagactgggtggcttaaaaaacagaaattgattttctcacatttgtgaggccagaagtcaagatgttggaggggtcagtttcttttgaggcctccctccttgacttgtagacggccatcttctccccatgtcttcacagggtcttccctctgtgcccatcagtgtttttggtttttctttttataagga

SEQ ID NO: 88368 - DNA, 2320 bp, Homo sapiens
atgtgttctatgtttgagcctaaaatgggaaatcaatgagacttgtacaatgcttcccccactctcctttcagaggaaatcaacaagatttgtattcctttccctaagtctcctttcagagggaggaagtggctagactggcctttctgtttctgtggctctgaatgagattaaaaatggaggcttgtctttctcaggaactgagctcatcaaaaacctaccaaataatagtagagtgaagcaggggctggtggttggaaatggatgagtgtgcgggttagtttcacagctcaaaagaaggaaatttagagctgaattgatgcaaccttattcccatgggaataaaagaccctcagaaccagacggatattatcataatataactattatgataataatagtgtagagcagtgcttctcaaactttggtgtaaatttgaatcacctgaagagtcacaaaaaaatacacacacacacacacacacagaggctcaggatcattgaagtaggacaggacctagaattctacatggccatcaagttccccaagttattctgacaccagccactggaggttaaaaatatcagctttggtgtcagacagactcaggttcatagcttacctctgctgcctgccaactagctgcaagacccagggcaaatttcttactctaaatcctgaactattcttctgtatactgtggcagatgacaggaccaaccttatagggttgtgaggattaaatgagacaatgcataaaatacacagagcacagtgcctcgcacatagtggacactagacacctagcagttgctattcttgttttttctactattgccagtggatccaactatattctaatgttggaattccctccccaacagccccactgtgggatcccatctctccctgaattctttcaaatgatgtggactttgacctcactgaggaactaaaaagttaaaaagttcttttctatggatttaaaatctatgtcctttaaattttaactggataggtctcagatatatcattagagatacaaaaatatgactaactcctcttgcatataagagttattcaaatatttcgaaaaagcgaacatggtccctctttttccaacatatatgcatcgaaatatagctgttatagtcttatcacatgaaaggctataggttaaacatcagatatcttgagagtaaatttctccaagtctcttactccatccttcacaacagtaggcttcaaattcaattttggtcattcctgtcctgtctcaacacacaaaaagggctgtcccagagaggtcaaatccagtgcaatacagggaataattttccaaggttgagccccactgatcatgaaacagatagtttcaagaggtaacaatctccctgccagaggaagtataaaaggaaaggataaacctcaacttaggctgggaacagtggctcatgcctgtaatcccagcacgctgggaggctgagctgggcagatcacttgagcccaggaattgagaccagcttgggcaacatggtgaaaccccatctctacaaaaattagccaggtgtggtggtgcacacctgtgctactcagcaggctgaggtgggaagatcacttgagagcccaagaggtggaggctgcagtgagccgagatcacgcctctgcactccagtctgggtgacagagtgagaccccatcaaacaaacaaacaaacaaaaaacagaaaagaaaagaaagacccaaacctcagcttagaagtgttttagaggagttcacataggacaaattccagtttgatagcatcctccttgaaacatgaatctcatgctctaggtgtagacttcacagaagaatgacagagggcatactcaaatgaggacaatttgaggaaggtttatttataaaaggtctgctgataaaggtgacaaatgtatagrgacccataatatactagtgcctcagtaggagagctgtttattacctatgggaccagaggaacaaatagaggaagcagtaaccagagccccaaagaagagagctgtgaaaaggaggtaccctgaacagaagcagcggctttctcttgaaaggcccagccagtcatagacaacctgacagggagagaaccagaggcaaaaaaaaaaaaaaaaaaaaaaaatgccctgactacaccttatgcccttcctctggtcgcctgtggcagttctcactagctgaacccaacaagtcagaagtggcaagtgatctttttgacagacttcatacagaatgcactctggaagcagagagcacagtagagaaaggtggaaaggggaactgga

SEQ ID NO: 88369 - DNA, 1150 bp, Homo sapiens
taaatgaaaattgataatttttttttttagatggagtctcactctgtcacccaggctggatggagtgcagtggcatgatggcagctcaccgcaacctccacctcccaggttcaagygattcttctgcctcagcctcccgagtagctgggactacctggctaatttttgtatttttagtagagatggggtttcaccatgttggccaggatgctttcaatctcctgaccttgtgatccgcctgcctctgcctccccaagtgctgggattacaggtgtgagccaccgtgcccggccgaaaattgataatttttaaaaatacttagtatgttcactcaacgctgaatatatatttttattttatttttttgaggtggagttttgttcttgttgcccaggttggagtgcaatggcgtgatctcggctcacagcaacctctgactcccgggttcaacctcgtacctcagcctcccaagtagctggtattacaggcactcaccaccaagcctagctttttttttttttttttttttgtatttttagtagagacggggtttctccacgttggttaggttggtcttgaactcctgacctcaggtgatctgctcacttcggcatcacaaagtgctggtattacaggcgtgagacaccacatctggcatgaacacatatgtttaagtgaacactcatgtactctcatccaagtaagggaaaagcacattgtgagcattccagaagctccctatgttcttctccctgaatgttgcctcattgctcccccatagaatcaatcacaattctaaattttatcataatcacgtccctgctctttttttatctttttttgtttgtttctttgtttttgagacaggatctcactctgttggccaggctgggatgcagtggtgcaattcctgctcactacagcttcaacctcctgggtacaagcgatcctcctgcctcagcccctcaagtagcttgaaccacaggcacacaccaccacaaccagctaatttttgaattttgttttttagagaccaggtctcgctgtgttgtgcaggctggtcttgaactcttgcgctcacgcaatcttctcgccttggcctccctcgctgctgggattacagatgtgagccactgtgcccagctgttct

SEQ ID NO: 88370 - DNA, 1150 bp, Homo sapiens
taaatgaaaattgataatttttttttttagatggagtctcactctgtcacccaggctggatggagtgcagtggcatgatggcagctcaccgcaacctccacctcccaggttcaagcgattcttctgcctcagcctcccgagtagctgggactacctggctaatttttgtatttttagtagagatggggyttcaccatgttggccaggatgctttcaatctcctgaccttgtgatccgcctgcctctgcctccccaagtgctgggattacaggtgtgagccaccgtgcccggccgaaaattgataatttttaaaaatacttagtatgttcactcaacgctgaatatatatttttattttatttttttgaggtggagttttgttcttgttgcccaggttggagtgcaatggcgtgatctcggctcacagcaacctctgactcccgggttcaacctcgtacctcagcctcccaagtagctggtattacaggcactcaccaccaagcctagctttttttttttttttttttttgtatttttagtagagacggggtttctccacgttggttaggttggtcttgaactcctgacctcaggtgatctgctcacttcggcatcacaaagtgctggtattacaggcgtgagacaccacatctggcatgaacacatatgtttaagtgaacactcatgtactctcatccaagtaagggaaaagcacattgtgagcattccagaagctccctatgttcttctccctgaatgttgcctcattgctcccccatagaatcaatcacaattctaaattttatcataatcacgtccctgctctttttttatctttttttgtttgtttctttgtttttgagacaggatctcactctgttggccaggctgggatgcagtggtgcaattcctgctcactacagcttcaacctcctgggtacaagcgatcctcctgcctcagcccctcaagtagcttgaaccacaggcacacaccaccacaaccagctaatttttgaattttgttttttagagaccaggtctcgctgtgttgtgcaggctggtcttgaactcttgcgctcacgcaatcttctcgccttggcctccctcgctgctgggattacagatgtgagccactgtgcccagctgttct

SEQ ID NO: 88371 - DNA, 1150 bp, Homo sapiens
taaatgaaaattgataatttttttttttagatggagtctcactctgtcacccaggctggatggagtgcagtggcatgatggcagctcaccgcaacctccacctcccaggttcaagcgattcttctgcctcagcctcccgagtagctgggactacctggctaatttttgtatttttagtagagatggggtttcaccatgttggccaggatgctttcaatctcctgaccttgtgatccgcctgcctctgcctccccaagtgctgggattacaggtgtgagccaccgtgcccggccgaaaattgataatttttaaaaatacwtagtatgttcactcaacgctgaatatatatttttattttatttttttgaggtggagttttgttcttgttgcccaggttggagtgcaatggcgtgatctcggctcacagcaacctctgactcccgggttcaacctcgtacctcagcctcccaagtagctggtattacaggcactcaccaccaagcctagctttttttttttttttttttttgtatttttagtagagacggggtttctccacgttggttaggttggtcttgaactcctgacctcaggtgatctgctcacttcggcatcacaaagtgctggtattacaggcgtgagacaccacatctggcatgaacacatatgtttaagtgaacactcatgtactctcatccaagtaagggaaaagcacattgtgagcattccagaagctccctatgttcttctccctgaatgttgcctcattgctcccccatagaatcaatcacaattctaaattttatcataatcacgtccctgctctttttttatctttttttgtttgtttctttgtttttgagacaggatctcactctgttggccaggctgggatgcagtggtgcaattcctgctcactacagcttcaacctcctgggtacaagcgatcctcctgcctcagcccctcaagtagcttgaaccacaggcacacaccaccacaaccagctaatttttgaattttgttttttagagaccaggtctcgctgtgttgtgcaggctggtcttgaactcttgcgctcacgcaatcttctcgccttggcctccctcgctgctgggattacagatgtgagccactgtgcccagctgttct

SEQ ID NO: 88372 - DNA, 866 bp, Homo sapiens
gtgtaactctgtaggaagtacaggtccactgccagtgggctagattatctgcaagaactctaggatatctccttgaatctctgtgtactgataatactactgctctgtcacttttaaagcaaataaagcccctgaaaacagggacatgctttgttccaaccacctggacaaagttctgcctgttgtctgtgtcctagcctagttcttttaactagtaagccttcttacatggcagtctgaagaatgaaggtgttttgcttttagagaaaggcacagaagcagtgggctgagctgaggcactgtgcaggaccagcctgcccatggtggttgccatagaaacttgacctcatggctgggcatggtgactcatgcctgtaattacagcactttgggaggctaaagcaggaagattgccaaggctctggtgagtcatgattgtaccactgcacttccagcctgggtgacaaagccagaccctgtgagagagagaagaaagaaagaagaaagagaaagagagaaagaaaaaaagaaagaaggaaagagagagaaagaaagaaagagaaagaaagatagaggaagaaagaaagaagaaaaagagagaaagaaagaaagaaggaaagagagagaaagaaagaaagaggaagaaagaaagagaaaaaagagagaragaaggaaagaaagaaagaaagaaagaaagaaagaaagaaagaaagaaagaaagaaagaaagaaagaaagaaaaagaaaaagtgagaaagtgagaaagtgatatggtttgggtctgtgtccccagccaaatctcatgtgcaattgcaatccccattgttggaagaggggcctggtgggaggtgatttgatcatggaggt

SEQ ID NO: 88373 - DNA, 866 bp, Homo sapiens
gtgtaactctgtaggaagtacaggtccactgccagtgggctagattatctgcaagaactctaggatatctccttgaatctctgtgtactgataatactactgctctgtcacttttaaagcaaataaagcccctgaaaacagggacatgctttgttccaaccacctggacaaagttctgcctgttgtctgtgtcctagcctagttcttttaactagtaagccttcttacatggcagtctgaagaatgaaggtgttttgcttttagagaaaggcacagaagcagtgggctgagctgaggcactgtgcaggaccagcctgcccatggtggttgccatagaaacttgacctcatggctgggcatggtgactcatgcctgtaattacagcactttgggaggctaaagcaggaagattgccaaggctctggtgagtcatgattgtaccactgcacttccagcctgggtgacaaagccagaccctgtgagagagagaagaaagaaagaagaaagagaaagagagaaagaaaaaaagaaagaaggaaagagagagaaagaaagaaagagaaagaaagatagaggaagaaagaaagaagaaaaagagagaaagaaagaaagaaggaaagagagagaaagaaagaaagaggaagaaagaaagagaaaaaagagagagagaargaaagaaagaaagaaagaaagaaagaaagaaagaaagaaagaaagaaagaaagaaagaaagaaagaaaaagaaaaagtgagaaagtgagaaagtgatatggtttgggtctgtgtccccagccaaatctcatgtgcaattgcaatccccattgttggaagaggggcctggtgggaggtgatttgatcatggaggt

SEQ ID NO: 88374 - DNA, 866 bp, Homo sapiens
gtgtaactctgtaggaagtacaggtccactgccagtgggctagattatctgcaagaactctaggatatctccttgaatctctgtgtactgataatactactgctctgtcacttttaaagcaaataaagcccctgaaaacagggacatgctttgttccaaccacctggacaaagttctgcctgttgtctgtgtcctagcctagttcttttaactagtaagccttcttacatggcagtctgaagaatgaaggtgttttgcttttagagaaaggcacagaagcagtgggctgagctgaggcactgtgcaggaccagcctgcccatggtggttgccatagaaacttgacctcatggctgggcatggtgactcatgcctgtaattacagcactttgggaggctaaagcaggaagattgccaaggctctggtgagtcatgattgtaccactgcacttccagcctgggtgacaaagccagaccctgtgagagagagaagaaagaaagaagaaagagaaagagagaaagaaaaaaagaaagaaggaaagagagagaaagaaagaaagagaaagaaagatagaggaagaaagaaagaagaaaaagagagaaagaaagaaagaaggaaagagagagaaagaaagaaagaggaagaaagaaagagaaaaaagagagagagaaggaaagaargaaagaaagaaagaaagaaagaaagaaagaaagaaagaaagaaagaaagaaagaaagaaaaagaaaaagtgagaaagtgagaaagtgatatggtttgggtctgtgtccccagccaaatctcatgtgcaattgcaatccccattgttggaagaggggcctggtgggaggtgatttgatcatggaggt

SEQ ID NO: 88375 - DNA, 866 bp, Homo sapiens
gtgtaactctgtaggaagtacaggtccactgccagtgggctagattatctgcaagaactctaggatatctccttgaatctctgtgtactgataatactactgctctgtcacttttaaagcaaataaagcccctgaaaacagggacatgctttgttccaaccacctggacaaagttctgcctgttgtctgtgtcctagcctagttcttttaactagtaagccttcttacatggcagtctgaagaatgaaggtgttttgcttttagagaaaggcacagaagcagtgggctgagctgaggcactgtgcaggaccagcctgcccatggtggttgccatagaaacttgacctcatggctgggcatggtgactcatgcctgtaattacagcactttgggaggctaaagcaggaagattgccaaggctctggtgagtcatgattgtaccactgcacttccagcctgggtgacaaagccagaccctgtgagagagagaagaaagaaagaagaaagagaaagagagaaagaaaaaaagaaagaaggaaagagagagaaagaaagaaagagaaagaaagatagaggaagaaagaaagaagaaaaagagagaaagaaagaaagaaggaaagagagagaaagaaagaaagaggaagaaagaaagagaaaaaagagagagagaaggaaagaaagaaagaaagaaagaaagaaagaaagaaagaaaraaagaaagaaagaaagaaagaaagaaaaagaaaaagtgagaaagtgagaaagtgatatggtttgggtctgtgtccccagccaaatctcatgtgcaattgcaatccccattgttggaagaggggcctggtgggaggtgatttgatcatggaggt

SEQ ID NO: 88376 - DNA, 603 bp, Homo sapiens
tgttctaatgggatagggttgcatttaattaattgtctaatgggatttcttctgtctccagcaaggtttctcaacttcagcactactgacatttggggctggatatttctttgttgtgggaggctctcctgtgcactgtaggatgctgaggagcatccctggcctcccccaatgtccccctgcccccagttctaacaactagaaatgtcttcagagctggccaaatgtctcccagaggacaaaattgccccagttgagaaccactattctaacagcaagataccactggaatcacagaaacctggagttagcagggaatttatagatcatttggtccagtgattctgacatgctgtctcctaatggaggccatgctgtgtccagtggtcamcagggaaatgagtgaaacaaggaaaaatctacacgactctaagtaaattgattcacttcaaagacctttttaaattttttcatttgtgatattaatgactttcttttataaaatgctactgacgacagacagcagtcattttgttttaatgaatttacttagtaaaaaaataaattttttttcaaagcctacgaaagtccagcatctgggat

SEQ ID NO: 88377 - DNA, 493 bp, Homo sapiens
tgatatagtatttgcatataacctatgcacatcctcctgtatactttaaatcatctctagattacttataatacctaaaacaatgtgaatgctatgtaaatagttgttatactgtatcatttagggaataatgacaaaaaagtccacacgtgtttagtacagatgcagtcatcttgtttttcagatattttcgatcctcagaacccacacatacataaccgactgtatttttaaaaatcttattggtttcatttttcccacttgaaaattttttcccacattcactcagccttccattccaggccagacccagtggcttcataggttttctgtgcagtatcaggcttcagattctcacaactccccatgcagggttttgttttktttttttttttttttttgagccttcggtggctggggccctgtggagagagactcatcagagagcagagagctggagagaaagaagcctgaaaggaaggcttgagcctct

SEQ ID NO: 88378 - DNA, 599 bp, Homo sapiens
tatttgttcagcctgggaaaattactctaattgcataattaaactcgttgttgatgctacttccggacagaatgcctgcagaggagggcccagcctgcagctgcccttcagagctttttcaatagagagactgtttgcagagacttttctctggcccctgtctcttcacagggagaacgaagaaaggaacttggggagaggttgtctgtgggagagaggagggtgtggaaaggtcccagaatcagaggaccactggtgtggggcctcgcggatcctccctgaggattagggctatcttccaaatgcccaacacacattccacgctccacggacagctggtaacttgagccaacgattcattcactgaagtggaaaaatattagtagattgaaagagatttgcttaaaaagacatcagatcccaactgaatccaaaaccagtgttccttgctaaggtaaccacagaaacacaatgcgaagtgaaagaaactggccacacaagacccctgtattgcatgagtccgttgatatgaagcgtctggaatagggaagcctgtagagacagaaagtagtttaggrgttgccgggggtcaggggagg

SEQ ID NO: 88379 - DNA, 897 bp, Homo sapiens
ttgtgcatgctatctatgttctttgcgtctccttccatctgtcttcccgctgtttccctgctcattaacacctctactagaaagtgggcagggtgatgacaagaaataaaaatacaagttgaactgcaactaagaatttaacatttaaaaaatgccaacgtaagaatgatataaatatctcaattgtgaaaatagactgcgaccctggttagtatatggtattttaaatatgtgaaaaatgtgaggaattggagcacatcccataaaaaagaacaagttcacagaatgttatcaagggaaaggactgcagagatagactgcaggagcatctttccatacaggtgggaaatgcagaaaaattcattaaaaaaaaaaaaacgaattagcaagtacgcgtaaactctgaagacctaaacacatttctggaagctaactgcaaagcttggcctaaacatggaaatgctgaggtcacttgctggagtcaggtacggcatctgcaatggaaagatttttttttttttaaagaaggttatttcaacattttcaaaaaggaggctggggtggaaatatatgacmctaggtaaatatacatcaaaatatttatatcataataggcatgtagtttatttaggctacttttattatgtttatactttacatctcaagatttctacaatgaacatgtatcaattttattatgggaaagtgggctttaaataaaaaatttatgttctgctctcatttgcttatctgtcagtggagtttcttcagtgaattttactagtcaacccgtttttacaatgggattgagacagggatcaatgctgggaatttctgacatgcaaatgattttaatgatgaaagcatggagtttagtcccaatgaggtcatgtatgc

SEQ ID NO: 88380 - DNA, 1747 bp, Homo sapiens
tttaattattcatgccattgtgttaattcacatttccatgtctaactataaatttgctgatttctttcttttgtttccatcattatgtgcatttaattcattgaagaacaagaaaaatataactcttccacaaaaggtaaatattaacataactttttaaccatttaatattgttacttttaaaaatataatatacaagagttatataactgtatttattgaaataatgagcaaaattaacaggtagctattttcctcaaatgattttgtagtgtatttgatattaattatttcatattctatgttcacatcaaagaagagaagattactttaaaattaatgttttttaaaaattttatttaaaattaatgtttttttaaaaatttatttatctatactgacaactagaaaacaattctcctaggaaaatgacattttctttgtttctgtttgtttgcatttccctgctctcatagataaaagatttaattctattcagggtaatacctggtaaaagtagaaaatctctggattttactttccagatagtggtaaccttagtgaatgttctggccctggctgcagtcatacatctgagaagctgctgcctaaatgttacttctgtttgcctcaatactgttaaaatacccattaattttatctttctgagagtcatgggagaagaaaaccattcagcatttttggtctttgcacttgaatttcaaataggttgcaggcttccccctacagtcatatgctgcccacaccattttctgttcagagttgmtgttggcctgataattaactatttgaacatgagttttcagcttaatgtgataaggttaattatatttaataattatataattctgtataatttaataaaagtacattttctcaatatttgaaagtggactgattgaattaatttgttgcccatagtaacaacaaattaactcaaagctagttctgaaagtaacatcattcctattttaggaataaggacacaagttcagagagattatgacatttgcccaaactgcttgtcagtagtagactacaaacccagatctttttactttcgaccttttcctctacatgttggtgtatcctattttagtaagtacaaataccaaatatattatttctcacccttagcatatttagttatgcattatgtatctcggtattacaaagagaacagtttcaattacatatttgatctgtatttataaaaatgtatttaacaatatttatattcaggcactatacatatatatattattctggcatagtgtctgatatattaggcaatacatatattaattaaaaaattaaaaaattcagtgagatcaagatgttttggccatagattttgcatagatttctagccatcttgctgcatttttatgtcagatattgaaaacacaacattagattcagtagtacaagaatgaccaatgtactttacttaggtcagaagaatgtagttggatttgcaagataaattttagtgggctaaaagtattagattcatattagaaatgggccatgatctaattcctttatccaaaagaaagaaaaatgtaataattcttcatttagagccctttccatatatattactaggcaaaagctgtacctagctaaataaaacaaaacaaaatccataagtataacctaaagtctgcatgaaatatgcacatttagggcctctgtgcagaacatgtcagtttgtttttataca

SEQ ID NO: 88381 - DNA, 1826 bp, Homo sapiens
gttccgggagaaggactataagcaggctctggtgcagtacatggaagggctgaacgtggccgactacgctgcctctgaccaggtggccctgccccgggagctgctgtgcaagctgcatgtcaatagggccgcctgctacttcaccatggtgagcctggcaccctcttttctctcctcctctgctgccctgatcccctggatgcccagtcgagccaggcccataccccagtgagcctgtagaccagggccagcctcctcccagcctgctttcagaatttcattgtctgttctcgtggctcttaatctcaactgtacaacatgctcagctggagagcttttaaaagtacggatgcataataaaaagtttttaaaaaaaatgatactgatgccctagccctagccctgccctagatgaagtaagttagaatcttggggtgaccctgggccttggtgggagtctgacttctcctgctcctccctcccggccccactgtttcttccatagcctcagcctcctcactgttccttccatagcctcagcctcctcactgttcctcccatagcctcagcctcctcactgttcctcccatagcctcagcctcctcactgtttcttccgtagcctcctcactgttcctcccatagcctcagcctcctcactgtttcttccatagcctcctcactgtttcttccatagcctcctcactgttcctcccatagtctcagcctcctcactgttcctcccatagcctcagcctcctcactgttcctcccatagcctcagcctcctcactgtttctcccatagcctcagcctcctgtttctttgcggacttcagtgccttcctcctcctcctcctctcctccttagagctgcagcctcctcctcttccctgtcctgtgcacccactgactcaggttcatgagatcctgtgggaggctctgctgcaggctctctagaggaccccatgacacctctgccatccagcgaactcttctggataaatggctcctggatgcctcagggttaacccttgtacactctgcacacagagctgccttcatggtctcactgcctcttagagatgccaytgttactctcagctcatcatgttcccaaccaaaggcagagatggaaatagacgtgcttgagtggccgggctcatggttgtagatcttcaggcccttccctgcaatatcctgcccgtgcccactgcagccccatcagctggacacacagacacccttgatcagagtctggacaccagagtgcttccttctctcctggagcctcgagccctgtccctgacccaagacttcagctcctctgtctctgccaggaagggaagctggtgttccttcctaggcaggggcaggaggcctgggggagggagggtaacaggtgttgaccagtgaccacatgctcctctctggcagggcctgtatgagaaggcgctggaggacagcgagaaggcgctgggcctggacagtgagagtatccgggcgttgttccgcaaggcacgcgctctcaatgaactgggacgccacaaggaggcctacgagtgcagcagccggtgttccctcgccctgccccacgtgagtgtggctctgcagccacgccggtgcctgctcagaggccaggcttctgaccttccggccctcacttgggcccagccaccacatccttctgtgtctcacttcctcccctgtgacatggccatgcagatcctgatgttaacactagctcccattctctgagcgctgactgggtgccaggcactgctaggatgcattgtgtgtattaactcacctaatactggcaataacc

SEQ ID NO: 88382 - DNA, 820 bp, Homo sapiens
tccttatctaaggggctgaatgaaagaccctccagcttgtgatgggtcctgtgtcactcatgcttccaaactcccagggtcagagagcaaggagggagtgggaggggttgcattcagggtgaggtgggagtgaagacagagtcagagtcagggccaagggcctgggtgatgcttcccatatttaattacccgccgtggaggccccctgctgtgccaggtgttcgtgcctaagttttgggaatgaagggagacccaagggaaggcaccagtgttggggttactcaggcagcttggggccacagctgtttaccaggaggtttggaagtagttcaatattttaacaacctctgtagtaggacttcatattccagctgagttccgatcttggagcagggcgagggttggggcygcttggtgccctctccctcctctttgcccagcagtgtctgggatattccccacaaagatcctgcaggatggctgtgtctcaggctggtgcatcaggggctggcctcagagccaaagggtccacagtggacttgccaagcccagagtgccagagctttcctgcctcccctcccactttagccagctctcagggggccccccaccaccctgagcactgagctggaattggaggcagccagccggctgggatgtgatcattcggcctcctgagcaaggccagccctggccacagggaaacaatgaggtcccttgagtagtcaagggtctgctggggccactgggcaggacaggccctccctagcctgccctggtcttgctctgggaccttgaccctctccccttctgaggaagg

SEQ ID NO: 88383 - DNA, 778 bp, Homo sapiens
caggaggaggggcagagagccgaaatccaggctccagtggatagagcccctgctggaatgtgtgtgtatgtgtgtccctcggtggtttggatttgtggggttttgtctacaaaagtgtgtgtgttttcctggttagtgtggatgtcctttaaaagaatgtgtgtatagcactttgcctcctgctcatggtggttgctgtttctctttagtgtgtgtgtgtgtgttgctggaattaacacaagtatgtctgtttctggactgcacctgtgtgtgcacacccacaggctcctgttggttttgtttgtacatgcccygttcgcatcccagcccactcagaaggctgcaggcccagacacagcctaatggacagagccaggtgggcagggcaggctggctggcctgcacccagggggcggtgggtggatctgggcatcttccagaggcaccggcctggcagggaacaaaggggcaatcagtagagaggccactagagcacagctgattgaggaagaggaattaactaggagccccatggggctctgcagggggcgggggcggtggcccctggcattctgattaggagggggagcaggtgcagctgggcttacctgagccacaggaaggagttggagggggcagaggggaaagcctaggatgggatgaagtagagcagagctgggagctgaggacctggaccaatgactttgagggagaggagcaaggggtcctgggtgagaaggtcacagagtgtactgagcagatattgtcatcctaaatg

SEQ ID NO: 88384 - DNA, 791 bp, Homo sapiens
cagacctgttccaaggccagaaggaacccacatgatctggccccctcgctgaccacatctcctcccagtcctgtctcttactcactctaatcacacaggtctcctccattcctaatccaccccagtcctgctcaccacagggcctttgcacttgctatttcttccactggggtggtcgttttctctcatatcctttaggtcccttctcactatggatacccttggagagtccttcccaggccaccctatttaagaagatagcttctcctcttaccctgctttctctctctctttttttttttttagatggagtttcgctcttgttgcccgggctggrgggcaatggtgagatctcacctcactgcaacctccgcctcctgggttcaagcaattctcctgcctcagcctctggagtagctgggattacaggcatgcgccaccctgctggactaatttttgtatttttagtagagactgagtttcaccatgttggccaggctggtctcgaacttctgacctcaactaatccgcccacttcagcctcccaaagtgttgagattacagggctgagccactgtgccctgctttatttttcactgtttcattgaacacattttatcaaacacctacgatatgccaagcactgctccaggcacctagggttgaacaaagtcaagtccagacccttgtggagattgcattattcctccaccccagccacttatcatccccaacatacttttttatttgtgtcatttctgtctcacctcactagaatataaactaggttt

SEQ ID NO: 88385 - DNA, 288 bp, Homo sapiens
tctcaccttgacttcccaaagcactggaattacaggcatgagcccagtcatagagtgcccagcctatattttttacttttatcataaaagatatatccataaactgtatagygttgtttaatagtgtttagatacagtttatgtatccttttatgactttttaaaactgtactaggtttttaagatttaagtgtgttgaaacatgtaactagtttactggttcttaaagtgtagtccctggactagcagcatcagcaacatctgagaatttgttagaaatgcaaattt

SEQ ID NO: 88386 - DNA, 802 bp, Homo sapiens
cttcagcctcattactctatagttctgcgtttattcaacaaatacctgttcagcatctggcaggtgttcagactctgtgtgggtgttaggttaagaagataaaggaggcactgttcctcctctccacaattcaagttagaagtgagggatggcctgatccaaaggcgattgagtgcaaattccttgttccttaggaatcagccacatggctggcccacagccaaagccaacaggtcctctgtaccctgtattttagggagccagatagtttccctccaggtttactaaaggaggcagaactcgctttacacccacagccmaaaattccaatttcctcttccttgcccatacagcaatcttggggaggaaggaggtccttggttttactgagtagtcaggtgttcataggagaaggccatttcctccctccccgttaagggtggggtagtggaaattcaaaggaagtccctcatggagactgagaggtgactgcaagcatggggtgctgggatgctgttccctgatgggtggtggactgtgggcagtggactgtgcctatctgagcagggtagaggagaggtgagaagaggggcattgtggtgtagctgactggatgcgtgagcttctctaggtcaagtggacgttgcagtaatcagcctggctggagcacttttctggtggcctactcaagcaggttgactgctgggcaagagggtcaggacactggtaggccctaggtggtggggtggggtaggcgaggtcaagcctgggctggatgaccctgtgagagaattgtgcagtg

SEQ ID NO: 88387 - DNA, 1007 bp, Homo sapiens
aagaactctcaatctttctgtgttcactgagttatgtcgagaatagaagtcgttgttgaattttagctaaactagagaagttgtagctctaaagaatcagcccgcacttgtgcaaactttcacaataagtcttctcgaatatcccattggctttagatttttttcttttacaaaaaagaaaactaattaagaatgatctctgtgactggaaggctatttccttgagtacacaagaatgaaatgagacgaactaattcctctggataaatttttacatataaaattaaattgctttcagaattaaataccttggccattccatactcttgttttgtaacattatgacagtgacatggagagaaaaaaagtggcagaaggacaattcttttcttatgctggagcagcaagtgtgagattttctttttctacaccctcaaggytaactcacttctgggcatacaggaaaaactgaatggaattaatgtcactaacttggaaactcagtataacatctttcactcaaatgtgaacttgctataagtaaatgttggggaaggaaagaagaacaattgtcttatttctggttttagatcgaagacccaaagatggtgatggtgaggtagtcagcaaaaatatagtccacagaggtaacaaattatatcagctttaatttgtaagtgtttgatgatttcctcctggcctcagcaaggaataacatagctttctcctgtttcttccttcgtccgctccacctaccctttgaacctattatacaaactcagggcagtcaggtaaagaggaaagagaaaaatagaaatatttgtagtggaaaaggttgagacttacaaaaggagaaaaattgggcttgaaagagaaggagaaggaaaaaagcaagagcttatgcaaaaagcatggaagggaaagtttgtgagggaagaaaatggagaataggaaagaaggtagaagtcgaagaatagccccagggacccatgtatgagagagtagaa

SEQ ID NO: 88388 - DNA, 1007 bp, Homo sapiens
aagaactctcaatctttctgtgttcactgagttatgtcgagaatagaagtcgttgttgaattttagctaaactagagaagttgtagctctaaagaatcagcccgcacttgtgcaaactttcacaataagtcttctcgaatatcccattggctttagatttttttcttttacaaaaaagaaaactaattaagaatgatctctgtgactggaaggctatttccttgagtacacaagaatgaaatgagacgaactaattcctctggataaatttttacatataaaattaaattgctttcagaattaaataccttggccattccatactcttgttttgtaacattatgacagtgacatggagagaaaaaaagtggcagaaggacaattcttttcttatgctggagcagcaagtgtgagattttctttttctacaccctcaaggttaactcacttctgggcatacaggaaaaactgaatggaattaatgtcactaacttggaaactcagtataacatctttcactcaaatgtgaacttgctataagtaaatgttggggaaggaaagaagaacaattgtcttatttctggttttagatcgaagacccaaagatggtgatggtgaggtagtcagcaaaaatatagtccacagaggtaacaaattatatcagctttaatttgtaagtgtttgatgatttcctcctggcctcagcaaggaataacatagctttctcctgtttcttccttcgtccgctccacctaccctttgamcctattatacaaactcagggcagtcaggtaaagaggaaagagaaaaatagaaatatttgtagtggaaaaggttgagacttacaaaaggagaaaaattgggcttgaaagagaaggagaaggaaaaaagcaagagcttatgcaaaaagcatggaagggaaagtttgtgagggaagaaaatggagaataggaaagaaggtagaagtcgaagaatagccccagggacccatgtatgagagagtagaa

SEQ ID NO: 88389 - DNA, 1007 bp, Homo sapiens
aagaactctcaatctttctgtgttcactgagttatgtcgagaatagaagtcgttgttgaattttagctaaactagagaagttgtagctctaaagaatcagcccgcacttgtgcaaactttcacaataagtcttctcgaatatcccattggctttagatttttttcttttacaaaaaagaaaactaattaagaatgatctctgtgactggaaggctatttccttgagtacacaagaatgaaatgagacgaactaattcctctggataaatttttacatataaaattaaattgctttcagaattaaataccttggccattccatactcttgttttgtaacattatgacagtgacatggagagaaaaaaagtggcagaaggacaattcttttcttatgctggagcagcaagtgtgagattttctttttctacaccctcaaggttaactcacttctgggcatacaggaaaaactgaatggaattaatgtcactaacttggaaactcagtataacatctttcactcaaatgtgaacttgctataagtaaatgttggggaaggaaagaagaacaattgtcttatttctggttttagatcgaagacccaaagatggtgatggtgaggtagtcagcaaaaatatagtccacagaggtaacaaattatatcagctttaatttgtaagtgtttgatgatttcctcctggcctcagcaaggaataacatagctttctcctgtttcttccttcgtccgctccacctaccctttgaacctattatacaaactcagggcagtcaggtaaagaggaaagagaaaaatagaaatatttgtagtggaaaaggttgagacttacaaaaggagaaaaattgggcttgaaagagaaggagaaggaaaaaagcaagagcttatgcaaaaagcatggaagggaaagtttgtgagrgaagaaaatggagaataggaaagaaggtagaagtcgaagaatagccccagggacccatgtatgagagagtagaa

SEQ ID NO: 88390 - DNA, 645 bp, Homo sapiens
tccaaatcccaagcatgggcccacagagagctcttcttggagactgggcaccaatttgcctccagggcaagcaggtttcctgcaatgagagattttaagaactcaacatggatgagtccacatgagggtcacccctgtctgcctagccaaactgggaggactggacatgattggtgtttacttctatcgtggagaagaggagcatctagtgatagtttccaccctgagggtatttaatactaaatcatctttcyttacccgaggaatggggactggaggagaggactagaaagtctccaaatggggaagggggagggagagtgtcattaaatcctaaatgtaatatgttggccatcagggagttctcccattctctgcctacaatgtttgcagagaggacaatgatgaattttggtggaggaagctaagcttgaacttctttgcgaagtgcctgacaggaattttgatctacccagtatacattagagaagttggggggcagcagatgtaaagtgtaatagacacataggctcagctctttttgacacatggatattcatggcctcccacccacctcctccccagtcaaggaaaattctggcaatgccattttggtatttactactttcctggagctccatggct

SEQ ID NO: 88391 - DNA, 572 bp, Homo sapiens
aggcaaagaatgaaagaaaaataaggagtcaattttcacttttgatagctagattacagtcctttgaatgcgatagtccacaatgataaagctttatgaacctcaggatttactaaaactatggctttctatctcatagcaaaaaaaggtagaaaacccaccatccaacctaggaactcaacctctaccagttaacttcccccagcatttacacttacttccaggattacatcattctgatttcagaagttggatagaccaaggctgagtttcagtgtctgtggggtctgctgacttatggttcatccttattcctaatgtgagtccttcacaggccctcccatccttagccaatccctgtcccctcagaagacaaagccctcataaccatcactcagcctstcaacacaccccttacccctactccaggaacagtaaatgccctcaggagaaaaacagccccaaacaacaggatcacattcctgaccttacaatttctcctagatcttggcctgatatccttcatcatcttgtatactttgatgccttcaagtgtgtagctatacatatat

SEQ ID NO: 88392 - DNA, 572 bp, Homo sapiens
aggcaaagaatgaaagaaaaataaggagtcaattttcacttttgatagctagattacagtcctttgaatgcgatagtccacaatgataaagctttatgaacctcaggatttactaaaactatggctttctatctcatagcaaaaaaaggtagaaaacccaccatccaacctaggaactcaacctctaccagttaacttcccccagcatttacacttacttccaggattacatcattctgatttcagaagttggatagaccaaggctgagtttcagtgtctgtggggtctgctgacttatggttcatccttattcctaatgtgagtccttcacaggccctcccatccttagccaatccctgtcccctcagaagacaaagccctcataaccatcactcagcctctcaacacaccccttacccctactccaggaacagtaaatgccctcaggagaaaaacagccccaaacaacaggatcacattcctgaccttacaatttctcctagatcttggcctgatatccttcatcatcttgtatactttgatgccttcaagtgtgtagctayacatatat

SEQ ID NO: 88393 - DNA, 1052 bp, Homo sapiens
tggctttccttcktatcagttatctctttgtgaaatcgtacactaattggcagtgcttgatggcttgtacctgaagtcccagctactcaggagactgaagtgggaggatcacttgagttcaggagcttgaggctacagtgaactatggtcactgcactccagcctggatgacagagtgagactccattgaaggaggaggaggaggagaagaagaaggaagaaattgtatgctcattagtacaatatcttactgatgtctctctctcctaatacattttaaactccgttgtttctgttttggttcattgttatattgccagcacctagcacagggcctgacgtatgaaggacaaataatttgttcaacgatccaatgaatggttttaggtggtaggactagaagcagggtattcactaaaaaaaaggttatagcactgtggagaactgtgattcagtaggctcctgggacccaaaattttgctgggtgagagcagctccagaggctggagtccctactgcaccaaacttggattcagctcaggacccttaatcatttttgcacccccttctcaccaaggcccccacatgctgtccctccaggataacaacagcatagcatctgtctttaccagagaagccaagtctcagatattcacataatgtctcttcattccttcagtcctgtgcttgcagcagcagcagcggcagcattgaaatgcttccttctgctgctcgcgaatccgaggagtggggaccgaccttggcacatttgctgggatgcctggctaggcaaggagagtgccgtgtgctccagcacgtatgtggccgccctcatggagcaaatgctggactgcacagccctggatctgacaggtaacacgcagcagctgcatgatttaaaaggccttgtgggaagaggttttgtctcccactttgagagcttgagtgcttcatataaatatttatgggagtctggggcctccattaaccctaccagtaccacatttcacttgttacatggtgcttgtctgtgaatgaatgtgaacacccgt

SEQ ID NO: 88394 - DNA, 1052 bp, Homo sapiens
tggctttccttcgtatcagttatctctttgtgaaatcgtacactaattggcagtgcttgatggcttgtacctgaagtcccagctactcaggagactgaagtgggaggatcacttgagttcaggagcttgaggctacagtgaactatggtcactgcactccagcctggatgacagagtgagactccattgaaggaggaggaggaggagaagaagaaggaagaaattgtatgctcattagtacaatatcttactgatgtctctctctcctaatacattttaaactccgttgtttctgttttggttcattgttatattgccagcacctagcacagggcctgacgtatgaaggacaaataatttgttcaacgatccaatgaatggttttaggtggtaggactagaagcagggtattcactaaaaaaaaggttatagcactgtggagaactgtgattcagtaggctcctgggacccaaaattttgctgggtgagagcagctccagaggctggagtccctactgcaccaaacttggattcagctcaggacccttaatcatttttgcacccccttctcaccaaggcccccacatgctgtccctccaggataacaacagcatarcatctgtctttaccagagaagccaagtctcagatattcacataatgtctcttcattccttcagtcctgtgcttgcagcagcagcagcggcagcattgaaatgcttccttctgctgctcgcgaatccgaggagtggggaccgaccttggcacatttgctgggatgcctggctaggcaaggagagtgccgtgtgctccagcacgtatgtggccgccctcatggagcaaatgctggactgcacagccctggatctgacaggtaacacgcagcagctgcatgatttaaaaggccttgtgggaagaggttttgtctcccactttgagagcttgagtgcttcatataaatatttatgggagtctggggcctccattaaccctaccagtaccacatttcacttgttacatggtgcttgtctgtgaatgaatgtgaacacccgt

SEQ ID NO: 88395 - DNA, 875 bp, Homo sapiens
tcagagaacagtgtaacatcggttaattcaaagacccacttattcaactctcattggaagaagctgtcaggatttcaaacatggttttttgttgtcgttgtggggatttttttttctgccttattataactcccttgaagatcaatctgtgaaaaaaatcaattggttattagaaaaatgcacatttccccattataatattatactgtgcctcatcagagtgcactgaarattttgtagtacgttataaaagtgccaaatataatttgtatgtaaatgtcttatgtaaagtcttacttttatttttctaccgcatacggaaaaacacaccaagtgaatttgaggcaaacacaatgatagatcccactgtgataagaaaacaccctaatgcaaagttgccagtaggaaagaagaccctttccttgtgttactttgtttagagcctgtttgagaaatatcagcgcttcttttctacagcagacagataactaaggtttcatttcctcttctatcaaatatgcccatttcaacccatttgtctcctgcctggttcaggaatttttaaagaggcaccagagagaattgtgtgccataatattctaccctggatgggaatatgatcctcttgacactgccttgttgacacagaacaaattaactctatgattgccaaatcttttccactttcctgttgtgtggacagggcgtagctcaagaggcagcattgaggtaaatcctcatgggaccatcctaatgacagggtactcccttccttatctgacctgtgattggatgcctagagtgtgcctggtagtgggcgggggcaattgctttaagaaatctggtggtttcaagctctaaacacattcaacaca

SEQ ID NO: 88396 - DNA, 3602 bp, Homo sapiens
ctagaaactgaaaaggaccattttttttaagatttccttagtacttttatttccattcactcatttatataaaataattttattgagtaggaagctaaaaatgaacactggatatgaggtggctgtgataatgggacttgcagttcttggctgtaggtggcataattgacccagagctccacgattgcactttgaaatacacgaccacattctgccaaggatgtgcgacggtaggcagcccacatcccaaagcccaaggctacgcttcccctgggctgcccctggccaatggctaagtgtggcagggacataaggcaggctctttcctgaaagacaaggacttcctgtgatgggaatcatggtccaaggactgccctttgagaatccaaggatactcaaatctcttctctacaatggcatagtatttgcatataacctcatcctgtacatcatcctgtataccttaaataatctctagattacttaaaatacctaatacaatgtaaatgctatgtaaatagttgtttcactgtattgttttatatttgtatttttttccaaatattcaatccgtggtcggttgaatctgcacatgcataatccgtggatatggagggtcaactgtactttcttagaaccacactgcagtctaagacacttgttcccaaccacccttccctccttccatcttgtctcacctctgagttctaatggccctcagcctcctctgcctttctccctgcctttctcccaaatctctttcccctctaaatctgcgtgtctccctcttagagagtccaaattagcacagggtaggggaagaaaactagtcatttatcatcttgctgagttcttacaggggcctacaggatctacaatctggcccctggctcctaggggggaattagtgttagaataatcctaatcactagattaaagctttctgtaccttttcccaggagacggtttgactctccaaggtcaatggtgttgctgacccggtaccctttgtcctggatggcaatatgaaagtcttcttagctttaccctttgtaatctcttttaactttcactaagggcattttccttttgacacatctttactttagatgtatcatcactttggagccatataaacctggaataagttacttaaactacaggaatcttaatttccctgtatataacttgggaacaataataatatctatgttgtacggtcattcattatttgttcggtaaatatgtattgaatacctactaggctccaggcattatgctgtaaagagaattagttaaaatacataaagcatgaagctcacaagttggcttatattagttgttcaataaatgatactattactgatttgttgttatttttattactggcatgatgattgaattgtaattctgctctttaatctgagaaatattttacctttttatggtaatttttgcatagatgatcttattcattatttgctatttttcaagtttaatccttagaatcttaaaaccccatttctcccggtttatcactctctctttacattcaaatttcttgaaagaattgtctatacagcctgactccatttatttacttaccttcagttagtcctcagcatgctctaatccagttttctaccttcatccttccccaaaacaactttatcgtaggtcatctatgggctccttgttgtttatatgcattagcttgggctgccataacaaagcaccagagattggggggggttgaacaacagaaatgtactgtctcgcagttctgcaggctggaagtcccagatcaaggtgtcagcagggttggtttcttctgagacctctgttcttggtttgtgtctttacatggtgttccctctgtctgtgtgtgtcctgatttccagcaccttgggaggccaaggcaggtgggtcatgaggtcaggagtttgagaccagcctggccaacatggtgaaaccccgtctctactaaaaatataaacattagccaggcttggtggcgcaagcctgtagtcccagctactcgggaggctgaggcaggggaattgcttgaacccgggaggtggaagttgcagtgggcggagatcatgccactacactccagcctggcaacagagcgagactccgtctcaaaaaaaaaaaacaaaacaaaaaaagccccatctccaaatacagtcacatcgggagttagggcttcagtgtatgaattttatgggaaacaattcggttcacaacatgctacttacttttttcctttgcttgttttacttgaccttacagggtaattcgagagtactatccacacttactttcttgaaacctcttttctctggatttctgcaaccctgacatgttcccaatttgtctcttattcctctggaaaaggagaccctttttcaaaattatctttcactttctgacaattaaatcaaattgaagtttttcaagattttaaccttaacttcttccattccactctctttctaggtgttcacatccatccagatggcttcagcctacgtagaaaactcttgttttttatgtggagactagaaatgttgtcttgacctttctatgcattttcccctgtctggaatataacagacattgagaaaaacagagggttttttttttcctattcagaatgattgttgtattgaaacatatttaccccataaaatcacctgttattccatcgtaccaatacattcgtaggagggaatttccagactaatcgcagatgaatttgtgtggccctttacagagctgacccacatgtgtagctgttcttgacatgaaggtggtggggcaagaggggaaattccaagctgcagagtrcgtgaaaacagttttttaaagttgactgcaatctccattgcaactattctgtggctctgtcattgtatgactaaggactctgatgctgctgccacacactgccaatggggaatttttgtagtctgagctaagttatttcatttgctaggctatggtgaacagtttcaagatattataactctcttgatgttagatgtaattatacagatcctgagatggtgcattaccattaccaattagaaatgaaaatccgggaagggtgtgaggatggagggggagtgagggatgagaaattgcttaatggatatagtatacctcactcaagtgatggtgacactaaaaactcagacttcactacaatatatccatggaacaaagctacacttgtacctcttaaatttatacaaatttttcaaaaaaaaatgaaaggggtaaaattcaatcattcataaagaatgggtgtgttaagtggctacaccgggaatcaagtatagtgctagtgagtggagaggcggggaaaatggaggatgggagggtcccagatacaagctcctcaacctcatcaatgtcatgattgtgcctggaccagccctgttcattacaatcagaatccctcctgtgcgtcttggacataagccttagctagctggccaacctcagaacagaccctgcccatgtttgtcccaaggcagcctaactccattttttatttagatatgcaattctggccattcaagcttctttcacca

SEQ ID NO: 88397 - DNA, 3602 bp, Homo sapiens
ctagaaactgaaaaggaccattttttttaagatttccttagtacttttatttccattcactcatttatataaaataattttattgagtaggaagctaaaaatgaacactggatatgaggtggctgtgataatgggacttgcagttcttggctgtaggtggcataattgacccagagctccacgattgcactttgaaatacacgaccacattctgccaaggatgtgcgacggtaggcagcccacatcccaaagcccaaggctacgcttcccctgggctgcccctggccaatggctaagtgtggcagggacataaggcaggctctttcctgaaagacaaggacttcctgtgatgggaatcatggtccaaggactgccctttgagaatccaaggatactcaaatctcttctctacaatggcatagtatttgcatataacctcatcctgtacatcatcctgtataccttaaataatctctagattacttaaaatacctaatacaatgtaaatgctatgtaaatagttgtttcactgtattgttttatatttgtatttttttccaaatattcaatccgtggtcggttgaatctgcacatgcataatccgtggatatggagggtcaactgtactttcttagaaccacactgcagtctaagacacttgttcccaaccacccttccctccttccatcttgtctcacctctgagttctaatggccctcagcctcctctgcctttctccctgcctttctcccaaatctctttcccctctaaatctgcgtgtctccctcttagagagtccaaattagcacagggtaggggaagaaaactagtcatttatcatcttgctgagttcttacaggggcctacaggatctacaatctggcccctggctcctaggggggaattagtgttagaataatcctaatcactagattaaagctttctgtaccttttcccaggagacggtttgactctccaaggtcaatggtgttgctgacccggtaccctttgtcctggatggcaatatgaaagtcttcttagctttaccctttgtaatctcttttaactttcactaagggcattttccttttgacacatctttactttagatgtatcatcactttggagccatataaacctggaataagttacttaaactacaggaatcttaatttccctgtatataacttgggaacaataataatatctatgttgtacggtcattcattatttgttcggtaaatatgtattgaatacctactaggctccaggcattatgctgtaaagagaattagttaaaatacataaagcatgaagctcacaagttggcttatattagttgttcaataaatgatactattactgatttgttgttatttttattactggcatgatgattgaattgtaattctgctctttaatctgagaaatattttacctttttatggtaatttttgcatagatgatcttattcattatttgctatttttcaagtttaatccttagaatcttaaaaccccatttctcccggtttatcactctctctttacattcaaatttcttgaaagaattgtctatacagcctgactccatttatttacttaccttcagttagtcctcagcatgctctaatccagttttctaccttcatccttccccaaaacaactttatcgtaggtcatctatgggctccttgttgtttatatgcattagcttgggctgccataacaaagcaccagagattggggggggttgaacaacagaaatgtactgtctcgcagttctgcaggctggaagtcccagatcaaggtgtcagcagggttggtttcttctgagacctctgttcttggtttgtgtctttacatggtgttccctctgtctgtgtgtgtcctgatttccagcaccttgggaggccaaggcaggtgggtcatgaggtcaggagtttgagaccagcctggccaacatggtgaaaccccgtctctactaaaaatataaacattagccaggcttggtggcgcaagcctgtagtcccagctactcgggaggctgaggcaggggaattgcttgaacccgggaggtggaagttgcagtgggcggagatcatgccactacactccagcctggcaacagagcgagactccgtctcaaaaaaaaaaaacaaaacaaaaaaagccccatctccaaatacagtcacatcgggagttagggcttcagtgtatgaattttatgggaaacaattcggttcacaacatgctacttacttttttcctttgcttgttttacttgaccttacagggtaattcgagagtactatccacacttactttcttgaaacctcttttctctggatttctgcaaccctgacatgttcccaatttgtctcttattcctctggaaaaggagaccctttttcaaaattatctttcactttctgacaattaaatcaaattgaagtttttcaagattttaaccttaacttcttccattccactctctttctaggtgttcacatccatccagatggcttcagcctacgtagaaaactcttgttttttatgtggagactagaaatgttgtcttgacctttctatgcattttcccctgtctggaatataacagacattgagaaaaacagagggttttttttttcctattcagaatgattgttgtattgaaacatatttaccccataaaatcacctgttattccatcgtaccaatacattcgtaggagggaatttccagactaatcgcagatgaatttgtgtggccctttacagagctgacccacatgtgtagctgttcttgacatgaaggtggtggggcaagaggggaaattccaagctgcagagtacgtgaaaacagttttttaaagttgactgcaatctccattgcaactattctgtggctctgtcattgtatgactaaggactctgatgctgctgccacacactgccaatggggaatttttgtagtctgagctaagttatttcatttgctaggctatggtgaacagtttcaagatattataactctcttgatgttagatgtaattatacagatcctgagatggtgcattaccattaccaattagaaatgaaaatcygggaagggtgtgaggatggagggggagtgagggatgagaaattgcttaatggatatagtatacctcactcaagtgatggtgacactaaaaactcagacttcactacaatatatccatggaacaaagctacacttgtacctcttaaatttatacaaatttttcaaaaaaaaatgaaaggggtaaaattcaatcattcataaagaatgggtgtgttaagtggctacaccgggaatcaagtatagtgctagtgagtggagaggcggggaaaatggaggatgggagggtcccagatacaagctcctcaacctcatcaatgtcatgattgtgcctggaccagccctgttcattacaatcagaatccctcctgtgcgtcttggacataagccttagctagctggccaacctcagaacagaccctgcccatgtttgtcccaaggcagcctaactccattttttatttagatatgcaattctggccattcaagcttctttcacca

SEQ ID NO: 88398 - DNA, 3602 bp, Homo sapiens
ctagaaactgaaaaggaccattttttttaagatttccttagtacttttatttccattcactcatttatataaaataattttattgagtaggaagctaaaaatgaacactggatatgaggtggctgtgataatgggacttgcagttcttggctgtaggtggcataattgacccagagctccacgattgcactttgaaatacacgaccacattctgccaaggatgtgcgacggtaggcagcccacatcccaaagcccaaggctacgcttcccctgggctgcccctggccaatggctaagtgtggcagggacataaggcaggctctttcctgaaagacaaggacttcctgtgatgggaatcatggtccaaggactgccctttgagaatccaaggatactcaaatctcttctctacaatggcatagtatttgcatataacctcatcctgtacatcatcctgtataccttaaataatctctagattacttaaaatacctaatacaatgtaaatgctatgtaaatagttgtttcactgtattgttttatatttgtatttttttccaaatattcaatccgtggtcggttgaatctgcacatgcataatccgtggatatggagggtcaactgtactttcttagaaccacactgcagtctaagacacttgttcccaaccacccttccctccttccatcttgtctcacctctgagttctaatggccctcagcctcctctgcctttctccctgcctttctcccaaatctctttcccctctaaatctgcgtgtctccctcttagagagtccaaattagcacagggtaggggaagaaaactagtcatttatcatcttgctgagttcttacaggggcctacaggatctacaatctggcccctggctcctaggggggaattagtgttagaataatcctaatcactagattaaagctttctgtaccttttcccaggagacggtttgactctccaaggtcaatggtgttgctgacccggtaccctttgtcctggatggcaatatgaaagtcttcttagctttaccctttgtaatctcttttaactttcactaagggcattttccttttgacacatctttactttagatgtatcatcactttggagccatataaacctggaataagttacttaaactacaggaatcttaatttccctgtatataacttgggaacaataataatatctatgttgtacggtcattcattatttgttcggtaaatatgtattgaatacctactaggctccaggcattatgctgtaaagagaattagttaaaatacataaagcatgaagctcacaagttggcttatattagttgttcaataaatgatactattactgatttgttgttatttttattactggcatgatgattgaattgtaattctgctctttaatctgagaaatattttacctttttatggtaatttttgcatagatgatcttattcattatttgctatttttcaagtttaatccttagaatcttaaaaccccatttctcccggtttatcactctctctttacattcaaatttcttgaaagaattgtctatacagcctgactccatttatttacttaccttcagttagtcctcagcatgctctaatccagttttctaccttcatccttccccaaaacaactttatcgtaggtcatctatgggctccttgttgtttatatgcattagcttgggctgccataacaaagcaccagagattggggggggttgaacaacagaaatgtactgtctcgcagttctgcaggctggaagtcccagatcaaggtgtcagcagggttggtttcttctgagacctctgttcttggtttgtgtctttacatggtgttccctctgtctgtgtgtgtcctgatttccagcaccttgggaggccaaggcaggtgggtcatgaggtcaggagtttgagaccagcctggccaacatggtgaaaccccgtctctactaaaaatataaacattagccaggcttggtggcgcaagcctgtagtcccagctactcgggaggctgaggcaggggaattgcttgaacccgggaggtggaagttgcagtgggcggagatcatgccactacactccagcctggcaacagagcgagactccgtctcaaaaaaaaaaaacaaaacaaaaaaagccccatctccaaatacagtcacatcgggagttagggcttcagtgtatgaattttatgggaaacaattcggttcacaacatgctacttacttttttcctttgcttgttttacttgaccttacagggtaattcgagagtactatccacacttactttcttgaaacctcttttctctggatttctgcaaccctgacatgttcccaatttgtctcttattcctctggaaaaggagaccctttttcaaaattatctttcactttctgacaattaaatcaaattgaagtttttcaagattttaaccttaacttcttccattccactctctttctaggtgttcacatccatccagatggcttcagcctacgtagaaaactcttgttttttatgtggagactagaaatgttgtcttgacctttctatgcattttcccctgtctggaatataacagacattgagaaaaacagagggttttttttttcctattcagaatgattgttgtattgaaacatatttaccccataaaatcacctgttattccatcgtaccaatacattcgtaggagggaatttccagactaatcgcagatgaatttgtgtggccctttacagagctgacccacatgtgtagctgttcttgacatgaaggtggtggggcaagaggggaaattccaagctgcagagtacgtgaaaacagttttttaaagttgactgcaatctccattgcaactattctgtggctctgtcattgtatgactaaggactctgatgctgctgccacacactgccaatggggaatttttgtagtctgagctaagttatttcatttgctaggctatggtgaacagtttcaagatattataactctcttgatgttagatgtaattatacagatcctgagatggtgcattaccattaccaattagaaatgaaaatccgggaagggtgtgaggatggagggggagtgagggatgagaaattgcttaatggatatagtatacctcactcaagtgatggtgacactaaaaactcagacttcactacaatatatccatggaacaaagctacacttgtacctcttaaatttatacaaatttttcaaaaaaaaatgaaaggggtaaaattcaatcattcayaaagaatgggtgtgttaagtggctacaccgggaatcaagtatagtgctagtgagtggagaggcggggaaaatggaggatgggagggtcccagatacaagctcctcaacctcatcaatgtcatgattgtgcctggaccagccctgttcattacaatcagaatccctcctgtgcgtcttggacataagccttagctagctggccaacctcagaacagaccctgcccatgtttgtcccaaggcagcctaactccattttttatttagatatgcaattctggccattcaagcttctttcacca

SEQ ID NO: 88399 - DNA, 3602 bp, Homo sapiens
ctagaaactgaaaaggaccattttttttaagatttccttagtacttttatttccattcactcatttatataaaataattttattgagtaggaagctaaaaatgaacactggatatgaggtggctgtgataatgggacttgcagttcttggctgtaggtggcataattgacccagagctccacgattgcactttgaaatacacgaccacattctgccaaggatgtgcgacggtaggcagcccacatcccaaagcccaaggctacgcttcccctgggctgcccctggccaatggctaagtgtggcagggacataaggcaggctctttcctgaaagacaaggacttcctgtgatgggaatcatggtccaaggactgccctttgagaatccaaggatactcaaatctcttctctacaatggcatagtatttgcatataacctcatcctgtacatcatcctgtataccttaaataatctctagattacttaaaatacctaatacaatgtaaatgctatgtaaatagttgtttcactgtattgttttatatttgtatttttttccaaatattcaatccgtggtcggttgaatctgcacatgcataatccgtggatatggagggtcaactgtactttcttagaaccacactgcagtctaagacacttgttcccaaccacccttccctccttccatcttgtctcacctctgagttctaatggccctcagcctcctctgcctttctccctgcctttctcccaaatctctttcccctctaaatctgcgtgtctccctcttagagagtccaaattagcacagggtaggggaagaaaactagtcatttatcatcttgctgagttcttacaggggcctacaggatctacaatctggcccctggctcctaggggggaattagtgttagaataatcctaatcactagattaaagctttctgtaccttttcccaggagacggtttgactctccaaggtcaatggtgttgctgacccggtaccctttgtcctggatggcaatatgaaagtcttcttagctttaccctttgtaatctcttttaactttcactaagggcattttccttttgacacatctttactttagatgtatcatcactttggagccatataaacctggaataagttacttaaactacaggaatcttaatttccctgtatataacttgggaacaataataatatctatgttgtacggtcattcattatttgttcggtaaatatgtattgaatacctactaggctccaggcattatgctgtaaagagaattagttaaaatacataaagcatgaagctcacaagttggcttatattagttgttcaataaatgatactattactgatttgttgttatttttattactggcatgatgattgaattgtaattctgctctttaatctgagaaatattttacctttttatggtaatttttgcatagatgatcttattcattatttgctatttttcaagtttaatccttagaatcttaaaaccccatttctcccggtttatcactctctctttacattcaaatttcttgaaagaattgtctatacagcctgactccatttatttacttaccttcagttagtcctcagcatgctctaatccagttttctaccttcatccttccccaaaacaactttatcgtaggtcatctatgggctccttgttgtttatatgcattagcttgggctgccataacaaagcaccagagattggggggggttgaacaacagaaatgtactgtctcgcagttctgcaggctggaagtcccagatcaaggtgtcagcagggttggtttcttctgagacctctgttcttggtttgtgtctttacatggtgttccctctgtctgtgtgtgtcctgatttccagcaccttgggaggccaaggcaggtgggtcatgaggtcaggagtttgagaccagcctggccaacatggtgaaaccccgtctctactaaaaatataaacattagccaggcttggtggcgcaagcctgtagtcccagctactcgggaggctgaggcaggggaattgcttgaacccgggaggtggaagttgcagtgggcggagatcatgccactacactccagcctggcaacagagcgagactccgtctcaaaaaaaaaaaacaaaacaaaaaaagccccatctccaaatacagtcacatcgggagttagggcttcagtgtatgaattttatgggaaacaattcggttcacaacatgctacttacttttttcctttgcttgttttacttgaccttacagggtaattcgagagtactatccacacttactttcttgaaacctcttttctctggatttctgcaaccctgacatgttcccaatttgtctcttattcctctggaaaaggagaccctttttcaaaattatctttcactttctgacaattaaatcaaattgaagtttttcaagattttaaccttaacttcttccattccactctctttctaggtgttcacatccatccagatggcttcagcctacgtagaaaactcttgttttttatgtggagactagaaatgttgtcttgacctttctatgcattttcccctgtctggaatataacagacattgagaaaaacagagggttttttttttcctattcagaatgattgttgtattgaaacatatttaccccataaaatcacctgttattccatcgtaccaatacattcgtaggagggaatttccagactaatcgcagatgaatttgtgtggccctttacagagctgacccacatgtgtagctgttcttgacatgaaggtggtggggcaagaggggaaattccaagctgcagagtacgtgaaaacagttttttaaagttgactgcaatctccattgcaactattctgtggctctgtcattgtatgactaaggactctgatgctgctgccacacactgccaatggggaatttttgtagtctgagctaagttatttcatttgctaggctatggtgaacagtttcaagatattataactctcttgatgttagatgtaattatacagatcctgagatggtgcattaccattaccaattagaaatgaaaatccgggaagggtgtgaggatggagggggagtgagggatgagaaattgcttaatggatatagtatacctcactcaagtgatggtgacactaaaaactcagacttcactacaatatatccatggaacaaagctacacttgtacctcttaaatttatacaaatttttcaaaaaaaaatgaaaggggtaaaattcaatcattcataaagaatgggtgtgttaagtggctacaccgggaatcaagtatagtgcyagtgagtggagaggcggggaaaatggaggatgggagggtcccagatacaagctcctcaacctcatcaatgtcatgattgtgcctggaccagccctgttcattacaatcagaatccctcctgtgcgtcttggacataagccttagctagctggccaacctcagaacagaccctgcccatgtttgtcccaaggcagcctaactccattttttatttagatatgcaattctggccattcaagcttctttcacca

SEQ ID NO: 88400 - DNA, 3602 bp, Homo sapiens
ctagaaactgaaaaggaccattttttttaagatttccttagtacttttatttccattcactcatttatataaaataattttattgagtaggaagctaaaaatgaacactggatatgaggtggctgtgataatgggacttgcagttcttggctgtaggtggcataattgacccagagctccacgattgcactttgaaatacacgaccacattctgccaaggatgtgcgacggtaggcagcccacatcccaaagcccaaggctacgcttcccctgggctgcccctggccaatggctaagtgtggcagggacataaggcaggctctttcctgaaagacaaggacttcctgtgatgggaatcatggtccaaggactgccctttgagaatccaaggatactcaaatctcttctctacaatggcatagtatttgcatataacctcatcctgtacatcatcctgtataccttaaataatctctagattacttaaaatacctaatacaatgtaaatgctatgtaaatagttgtttcactgtattgttttatatttgtatttttttccaaatattcaatccgtggtcggttgaatctgcacatgcataatccgtggatatggagggtcaactgtactttcttagaaccacactgcagtctaagacacttgttcccaaccacccttccctccttccatcttgtctcacctctgagttctaatggccctcagcctcctctgcctttctccctgcctttctcccaaatctctttcccctctaaatctgcgtgtctccctcttagagagtccaaattagcacagggtaggggaagaaaactagtcatttatcatcttgctgagttcttacaggggcctacaggatctacaatctggcccctggctcctaggggggaattagtgttagaataatcctaatcactagattaaagctttctgtaccttttcccaggagacggtttgactctccaaggtcaatggtgttgctgacccggtaccctttgtcctggatggcaatatgaaagtcttcttagctttaccctttgtaatctcttttaactttcactaagggcattttccttttgacacatctttactttagatgtatcatcactttggagccatataaacctggaataagttacttaaactacaggaatcttaatttccctgtatataacttgggaacaataataatatctatgttgtacggtcattcattatttgttcggtaaatatgtattgaatacctactaggctccaggcattatgctgtaaagagaattagttaaaatacataaagcatgaagctcacaagttggcttatattagttgttcaataaatgatactattactgatttgttgttatttttattactggcatgatgattgaattgtaattctgctctttaatctgagaaatattttacctttttatggtaatttttgcatagatgatcttattcattatttgctatttttcaagtttaatccttagaatcttaaaaccccatttctcccggtttatcactctctctttacattcaaatttcttgaaagaattgtctatacagcctgactccatttatttacttaccttcagttagtcctcagcatgctctaatccagttttctaccttcatccttccccaaaacaactttatcgtaggtcatctatgggctccttgttgtttatatgcattagcttgggctgccataacaaagcaccagagattggggggggttgaacaacagaaatgtactgtctcgcagttctgcaggctggaagtcccagatcaaggtgtcagcagggttggtttcttctgagacctctgttcttggtttgtgtctttacatggtgttccctctgtctgtgtgtgtcctgatttccagcaccttgggaggccaaggcaggtgggtcatgaggtcaggagtttgagaccagcctggccaacatggtgaaaccccgtctctactaaaaatataaacattagccaggcttggtggcgcaagcctgtagtcccagctactcgggaggctgaggcaggggaattgcttgaacccgggaggtggaagttgcagtgggcggagatcatgccactacactccagcctggcaacagagcgagactccgtctcaaaaaaaaaaaacaaaacaaaaaaagccccatctccaaatacagtcacatcgggagttagggcttcagtgtatgaattttatgggaaacaattcggttcacaacatgctacttacttttttcctttgcttgttttacttgaccttacagggtaattcgagagtactatccacacttactttcttgaaacctcttttctctggatttctgcaaccctgacatgttcccaatttgtctcttattcctctggaaaaggagaccctttttcaaaattatctttcactttctgacaattaaatcaaattgaagtttttcaagattttaaccttaacttcttccattccactctctttctaggtgttcacatccatccagatggcttcagcctacgtagaaaactcttgttttttatgtggagactagaaatgttgtcttgacctttctatgcattttcccctgtctggaatataacagacattgagaaaaacagagggttttttttttcctattcagaatgattgttgtattgaaacatatttaccccataaaatcacctgttattccatcgtaccaatacattcgtaggagggaatttccagactaatcgcagatgaatttgtgtggccctttacagagctgacccacatgtgtagctgttcttgacatgaaggtggtggggcaagaggggaaattccaagctgcagagtacgtgaaaacagttttttaaagttgactgcaatctccattgcaactattctgtggctctgtcattgtatgactaaggactctgatgctgctgccacacactgccaatggggaatttttgtagtctgagctaagttatttcatttgctaggctatggtgaacagtttcaagatattataactctcttgatgttagatgtaattatacagatcctgagatggtgcattaccattaccaattagaaatgaaaatccgggaagggtgtgaggatggagggggagtgagggatgagaaattgcttaatggatatagtatacctcactcaagtgatggtgacactaaaaactcagacttcactacaatatatccatggaacaaagctacacttgtacctcttaaatttatacaaatttttcaaaaaaaaatgaaaggggtaaaattcaatcattcataaagaatgggtgtgttaagtggctacaccgggaatcaagtatagtgctagtgagtggagaggcggggaaaatggaggatgggagggtcccagatacaagctcctcaacctcatcaatgtcatgattgtgcctggaccagccctgttcattacaatcagaatccctcctgtgcrtcttggacataagccttagctagctggccaacctcagaacagaccctgcccatgtttgtcccaaggcagcctaactccattttttatttagatatgcaattctggccattcaagcttctttcacca

SEQ ID NO: 88401 - DNA, 2261 bp, Homo sapiens
tgcattagtcctttttcaccctgtggacaaggaagctgagctactttgctacaatagcaggaaggcacttgggtaaaacattcagataactgaggaaagcccaaattccctcatgtacaaaaaacagctcctagccagtcctagccaggtcgagtgagaacaaatcactcaccacacactcttggcttttccccagtgaagtcaatattgctggagagaaaattctttaggtgaagctgctagtataaggaacttataataaggaacttattttgttcatgaggaagtatttagcatcccagaagttccatggtaggggtcaacctcttactggcattctgtttatttaaaagagaattttgctaaactctttgagcttagggtgggtgagggaaaggtcgttcattgtcagggaaaaataaatgctaggtatcgaccgacaggttgcatacaagtgcacaggcccgaatctgagcattttgccttctatctggagtgccaaacacacctggccccactcccaggaagcttttacctctgggtaaccttgamgggagagccaggacttacaaagcccacagtgggcactgagtggccatgactttcttctgaggccttctgcctacagactgtacagactggactgagaaaacactctaagtacagtctgagtgctaagaatattttcactttgctgcggattattgaggaaacaactgaatggctgaaaaatgaatcccccgcttgtcctggggtatctgcagtacatgcaaacagaaacaaacacatctgccaagaacttcaagggttttgtttgtaaaaatcacaaaaatcacacccacagaggaagactaggggagactgggtgcgctcagtggaaacagttgggaggaaggaaatcacatataacatgcaaccgaatagagctcattcaaagtaaaggatgcattcgagtagatttcttcatgttagaatttgagtgcggataggtcttcaggggcagaagggatctttaaataggttcaggtcaaattaaccagtgaagctgggaagcacatcctgagctcggctgtcccacttagagggaattcagcccttttcctctatcttggtagaaacccacctccagaagcacttgggctgttttacttaacaaaaatacccacacttcttttcttggttgctttagcccttctgctattcctcaattaaatgcacatgcttgagattctccaccgctttacggaaaagcactctggctgctaggaagaaagcaagccggaaccttgcaaagcatccaggttgtacagctgcagcagacaggtgcttgctctctgcagcctgggtcagccccccaagtctatggaaattgtgttagcaggactgcgtgctgcaggggttaaagaacagctcgccaagacagctccagggctaggtgccctggtcagccttttaaagcagaaaaaataataataacaaacgcgtatacatgtcataacttaacgccaagaagtcttaacaggtgatcttgtctgggcaagacagtttggttttggaatgagaattcaaaaataaagctttagctgtggcccagttgtggcatggactgggcgagctctaaggactgacagttcagtttctgtctctatcgagggttttgggtttcttcagcctgtaagctgggctcttgggtcacgttcctttggttgctctgagaactccttgccttcaaaaggtacaggagctgtatctgtgacctggaaaaacgaacgcaagggctggggtttaatcacagtgcccacatcttctgtcccccgtccatccccccaagctccagtcactctgttctcaggagagttccagtgtcctgtctcatgtagaatgtgcttttggtcagcaggtgcttactatttggacggaacaccattaagatcaaccaggatgctctctgggatttaaaacataaaccgaaaagaagagttctctctggtgtttagagggaggtggcgagctccttaagtgagagtccgcttagtgcccatacattgatccgcgtgtggactccgggctgggagatgaacatgaaaggagacagaaggtgaggggctgtggagggctccgaggggtcagatacagaaggtgtcttgctataatggcttcttttacgtctgatttctggcaggaggtcctgaaaactccttcctgataatttcattaactacaaaagaaaagaggagggggggggagagagaatggggcaa

SEQ ID NO: 88402 - DNA, 869 bp, Homo sapiens
gctcaaaatacaacctttggggacctccaagtaataaaatgactcatgtcaggatatgatgactcagtgggaaagagggaattccaccacccacgcgtcctttctaaaaaatcaatttgtcctctggacaggtgatgggagcctctgccatcagaccgttccaagaaaatcgtccagcaaaacaaaacaaaaaattctcttcaaacaatttaagtttcaaagctgagtaatctgatgcaggccagtttccaacctacgcccccgcaggacacacagagccagggagctagttggccaagcctgggggcctgaattaagaaggatttaccagccgaaaaattccaaaactctgtgtcatgtgaaggaaccttccaaaacattggatcccacccaggcgcagcgagtcgctcaaagccatggcaacccctttcccgctgccacatcacttttatttttgtgtccttagattttttcctgttttgcaatgttttgctgggacccccgactccgcctgaggccctgtggccaagggccagggttcccactgaagtcaggaacagcctggacttcccagygtgaactttgcctgaagggttacacattttttaaatttcagagaacatccaaatggcttttcagcaattactgagaatgataaataggaaagaccctgattgttctgtttggtttctctgtcctctctgacatgactagaaaaaattactcgagttgacgacaaatgctgccttgggattccacctctgtcaccagttgtgggctgacctggggtgcatgacttgacatctgtgagcctcagttacctcatctgtaaaatggggataatgctgcccgcttctcagggctggagt

SEQ ID NO: 88403 - DNA, 1102 bp, Homo sapiens
gactcccccagaacttaactactaacagcctactgttatacttactttattcagtaaaaatagatttactattcatgaagtggaagtggatcatcataaaggtcttcatcctcatcaccttcatgttgagcaggctgaggaggaagaggaagtggagggattggccttgatgtttcaagagggcagagatggaaataaatctgagtataagtggacctgtgcaattcaaacttgtgttcttccagggtcaactgtatgtttaaaggtacatttggcaccacagcaatgactataatactgtctataatctctactcacccaagccatgaactgtgttgtagtctatgtctgtcccatacacatatgcaccaaaatgagcacatgctatcagcaggccacctgaaaaatcacacaattttgacctgttaaccagtaagtcccaaactcctgtttgttcctatttaacttcatccagtcttagaaactagctgcaggcagagtatcctggaatgacattggtcgtaacatatttagtaagcctcaggactgaaaaaacaaacccctaagctatagtcactaaactggtaacaaagtagagaaattaatgtataccctggcatcattattttaaayagcactattttatcttttttttggtcaaaataatgtatatttagacattttcatcttatttttagagctctacacaaaaacattttgctcctttcttaaaaatgagcatataaggctgtttatacaaagagctggcaataaacagaataaattctgatgactaggctcaattcccactgaagtcagagtttcaaacaaatagggcataattactatgtgagacattagttcttacagaaattaaaaggttaggacatattttaatttttgtaagaattaactattttaatatagttactcctgtaaccaatcaagtaattatctcctgttttaaactgtaaatacaaatttctgagtaactattatcaaacatgcacaaaataattaataaactgtttttattagtgctgtgaccaaagtaagaacaactgtcccaatacaatctgaccagacaaagtaatgtgacaga

SEQ ID NO: 88404 - DNA, 1102 bp, Homo sapiens
gactcccccagaacttaactactaacagcctactgttatacttactttattcagtaaaaatagatttactattcatgaagtggaagtggatcatcataaaggtcttcatcctcatcaccttcatgttgagcaggctgaggaggaagaggaagtggagggattggccttgatgtttcaagagggcagagatggaaataaatctgagtataagtggacctgtgcaattcaaacttgtgttcttccagggtcaactgtatgtttaaaggtacatttggcaccacagcaatgactataatactgtctataatctctactcacccaagccatgaactgtgttgtagtctatgtctgtcccatacacatatgcaccaaaatgagcacatgctatcagcaggccacctgaaaaatcacacaattttgacctgttaaccagtaagtcccaaactcctgtttgttcctatttaacttcatccagtcttagaaactagctgcaggcagagtatcctggaatgacattggtcgtaacatatttagtaagcctcaggactgaaaaaacaaacccctaagctatagtcactaaactggtaacaaagtagagaaattaatgtataccctggcatcattattttaaacagcactattttatcttttttttggtcaaaataatgtatatttagacattttcatcttatttttagagctctacacaaaaacattttgctcctttcttaaaaatgagcatataaggctgtttatacaaagagctggcaataaacagaataaattctgatgactaggctcaattcccactgaagtcagagtttcaaacaaatagggcataattactatgtgagacattagttcttacagaaattaaaaggttaggacatattttaatttttgtaagaattaactattttaatatagttactcctgtaaccaatcaagtaattatctcctgttttaaactgtaaatacaaatttctgagtaackattatcaaacatgcacaaaataattaataaactgtttttattagtgctgtgaccaaagtaagaacaactgtcccaatacaatctgaccagacaaagtaatgtgacaga

SEQ ID NO: 88405 - DNA, 739 bp, Homo sapiens
ctcatgaagcaaaactaaaacagaataaagataagctccatgaactgacaggaagtgatttccaggaaataccattaagtgaaaaaagcaaagttaaaaccaacacacacagtatgataccttttgtgtaagaaagtagcgaaaataagaaaatgtatatattccattatgaatcagaaaatgtattatcattacaaaaagaaacaggaagaatcaactagaaaacaatgaagttagtcacctaggataggtgggagaacaggctggaagcgttataaaggtaaagtgacatctctttgagtaccacttcttgtgtagttctgacttttggaagcaagttcatcttatacatatttgaaaataaaagtaaatcaataaggagtgggggataggagataaaaacctaaaacagagggcaaactggaacaaatgaacccaaatgaattttaaatgaaaagggaaaaagcaggcacagtatttgactttactgccccttagggtgaagaactgaaaacacatcctgaactcttattcacaggatwtttttaagtggcataagcaaaacaactgtgaaaccatttcagatataggaatgaggaaaagagtaaatgtgttgatgtagctaggaatcagggttctcactgtggaagaaggtacacataaacatagaatagggtagtcaaaaggaaatctgtaaggattgactgcaatttatagtatatgtgcaaattcacagtgt

SEQ ID NO: 88406 - DNA, 1645 bp, Homo sapiens
tgggtggaacaaattatcacagatttttaaagtaaacattgaccttaggataaatctgcagcctaagagctgtctccttccttttcaatgaatctgggcctaacttacatgattttttttggcctacagaaaccctgtgtctgacctggtatttgcactttatggtttgggcgtttttatcttgccataaattgtcatggttattaaatacagtttcaaaattgtctctaatctttcgtggtgacttttttttttatcttggaggcaaattaattttttcctgtgagactgtctttccagttcagaatgcaagtcagtcaggaaatgtgatctaatagctcctgcctcacttacccttacacagcctcaatccaggagcccaaggctcttggctaccccagcagctgtgtattacatttatttgaatcctgttttgagaatagaaggtactaatccttctggagctgtttacaagtgcttaaaggggtccacagagctgtggtttaatccagggtatcggtcatctcacaggcagattttcagagacacgtgggctgccctcagacacatcagaggtcaagggtcccaaattgttgcatgtgcgctttctccctccaccccatgcccacctttgctcatgagtcagaaccaacactcagagctcacccccatcttctccctccctcccccagtgctcacgacccaccattctcctaacttctcctcaccaaaggttgccaacctctagctccttctaatccactgactgaaggaaccctgcaatggcagcttcagaaatgtaagatgccaaatcatattgcaggacacagcaacatcagtgacatggccttgctcctcctgtggtccttcctcggcccacttccctgttttgatccaacatcccatgcctcactcttgctcctagatctccgaccccagtcccactctgatgacacattcaagcttcagacccagaaggctcggatcctcccagatttctaccctgggctgtaaaagcttttgctcaccgattgtttatttttccatggctcagagtgatttacaaagtcattaggaatgacaacttctgtctagagacccttgcctctcaaagcatggcccatgaatcagcagcagctggcttcacctccaagcatgatggaaacagagaatctcaggcttcacctcagacccatctgtaatttcacaagatccccaggggattcgtctgcacattaacatttgagaagctctggtctagaaagcagaaatgtctgttgtaacacaaagtttaatttatccttttagaaaaaaatctccaactgtaagatctcttcacaaaatcaaacagaactgttacagaaacgttttcttaayttaagttccattgaatttggttaattaaaaataaaagctagtaagacttttcccacattcttagggaaatttagtttttctatactactctgcatggtacaacatggtatagtctggatatctaaactttaacatatcttctcatattaattgatgcacaaagcccactgagtccttattttgaaccaaaaatagccttttccttttttcatgttataaaagcaaaatgtatttgataatcataaaatacatatcactagaatgaaat

SEQ ID NO: 88407 - DNA, 630 bp, Homo sapiens
ttcatgtgttctatttgatttggggccaattttcaacccacttgaatgttctaagagcacctgaagacctaagtcctaggtttaaaagctaaaataaaaccacaccaaagttaagtttgaagttgccacgaaagtaggctacctatattctgatgattattaatcaatattagtcttttcacagatatatacatattacaataaagtacctcaaggcaagggagaaaacctgtaaataaaattggaacaataacaaagtgtaaagttgtagtgattcaaaagtgycctccctctacgccttaagaacaaaattggtatttttccacaacatgaactatatttcgattcctttgctcagctacgattctttggtttgaatcaacagaaagagatcctggttgccttaggcaaataaaaatgaaaaatattggccaggcatggtggctcacacctgtgatcgcagcactttgggctgccaaggtggacggatctcttgaggccaggagttagagacaagcctaacatagtaaaacctcatctctatcaaaaaaaatagaaaatacaaaaattagccaagcgtggcagcgtgtacctgtagtcccagctattcaagaggctgaggtgggatcc

SEQ ID NO: 88408 - DNA, 799 bp, Homo sapiens
ccacaaatggcgtacaactcacattctgtccggctttgtgggcagctgagcacctacacatgaaggcctgaaggcccgaaggccccctgtgtctcaccaatggaaagacgagaaactaaaagctgtccatgaaagggaacagggtcaataacaaacaggtatccccaaagccaaaagtcaccaaaataccaaaccaaagggatggttctctgactaaggccatggcagtgaaggtacaggatttcaccttccagaattccaggtggagcagctttcactgtgaatcccacagggcatctgaagcaggcaccttgagcttacaaaggattttaactttgtttttggtcaaatttttgctctttacttttgtgaagagaatttctaaagctggccatgataccattatgtgtcttttagaaaatctgatctcggctgggcacattggctcacgcctgtaatcccaacactttgggaggccaaggcaggtggatcacctgaggtcaggagtttgagaccagcctggccaacatggtgaaaccccgtctctgctaaaaatacaaaaattagccaggcatggtggcaggtggctgtaatcccagctacctggggggttgaggcaggaggatcgcttgaacctgggaggcgggggttgcagtgagccgagatcatgccattgcagtccagcagcctggtggcagagcaagattcagtctcaaaagaaaaaaaaaatctgatcttcccrtaagtacaaataggcaatttgtttagaatgagagatcatatatacatatatatatat

SEQ ID NO: 88409 - DNA, 510 bp, Homo sapiens
agaatactaaatgcctctgctattttctcatgtattactttttctcccaaaaaatcgttttctgtccctaatatattttaatacattaaatatataattatatctcataatatactaaatataattatattaagtatattataattatatattatataatatttcgtatattatatattattgtacagtatattatactatttatatatttatattgatatttataattttaatatatttgatatattaaaatcataaatacatttatttataattatatacattataaatatattttatataatgtatatatcttatatatttattatattaaatatattaaaattataaatacattataattatgtactatattamacatattacatatgttatatataatacgttaaatatgctatattaaatatgtttgcttcagcagcacatatactaaaattgaaacaatacagagaagattagcatggtcctattattattagcatggtccta

SEQ ID NO: 88410 - DNA, 756 bp, Homo sapiens
caagcactgctttagtgtcagtaaaatgacagcctctggcgtattaaattgatagagtccatcagaatattttggtcttgtactttcagttatatttaattgatatgtttttatttgggccttctagttgtataagcataaagtatttatagctcagtttatatctagacacattgaagacatattgtcttaaaaataatttcattcggccaggtgcggtggttcacgcctgtaatcccagcactttgggaggcagaggcaggcagatcacgaggtcaggagattgagaccatcgtggctaatacagtgaaaccccgtctctactaaaaatacaaaaaattagcctggcgtggtggcgggcgcctgtagtcccagctactcgggaggctgaggcaggagaatggtgtgaacccggcaggcggagcttgcagtgagccgagatggcgccactgcgttccagcctgggcgacagagcgagactccgtctcaaaaaaaaaaaaaaaaaaaaaaawaaaaaaaaaaaaatatatatatatatatatatatatatatatatatatatataaaacttcattcaaccttgggtgttttggagaattttttgtttctttacaagcggtcttttatgtcactcaaacttgagaaaaatggctttattttaatcctgcataaaataagaaacacaattttaaattagcttatcttcagaatgtgtattctggctgtctcctaagatacaagtgaaaggactgatgt

SEQ ID NO: 88411 - DNA, 756 bp, Homo sapiens
caagcactgctttagtgtcagtaaaatgacagcctctggcgtattaaattgatagagtccatcagaatattttggtcttgtactttcagttatatttaattgatatgtttttatttgggccttctagttgtataagcataaagtatttatagctcagtttatatctagacacattgaagacatattgtcttaaaaataatttcattcggccaggtgcggtggttcacgcctgtaatcccagcactttgggaggcagaggcaggcagatcacgaggtcaggagattgagaccatcgtggctaatacagtgaaaccccgtctctactaaaaatacaaaaaattagcctggcgtggtggcgggcgcctgtagtcccagctactcgggaggctgaggcaggagaatggtgtgaacccggcaggcggagcttgcagtgagccgagatggcgccactgcgttccagcctgggcgacagagcgagactccgtctcaaaaaaaaaaaaaaaaaaaaaaaaaaaaaaaaaaaaatatatatatatatatatatatatatatatatatatatatawaacttcattcaaccttgggtgttttggagaattttttgtttctttacaagcggtcttttatgtcactcaaacttgagaaaaatggctttattttaatcctgcataaaataagaaacacaattttaaattagcttatcttcagaatgtgtattctggctgtctcctaagatacaagtgaaaggactgatgt

SEQ ID NO: 88412 - DNA, 929 bp, Homo sapiens
aattgagttcagagctgtcgtcttatgactcagatccatgttcacccaggttgggaagctcaatgctgcatccatgtagctgatcccagcataggcctgacataggaaaaagactatgggagcccttgtgccagtgactaaattccaaccagcatctttccagtgagatggcctattccaacacacacacacacacacacacacacacacacacacacacacacacacacatacacattttgtaagatcttgaaaaccataaaccaaaatagatccatgatttactggttarttttttgatgatgaactatagagcattaccaaaaagcctaaaatgtttttctgtttgactttcatgccttactttttttctttctggtgatatgatgtcactctgagcacacagggcataggttatatatagttcctttagattctctttaaaactttcaggaacaatgaaaaataatatatcgactaggtagcagttaggacaaatggtgttaagctgttctaaaaagacaatgtttaagctaaaaaacacatcttgggataagaaataaagaaaattcagttacataatggcactatcagggtatagcatcaaggcatatgtatttttctcttctcttcttagaagcgttggtgtcagattatcatttccaggttttttttttcctatttaggagaagttcaggaaatgcttaatatttacaattccctttttaaaggtgtttttcaaaattaaaatagctttgttttcattgccattataaaatattaaaatagttgagaaaggtagaaattagcaattttaccacccagagacagtcaccagtatttttttatgaatcatctcctagataactcattgcatgcccttacatcaatacacataggatattaaggatgttgcatcatactatgca

SEQ ID NO: 88413 - DNA, 929 bp, Homo sapiens
aattgagttcagagctgtcgtcttatgactcagatccatgttcacccaggttgggaagctcaatgctgcatccatgtagctgatcccagcataggcctgacataggaaaaagactatgggagcccttgtgccagtgactaaattccaaccagcatctttccagtgagatggcctattccaacacacacacacacacacacacacacacacacacacacacacacacacacatacacattttgtaagatcttgaaaaccataaaccaaaatagatccatgatttactggttaattttttgatgatgaactatagagcattaccaaaaagcctaaaatgtttttctgtttgactttcatgccttactttttttctttctggtgatatgatgtcactctgagcacacagggcataggttatatatagttcctttagattctctttaaaactttcaggaacaatgaaaaataatatatcgactaggtagcagttaggacaaatggtgttaagctgttctaaaaagacaatgtttaagctaaaaaacacatcttgggataagaaataaagaaaattcagttacataatggcactatcagggtatagcatcaaggcatatgtatttttctcttctcttcttagaagcgttggtgtcagattatcatttccaggttttttttttcctatttaggagaagttcaggaaatgcttaatatttacaattccctttttaaaggtgtttttcaaaattaaaatagctttgttttcattgccattataaaatattaaaatagttgagaaaggtagaaattagcaattttaccacccagagacagtcaccagtatttttttatgaatcatctcctagataactcattgcatgcccttacatcaatacacataggatattaargatgttgcatcatactatgca

SEQ ID NO: 88414 - DNA, 1044 bp, Homo sapiens
tttgcaaaccattcagaggcattaaattggacacactccccaaagtgcgactaccaccgggttaaagtatcgttccatttaacatttccatcattcctgccaaaacactcttcagaatttgtctacaaacttaacaccaccaatcacagtgaggccaatgtcccccagtttcccagagtattagagacacaaccctcccctccttggttgtatgtgtattcatctcttcttccttcctgagatgaagcttggcatcactccactctgaaagaaatgagaaccgtttttgcatttcaccttaatcagatcaaattaggacaggtggcaaccctgcaggcaacataattatgaaaaatgtctgtgctcaatacagcctgtccttccagcttcccaatcaaataggacaccagagcccaacctttctatttcagctggtgactcatagagcagtcacccacataattgctctgaatataatggtgctgcaaaatctgaaattaaacataatataaaaagcacaaaaatctattttgtaagattagttaatttaatataataatagttcttctattataatcttcatgtgccaaattgggggaaaaaaccttatggctggcctgttattagaagaaaatcttttaacatatcccccttacacttgccatccaaaggtaaaaagaaatgatgttgaggatttcctggttttattgtaagagagtagctgttgtccctccaataaaaagtgtgcaatgaatatctgtttaaatagatttgagataagctgaagctggatacaaaactccattatacaacagggggatcctacatccagcttcatttaggawattgcttctcagaagacatcccgaacacctcaataacaaatgttatattgaaaatgtgctcagtaacaattgcgggatgagtctctgtgcagcgatttttcagcatgtcaaaattatactatcacaccatggaaacaaattaaacagcacaagcctggctgccgggatggctgtattagcaatgcagtgctatttcata

SEQ ID NO: 88415 - DNA, 747 bp, Homo sapiens
tcaagcatttatgatcggggctaccactacaaaacaaagtccctattcataggaaagcttttacataagtcacaatgacttaattttaagtctgaatttctagtaagaagtgtgatataagataattatctttgccttcatgagtgagagtctaggtcccaacttctcatagaaatgaacayagcaatcatccagtcaattacaaagtatataatgatatattcccagtgcgactatcaattaatgaaatagcatagtaccctgtcagataattactagtgattcataatttcagtgctatttttacttaaataaacctaaaagaatcatggcatctagaatgacttctttagatacgcttttcctggtagatttcaaattactttgaaatgactaggggtcagtttatgacttttcgaaaaactgatttaggattttttcgaggtggatggggcagggagcgttcctattgcatagttccctgaagcaagtataagtattagagatggatttactagtcattctccttgccacctttaagataaagcctgtcagttttgcttgggtgccatcttatcagcagtagctcctttgccttgtaccttgataccatgctaagcacacatgactttgaaatccagctattatcaatttcgtatccattttatgtcacttgacacatgtgtcagaagacccccaagtttttaccttatttgtagccacactaaaagcacataatgctaagtt

SEQ ID NO: 88416 - DNA, 932 bp, Homo sapiens
caaaaatccaacaccttccaacaagtggctatttttcttgaccatgggtttatgtctgtgggtcaataggggtggccctgtttcatcctaagagttgggtcatggtctcctcctgtttctcatgctggagccagtggttacccagtgcaagttcctctcatggcagaagcacaagaggccaagacaaattggcagggatctgtaaagcctctgcttgcatcatgtccactagaatgttccagtggccaacacaagtcatgtggacaaattcaacatccataagacagagacatatactctgcctacctttgtgggcagtgttgaaaagtaacatggcaaaaggcataattctattaaagggaggggatgaagaattgggaaccatagatgtttatccaatggccagacctgcccccaatgtggcaggagcaggcagtgggctctggacccactatgagccacaacctcactaattttcttctctgttcctcggcaggagctcagtgagtacaacgccacagccataaaaagccccaccaacacggtcaccgtgcagggcctcaaagccggcgccatctatgtcttccaggtgcgggcacgcaccgtggcaggytacgggcgctacagcggcaagatgtacttccagaccatgacagaaggtgagcagagtccagcgggcaagaggagggcacagactccacaaacagaacaaactcaagggtcaccattctcatgaagcacctttgtgcagattagaaaaggcactcccttctagatgtcagccctccctccctcctaatttcgaacctttgtgcacaaccatatataaaagccctgtttctgttcccgttgtgtcagccaggccacttcctttcccaggactctggggagctcagccctaacttccagagccactctgagcaagtcatgca

SEQ ID NO: 88417 - DNA, 472 bp, Homo sapiens
ccaggaagtgacatgagctgacacttcttttgtaaagatcattctggatgctgtataaataataaatttcatgggaaaaggtggaaacagaaagacgtcctggaaagccattacagcaaccactgtaaaactagcaacacacactcagtgtttattctaagtactttatacatgatttcatttatgacaattttaaggagcagatagtactgtcccattttatagatgaggacactgagtcacagagaagttaagtaacttaacacggacagggtagtcaaaatgaaataaaaaagttgacggattaaagatttgtttggaaggaaaacagcaattgctggatcagctgtggggagtgagatgtgagggaaagagaggaatctaggacaatatggaggttatttgctgttcccatcaytgttgatattaacacaggtgaagtgcttagcacaaaatcagtgcaagacaagaa

SEQ ID NO: 88418 - DNA, 1069 bp, Homo sapiens
gaggttttgccttccctgcaagcttccagacggctgtaattgtcagatgcctagtgatatagtttggatgtcctccctagagctcatgttgaaacgtaatccccagtgtggaaagtcgggcctggcggtaggtggttggatcatggggacggatttctcgtgagtgatttagctgtcctcgcaatagtgagttctcgtgagacctggttgtttaaaagtgtgtggcatcttccccgtctctctcttactcccgctctccccacgtgatgtaccggctccccttaggcttcctctgtgattgtgggcttttggaggcctcaccagaagctgagcagatgcctggcgccgtgcctcctatacagcctgcacaacagtgagccaatgactgttttctttgtaaattacccagtatcaagtatttctttatagcaatgcaagaatggcgtaatgcagctggcctttagataaggacagaaaataggtggatgggaaggtgacagagttaaatccctgtttctgatctgtaaaatgggacaaaaatttttggcctatttcacaactgaacagacatgaaagatatgtttaatatgaacagacatattaaacagatagacatgaaagatatgaaaaacagacatgaaagctccctataagtccaacctatcaatactattatatattttgcacactctttaaaaaatggatgatgaatatatttgcagttttatctggtagagtacaaaatatgtttgctttcagttatatgactccttttcatgagatctgtattattacrgatttttctgacacccagagtgctgtgcacagatctcatttgtgaaccttgatcctaaattgtgttgtgacttattactgtggtgctcaaagtgttttcagcaatgccatgactaacttctttactagtgggtaaaaatacaataactttgcttattttttattttactaagtctaacaacatttcacttactgattctactaagttaaaaaaaaatcaatataaagtcatcccctgattagatttgtccttcattttttaatgatacatatg

SEQ ID NO: 88419 - DNA, 2269 bp, Homo sapiens
tgaccttaatactggaagccacatacttaggatggtggagcagaaaaacagaaaccaggactctgatgatagtatgaaatggtatcatcgggtcaaccttggaagtcctacctccttttacatgagcaagaaatacacttgtattttgtttaagccagtgttgttttggggttttatgttacatgcagccagggactacctaggcctgttattcaaggttgtattggttttttaatcatccaaaagcatctggctaaggagaggagtgagggctgaaatgcagccagcattctcttcaacaaactgtggactctgacatggggctgagtccactcagaaagagaggacatcattttctaattcatttaaaggcctagtctgttcatgaagtcatggccctatttggaaggatcacctgttggtgattgacacaaaggcactatatgggctagctggagctttattttaattcaagtccagagaagtgagctatacaatagcaagaggttacacaagacatttggagcagcagaaattgttcagtggaataatgactacccggttaacacgtagaacttaaaactactttctctgggccaggtatggtggctcatgcctgtaatcccagcactttgggaggccgaggcaggtagatcacttgaggtcaggtgttcgagacccctgcccaacatggtgaaaccccatccctactaaaaatacaaaaattagccaggtgtggtggcacatgcctggaatcccagctacttgggaggctgaggcaggagaatctcttgaacccaggaggcagaagttgcagtgagctgagatggcgccactgcactccagcctgggtgacagaatgagacgccatcttaaaaaactaaaaaattaaaaatgaaaaaaagctgctttctctgatgttccccaaagtagtttggagactagtggctatctactcaaaggaaaagaagtcatcatatgaaaaagacatttgcacatgcgtgtttatagcagcacaattcgcaattgcaaatatgtgaaaccaacctaaatgcccatcaagcaacaagtggataaagaaaatgtggtatatatacaccatggaatactactcagccatataaagaatgaaataatgkcattcgcagcatccgggatggagttgcagaccattattctaagtaactcaggaatggaaaaaccgaatattgtatgtcctcacttacaagtgggagctaagctatgaggatgcaaaggcataagaataatataatagatttgggggatttggggtaaggaggagaggggggtgagagataaaagactacatactgggtacagtgtacactgctcaggtgacaggtacatcaaaatctcagaaatcaccactaaaaaacttatccatgtaaccaaaaatcacctgttcccccaaaactaccaaaataaaataaacaaacaaaatcttggagaaaggggatccaatagaaaattggactttctataatcagtaggataagggcttagaataatgtaaatattaatatgaaaaagtgactttttaaatcataaactgttgtgcattccttatctcatttaatcctcaaaactacattataattaggtattattgtttcagttctacagaagagaaagcagtctgagagcaaataaataaattgttcaagttcacagctaataagtggcaaagccaggattctcgccaggtctgactcctaaagttgagcgctgaaccactactctgtatttcagtctagtgcctcctaagtgatcacatgtccaaattagtgaaatcctaaacttgactgagcttatggaaatttgaaaacaccccataatgggcccagatgatgtgtcagagtccctttgtttagaagaaggaagttgccttacttccccagttatttctgttttggaggagaggtgtgctccacagatgtgtgaagtggctgggattcccactcagcgtgacacaagccctcccagcttcaagaagtcagacctagacctctctgtggaaagggcaagtcctctttaatgaaatttctcctctggaggtacggcttccctctggtgctcaactcaagttcatcttgggatcaccctaccctaagttattttaaggcagtattaatgttttatgacctatttcttagtttcctttggaaaaaaaattacagcccaggcattctgcctctgacactgcaaacagctgatgtgtgatttggaaaagtatattttattgtgagtg

SEQ ID NO: 88420 - DNA, 2269 bp, Homo sapiens
tgaccttaatactggaagccacatacttaggatggtggagcagaaaaacagaaaccaggactctgatgatagtatgaaatggtatcatcgggtcaaccttggaagtcctacctccttttacatgagcaagaaatacacttgtattttgtttaagccagtgttgttttggggttttatgttacatgcagccagggactacctaggcctgttattcaaggttgtattggttttttaatcatccaaaagcatctggctaaggagaggagtgagggctgaaatgcagccagcattctcttcaacaaactgtggactctgacatggggctgagtccactcagaaagagaggacatcattttctaattcatttaaaggcctagtctgttcatgaagtcatggccctatttggaaggatcacctgttggtgattgacacaaaggcactatatgggctagctggagctttattttaattcaagtccagagaagtgagctatacaatagcaagaggttacacaagacatttggagcagcagaaattgttcagtggaataatgactacccggttaacacgtagaacttaaaactactttctctgggccaggtatggtggctcatgcctgtaatcccagcactttgggaggccgaggcaggtagatcacttgaggtcaggtgttcgagacccctgcccaacatggtgaaaccccatccctactaaaaatacaaaaattagccaggtgtggtggcacatgcctggaatcccagctacttgggaggctgaggcaggagaatctcttgaacccaggaggcagaagttgcagtgagctgagatggcgccactgcactccagcctgggtgacagaatgagacgccatcttaaaaaactaaaaaattaaaaatgaaaaaaagctgctttctctgatgttccccaaagtagtttggagactagtggctatctactcaaaggaaaagaagtcatcatatgaaaaagacatttgcacatgcgtgtttatagcagcacaattcgcaattgcaaatatgtgaaaccaacctaaatgcccatcaagcaacaagtggataaagaaaatgtggtatatatacaccatggaatactactcagccatataaagaatgaaataatgtcattcgcagcatccgggatggagttgcagaccattattctaagtaactcaggaatggaaaaaccraatattgtatgtcctcacttacaagtgggagctaagctatgaggatgcaaaggcataagaataatataatagatttgggggatttggggtaaggaggagaggggggtgagagataaaagactacatactgggtacagtgtacactgctcaggtgacaggtacatcaaaatctcagaaatcaccactaaaaaacttatccatgtaaccaaaaatcacctgttcccccaaaactaccaaaataaaataaacaaacaaaatcttggagaaaggggatccaatagaaaattggactttctataatcagtaggataagggcttagaataatgtaaatattaatatgaaaaagtgactttttaaatcataaactgttgtgcattccttatctcatttaatcctcaaaactacattataattaggtattattgtttcagttctacagaagagaaagcagtctgagagcaaataaataaattgttcaagttcacagctaataagtggcaaagccaggattctcgccaggtctgactcctaaagttgagcgctgaaccactactctgtatttcagtctagtgcctcctaagtgatcacatgtccaaattagtgaaatcctaaacttgactgagcttatggaaatttgaaaacaccccataatgggcccagatgatgtgtcagagtccctttgtttagaagaaggaagttgccttacttccccagttatttctgttttggaggagaggtgtgctccacagatgtgtgaagtggctgggattcccactcagcgtgacacaagccctcccagcttcaagaagtcagacctagacctctctgtggaaagggcaagtcctctttaatgaaatttctcctctggaggtacggcttccctctggtgctcaactcaagttcatcttgggatcaccctaccctaagttattttaaggcagtattaatgttttatgacctatttcttagtttcctttggaaaaaaaattacagcccaggcattctgcctctgacactgcaaacagctgatgtgtgatttggaaaagtatattttattgtgagtg

SEQ ID NO: 88421 - DNA, 2269 bp, Homo sapiens
tgaccttaatactggaagccacatacttaggatggtggagcagaaaaacagaaaccaggactctgatgatagtatgaaatggtatcatcgggtcaaccttggaagtcctacctccttttacatgagcaagaaatacacttgtattttgtttaagccagtgttgttttggggttttatgttacatgcagccagggactacctaggcctgttattcaaggttgtattggttttttaatcatccaaaagcatctggctaaggagaggagtgagggctgaaatgcagccagcattctcttcaacaaactgtggactctgacatggggctgagtccactcagaaagagaggacatcattttctaattcatttaaaggcctagtctgttcatgaagtcatggccctatttggaaggatcacctgttggtgattgacacaaaggcactatatgggctagctggagctttattttaattcaagtccagagaagtgagctatacaatagcaagaggttacacaagacatttggagcagcagaaattgttcagtggaataatgactacccggttaacacgtagaacttaaaactactttctctgggccaggtatggtggctcatgcctgtaatcccagcactttgggaggccgaggcaggtagatcacttgaggtcaggtgttcgagacccctgcccaacatggtgaaaccccatccctactaaaaatacaaaaattagccaggtgtggtggcacatgcctggaatcccagctacttgggaggctgaggcaggagaatctcttgaacccaggaggcagaagttgcagtgagctgagatggcgccactgcactccagcctgggtgacagaatgagacgccatcttaaaaaactaaaaaattaaaaatgaaaaaaagctgctttctctgatgttccccaaagtagtttggagactagtggctatctactcaaaggaaaagaagtcatcatatgaaaaagacatttgcacatgcgtgtttatagcagcacaattcgcaattgcaaatatgtgaaaccaacctaaatgcccatcaagcaacaagtggataaagaaaatgtggtatatatacaccatggaatactactcagccatataaagaatgaaataatgtcattcgcagcatccgggatggagttgcagaccattattctaagtaactcaggaatggaaaaaccgaatattgtatgtcctcacttacaagtgggagctaagctatgaggatgcaaaggcataagaataatatartagatttgggggatttggggtaaggaggagaggggggtgagagataaaagactacatactgggtacagtgtacactgctcaggtgacaggtacatcaaaatctcagaaatcaccactaaaaaacttatccatgtaaccaaaaatcacctgttcccccaaaactaccaaaataaaataaacaaacaaaatcttggagaaaggggatccaatagaaaattggactttctataatcagtaggataagggcttagaataatgtaaatattaatatgaaaaagtgactttttaaatcataaactgttgtgcattccttatctcatttaatcctcaaaactacattataattaggtattattgtttcagttctacagaagagaaagcagtctgagagcaaataaataaattgttcaagttcacagctaataagtggcaaagccaggattctcgccaggtctgactcctaaagttgagcgctgaaccactactctgtatttcagtctagtgcctcctaagtgatcacatgtccaaattagtgaaatcctaaacttgactgagcttatggaaatttgaaaacaccccataatgggcccagatgatgtgtcagagtccctttgtttagaagaaggaagttgccttacttccccagttatttctgttttggaggagaggtgtgctccacagatgtgtgaagtggctgggattcccactcagcgtgacacaagccctcccagcttcaagaagtcagacctagacctctctgtggaaagggcaagtcctctttaatgaaatttctcctctggaggtacggcttccctctggtgctcaactcaagttcatcttgggatcaccctaccctaagttattttaaggcagtattaatgttttatgacctatttcttagtttcctttggaaaaaaaattacagcccaggcattctgcctctgacactgcaaacagctgatgtgtgatttggaaaagtatattttattgtgagtg

SEQ ID NO: 88422 - DNA, 2269 bp, Homo sapiens
tgaccttaatactggaagccacatacttaggatggtggagcagaaaaacagaaaccaggactctgatgatagtatgaaatggtatcatcgggtcaaccttggaagtcctacctccttttacatgagcaagaaatacacttgtattttgtttaagccagtgttgttttggggttttatgttacatgcagccagggactacctaggcctgttattcaaggttgtattggttttttaatcatccaaaagcatctggctaaggagaggagtgagggctgaaatgcagccagcattctcttcaacaaactgtggactctgacatggggctgagtccactcagaaagagaggacatcattttctaattcatttaaaggcctagtctgttcatgaagtcatggccctatttggaaggatcacctgttggtgattgacacaaaggcactatatgggctagctggagctttattttaattcaagtccagagaagtgagctatacaatagcaagaggttacacaagacatttggagcagcagaaattgttcagtggaataatgactacccggttaacacgtagaacttaaaactactttctctgggccaggtatggtggctcatgcctgtaatcccagcactttgggaggccgaggcaggtagatcacttgaggtcaggtgttcgagacccctgcccaacatggtgaaaccccatccctactaaaaatacaaaaattagccaggtgtggtggcacatgcctggaatcccagctacttgggaggctgaggcaggagaatctcttgaacccaggaggcagaagttgcagtgagctgagatggcgccactgcactccagcctgggtgacagaatgagacgccatcttaaaaaactaaaaaattaaaaatgaaaaaaagctgctttctctgatgttccccaaagtagtttggagactagtggctatctactcaaaggaaaagaagtcatcatatgaaaaagacatttgcacatgcgtgtttatagcagcacaattcgcaattgcaaatatgtgaaaccaacctaaatgcccatcaagcaacaagtggataaagaaaatgtggtatatatacaccatggaatactactcagccatataaagaatgaaataatgtcattcgcagcatccgggatggagttgcagaccattattctaagtaactcaggaatggaaaaaccgaatattgtatgtcctcacttacaagtgggagctaagctatgaggatgcaaaggcataagaataatataatagatttgggggatttggggtaaggaggagaggggggtgagagataaaagactacatactgggtacagtgtacactgctcaggtgacaggtacatcaaaatctcagaaatcaccactaaaraacttatccatgtaaccaaaaatcacctgttcccccaaaactaccaaaataaaataaacaaacaaaatcttggagaaaggggatccaatagaaaattggactttctataatcagtaggataagggcttagaataatgtaaatattaatatgaaaaagtgactttttaaatcataaactgttgtgcattccttatctcatttaatcctcaaaactacattataattaggtattattgtttcagttctacagaagagaaagcagtctgagagcaaataaataaattgttcaagttcacagctaataagtggcaaagccaggattctcgccaggtctgactcctaaagttgagcgctgaaccactactctgtatttcagtctagtgcctcctaagtgatcacatgtccaaattagtgaaatcctaaacttgactgagcttatggaaatttgaaaacaccccataatgggcccagatgatgtgtcagagtccctttgtttagaagaaggaagttgccttacttccccagttatttctgttttggaggagaggtgtgctccacagatgtgtgaagtggctgggattcccactcagcgtgacacaagccctcccagcttcaagaagtcagacctagacctctctgtggaaagggcaagtcctctttaatgaaatttctcctctggaggtacggcttccctctggtgctcaactcaagttcatcttgggatcaccctaccctaagttattttaaggcagtattaatgttttatgacctatttcttagtttcctttggaaaaaaaattacagcccaggcattctgcctctgacactgcaaacagctgatgtgtgatttggaaaagtatattttattgtgagtg

SEQ ID NO: 88423 - DNA, 528 bp, Homo sapiens
tttatggagatggagatttcaaatcaagacttgagaaattaggtaagaattccaaaataagtgctctgggaggatttaaataaatcagtgaggagtaagtacattcattcattcattaatttattaacaactgaactaatacattcctgaatgagaggataatacactgttgttcaatatgtgctgtttagtttctaaggatgttgccctcaataagaacacttggtattaacctctgacaaagtaccactataactctgaagccatgtattagtggtttaaattaagaaacagctgtgatattaaaattaagacacttttgaataaagcaacaagccatatcatagacttcccagaaacagagggyatttcacatatttcagtgaatacaggagtagaattctatatatttattaatttgatatgcattcaatagatatcgactgtttacttaatattgtactaattactatgaagatataaaataaagtatggaaatagttacttcccgatgggttgcccaatatt

SEQ ID NO: 88424 - DNA, 625 bp, Homo sapiens
tcaccacaatgacccataaggtagatattattattagtctcattttatagataaggaaaatcaagagtcatataaccagtaagaagctgagatggaactcaaacccaggtttgtctgacaatgatgtacaaaatctttttaaatttaattttatttttccataagttattggggtacaggtggtatttggttacatgagtaagttctttagtggtgatttgtgagaccctggtgcatccatcaccctagcagtatacactgcaccatatttgttgtcttttatctcttgtccccctcccactcttccccccaagtgcccaaagtccactgtatcattcttatgcctttacatcctcatagcttagctcccacatatcagtgagatcatacgatgttcggtttccatttctgagttacttcacttagaataatagtctccaatctcatctaggtcattgcaaatgctgttaattcattmctttttgtggctgagtagtattcatatatatacacacacacatatatatatacacacatatatataatcaatagaaacatatatatatatatatatatacacacacatactgactctctgtctctgtctctctatctatctatctat

SEQ ID NO: 88425 - DNA, 670 bp, Homo sapiens
tgacactgtcccttcatctttcttgctggaatagggatgttttgcctgcaactgtggcatcttttttttttttttttttttttttgatacagagtctcactctgtcacccagggtggagtgcagtggagtgatcttggctcactgcaagctccacctcctgggttcatgccattctcctgcctcagcctcccragtagcagggactacaggcgcccaccaccaagcctggctaattttgtttttgtatttttagtagagggggtttcaccatgttagccaggatggtcttgatctcctgacctcgtgatccacctgcctcggcctcccaaagtgctgggattacaggcgtgagccagcaactgtggtatctttaaagaccactattgtgcctaccatatagaaacaagtggtcctccaaataactgctgatttaatattaaatccgtaaactctactcaagccagttccattcattcattcattccacaaatagttattaagcgtctactatgtgttctgggcatagagctacgaaaaagacaatgtctctgccttcatggaattcacattctgcctgtggaaggcatgatgataagtgagcaaacacattgtggaaacccaactttcctttaaagatggagcctaataattctccccttgagtgtgagc

SEQ ID NO: 88426 - DNA, 670 bp, Homo sapiens
tgacactgtcccttcatctttcttgctggaatagggatgttttgcctgcaactgtggcatcttttttttttttttttttttttttgatacagagtctcactctgtcacccagggtggagtgcagtggagtgatcttggctcactgcaagctccacctcctgggttcatgccattctcctgcctcagcctcccaagtagcagggactacaggcgcccaccaccargcctggctaattttgtttttgtatttttagtagagggggtttcaccatgttagccaggatggtcttgatctcctgacctcgtgatccacctgcctcggcctcccaaagtgctgggattacaggcgtgagccagcaactgtggtatctttaaagaccactattgtgcctaccatatagaaacaagtggtcctccaaataactgctgatttaatattaaatccgtaaactctactcaagccagttccattcattcattcattccacaaatagttattaagcgtctactatgtgttctgggcatagagctacgaaaaagacaatgtctctgccttcatggaattcacattctgcctgtggaaggcatgatgataagtgagcaaacacattgtggaaacccaactttcctttaaagatggagcctaataattctccccttgagtgtgagc

SEQ ID NO: 88427 - DNA, 757 bp, Homo sapiens
agtttctccaggagcagggcatgctgggaacgtcagttgaagacatagcccaattcctgcaccaggaggagcgcctggattccgtaaggcttgggggtgtagcacttgcatgtgagttctgtcaggtgattgtgagcccttaccagttttaacctcgagattgtctggccctaagtacattgtctgttgtccacccccgggttatacattgtctrttgtccacccccgggttacagcagtcctgtgtatcccgttggctagtgttgcagaaagctctttgatgggaataaactagcctcccagcaggtggctgcatatttgctggaagagagtcagagctggaagtgttccttgactgctagaaagttcttacggctgcctgtctgcaactaacctccttagtgtgccccgtcattctctccattttaagtctcttgtgccccctcctcttccttcatccatgcaggacaggctgcttctggaatgggtgggtgggtgggcaggtcagggagttccctagcttttttaccagtccagcctattctgggcagttagggccaggctattctgactccaccctttggctgctggcttttgctgagggttcgtatttgacaatttctggatataagtgagtgtgtatgtttcagacccaagtaggcgattttctgggagatagcgcaaggttcaacaaggaggtgatgtatgcctacgtggaccaacttgacttctgtgaaaaagaatttgtctcagccct

SEQ ID NO: 88428 - DNA, 700 bp, Homo sapiens
aattgagaatctgagagattgagcaacctgtccaaaattaatcagctagtaaggagcagagccagggttgaatatggatttctctaactcagaagctcatgttcgggctggatgcagtagctcttgcctgtaatcccagcactttgggaggccgggacgggcagatcacttggggtcaggagttcgagaccagcctggccaatatggtgaaatcccgtctcttccaaaaatacaaaaaaaaattagctgggtaatcccagctgctcagaggctgaggcaggagaattgcttcaacctgggaggcagaggctacagtgagccgagaccacaccactgcacaccagcctggatgacagaggcagactctgtctcaaaaaaaaaaactcatgttctctccactgaacattaaattagaaatatgtctgaatatgctgtgaccatgatgtggaaattgttcagtggraactattttttttgagacagggtcttgctctcttgcccaggttgaagtacagtggggtgatcacagatcactgcagcctggatctcctgggctcaatcagtcctcccacctcagcctcctgaactgctgggactacaggtgcatgccactgtgcctggctaattttttgtataatatttctgcagagatagagtttcaccgtgttgcccagtctggtcttgaactcctagcctcaag

SEQ ID NO: 88429 - DNA, 662 bp, Homo sapiens
ggataaagaaatgtggtatgtatataccatggaatactactcaaccataaaaaggaacaaaataatggcatttgcaacaacctggatggaactggagaccattattctaagtgaagtaactcaggaatggaaaacaaaatattgtatattctcacttatcagtgagagttaaagatatgaagatgcaaagtctgaagaatgatataatgactagagaaggagggtaggagaggggtgaggggtaacagactacaccttgggtatattgtacactgcttgggtgatgggtgcaccaaaatttcagaaatcatcactaaagaacttatccatgcaaccaaaaaccaactgttccccaaacactaatgacataaataaaatagaatgttaaaaaaaataaagaaaaatttgctgtgtattttacatctgtgtcaaaacttcgtggcataaaaactgatattatatttyatatataccatcttggcagaatgcagtaaagccagtgttggagaaaaagtcaagaggcctggtttctgctgaattgtagacacatgagcttgggcttcactttcctcgtgtccaatgtaaggatacggacagcataatagctacaatgtctcatagctgtaacatgatataatgtaagatacagctgtgttaatgca

SEQ ID NO: 88430 - DNA, 1154 bp, Homo sapiens
aaatagttatgtttttaagcctctaagttttgagtggttggttgtatagcaaaagataactgctgcctaatctaagtctagattattttggtctttatttacctggaaagatccttagggctcccctgaagtgggttataccaaattttaaggtaaaaatgtttcatgcaatagagtggcagaagatttcatgaaagcaaagaaaaatgcttggtttatcactgtttggaatatagaacacaaccaggattagttaattttgtaagggtatacaaggaaggcgagaccmcaataacctttagaatttacaagcttatgaatataattaaagatatttctttaattttttattgccttaagtaacaattgatttggtgatttttctgtttcctttttattaaaaatttttagctcataaaaaccttacacttagcttatttatcatagaaaaaaattacctttcagtttctcttgggtaatctgcaaattctacacattttaccaaaatgaaccatgttgtgcccgggacaatgtgaaactttcaaaggtcctttttgataataaaatataaaatatgagcataaaacatcaactattatgataaatccactatggacctaggactctgcttaaggctcaacattcattatctcattcaattatttcatctactcccatgaggtaaaaactaccctcattagtgattttccttatgaagtaactgaggcttagagaccccccactaatgcgcaagtcagcaaaaggcacccgtggcatccgagggtgctagcctttggatgccttcctcctagccatcactttgtagtgctgtgtttggctgggactgaatccacactctgccattgctctccattattgcttctgggccagccattcaaattttctgcatttctgttccttcttctatatcaagaaggtaacaatatacagaagcagaaacggtgggctgaaaatgccattttatattaatgtattaatagatatgaaagctctttgagaaagtagaacacgaccttatccacagcaggaagtttgtttttgtttctacaaagattgtcaaagcaggaagtttgacggcagatcctggcaggtctccgcattcctctgtctcttctgcctctctctacactaaa

SEQ ID NO: 88431 - DNA, 1069 bp, Homo sapiens
ggatgaaagagaatgattggaatatcaggaactatgagaggtccttgggaaaactgatgaagcccgttgatattttgtaaaacttactctttatgatcctgctatgaaataatgagaacaatgcctttttgcactattatgcaattttgtcagaaaaggcataccaaaaaaaccccacaaccaatatttgatttatgtattgctcaaaggatgtgcttgtagttgcattaaacctttttaaaaattataagataagacacctttttggaggtttaaatttttaaaaaaaaaatttcaatcaaacattcaaaaaattaatgatgatattgtggttcctattttaagtagacttcctttaagtgaccctttttccagtagcgattatttctggatacatggactgcctctattgcccaattatcttccccagaggtggcatcaatttgcatttccaccaacagtgtatgagagtgcctgttactcatcttggtgaacttttgagttattgacgrtcaggtgggtgaataagacatcttcattgctgtttttatttgcatttcattaatcatgaataaggtcgaacatattttcatgtgtttaatggccatttgtatttctttttctgataactgcctgttgctattctttgcctgtcttttgtggtggtggtgggggtgttgttcatccttttgtcactgatttgtacaagcttattgtaaacaataaacaaagtcatttgtcatatatgctgcaaacactttgtcaatgtgtcttttgtcattgtttctgacattttcagaatttgtagtaagcacagtttacatttggattctgacatttgtattttgcttaggaattggtttcaaatcaagggtataaattaatccccttatgttttcatctagcatcttttttactattaaaaccttttgtccattgaggatttattttggtataataaatgaggaatgaattcagcttttctgtgaaacagtcacaagtgcaaacatcatcaagtgaatcatccatattttctttgctgatatgaaatgctacctttgtcatatat

SEQ ID NO: 88432 - DNA, 939 bp, Homo sapiens
gcatatttattgggcatctactgtgtgataggcatcatgttagaggcaccaggggatacataaatgacacagctcttgcctcaagctgcttgcaattatactaatggtaaagataattgcaaaaatagtcatatctacagagtttatgtgtagccctaggagcataagtaattgctgccgtgttagctaaaggcagaatgtaactggtggagaaggaggatttctcctcacttatttcagcttggggcttattgggattgacagcgaagataataaggaggaagtattttgcagtggtctgcagattagttgggcagcagtggtggcacagaggccttatgggaatatgcaagattattgtttgtcggttgcccaggggcatcactactcttcctgactctgaatttgagaaagatggagtgatttggaagggctggagttttagtaggtcttcggattgttgtgtttgtaactgggctgccctctttcttgtcatcatgcttaaaggctgcctgactgattgctgtcttgcttcccaatggacttttatgaggcggcctattgactggttttctttctttctttctttctttctttctttctttctttctttctttctttctttctttctttctttctttctttctttctttcttctttctttctttcttcttycttccttccttcctttcttcccttgttcttttgctttcttgcttcctttcttgctttctaacttcctttctcactttctcacttcctttctcactttctcactttcttgtctttcttcacaattgtgtcctcacaactggtcctataaacatttggtacatagggtttgctcagtataatagaaatgcaaaaagtgtgagcacttcagaagtaccagcttcttcaaattactgcatagtcatttaaaatcattcttatctatgc

SEQ ID NO: 88433 - DNA, 698 bp, Homo sapiens
cttgagcccaagagttccataccagcttaggcaacatagtgagacccccatctctataaaaaatttaaaaaattagctgggcatggtggcacatgcctgtagtcccagctacttggggggaggctgaggcaagaggatcaactgagcctaggacatggagtctgcagggagccacgatcgtcccactgcactacattccaacccacatgayagagcaagaccctgtctcaaaaaaaaaaaaaaaaaaggagcctccggggaaaccaagatggtaactgggggagcaggccaaggaaagggaagaaaccatacaagagtgtgaggtgaagcctcagaccgatccctggagagctctggagcataaatggcacctctgagctgtcctgtctggaggctgagtctttgtccgcctgcaccagtcattggctctggggactctggccctctgaatgggcgagggggcaccaggagctcataggcaaccatctaaagatcacagctgggattaggaacaaagtcacaagcttgtgacaagttctgccgcaaccagaagagggaaccgcaaccacggcagggaatcagccttgtccattgctctgggtgatgtcgtgtccttttaatcaacagctactacacacaagtatttgtgatttgacccatggtatgaaaatccatacaacataaccatgatctaacag

SEQ ID NO: 88434 - DNA, 772 bp, Homo sapiens
attaattttaataatatattttctttagcccaatctatccaaataattatcatttcaacatgtaatctaaagtgtaaaatttcaatgagatattttacattctcattttttggtagtaagtctttgaaatctaatgtgtattctatacttatatcacacatctattcagactagccacattttaagtgctcaatagctacaagtggctatcatattggaaggtattgttctagaaacttgtctgccaggctgagcgccaattgtggaaataggcacattccttaaacccccagagtccactagtttgactgcaatggttaataaaagtttattattatyatattgaaaagagaaatgtaaaatagatacgagccatcactggccttggtatgcagacccttgcccttccagaaagtcttcttgtctgaaccatggctgctgccaagttaccaggacccccctctctctctgcaaggtgattgcctttggccaggtcccctctgcccactgtcaagatgggaacccccaccaggtcctctttttcccctcactcttcctgtggatacagcctggttctacatttaatctaaaatgtgtacttggagtcccaggtgagagcagctcgttatctcagattcctccggcattccagatgggatcagagccacaccttggcatagccaaaaccccacggaagtggttggggggaggtctctcctccgaaacaaaaagcagccaggaatgaatctgcctctccagtgagattcatgta

SEQ ID NO: 88435 - DNA, 2039 bp, Homo sapiens
tggagaaggcgcacctgctgcaggtgctcccggccgccccggaccagcgagcgcgggcactgcggcggggaggatgctgcgcgagcggaccgtgcggctgcagtacgggagccgcgtggaggcggtgtacgtgctgggcacctacctctggaccgatgtctacaggtgagccggcccaccgtgatgcccgggccgagatctcgagcccagaaatcctgagacgcgctcagactcggggacgtggacagcctttgtccagcccgagttgtccctcatcccgagcccccgagcccagaaatcctaagaatctcatccagaaacctgacaacccccgaaccttgtgtccaccttccagaaaccctgagactctcccagaccccctaacacagcctcagccccagctccctcacagaccctccctttcacccgtaaccctccgtctggccctctccagttctcctcccgggggacctcacaccccttcagcttccctgccgtcctctcccctttcacttcccctccgcacctcacttcccctcggacccacctcaacccagcccctctcctgcttcccactcccagttcagcggagcttccgcggagacttgccggggactggggcaggacccgaagggagctgccctgaggctgaatccggccctggaggttactcaggctccgatttcgccctgtgggggctgctggtggttgcttgtccccaggcactggccctgagctccgtgtccccagataccttcccctgacttcattctgagaccacagagggacaatattctacccagctgacgacggggacttggggtgtatagcggggtactttgttggaaaaggatcctgattcagagttctgctccctccccttctctctgtccaagaacttggtagagtgcgggatgtccgagacagctgaaggtagggtagggccctaccactccccccgcaatcccagaaagcagccaagtccaatgatctgtctccctgagtaatgggacggggccttggaaaggtgtggctggtgtgaatgaaagggtggggttatgctggggtttgatctgccccctctattccaagcatttaaaacctccccattgctagggttggaggggtcagtgctgggggcagggagcatgcaggactctgaggtgggaccctgtgctgacaccggatgagtcccctatcctctctgcctcaagctgaactcacacggaggcaccatcgtggtttatggctctcaaatcatcctgacacctggagcaccctgcctctcccaggcccccaccaacccatcatgtgtctccccacacagccctggcagccctcccacctgcccaaccagtctcctgccaccgctgcagaggcactggccacgctgataccaacaagccccaggactagggacccactccatgcctctgtccctggcctcaacctctgccttyccctgggcctgggcttcagttgtcccccatgtaaacctcagaggtggactgggtggtctctgagaacaagaacacagcagtggagggtggtccaggctctggtggggtgcaagagctcccctgccttccccacccccagccctgaactgggcaccgctagggagtgggcgcggagccagagtgctcaggtctctaagcctcagctgtcaccatacccacctgtttatttgctggggcatggttggtgccgcctgaaaagctggcatgatcctcccagtcgggggtggggagcaaaggagggttcctgctcaggcgccctgctatcgctctatcctggcaaagagaggcccagctggggtaggggcacagagtggggcagatatggactcagcctccctctagcagggggcagcagtgtgacgattccccttgtcctgtctcaacgaccacaaagaccctaacccccaccggcacttaaggttctccaccaccacagagaggggcagtgcgctctagaccagtactgtccagaaaagtccagtttgaaccacaacaaaaccacaattgcattttaaatct

SEQ ID NO: 88436 - DNA, 613 bp, Homo sapiens
ttgttctcctgctctgaaatactttcggagttcttgaatttcggaattcaagaattccaaaagtatttgctttgcaatggaaaaccacttttgaaccccaagaaatgactcagaaggtgggggatgtcaggtggcaagaaagctgtggcaggaaggaagggatctttgtaacaagagacaccccacctctgccctgttaggacccaggcactgggctccatccctgtgaggactcagcactttactcagcgaccctgggcagggagacagggttccaggcccagctctgctagtggagyaaattcattcctgcctgggtctccatcttccaccttcacaggaccctgtggctcccaaaactggcctcccatcagaggcactaggaaggttgttaagaattcagatccccaggcccgaccctcatacattcacactcaggaggtgcaagattggcccaagagatttcatgttcaacagatgtcctcttcacagccaggtgactgcaatgcagctggcccctttggggtctcccagatcagattacctgtgggggcccttgcagacttgcccctccagaagtcttcttttttgaaaaaagagccgggcgtggtgg

SEQ ID NO: 88437 - DNA, 682 bp, Homo sapiens
ggatccttcaaactggcctgtctgggctcccagccaggacagagcccacactgaggagagattgggtgagaaaaatcaaaattgagcaagatccccatatcaracctgaagtggggaggggaacccacccaggacacctcagagggcagaccaccctgttcttaatactacaaggaaagtgcggaagagagagctctgcagagttaaaaatcctcccctgcaatcagtctccttctaaaatatcaggaaaaccatttcacataaaaattgagcaacagaagtgcattgaggttcaatacgacacaaaatacaaaattaacacaagaaaaagagacgaagcagcagaaaacctttcctactaacaatcaaaacttgcctgacaaatgggaccacaaaaatcagagctatcatctattatttcaatataaactaaaagacattaggaacaccacatgacatgaacactcttaaatgactttgggagaattcataaataaggtaacaaaactctagagaatttgaaataaaagaaaattattgcagaggtaatgattaaaatgaaaggaacataacaccaaatacacacaagggataatgccatagaaaaatagaaggcaaaaagaggaaatttgtaaaaactgaaaaacacgagtccagagatgaaaagactgagagaaagtgg

SEQ ID NO: 88438 - DNA, 1183 bp, Homo sapiens
tatatatggcattgtagcaatttatatatgtgcatatatatgtgtgtgtatatatgtgtgtatatatatacacacacacatacacatatatacacacatatatacacgtgtacacacacacacacacacacacacacacacatatacatggcatggtagcaatgtgttacactracaaaaataaaccaaaaagctgtgtattgcctatccatggtccgtggccttacacaagttgttgctatctggcatttctattggctgttgacctggctcctcatttgtacagcttaggcccttctcctgctcactgactcctccaggatctggttcagatttttccaattagatataatctgttaaaataaaaccccggcaagaaagaagataacaatatatattatgcaaagtgatctatctcctcactaatttaaatgcttccattttagaaaagaattttggctgtaattctgcataataaagacaataatttttccaaaaacaaaaattaactttctccaaagataaatcagaaaacatctgtgacaatttaaaataataatttgtagccattttcatttatctaggtggcaaatattaaaatacaacatcactgacagtattacattaaaagtatgatagagctagagtggttttttagttcgaaaactgagactaaagtattagggaaagccttgcatttcttcattacaatgtaccataatttcaccatattatagataaaacaaatcatttatagaacacaggtgtgtgtatatctttataatttgcatgactgcagtaaatgttctctatgtgtaattatatttaatgagctcaactggatttgatatatagcatcagctaacacccccaaaagattagcaggggttagcactgaaagtaaaaaggtggctaacctagcttagagtctgtgataattccaattatgagttttagttgcctaattttaccattgaattatctactctgttttgaaacttttgtctcctttaccctgtccccaggttcttatggacatttccttgtctccccatccccatagtattcacttgcccaggaattacaaatcaaatgcctctggaatgaggcagggaactttcttgtgtaaagtaagccagacgttgaaagctagaaagtgtgaagggctgtgctaaattgaaca

SEQ ID NO: 88439 - DNA, 1183 bp, Homo sapiens
tatatatggcattgtagcaatttatatatgtgcatatatatgtgtgtgtatatatgtgtgtatatatatacacacacacatacacatatatacacacatatatacacgtgtacacacacacacacacacacacacacacacatatacatggcatggtagcaatgtgttacactgacaaaaataarccaaaaagctgtgtattgcctatccatggtccgtggccttacacaagttgttgctatctggcatttctattggctgttgacctggctcctcatttgtacagcttaggcccttctcctgctcactgactcctccaggatctggttcagatttttccaattagatataatctgttaaaataaaaccccggcaagaaagaagataacaatatatattatgcaaagtgatctatctcctcactaatttaaatgcttccattttagaaaagaattttggctgtaattctgcataataaagacaataatttttccaaaaacaaaaattaactttctccaaagataaatcagaaaacatctgtgacaatttaaaataataatttgtagccattttcatttatctaggtggcaaatattaaaatacaacatcactgacagtattacattaaaagtatgatagagctagagtggttttttagttcgaaaactgagactaaagtattagggaaagccttgcatttcttcattacaatgtaccataatttcaccatattatagataaaacaaatcatttatagaacacaggtgtgtgtatatctttataatttgcatgactgcagtaaatgttctctatgtgtaattatatttaatgagctcaactggatttgatatatagcatcagctaacacccccaaaagattagcaggggttagcactgaaagtaaaaaggtggctaacctagcttagagtctgtgataattccaattatgagttttagttgcctaattttaccattgaattatctactctgttttgaaacttttgtctcctttaccctgtccccaggttcttatggacatttccttgtctccccatccccatagtattcacttgcccaggaattacaaatcaaatgcctctggaatgaggcagggaactttcttgtgtaaagtaagccagacgttgaaagctagaaagtgtgaagggctgtgctaaattgaaca

SEQ ID NO: 88440 - DNA, 1183 bp, Homo sapiens
tatatatggcattgtagcaatttatatatgtgcatatatatgtgtgtgtatatatgtgtgtatatatatacacacacacatacacatatatacacacatatatacacgtgtacacacacacacacacacacacacacacacatatacatggcatggtagcaatgtgttacactgacaaaaataaaccaaaaagctgtgtattgcctatccatggtccgtggccttacacaagttgttgctatctggcatttctattggctgttgacctggctcctcatttgtacagcttaggcccttctcctgctcactgactcctccaggatctggytcagatttttccaattagatataatctgttaaaataaaaccccggcaagaaagaagataacaatatatattatgcaaagtgatctatctcctcactaatttaaatgcttccattttagaaaagaattttggctgtaattctgcataataaagacaataatttttccaaaaacaaaaattaactttctccaaagataaatcagaaaacatctgtgacaatttaaaataataatttgtagccattttcatttatctaggtggcaaatattaaaatacaacatcactgacagtattacattaaaagtatgatagagctagagtggttttttagttcgaaaactgagactaaagtattagggaaagccttgcatttcttcattacaatgtaccataatttcaccatattatagataaaacaaatcatttatagaacacaggtgtgtgtatatctttataatttgcatgactgcagtaaatgttctctatgtgtaattatatttaatgagctcaactggatttgatatatagcatcagctaacacccccaaaagattagcaggggttagcactgaaagtaaaaaggtggctaacctagcttagagtctgtgataattccaattatgagttttagttgcctaattttaccattgaattatctactctgttttgaaacttttgtctcctttaccctgtccccaggttcttatggacatttccttgtctccccatccccatagtattcacttgcccaggaattacaaatcaaatgcctctggaatgaggcagggaactttcttgtgtaaagtaagccagacgttgaaagctagaaagtgtgaagggctgtgctaaattgaaca

SEQ ID NO: 88441 - DNA, 1183 bp, Homo sapiens
tatatatggcattgtagcaatttatatatgtgcatatatatgtgtgtgtatatatgtgtgtatatatatacacacacacatacacatatatacacacatatatacacgtgtacacacacacacacacacacacacacacacatatacatggcatggtagcaatgtgttacactgacaaaaataaaccaaaaagctgtgtattgcctatccatggtccgtggccttacacaagttgttgctatctggcatttctattggctgttgacctggctcctcatttgtacagcttaggcccttctcctgctcactgactcctccaggatctggttcagatttttccaattagatataatctgttaaaataaaaccccggcaagaaagaagataacaatatatattatgcaaagtgatctatctcctcactaatttaaatgcttccattttagaaaagaattttggctgtaattctgcataataaagacaataatttttccaaaaacaaaaattaactttctccaaagataaatcagaaaacatctgtgacaatttaaaataataatttgtagccattttcatttatctaggtggcaaatattaaaatacaacatcactgacagtattayattaaaagtatgatagagctagagtggttttttagttcgaaaactgagactaaagtattagggaaagccttgcatttcttcattacaatgtaccataatttcaccatattatagataaaacaaatcatttatagaacacaggtgtgtgtatatctttataatttgcatgactgcagtaaatgttctctatgtgtaattatatttaatgagctcaactggatttgatatatagcatcagctaacacccccaaaagattagcaggggttagcactgaaagtaaaaaggtggctaacctagcttagagtctgtgataattccaattatgagttttagttgcctaattttaccattgaattatctactctgttttgaaacttttgtctcctttaccctgtccccaggttcttatggacatttccttgtctccccatccccatagtattcacttgcccaggaattacaaatcaaatgcctctggaatgaggcagggaactttcttgtgtaaagtaagccagacgttgaaagctagaaagtgtgaagggctgtgctaaattgaaca

SEQ ID NO: 88442 - DNA, 1183 bp, Homo sapiens
tatatatggcattgtagcaatttatatatgtgcatatatatgtgtgtgtatatatgtgtgtatatatatacacacacacatacacatatatacacacatatatacacgtgtacacacacacacacacacacacacacacacatatacatggcatggtagcaatgtgttacactgacaaaaataaaccaaaaagctgtgtattgcctatccatggtccgtggccttacacaagttgttgctatctggcatttctattggctgttgacctggctcctcatttgtacagcttaggcccttctcctgctcactgactcctccaggatctggttcagatttttccaattagatataatctgttaaaataaaaccccggcaagaaagaagataacaatatatattatgcaaagtgatctatctcctcactaatttaaatgcttccattttagaaaagaattttggctgtaattctgcataataaagacaataatttttccaaaaacaaaaattaactttctccaaagataaatcagaaaacatctgtgacaatttaaaataataatttgtagccattttcatttatctaggtggcaaatattaaaatacaacatcactgacagtattacattaaaagtatgatagagctagagtggttttttagttcgaaaactgagactaaagtattagggaaagccttgcatttcttcattacaatgtaccataatttcaccatattatagataaaacaaatcatttatagaacacaggtgtgtgtatatctttataatttgcatgactgcagtaaatgttctctatgtgtaattatatttaatgagctcaactggatttgatatatagcatcagctaacacccccaaaagattagcaggggttagcactgaaagtaaaaaggtggctaacctagcttagagtctgtgataattccaattatgagttttagttgcctaattttaccattgaattatctactctgttttgaaactyttgtctcctttaccctgtccccaggttcttatggacatttccttgtctccccatccccatagtattcacttgcccaggaattacaaatcaaatgcctctggaatgaggcagggaactttcttgtgtaaagtaagccagacgttgaaagctagaaagtgtgaagggctgtgctaaattgaaca

SEQ ID NO: 88443 - DNA, 1183 bp, Homo sapiens
tatatatggcattgtagcaatttatatatgtgcatatatatgtgtgtgtatatatgtgtgtatatatatacacacacacatacacatatatacacacatatatacacgtgtacacacacacacacacacacacacacacacatatacatggcatggtagcaatgtgttacactgacaaaaataaaccaaaaagctgtgtattgcctatccatggtccgtggccttacacaagttgttgctatctggcatttctattggctgttgacctggctcctcatttgtacagcttaggcccttctcctgctcactgactcctccaggatctggttcagatttttccaattagatataatctgttaaaataaaaccccggcaagaaagaagataacaatatatattatgcaaagtgatctatctcctcactaatttaaatgcttccattttagaaaagaattttggctgtaattctgcataataaagacaataatttttccaaaaacaaaaattaactttctccaaagataaatcagaaaacatctgtgacaatttaaaataataatttgtagccattttcatttatctaggtggcaaatattaaaatacaacatcactgacagtattacattaaaagtatgatagagctagagtggttttttagttcgaaaactgagactaaagtattagggaaagccttgcatttcttcattacaatgtaccataatttcaccatattatagataaaacaaatcatttatagaacacaggtgtgtgtatatctttataatttgcatgactgcagtaaatgttctctatgtgtaattatatttaatgagctcaactggatttgatatatagcatcagctaacacccccaaaagattagcaggggttagcactgaaagtaaaaaggtggctaacctagcttagagtctgtgataattccaattatgagttttagttgcctaattttaccattgaattatctactctgttttgaaacttttrtctcctttaccctgtccccaggttcttatggacatttccttgtctccccatccccatagtattcacttgcccaggaattacaaatcaaatgcctctggaatgaggcagggaactttcttgtgtaaagtaagccagacgttgaaagctagaaagtgtgaagggctgtgctaaattgaaca

SEQ ID NO: 88444 - DNA, 995 bp, Homo sapiens
atgaaactctccctggccttccttggctctatttgccaggttttcaaaatttttcatttaattttatttaacacaagtgattccattctgattctgtcaactttcatctggtagacctgagatttaaattcgagccatctggctcaaagcctgtgcgcttaaaccaccaggccacacaaccccttagcatgtggctctgagatgccttttgatatttaaaatgggtctcaggcttgaaagtgtaggaaaccaccagtgcgtgaagaatatggtcagccatttatagaagggatagtagaaaaggcaattcattctaaaatacattatggctggaragaagggattctcacgtgcattgtccacaggagtcaaaaagcttaggctttggatcatgggtggaagatgggatgatgggatgagggcctggcatagttcatctccagatcccaaagctttttatctgtagaagcccctgctctgagtctcctgttggaactcactgggcagactgaccagatgatggcaggtgggtggaatgaatgacttaccggccggggcagactgtactgatacatttctgggcggtaggtcggcacccactgcaccccggcctgggccgcgtcatggtccccggagcgctggtcaccacctccgaatagggcaggtgctgggctgagccgtaggcctcttggtgccggctctggcctgcgtggcccgcggatgccaggctgaaggcctcctccagcagcatgtgcatctgctgcctgacctcgtcgatggatggctgggagctcagtgtggaggtctccgagtggcctttcacctgtcgagacctggaatagccccggggctcaggaactctgtcaatgttggtttcctctatgatttcaggctcagtctgtgggaggaaacaaagcccattgatgtgtttactttccttcccgtgaaggtgctctgtaatttactctaaaacattcacttggacaggtgctagg

SEQ ID NO: 88445 - DNA, 1203 bp, Homo sapiens
ccaccaagcccagatcttttccagggttgctgggaccagggtattatactcctggtgagctggttactcagaatgattcctaggcatgatgaggctgtaaccaaaagagcatgtggaatctgcagcacagctccagctggttccagcttgtctcatcatggccggatgatgaagggctcttcctttcacagcaccattcatctctccctaggtgtcctgagcccactgtgctggaggctgttgaaaagggaggttgtccatagcagatgagtcggatgaggctgagtagaggagtcactccttctgggtgatcaatgggtgatgcattggctgtggtgagaaagtgagttctagtcctgcttaatctctgacgaggggagcaacattgtgtacaagtattcaaacagaggctccataaataacaataattcatcatacttgttgagtgccatgcagttgtgaatggtgcactctctccttccccttctacagtcacctcattgactgcacatttcacagataaggctcagagaggggacatgaattgcccaaagyaacacagctagaatgtagtaaaggcaaggttctaaacctaggtctggatgatgtcaaatcccaagattgggatccctttaaagtgtaataacagtggtcatgacatagattcggagctacagtaaaaccttatcaggccccaaactgaaaagattttagtgccctcttttcctatatgtaattaaaaatgaaaacaatcctaaactataaagtattaaaaaagcacaacaaacttgtaaccccccagcccccatcccagggtaactatagtgcctttttctttttctctattaaattgcattcaaaagctctcttttcctgatcttctcctctctctgctccacttcctctcattttgactgtctgcttttccgaagctctagtcctgcttaatctctgacgaggggagtaacattgtgtacagaggtcatgaggtttatcctgtgatgactggagtgtgaaggacagaatcttcactagattccctttcaactcagagtctgggattctatcacttcaaaaacagcaagatatatcacttcatcatgtggcaatgtctaatattctgagaatattgtaaacacttgttaaaatctcttccttatgaggaatggagaaagaagtattaagggaaaagacaaactgtga

SEQ ID NO: 88446 - DNA, 921 bp, Homo sapiens
gggattcaacctgggtcttttttcttttttgacagctatatctttgtctttcccaaggttttacagagaaaatctgtaggctccctggtcttcttttaaagttttcttttattcccactccaatttccagtttgtactgctaattatcctcttcatggtgccttaaattttgcctatcttgcaatcaacaatctcaaggttgtcaagaatatatatatataggccgggcgcggtggctcacgcttgtaatcccagcactttgggaggccgaggcgggcggatcacgaggtcaggagatcgagaccatcctggctaacacggtgaaaccccgtctctactaaaaatacaaaaaaattagcygggcgtggtagcgggcgcctgtagtcccagctactcgggaggctgaggcaggagaatggcgtgaacctgggaggcggagcttgcagtgagccgagattgcgccactgcactcccacctgggccacagagcgagactccgtctcaaaaaaaaaaaaaaaaaaaaaaaaaaaaaaaaaaaaagaatatatatatatatatatatatatataaataaatatatataaaaataaattttttggatccaagggtaactcatggttaaataaaaataactgactttaatatttggaataaggaataatatttggaagaaataaacttgcacagactaggtctaggaggcatgaaagattggtcatattttttcaattgaaacgatttacggtaagattagaaggagaatcaggattaaaatcttacatttaaatatttcctgatattaagcactaaatcatcattcataaaagaaatgccatcgtaaaatgagccatttgatttgttgattaatttatctttttcctttaccacctaaagcaaatgtggataggtatgaaaaaacag

SEQ ID NO: 88447 - DNA, 921 bp, Homo sapiens
gggattcaacctgggtcttttttcttttttgacagctatatctttgtctttcccaaggttttacagagaaaatctgtaggctccctggtcttcttttaaagttttcttttattcccactccaatttccagtttgtactgctaattatcctcttcatggtgccttaaattttgcctatcttgcaatcaacaatctcaaggttgtcaagaatatatatatataggccgggcgcggtggctcacgcttgtaatcccagcactttgggaggccgaggcgggcggatcacgaggtcaggagatcgagaccatcctggctaacacggtgaaaccccgtctctactaaaaatacaaaaaaattagccgggcgtggtrgcgggcgcctgtagtcccagctactcgggaggctgaggcaggagaatggcgtgaacctgggaggcggagcttgcagtgagccgagattgcgccactgcactcccacctgggccacagagcgagactccgtctcaaaaaaaaaaaaaaaaaaaaaaaaaaaaaaaaaaaaagaatatatatatatatatatatatatataaataaatatatataaaaataaattttttggatccaagggtaactcatggttaaataaaaataactgactttaatatttggaataaggaataatatttggaagaaataaacttgcacagactaggtctaggaggcatgaaagattggtcatattttttcaattgaaacgatttacggtaagattagaaggagaatcaggattaaaatcttacatttaaatatttcctgatattaagcactaaatcatcattcataaaagaaatgccatcgtaaaatgagccatttgatttgttgattaatttatctttttcctttaccacctaaagcaaatgtggataggtatgaaaaaacag

SEQ ID NO: 88448 - DNA, 1219 bp, Homo sapiens
gtttcttcgtaaaaccttagaagtcagtcagccttctaggrcccagttttcttaccatttaggccatgcagtgcacacatgtagttgcaccttgcatatccagtatctttttatttgtaaatgtctcctatgtcattgggttctggtggggttggcatcagagaaggatgtggcttgtcaacatagcttgattcagtatttggcacaggttgtccagaatggcttactagaaaggctattagaagaaacctagtctacagggtagttcgtggataaaggagcatggtgttcagtatgtagtgatgatttggtacatggtgaagggttttaaagattcatcttcataaacccagggaataaagtgcatcaggctgtgctcaccattcacatacacggtggtgcctggaccagagaaaaactccatgtcagggtgtcctacccttaacttcacacagtagtaggtgccagcatcctctggcaacacgtcactgatgcgaatggaatagtcagtttgatcaaccattgtgttttccactggagttactctggggaagtggcttccattgcaactaaagattaattgttgtcctggcccaatgctcttgaaccacaagacaggcccttctggggacagagcagacatattgcaggccagggttaggacatctccgggattgactgacactaaagtctgaggctatttcacctggaactcttcttctggagttcctggaaataaacatggaatcatctcttatgttctctgtcttggctcaagatgctctgagggtctggttataggtcaaggtgggatctcagtatgatagctttatttcagcatcatgtgatggcaccagtcatataaaaattacaatgctgggtgccatgtgaggtgaaggggaggtaccagtgtacaaataggagaatgacactttccttctgcatcgggatatgaggatggcctgcaatatattaggcactaaataaacatattttaaataaatatatgagtatatttttattaaatgagaaaatgcaaaatagaatttgggtcagatttttctaattgtctcaaaatcagggatactgccccaagctaaggacagtatgttgataaccaacatactgcatatggagtgacctgcatatggaggcagctccctcccataccgggtgttctgtggtgtgaaaggccactcattcacctctcccagagtaa

SEQ ID NO: 88449 - DNA, 431 bp, Homo sapiens
tgcatattacaattataacaagactggacccaaattagaaggagttattctataatgtgtttattgaggagaagtattggtttgcagaaaattaccatggaccttaggaaatgaaggcgccatggtccctgccattgtatcwgtcttcacagttatggctgctcatggggcccattcagaaggaaaaaggtaaacacattccacattggagcccaacttcggagccatggaagtatgacttctttgacactccctccattaaaagctagcgtccatcccctgcctcttcagtctaggcaggcttgtgactgttttgaccaatggggtatgaccaaaatgatgctttgtgacttctgaagctaggtcataaaaagtcatgtgattctgccttgcttactgtcagaagtctgagtggagaggccaggtgtggg

SEQ ID NO: 88450 - DNA, 1279 bp, Homo sapiens
tccgagactgagaataaggaggagaaggaggaaggggaagggaatattgaatgaggaaaactgaaagggaagaagacaggagagaggagtagggacacagggaagaggtggggatagtggaaaggggtgaggggggaaaggaaagagaaaagaaataccacaattatagtcccctctttgtgaaggacacccactgtacttggcaaacacttaatcacataaccttgcttgtacctcattatccactttctccatcttcacctgagcagttggctcacattccccccaaaaaacaaccatacagccatactgactaggtttcacttgaaattcatgtccacaattagcaactgattttttgtttgtttgtttgtttgtttttgagatggagtttcgctcttgttgcccaggctggagtgcaatggcgccatctcagctcaccgcaacctccgcctcctgggttcaagtgattctcctgcctcagcctccygcaaccgattttaaaataaagaaaatttcgttttccagcattgattaattcagtcgcacaattatataatgaagaacctaagtgctttccatctttttcttctgccagactcaaaaccatgaaatgacaactatgttatgcaggcataccaatgtctagtagaagagagatgctttcttccctggagatccttttgtcagaaaagaaaacctttcacagtaacccctaaacaatcttccccttctgtctcactggccagatggcatcacttgaccaagtcttaatccttggcaaggtgaatgaaactattatgtttggattaaatcagcaaatttcaacctctggaactggaatggggctcatttccaacaatatacatggccatgaggaagacaggagatatctggagaattatattagcagaagagaattacagtggcagaaacacttaccagcttggactgaaagtgacatagacagtacaaaatgaaaagagacctctggatcccccaccttgaaacttctaccagcagaaagcagattaaaaaaaagctacttggttgcaaaaacatgttatctttcgtgaaaaaagaaagatgactcagagggtggaaataagagccaagaaggtagaacattattctcaggctttgagacctaatcatggaaaagccaatcagtgcttaactgaatttcagaattgctaaggaccagttactcttgtgttacttccctattccccttttctgaataggagtgtctgtgtagcagttaacttatgcctgtcct

SEQ ID NO: 88451 - DNA, 2355 bp, Homo sapiens
tcattcatttagtaactcatatatatgaagcacattgctgtatggcaaataccctacttggtgcttgggaataaacagtgaacaaaagtgaacccagttcctgcctacagggaacttacaataatggaggcaggtaataatcaaataatattcaaatttatgcttgcaagtttagaaaaggtttgtaagtgatgcaatatgatgagatggcacaacaggtctaggggtcaggagaggttttgcagagaagaaagtgacactgggtctggaatctacaggaagcgtattgaccaggtgaaggttgcgggaaggcctgttggtgcaaagaagcagggcacattagaggaattgaaagaagactgcagagaatcagaaaaggagagtgcggtgtgagacagggctggagacactggcagagacccggcaatactagtccttgtgggttgtgctaaggaggccgggcctgatttcaagaacagcaggaggctgctgcagtgctttaataagggtggatttacatttggaagatgcacatttggatttacattttggaaaggtctctctggctgctgagctgctgtggactggaagggggaagattcaacctccgatgatggctttctgctgatttgttttccttctttcacttttcttctgggtttgggggctcttggctgatttagtctctactagcctctgaggaaaagcactggtcctggggtatttattaaaggaagcatgatggattattttggagggatattctttgaaatctggagtgagagggggtaccatatgccagcagcaatgggcaaaatggtgctaagaggtaaactgatgtccaaaatgattccatccaccaaccttggacatgagagtgaagttcctatttcataaatggaaatataaacctagtttatcctttgacatccagaataatgtgtaagaagttttccttggcagcaaatcttaaatgatggagccttggggaatgacttctgaccctttataataattagccaggccaggacacataggtaagacacctggtgaccaacagcctaagggtcagggggcaaagggtggtaggacaatataagagtgcttaactcagtgtcctgcatagatggtagctattagcataatgactatcactaatatacacaccactattaccaacagaagtgtcctatattgctctctcatcttttaaaatatttattcatttattcattcaattcattgtttcagtgaatgtttattgaacacccacaatactatgcattgttatgggaggtggggactcaacagtgtcaaaaactaagttccagccaccatggagcttacattctggttgggagaggagaataaacaaataaaattaaataaaggaatgcattgtctggcagacggtaataagagctgagaagagaaacacaaagcaggataaagagatggagaatgatggataagatgatctgggaggccctctttgaagaggcactgtgagccaagctctgaatagagggattgaactatgcagatgactggaaagatggaacagcaggtgcaaaggccccacagcagaagacgcttgcaggatttgagaaggggtgccctccactgtgtgcccagagcttctgttattctataactactaaccttagtaacaggagtgacccctcttccaggagaaggagatgagcagctctgatagagtagcatccgctttcaattttctttctttatttcttaaggctcttattccaacctcccaactacggtttcagcacaagttaggtgagcagctatttatgtactaggtgaaggttcccagaataaatgtcttgagattttaagcaaggtgtagtattatcgtatgtctcttctgacaattttccaggttgacaaaaatctgcgtttgtctagcaacatggtgactggaggggcaggcaggcattctgttcagcatggaacagaaataagcagtgggagctgatgtgctgaagtrgcaactgaaggaaatacagctttggataaaatggagccactcaaatggcatttgaaatgtctgctctgaattcgacagatgatgttctctgccaccggcatcctttccgatatttaatgcagacgtttgccacgtgtcagttctcagctggggactaggaagcattcttcagggtgtcagcgtcttgataaacatgtcaccaatttgtatgattcactacacatgaataaatgctaggaatttggctgatcaattcatatgccagggcctacaaatgtggaggaaaatcgcacttcttatctgtgggcggaaatgcaaaaaccagcgtgatagtgcacaatgca

SEQ ID NO: 88452 - DNA, 1423 bp, Homo sapiens
catatatgtgcctcccacccttccctattgctgatgacttccctgaggcttgctgtggctctacttttctgcccgaggttcctccactcacatttgcagcatttctaatctgccacatggatgtccaaggtgatgcccagaaaaaggccttgggcaatgacaggaaggtgctagaagctgcactgtgccagctggcattgaagaggtcagaaccaagtaatatgggtcgagcaccacggcatctgcctatctacacggtacctaaagagagagtcatgctgtggccagcaacgtggccattccactgttctctgggtcaaggagaaatgctttgtggtactgtaatcttaatgctcaggaagaccccaaagatttaaaaagaagcaggagtatcccttccaatgacttccaaagttcctccctttccgtgctctgtaggctcttcaaactcagcatgccccaaacagaatgcactgcactggccccttcagtgtgctctttagcctgtgttctttcttctggcacctccaaccccacagtcattgcagccctgagccctgttacctgctctcccaacctactgtttcctagttcgtgccttcatctcttgttcattgaaaacatgctgtgtggcactcatgaacctatgctttggggatggcaaattatgtctttgcttgataacccccagaagcagatcctgatgtatgttcaatggtgggtggttcatttgggggctgatttcaggagatactggcaggggctagacctcggtgggctggagccagctcttattgactcagtggagctgattgtgtccatctcttccgaataccattttcaatgatgtcatgtgggcagcttggcattggctacaatgggaatattgacaccacagaagttggccagtggctgcaaaacagggcttttctcccccttcgagatttggttgttaaacatttctcagcatgtcactgggagcagggaattgagacagggaatkgggggcagttgatcaagtgtgctttatcaagagagttacacagtagacaactggagcttgatcccactgggaagaatctagaatccagcttagaacatacacctcaaagtcatcccactggtgcggcaaggaagccttcaggcagctagaggcagagtggctgggggtgcaggcggggctgaacaagtgatggctgatcagggcagcgggcatgcagcgtcggcagaggctgaaacccagctgtgaatgatgtgtggttattgtctttgtctccccagagcttgacctcatggacctcgtaggggaagacagaaagtggatgatggcgaggaagctgatgcaggtgaacgacactctgacttccgaagatgccggactccggaacagcaagaactgcaccgaaccaggtaacagtgctga

SEQ ID NO: 88453 - DNA, 1423 bp, Homo sapiens
catatatgtgcctcccacccttccctattgctgatgacttccctgaggcttgctgtggctctacttttctgcccgaggttcctccactcacatttgcagcatttctaatctgccacatggatgtccaaggtgatgcccagaaaaaggccttgggcaatgacaggaaggtgctagaagctgcactgtgccagctggcattgaagaggtcagaaccaagtaatatgggtcgagcaccacggcatctgcctatctacacggtacctaaagagagagtcatgctgtggccagcaacgtggccattccactgttctctgggtcaaggagaaatgctttgtggtactgtaatcttaatgctcaggaagaccccaaagatttaaaaagaagcaggagtatcccttccaatgacttccaaagttcctccctttccgtgctctgtaggctcttcaaactcagcatgccccaaacagaatgcactgcactggccccttcagtgtgctctttagcctgtgttctttcttctggcacctccaaccccacagtcattgcagccctgagccctgttacctgctctcccaacctactgtttcctagttcgtgccttcatctcttgttcattgaaaacatgctgtgtggcactcatgaacctatgctttggggatggcaaattatgtctttgcttgataacccccagaagcagatcctgatgtatgttcaatggtgggtggttcatttgggggctgatttcaggagatactggcaggggctagacctcggtgggctggagccagctcttattgactcagtggagctgattgtgtccatctcttccgaataccattttcaatgatgtcatgtgggcagcttggcattggctacaatgggaatattgacaccacagaagttggccagtggctgcaaaacagggcttttctcccccttcgagatttggttgttaaacatttctcagcatgtcactgggagcagggaattgagacagggaatggggggcagttgatcaagtgtgctttatcaagagagttacacagtagacaactggagcttgatcccactgggaagaatctagaatccagcttagaacatacacctcaaagtcatcccactggtgcggcaaggaagccttcaggcagctagaggcagagtggctgggggtgcaggcggggctgaacaagtgatggctgatcagggcagcgggcatgcagcgtcggcagaggctgaaacccagctgtgaatgatgtgtggttattgtctttgtctccccagagcttgacctcatggacctcrtaggggaagacagaaagtggatgatggcgaggaagctgatgcaggtgaacgacactctgacttccgaagatgccggactccggaacagcaagaactgcaccgaaccaggtaacagtgctga

SEQ ID NO: 88454 - DNA, 1246 bp, Homo sapiens
actaggcagctctgctgatcttggctgagtctactcacatgtcttggagtgttttggctgacaggtgatctagtcaggctttggctctgttgcatgtccctctcatcctttaggaggctatcttgtacaggttctcatggagagggcagaggcacaagagagcaaatggaaacatgcaagacctcagaaggtttaggctttgaactaacacatgccacttgtccaagcaggtcacatgattaaacccagaatcagagtgagagggggccacatgaagcaaagggcctaaatacagggaatatgaagaatcagagtcatcattgcaacccatgttcacayacaaaaagaagaatgctgatgacttttgtcatggtcttctttttcctgacctaaggagacacaaacttcagcttaagattggtctcctgatttgtgatacaatgagaatggggaaatggtatctgttttcctggaggaggctaagaccttatcccaagtctcatctcaagatggtgatttgggaattgtcaacgtattaagctcaagtttattgtactggttggcctggagtctacaccacatcccaggtaggaggagtttcactgaaaattttgagaaaagccctttgtcctttcatgcaacccgcctagtatctttctttgtatcactgtggactttattatcaacctcttgtcattcattcagtcattaaacaaatactgagtgcatcccatatactagactttaggaacatagtctagtatgtagtgagtccagtaccagccaatgacaagataaacatgcaagacaaacaactttacaataacatcattgtcttgaaggataaaagagtgtggtgggaccagagcagaattacacctaagtcatcttgagagcatccacatagacttcatagcctccacatagacttcatagacctcaaagcttttgagtaaaacttcaaagcaaattggagctttctaggtgaataagcagaaagattttcctagcagtgatatcaaagagtgtagaataaggagatattcaagaccatggcttattgggggaaagtacaagttcagtgttgctggagcatcaggtgagggagtggcaggagacaaagcaggacaggagaactgaggccaggcaatcaagaccttgcatgccttgcaagagagtttggattctattctattacatcggtcatatgtgatgatgaaccattggaaatatttaattagaatgc

SEQ ID NO: 88455 - DNA, 600 bp, Homo sapiens
cctggaacaggtaaaacccttcagggaatatggaggcctgtgcatctcttctgatgctgttttctcatccccctcaaagcactaaacaaggtttcctttcagagcccatttttctgatgggtgatgctcagggatttccagcatccccagtctctctctccatgtgctcacttgagcacctctttaatagaaaacaccctggattagggtctgagagctcgggatcatggcctggcatcatcagcacctaacatggagccctcagtgtattgtctagcttctctcaaactcgctatcttcatttattttttaaaaagtttcatagatgttttaaaaccctgactttgggaaccacagaaccctgaattaagagtccagtttttccaaatcttttgytcaggatcacatgaaaaactttagctaccattcaaaactacaggtgctgagaggtaagcaggagatgggaaaatgcagcctaccatcactcttctggaagccagcagagttcttagctcaggacaggtggggccttgtgaagggctgggtaagcaaatggatggaggaaatgaccctcaaaaggtgtatgtgcctggttaacgt

SEQ ID NO: 88456 - DNA, 1417 bp, Homo sapiens
aacctccgcctccccccaggttcaagcgattctcttgcctcagcctcccaagtagctggtactacaggtgcaagccaccatgcccgactcatttttgtattttcagtagagattgggtttcaccatgttggccgggctggtctcgaactcctggcctcaagtgacctgcccgccttggcctcccaaagtgctaggattacgggcaggggccacagcgccctgctgcctccttgtagtcttgagctgcattgtcagactcagcaggggcatcatcattcctggaaaatccactcgaggctcaggacagtaacctctttctccagaaaatctggtaattctgtcatctgacaacaaaacaaacacaactttgttcttgtattatttccatgcaagaaattataaaacacatttggtctcctcttcaaaggacaccaaaagcagtttgtgtaaattcctatcctttcttccccaagtgctgaggtgctactgggagagctgaagtgctttgcccaaactcactmcctgatattccctaggatgtaagctccatgtgatgaggcaatactgtggtggtgttctgactttttatttttttaagtatgctattttatctgctagctgtgtgcagttaatctgcacagacacatctccttgtctgtggttgtcaggcctgagtcctgcgtcttgtccttcctaggaggagcctgttgggccctccagcaccgggagacatgcatggcaggcattttcctggggtgtcccaggatcccagtcttttacttcccctgctgtcctccgtgccctcctgctcctggccctggtgatccccagcagagccgaggagccagtggccctgctctcagaggcttctacagtctccctcagccctgcgggagacctccaggggtggagatgggcaggggcgtagcgtcatccagggtggggtgggctcagctaattggttccctccccccttgtctggtgcacttggcctctgaggggagcccaggaggaaaggacccagccttctttcctgtcacctgcccagccagcgcaggagcatgcgtgtttgtggcaaggatcaggagctgggcagggcaaggctagggctgtggggtggtgctcttgcattgcagggcattgaggaagaaaacaccagcttgtactatggggtagagggccgtgaattggaggggaaagaacagatcttaagactgtgtgttcttcataatgcccaagacatttaagtgatagatttggattatttttaaatgactgttcttgtgattggtgggttgtgttcatttggccaccccgttctttgggactgaaagttcctggctcggacactatgatgtcacatgtgcattttccttctcggtgcttccattaataagactatttaaaacctccaacc

SEQ ID NO: 88457 - DNA, 557 bp, Homo sapiens
ggcatctgcaggggccattgttgtaactggcactagaagaataccatgggagaggaggaagcagaggaccctggctgctctggctctgcagtgtctgatgtgatgcttgaaaacaagaaggcagagcagcatgcccacactcacggagacagcagcagtctctggagccttcagcaggcccagggtccctcctacatctgtggcagcgcttctgaggaggggcagccatgagcagggtgtcctagggctgctctgagctgagtcccaaaggctgagagcagatgtcatggctgagaactcccagcagagcggacamcactgggtgaggcacaaaggagaggacatcctccaatgatgtcttctcccaggtctccctctttaggcatggagagattacaaaagagaaaaaaggaggggaggaggagggtgaaagacctttgtagacaaaatgggaaatttttagtaaaggttaaatacatgaagcctaagctaccctgattattgactttccagaacttactaaaaaaccaatgctcagctccagttcttcttgaaaa

SEQ ID NO: 88458 - DNA, 557 bp, Homo sapiens
ggcatctgcaggggccattgttgtaactggcactagaagaataccatgggagaggaggaagcagaggaccctggctgctctggctctgcagtgtctgatgtgatgcttgaaaacaagaaggcagagcagcatgcccacactcacggagacagcagcagtctctggagccttcagcaggcccagggtccctcctacatctgtggcagcgcttctgaggaggggcagccatgagcagggtgtcctagggctgctctgagctgagtcccaaaggctgagagcagatgtcatggctgagaactcccagcagagcggacaccactgggtgaggcacaaaggagaggacatcctccaatgatgtcttctcccaggtctccctctttaggcatggagagattacaaaagagaaaaaaggaggggaggaggagggtgaaagacctttgtagacaaaatgggaaatttttagtaaaggttaaatacatgaagcytaagctaccctgattattgactttccagaacttactaaaaaaccaatgctcagctccagttcttcttgaaaa

SEQ ID NO: 88459 - DNA, 714 bp, Homo sapiens
attctaaggatgtgatgaaatggcacagggtcagtaagtcattgtgatagccattgtagagttgatagttcagtgatattgaactgtgttctgggaatggttacttagcagcacagggacaaatatatagtgcagcagtgcaggagaactgcccagagataatggtacaaacaccatgatggtacaagtggcccttcctggaccacttgtcatgaccaggtcttggctaagcccttgctcctcttgatacctcttcaagtctcctttccagggttactgaatgtttttgagaatacattgttacccttactttctacttaagttaaaataagatctttttttttttttgccaccaagtgctttgactaatgtttcatttctaatattctcaagtttcattttgagaattttaattttagaatttctcatgcattgttctccacgctttgctcttttcttaaaagtctcttactcatctcttgaagttttatcaaaacctcatttaacactgggacagtaggatcgtgtttacattttatttggtatgctaaatatgtaaatttaattctgttcaatgaatctatttaaaaagtctatgtataccttttgaaatctctcatggtacttgagttttaaaatattaatagtattttaagaaaatcattctaaaatatttggacgcccatttatatgcaaaaaaaaaaawttttaatg

SEQ ID NO: 88460 - DNA, 1017 bp, Homo sapiens
tgcatatattattatgatagcttaataggaaagattcctgcatattataaaacttagatttatcaccaactctagttttatgacattgactagaaaggaaggaccagaaataatggttctctttagctttagattgggtgatttttaccatttatgtatattttatttgattggcataatatagtggagcacatgagcaggtcatgtacataattctctttttttwccctgaaggccaagcatataagaacataagagtgaagttctaaaagattttgtagataaatgattgcaataagatgactatcgatatttaggtatgttttaaaaggacagaaacttaatttgttgtttcttattgtattgtttctttaatatttacttaattgctttcattattaaatacctataattaattgattgcatgaagaaagcaagaaataagtgaataaaaaatatgtctataccaaatgacatatataaagtataaaacaatgatcagttagatcataaatattttagcttctgcagttcatacagtctctgttgcaactagtcaactctaccattttagagcaaaaacaggtatggataaagtataaacaagtgagtgtggctgtattccaataaaatattgtttactaaaatagtctacaggctgaatttatcccatgggtcatgctttgtcaagagctgatttaaggcatcaagggcagccctttattctcaaaataaataattagcttataggtattttaataatttgcaagacttcatgaaaggatcggctcagaggaaacacaattcacccaaactttctactgacaagtcatcagtatatagatggtgtacaggaccaagcaggcctttagactttctctcctccctgccactaaattccttttggccttgctgtattttatgagttattcttgtttccagcctaatacgaggaaaatgggtagatggcataagaggacattgaatgtactgaaggcagcccaaatattccatgca

SEQ ID NO: 88461 - DNA, 1017 bp, Homo sapiens
tgcatatattattatgatagcttaataggaaagattcctgcatattataaaacttagatttatcaccaactctagttttatgacattgactagaaaggaaggaccagaaataatggttctctttagctttagattgggtgatttttaccatttatgtatattttatttgattggcataatatagtggagcacatgagcaggtcatgtacataattctcttttttttmcctgaaggccaagcatataagaacataagagtgaagttctaaaagattttgtagataaatgattgcaataagatgactatcgatatttaggtatgttttaaaaggacagaaacttaatttgttgtttcttattgtattgtttctttaatatttacttaattgctttcattattaaatacctataattaattgattgcatgaagaaagcaagaaataagtgaataaaaaatatgtctataccaaatgacatatataaagtataaaacaatgatcagttagatcataaatattttagcttctgcagttcatacagtctctgttgcaactagtcaactctaccattttagagcaaaaacaggtatggataaagtataaacaagtgagtgtggctgtattccaataaaatattgtttactaaaatagtctacaggctgaatttatcccatgggtcatgctttgtcaagagctgatttaaggcatcaagggcagccctttattctcaaaataaataattagcttataggtattttaataatttgcaagacttcatgaaaggatcggctcagaggaaacacaattcacccaaactttctactgacaagtcatcagtatatagatggtgtacaggaccaagcaggcctttagactttctctcctccctgccactaaattccttttggccttgctgtattttatgagttattcttgtttccagcctaatacgaggaaaatgggtagatggcataagaggacattgaatgtactgaaggcagcccaaatattccatgca

SEQ ID NO: 88462 - DNA, 953 bp, Homo sapiens
atggtgtagcccctatggaaaacagtggcagttcctgaaagctgaacagaattactatatggcaattccactcctagatatatgtatctgtggtaatatgaaatatatttagccttttttcctggttcttatcacagcaactgaaaaacacttggaatttcctgtgtaatgggataatacgtgagttcatgacttagagkgggacccctagctagcctcaggatggggccagccaccagaaagaccaagtgatgagagggttggaactttcactcccacccaccagcctcctggagcagaggtggctggagataaagctctataaaaactcgtcaacaataagatttgatgagctcttcccaaaagctaaactgcccttataaaactagtgaaagaccctcaagtgaagaggatgagaggggcctgaattctaccaagacgtaggcctgttgagttcagaagcaagatggagtcagccatgtcagatttctcttactgtcacttttgcaaaggtagtttgatacacagaaacttgtatacaactggttttagcagaattattcataacagcccaaaggtggaaacaacccaaaatattcaacatataatggataaacaaattgtggtatatactgtcaacctaaataaacggaggccgtaaaagaaaatgatacctattcatgaatggggcattgcagtgggagtccatgtgccatactatgcgtattcagggaggtaaaggaagacagattaaaaggaaaaacaaggattatgtaattgtcttgggataactatccctaactccagggattaataacaagtcctggtggcaccagtctgaggttgaacaagcagaagtccttgcagaaatatttttgtatgtatataaggttgcagtggcctttgtgcaaggttgtgtttttacagtcttttgtagtagttttttttttttt

SEQ ID NO: 88463 - DNA, 624 bp, Homo sapiens
tccagccgtggaataaayagtttgcactgcctttgctgttgccggccacagaggaggattcccagccagggaggcgccccgccaactgcccacctaacccagggagacagcaggactcagcttgcaggaatgctctgaactgctcagtagcagaagatgttgaagtcaaatgcctcctctaccgtctcgtgggacggcgcaaagcttgggcttcacagcttatggaggcctggttcctgccccgagttcaacctctcgctagttgtgtgactttgggcagtcagttccccttctctgctcctcagctgtaaaatggggaggatgggaatattacgatgatggagggagatgctgcatgctcatcactagcagggtgatttccatgcacagggcctgggatggcggctatgaggctgtatggcatagtagccatgagagtgttgttggtattttaattacatagctcttaatcaaggtaagctcattctgaactaagcactttatacatattaatccacactctacaacaaccctttgagggagataagatactgctgtggttccccatttacagatgaaaaaactgaggcacagagagggcaaatgacatgtataaagtttaca

SEQ ID NO: 88464 - DNA, 628 bp, Homo sapiens
cagatccatgcagcactttcaggcttcctttctctgcagctttcagcttcaagacaccctgggactctgccctctcttggctttctagaaataccacactattctaattcctcagtctcatttccaaagtcatctctttcctctttgtgtccttttcctctcaaactatgagatatccagggcttgactttctgaccacttgctttctgcaggatacatgtgaaaataatttatatcaatatttctagacggawccactggctcctcccaggccatgtattgtcattcctgctatatctacttggaaatctcttcctagttgtctgtgccttctaccttacctgaaaaacacctgtcctttatttctcccccaaatctagagtcttccttgactgatgtgggaccccacagtctctacccctcacagttcaacaaaggagggagtacttgtccgttcataacatcacaatccaaaatgtgctccttgattgaatctggatttgaaaatatcagtgttaaaaatatttgagaacaagcggggaaatttgatagtggactggggtgtgtaagatgttattaaaggattattaggtttttttgagtaacatattggggtcatgtgggaaaa

SEQ ID NO: 88465 - DNA, 628 bp, Homo sapiens
cagatccatgcagcactttcaggcttcctttctctgcagctttcagcttcaagacaccctgggactctgccctctcttggctttctagaaataccacactattctaattcctcagtctcatttccaaagtcatctctttcctctttgtgtccttttcctctcaaactatgagatatccagggcttgactttctgaccacttgctttctgcaggatacatgtgaaaataatttatatcaatatttctagacggatccactggctcctcccaggccatgtattgtcattcctgctatatctacttggaaatctcttcctagttgtctgtgccttctaccttrcctgaaaaacacctgtcctttatttctcccccaaatctagagtcttccttgactgatgtgggaccccacagtctctacccctcacagttcaacaaaggagggagtacttgtccgttcataacatcacaatccaaaatgtgctccttgattgaatctggatttgaaaatatcagtgttaaaaatatttgagaacaagcggggaaatttgatagtggactggggtgtgtaagatgttattaaaggattattaggtttttttgagtaacatattggggtcatgtgggaaaa

SEQ ID NO: 88466 - DNA, 707 bp, Homo sapiens
tttgcaaagcagctgcatcatttcacagagctatttcataagagctctcctcggtgcttctaggtgtaattctaatgtgctgctggtgtgggtgaaaaacctcagtctgcctcatctcatctggaagtaaaataactgtagagcagatagaggcattgtatctgaaggagagaataattttagaacagaacattcgttcctttcaagttgtccttttcagcattgcacatctttcagctcttcctatgtagtcgaagcttaacctgagcaccagttaggggactagtcagtggaatgctggaggaagattcttcagtgcccacctacagcacaggctggctaccaagagttaagctgatctggaaaactgacctgtcatttaagcagagtgaggccacagatatgtaatccccacttctgaggacatgacatctcttcttgcgtcatcacttttttggtgctatctggtaaaaactgagtcatgaggtgccgacaaattcagtgyacttaacgtgaagcttgaggcattctgctcattcctgagatacctgcagctgtcagccctgccgtctagatggtaaacaacttgccgaggatgaaaccctgccactgtggtcttcctcggcttgtctgagcgagacctagaccgtgacggtgcacgcctacgagaatcggaggatgagggaggggctgcgaggtggcggcca

SEQ ID NO: 88467 - DNA, 712 bp, Homo sapiens
gaaggtgcatatttctgcttgggtttcacatctatctctctgtcgtagccacatagccatgtgtgctcgctcagggagtctataaaacccacgtgtacccatctctacccacagctctaattactccgtttccaacgttgctgtttgtcatcttccacagacttgtaaaatttactacaactccagaggggaaaatagtaaatctctggctaaatttaggtctagagctcatttgaacttttacagtgggttttctatttatttgatttactcctgtctttggcttcggtgtcatattgttggtgttttatggccggctcaggcctgcagtgggcggcgctgcgtgcgcccgcacgtttctcttgcaggcgcggcccaaacagccgcgctcatttatttagtgttggaggacgcggtttgtcccgttgacagygtaatttaaagaaatatatggaaggctgaaaaatcatttgctcaaatttgtccagatgtttttgagacgtgattggaatttgattgcccctttccgcagggtcaaaaaatattaatgtcccagaactttaattgcttacagaccctggtttgggctttgaagatttaaaatgtttgactctaagcatttgttctccccagttcagaatgtcttttttggcactttggtaatgagtacaaacttaaggaaagactttacccatctctcccaatgatcaaa

SEQ ID NO: 88468 - DNA, 751 bp, Homo sapiens
cttttatattgacaacagtctggttatacaaagattttcagtgccctacacttggaagaaagaaaggagggaaaggcagaaactagctccctcccccaatactgcaggtaaacaggtttttgctttgaatggaatcagcattctctagaataaacagtttcttgccctgggccatggaaggctccagcaatctgcttcagtgccagggacaggcttgtggccgaggggcctaaatctttcagggctttttgcgcctgatcaccaagaggttggagaggtgggaggggcgcgggggaaacagctcaaaagaaatgccaggtaagagctcaatattatgaagtattaaaaatcaacygctaaagcctagcgaatgtcccaaagcgagtccaggcggtcctggaatggaggggagaaaggctgaagtcgggggaaggcaaggctttggggtggaaggggtgcattacctccccacccccgctttcctttcagtcccagctgctcgagaagggagggcgctgggaaaggaaacagagcggaatcgcccacattagcctcgctcttcggtgacccggcgcctctgggcttgtgtgagcgtctcctttctaatgccaatgacaacgacactgagggtgattttctgtgcctcgcccacccctttgcaggcaactttgtaaagaatttacggatctactggcgcaggaccggacaccgatagggaacagccgacccagccccatcctggagccgggga

SEQ ID NO: 88469 - DNA, 752 bp, Homo sapiens
aagaaaaaattgctgtaaggatttattggagaaattgatgaaatttaaatataatcagtatattagaaaataatgttgcacaagtgttttctagttttgataattgtaccttgataaagtgacatgatatgtgcaacttaatcttttttaaaattattattatttttgagactggatctcattctgttgcccaggctggagtacagtggtatgatcatagctcactgcagtctcgatctacaaggctcaaccatcctcccaccttagcctgccaagtggctgggactacagacctgcactaccacgcctggctratttttcaaatttttagtagagatgacgtctcgctatgttgcccagattggtcttgaactcctgagctcaagcaattatcctgccttggcttttcaaattgttggggttacaggtgtgagccactgcacctggcaaaattaatattacttttgattgacaaatcataatcgtatgtatttatagggtaaaatgtaatgcatatatatgtatatatatacacacacacacagggtagagcttatttttaaatattttaggagaacatgagagaaggagaaagaaaggaaggaaggtaacaaaatgaggtaaaatggtgaatctgtgtgaatatgggaatgatttcttccgaaaccacttgtgtaagtttgataatgtttctacattaaaatgttgtaaaaagtggaaaaagcattgtttttttcggagagaatttcctg

SEQ ID NO: 88470 - DNA, 709 bp, Homo sapiens
aagtaatttactttattgttacttcctgtgttttgctatcaacaaccccccatgacatcagcggctcttggttaaaagctgctcacggattccttgacaggcttttgctgtttaattgtttcaggctcacttaaatacgtcatatgcacatgcctcccagtgatttcattgggttttcccatgaaaaaggtcctagatctaaactaaaatcttcaaaaacacacctgttttaaaaagtagcaggtttagaatttagctagaggaaaaaatgtgaaaatgcacagaacccatggggctctcttgaattctttactgtcaagatttcatcataacataggacgcagctgggtagtacagtgggactaagaaatttaggattgagaagggagaacatggggttttttctgcctctatataaacgttctgatccctgtcttattctctgacaactaaggattgtccaattgtccaagcctccaccaaagagtgatttctgccatatttgagtcagtgctgtagcagcatcggtsagaacatagccattagcaggaactgtcacaaatgtgggggcagcaacatggtaagagagagtctcccttcagcagcagtagttccttggggtctccataaacatagcctcctatcaggttggcttacagattgccatagtgtttacagattgtcctgaaagtgaaatgtcatgtgagtg

SEQ ID NO: 88471 - DNA, 651 bp, Homo sapiens
ttttaaagaagtggccaggcacagtggctgaagcctgtaatcccagcactttgggaggccaaggcaggagaatcacttgaggccaggagttcaagatcagcctgggcaacatagtgagactcttgtttctacaaaaaaatgaaaaattagccaggtgtggtggtatgcgcctgtagtcccagctacttgggagtccgaggcaggaggattgcttgaccaggaaagttgaggctacagtgaacagggattgcamcactgcactccagcctggatggcagagtaagaccctatctctaaaaaaaaagataaagaaacgaaggggagggaagggaagggaaagaaggggaaagaaagggagggaaggaaggaagaaagagaaagaaggaaagcaaaagagagacagtgagacagaggggaagggaaggggaggggaaggagaggggaaggagagagcaaggagaggggagaggaggggaggagagggaagggaagggaaacatagtctatggagtcgaacagatggcttttgaatcatggatctgtgaaaggaggggaaggaagggagaaaagaagaaaagagaaaggtaggaaggaaggaaaggaaaagaaaaagaaagaaagaaagagacatagtctatggagtcaaacaga

SEQ ID NO: 88472 - DNA, 1032 bp, Homo sapiens
tgtgcacacrtgtgcatacacacatatgacaggaggacggagagacactaaacttcattcctaactactgtatgttgagaggaggcctaatgaaaacctctatcacacccacatatttatgctagcttaataaattttaaagtgcttggaaatttttagatgattactttttctcatattctgatatcccccattcctttgctatcattcataagggcagatgtagacaaaattaaagaatttaattaagcctctccatatcctgaaagagaaatatttctcattttgcttagtcacaaaaaaagggagaaaaaaagaattcctgtgtgaaattaatggtgctaacgagacatgcctgaataagaaacttcacataagattacgattgacctggagactgtgttgaaagaaacctagctaaattcacatctattaatgccagactgcaggccaaaatttgttgatttaatttcttggcagttacccaagacaggtaaaaggatataggcagagcctaagaaccagattctcctacttcttcactgaacactgaaatatataaaggtcccaactgaaagaataaaaattagttgaaaatagtatggaaattatgttgctatgtgttaagaagctactaactggccaggcacagtggttcaggcctgtaattccagccctttgggaggcagaagtgggaggatcacttgagcccaggaattcgagaccagcctgagcaacatgtgagaccgtgtctctataaaaagttttaaaaatgggagactgaggcaggaggatggatggcttgagcctaggaggtggaggctgcagtgatccatgattgctctactgcactcaagcctgggccacagatggagatgctagtaaccaagacttcctttacaaaagaccccttagggaaacatcatatttgataaaggattttaataggacataagtattaataagaatcacttaggaatggtactgttaaagggtccagatctcaagtcctaatacaaggaaaagcctcac

SEQ ID NO: 88473 - DNA, 1032 bp, Homo sapiens
tgtgcacacgtgtgcatacacacatatgacaggaggacggagagacactaaacttcattcctaactactgtatgttgagaggaggcctaatgaaaacctctatcacacccacatatttatgctagcttaataaattttaaagtgcttggaaatttttagatgattactttttctcatattctgatatcccccattcctttgctatcattcataagggcagatgtagacaaaattaaagaatttaattaagcctctccatatcctgaaagagaaatatttctcattttgcttagtcacaaaaaaagggagaaaaaaagaattcctgtgtgaaattaatggtgctaacgagacatgcctgaataagaaacttcacataagattacgattgacctggagactgtgttgaaagaaacctagctaaattcacatctattaatgccagactgcaggccaaaatttgttgatttaatttcttggcagttacccaagacaggtaaaaggatataggcagagcctaagaaccagattctcctacttcttcactgaacactgaaatatataaaggtcccaactgaaagaataaaaattagttgaaaatagtatggaaattatgttgctatgtgttaagaagctactaactggccaggcacagtggttcaggcctgtaattccagccctttgggaggcagaagtgggaggrtcacttgagcccaggaattcgagaccagcctgagcaacatgtgagaccgtgtctctataaaaagttttaaaaatgggagactgaggcaggaggatggatggcttgagcctaggaggtggaggctgcagtgatccatgattgctctactgcactcaagcctgggccacagatggagatgctagtaaccaagacttcctttacaaaagaccccttagggaaacatcatatttgataaaggattttaataggacataagtattaataagaatcacttaggaatggtactgttaaagggtccagatctcaagtcctaatacaaggaaaagcctcac

SEQ ID NO: 88474 - DNA, 533 bp, Homo sapiens
ctttacaaacaatcctgcaagttagatattactattattcccattatataaatackggtactgagacttaaagaagttaagtggcttgtctaatattcttagctagtacaaatcagagcccagtctctctgattccaaaactcaccagctatgctaaagcaaaaatcaaaaggtagtagggaagggtatctaaaagtcattctgagagataattaaaaataaataatgtttgctgtcacttatctcttttaccttctttaatatcccttggcatcctctccttcaacattcaactattgactaacacaactaaaacctaaggaggaagtccagtatgtttgaaagaacccacatgtctgagcatgcaggcgaaggactgtgttttaaaatagcagggataatctaagattaggtattggtgtcaaacacacttctcttatctattagtacagatgaccaccagttttcagtaacaaaagatatggtaataagaaaaaacaaatccacagaaaaggaaaaaaacaagcttgtct

SEQ ID NO: 88475 - DNA, 533 bp, Homo sapiens
ctttacaaacaatcctgcaagttagatattactattattcccattatataaatacggrtactgagacttaaagaagttaagtggcttgtctaatattcttagctagtacaaatcagagcccagtctctctgattccaaaactcaccagctatgctaaagcaaaaatcaaaaggtagtagggaagggtatctaaaagtcattctgagagataattaaaaataaataatgtttgctgtcacttatctcttttaccttctttaatatcccttggcatcctctccttcaacattcaactattgactaacacaactaaaacctaaggaggaagtccagtatgtttgaaagaacccacatgtctgagcatgcaggcgaaggactgtgttttaaaatagcagggataatctaagattaggtattggtgtcaaacacacttctcttatctattagtacagatgaccaccagttttcagtaacaaaagatatggtaataagaaaaaacaaatccacagaaaaggaaaaaaacaagcttgtct

SEQ ID NO: 88476 - DNA, 829 bp, Homo sapiens
aaacagaagtccgaaaatgctggatttcgcaaatttcttttaagacaaaacaaacaactttactaaccttataccatagcagctttcttctctgtactaagtgaggccagcaagtaggaggcatttccaagggggaaaaatgaccacaggatctagccaaagcaacctgtctctaatactctcaaaaaacaaacaaacaaaaacaaacactttgatttcccagattcactctgcagtgattctaaaactttcctaatgtaagaatcacctggctatttcttgaacacacaaattcccagatgacaytccagatgcactgaatcagaatctccatgagaacacctgagctattcttatcataagagaggttagggaaacactgcttgataaatgttattctcccaccagtgcccacctgtgcagggaggtatgaaacaagtagggctaagatgctttacctgagcaatcaccccagacatgctcctcactgggtttgactccttttatggagagctgggtgtcagctcagtaaagtctacagacaagcatctctttgggtccctatcacctgcacaggtctcaggactctgagacaaatttctgagtagatgtcaatgaggacaagtcatgaggagatggattacagctgaatataagaagatctttctaagaattagagctggccaaagatggaataaactgctgtggagagctgtctaccacaagagatgttcaagaagagagaaaatatggtacctcttgactagaatgttgtaaacatcagatccagcatgggatggacagaaagactagatgaattttaaagttc

SEQ ID NO: 88477 - DNA, 829 bp, Homo sapiens
aaacagaagtccgaaaatgctggatttcgcaaatttcttttaagacaaaacaaacaactttactaaccttataccatagcagctttcttctctgtactaagtgaggccagcaagtaggaggcatttccaagggggaaaaatgaccacaggatctagccaaagcaacctgtctctaatactctcaaaaaacaaacaaacaaaaacaaacactttgatttcccagattcactctgcagtgattctaaaactttcctaatgtaagaatcacctggctatttcttgaacacacaaattcccagatgacattccagatgcactgaatcagaatctccatgagaacacctgagctattcttatcataagagaggttagggaaacactgcttgataaatgttattctcccaccagtgcccacctgtgcagggaggtatgaaacaagtagggctaagatgctttacctgagcaatcaccycagacatgctcctcactgggtttgactccttttatggagagctgggtgtcagctcagtaaagtctacagacaagcatctctttgggtccctatcacctgcacaggtctcaggactctgagacaaatttctgagtagatgtcaatgaggacaagtcatgaggagatggattacagctgaatataagaagatctttctaagaattagagctggccaaagatggaataaactgctgtggagagctgtctaccacaagagatgttcaagaagagagaaaatatggtacctcttgactagaatgttgtaaacatcagatccagcatgggatggacagaaagactagatgaattttaaagttc

SEQ ID NO: 88478 - DNA, 603 bp, Homo sapiens
aggctcctcagcatgagaataggacactgtgagagatattcttcaggaggcatgaaggctgatcaccatagagattccttggtttttgtcccagaaactgtgggtaaaattccctattctggtagatcgttatcccaatatcatttgtcccaagtttgtgcaaatggttatgccatatttttccaatcgatttaaagsaattgcccccaaatggttgctaggagaaaaactgcactattcagccctgtctcatcaaatactcagattgttcatggtagcgaggatttcagacgctgaaattagagtgaaggatgaaatctacaagatctacaaaattgagacaaaatcagagttgtgtgaatttgtcacatctgcccaggtccaatgtcatgagagtaggattagggcgccacaggcatggcctgagactaggaagagagccttgctcactgacccatcccttgtctgggcttccaagtggaactagagtttcattcaacctacatgtgcctataggtcctccctgtggcaatgacatctctcagctcagtaagggccacttgcagtaggaatatgaccctaaccagaagactcagtggatcc

SEQ ID NO: 88479 - DNA, 603 bp, Homo sapiens
aggctcctcagcatgagaataggacactgtgagagatattcttcaggaggcatgaaggctgatcaccatagagattccttggtttttgtcccagaaactgtgggtaaaattccctattctggtagatcgttatcccaatatcatttgtcccaagtttgtgcaaatggttatgccatatttttccaatcgatttaaaggaattgcccccaaatggttgctaggagaraaactgcactattcagccctgtctcatcaaatactcagattgttcatggtagcgaggatttcagacgctgaaattagagtgaaggatgaaatctacaagatctacaaaattgagacaaaatcagagttgtgtgaatttgtcacatctgcccaggtccaatgtcatgagagtaggattagggcgccacaggcatggcctgagactaggaagagagccttgctcactgacccatcccttgtctgggcttccaagtggaactagagtttcattcaacctacatgtgcctataggtcctccctgtggcaatgacatctctcagctcagtaagggccacttgcagtaggaatatgaccctaaccagaagactcagtggatcc

SEQ ID NO: 88480 - DNA, 603 bp, Homo sapiens
aggctcctcagcatgagaataggacactgtgagagatattcttcaggaggcatgaaggctgatcaccatagagattccttggtttttgtcccagaaactgtgggtaaaattccctattctggtagatcgttatcccaatatcatttgtcccaagtttgtgcaaatggttatgccatatttttccaatcgatttaaaggaattgcccccaaatggttgctaggagaaaaactgcactwttcagccctgtctcatcaaatactcagattgttcatggtagcgaggatttcagacgctgaaattagagtgaaggatgaaatctacaagatctacaaaattgagacaaaatcagagttgtgtgaatttgtcacatctgcccaggtccaatgtcatgagagtaggattagggcgccacaggcatggcctgagactaggaagagagccttgctcactgacccatcccttgtctgggcttccaagtggaactagagtttcattcaacctacatgtgcctataggtcctccctgtggcaatgacatctctcagctcagtaagggccacttgcagtaggaatatgaccctaaccagaagactcagtggatcc

SEQ ID NO: 88481 - DNA, 603 bp, Homo sapiens
aggctcctcagcatgagaataggacactgtgagagatattcttcaggaggcatgaaggctgatcaccatagagattccttggtttttgtcccagaaactgtgggtaaaattccctattctggtagatcgttatcccaatatcatttgtcccaagtttgtgcaaatggttatgccatatttttccaatcgatttaaaggaattgcccccaaatggttgctaggagaaaaactgcactattmagccctgtctcatcaaatactcagattgttcatggtagcgaggatttcagacgctgaaattagagtgaaggatgaaatctacaagatctacaaaattgagacaaaatcagagttgtgtgaatttgtcacatctgcccaggtccaatgtcatgagagtaggattagggcgccacaggcatggcctgagactaggaagagagccttgctcactgacccatcccttgtctgggcttccaagtggaactagagtttcattcaacctacatgtgcctataggtcctccctgtggcaatgacatctctcagctcagtaagggccacttgcagtaggaatatgaccctaaccagaagactcagtggatcc

SEQ ID NO: 88482 - DNA, 603 bp, Homo sapiens
aggctcctcagcatgagaataggacactgtgagagatattcttcaggaggcatgaaggctgatcaccatagagattccttggtttttgtcccagaaactgtgggtaaaattccctattctggtagatcgttatcccaatatcatttgtcccaagtttgtgcaaatggttatgccatatttttccaatcgatttaaaggaattgcccccaaatggttgctaggagaaaaactgcactattcagccctgtctcatcaaatactcagattgttcatggtagcgaggatttcagacgctgaaattagagtgaaggatgaaatctacaagatctasaaaattgagacaaaatcagagttgtgtgaatttgtcacatctgcccaggtccaatgtcatgagagtaggattagggcgccacaggcatggcctgagactaggaagagagccttgctcactgacccatcccttgtctgggcttccaagtggaactagagtttcattcaacctacatgtgcctataggtcctccctgtggcaatgacatctctcagctcagtaagggccacttgcagtaggaatatgaccctaaccagaagactcagtggatcc

SEQ ID NO: 88483 - DNA, 609 bp, Homo sapiens
gtggatccttatcaccttcatagaaaggtactcacctcccacgtcaagagaaaagccaacatgtttttcctccaatgcataaaaggaacttccatagggctggcaggagtcaggctgttcaagacaactggaaggagttgaataacatctatccagtgagtcctgcaagacttcaggctctactacctccagsagctccctgctgagcctggaaaaggaggaaaaagtaaagaataagccaggggaaatcagacacaacagagccccaactaggtttcatgggtagcatagggaagtggttaaaaaactaaaaggatagatccattaatgaggtaacaaattattgccttcatgttgggacagaacagggccaaatggaaaagaatgaaagagaaagacagatagacacacacacacacacacacacacacacacacacacacacacacacagagagagagagaacgagctcagtgaattgtccaggtgacgcactgatgagggagtaacaggacactctgagttagtgccctcaggacacacagcatacagggatcatgaaaagactgtgctcaataattttccataaaatgtgctcaagtttccatg

SEQ ID NO: 88484 - DNA, 609 bp, Homo sapiens
gtggatccttatcaccttcatagaaaggtactcacctcccacgtcaagagaaaagccaacatgtttttcctccaatgcataaaaggaacttccatagggctggcaggagtcaggctgttcaagacaactggaaggagttgaataacatctatccagtgagtcctgcaagacttcaggctctactacctccagcagctccctgctgagcctggaaaaggaggaaaaagtaaagaataagccaggkgaaatcagacacaacagagccccaactaggtttcatgggtagcatagggaagtggttaaaaaactaaaaggatagatccattaatgaggtaacaaattattgccttcatgttgggacagaacagggccaaatggaaaagaatgaaagagaaagacagatagacacacacacacacacacacacacacacacacacacacacacacacagagagagagagaacgagctcagtgaattgtccaggtgacgcactgatgagggagtaacaggacactctgagttagtgccctcaggacacacagcatacagggatcatgaaaagactgtgctcaataattttccataaaatgtgctcaagtttccatg

SEQ ID NO: 88485 - DNA, 609 bp, Homo sapiens
gtggatccttatcaccttcatagaaaggtactcacctcccacgtcaagagaaaagccaacatgtttttcctccaatgcataaaaggaacttccatagggctggcaggagtcaggctgttcaagacaactggaaggagttgaataacatctatccagtgagtcctgcaagacttcaggctctactacctccagcagctccctgctgagcctggaaaaggaggaaaaagtaaagaataagccaggggaaatcagacacaacagagccccaactaggtttcatgggtagcatagggaagtggttaaaaaactaaaaggatagatccattaatgaggtaacaaattattgccttcatgttgggacagaacagggccaaatggaaaagaatgaaagagaaagacagatagacacacacacacacacacacacacacacacacacacacacacacacagagagagagagaacgagctcagtgaattgtccaggtgacrcactgatgagggagtaacaggacactctgagttagtgccctcaggacacacagcatacagggatcatgaaaagactgtgctcaataattttccataaaatgtgctcaagtttccatg

SEQ ID NO: 88486 - DNA, 1596 bp, Homo sapiens
tccttcaccacaaaaacaaggttcgaggtgcctcaactcagagctgaaagcactgccagtagctcagactctgataagagtgaggyagaatgtggccagcgtgccaggtaaccgtctgcagttgcaataacagaattagaaggtgggggtgtcatggaatcttaggagctctgcattccaattgcccaggctttgctgaaacacaggcaccctactctcacctgagggtcaccaccaatggggatcattccttcagcattcactctcagtattcgtgtacccttgtgacaatgccacagacccgtgtctttcccaatacatctaagcatattcctcactgtttatctcttgtctgtacaacatcatcaaggcagaaacagtttcccaacaggttatattttcttaatggtagtcatgaagtcaccccacctgctctcagttaaaacagagcttaaggcttttccacaggtgtaagatatcaaacttttagcctgccctgatatcctccgggtcttctgcagttttttctgtatccactagaaagtgaatgaataattcatttttttaaaatattttctttcctgtctcagtattcttgctgctgcatcccattgttagattgatttcttctttcttactggggcaccttcttgggttttcattacattctagaccagtttgacatccctacgtccaaagctcttcctctatgtgggttgatttgttttttaatgtcactgagcactacattttatacttgtcacttatagatgtcattctagtgccccaagacctcttttcaaggtatcaagtgatcaaagtcatttatatagaggtctcctgaaaacatgtgtgaccatctatcttgggaagttttgtaaacctgatgctattttgttgtttccattttgttttcccatatactgaaaagaacagggccacgagcagttcttatggaatatggtttgatatatattttgttgagatgacctaacaccattgattttgggttgcattccactaacagaacatggcaagatcaaggttatggtcagggttggttggcgatcctcagtgttgctgtgcagtagaaggtgagtttgaggtgagaggaacaagtaggaaagagtgatcccctgaaccacctcttcgctttctcagctttcatccccacctaggttttgtgagcctggaacttgagagactgttctgtagcccaggtctcctaagattggctgctggacttgcctgagttgagggtgcagtgggttgaccctgggctgcccagcattcatgtggaagtgaaggaaggaggactggttaatcccatttgaaagcatccctctctgcagcccgcaccatcttccagtgacactgtaaggatactgctttgagatgtatcaaaggctttaagtcaatgtattttctagggtctgggagacctgacattctgtgtcagaatgaaaatctgtcaagtttctaaatgaaaaaactgcaggttcacaaagtgtcatgggttacttgaggtcacaaagggatgagttttcagcactgccaataaaagcaatcacaataattattcagtaattattcata

SEQ ID NO: 88487 - DNA, 1596 bp, Homo sapiens
tccttcaccacaaaaacaaggttcgaggtgcctcaactcagagctgaaagcactgccagtagctcagactctgataagagtgaggcagawtgtggccagcgtgccaggtaaccgtctgcagttgcaataacagaattagaaggtgggggtgtcatggaatcttaggagctctgcattccaattgcccaggctttgctgaaacacaggcaccctactctcacctgagggtcaccaccaatggggatcattccttcagcattcactctcagtattcgtgtacccttgtgacaatgccacagacccgtgtctttcccaatacatctaagcatattcctcactgtttatctcttgtctgtacaacatcatcaaggcagaaacagtttcccaacaggttatattttcttaatggtagtcatgaagtcaccccacctgctctcagttaaaacagagcttaaggcttttccacaggtgtaagatatcaaacttttagcctgccctgatatcctccgggtcttctgcagttttttctgtatccactagaaagtgaatgaataattcatttttttaaaatattttctttcctgtctcagtattcttgctgctgcatcccattgttagattgatttcttctttcttactggggcaccttcttgggttttcattacattctagaccagtttgacatccctacgtccaaagctcttcctctatgtgggttgatttgttttttaatgtcactgagcactacattttatacttgtcacttatagatgtcattctagtgccccaagacctcttttcaaggtatcaagtgatcaaagtcatttatatagaggtctcctgaaaacatgtgtgaccatctatcttgggaagttttgtaaacctgatgctattttgttgtttccattttgttttcccatatactgaaaagaacagggccacgagcagttcttatggaatatggtttgatatatattttgttgagatgacctaacaccattgattttgggttgcattccactaacagaacatggcaagatcaaggttatggtcagggttggttggcgatcctcagtgttgctgtgcagtagaaggtgagtttgaggtgagaggaacaagtaggaaagagtgatcccctgaaccacctcttcgctttctcagctttcatccccacctaggttttgtgagcctggaacttgagagactgttctgtagcccaggtctcctaagattggctgctggacttgcctgagttgagggtgcagtgggttgaccctgggctgcccagcattcatgtggaagtgaaggaaggaggactggttaatcccatttgaaagcatccctctctgcagcccgcaccatcttccagtgacactgtaaggatactgctttgagatgtatcaaaggctttaagtcaatgtattttctagggtctgggagacctgacattctgtgtcagaatgaaaatctgtcaagtttctaaatgaaaaaactgcaggttcacaaagtgtcatgggttacttgaggtcacaaagggatgagttttcagcactgccaataaaagcaatcacaataattattcagtaattattcata

SEQ ID NO: 88488 - DNA, 1596 bp, Homo sapiens
tccttcaccacaaaaacaaggttcgaggtgcctcaactcagagctgaaagcactgccagtagctcagactctgataagagtgaggcagaatgtggccagcgtgccaggtaaccgtctgcagttgcaataacagaattagaaggtgggggtgtcatggaatcttaggagcyctgcattccaattgcccaggctttgctgaaacacaggcaccctactctcacctgagggtcaccaccaatggggatcattccttcagcattcactctcagtattcgtgtacccttgtgacaatgccacagacccgtgtctttcccaatacatctaagcatattcctcactgtttatctcttgtctgtacaacatcatcaaggcagaaacagtttcccaacaggttatattttcttaatggtagtcatgaagtcaccccacctgctctcagttaaaacagagcttaaggcttttccacaggtgtaagatatcaaacttttagcctgccctgatatcctccgggtcttctgcagttttttctgtatccactagaaagtgaatgaataattcatttttttaaaatattttctttcctgtctcagtattcttgctgctgcatcccattgttagattgatttcttctttcttactggggcaccttcttgggttttcattacattctagaccagtttgacatccctacgtccaaagctcttcctctatgtgggttgatttgttttttaatgtcactgagcactacattttatacttgtcacttatagatgtcattctagtgccccaagacctcttttcaaggtatcaagtgatcaaagtcatttatatagaggtctcctgaaaacatgtgtgaccatctatcttgggaagttttgtaaacctgatgctattttgttgtttccattttgttttcccatatactgaaaagaacagggccacgagcagttcttatggaatatggtttgatatatattttgttgagatgacctaacaccattgattttgggttgcattccactaacagaacatggcaagatcaaggttatggtcagggttggttggcgatcctcagtgttgctgtgcagtagaaggtgagtttgaggtgagaggaacaagtaggaaagagtgatcccctgaaccacctcttcgctttctcagctttcatccccacctaggttttgtgagcctggaacttgagagactgttctgtagcccaggtctcctaagattggctgctggacttgcctgagttgagggtgcagtgggttgaccctgggctgcccagcattcatgtggaagtgaaggaaggaggactggttaatcccatttgaaagcatccctctctgcagcccgcaccatcttccagtgacactgtaaggatactgctttgagatgtatcaaaggctttaagtcaatgtattttctagggtctgggagacctgacattctgtgtcagaatgaaaatctgtcaagtttctaaatgaaaaaactgcaggttcacaaagtgtcatgggttacttgaggtcacaaagggatgagttttcagcactgccaataaaagcaatcacaataattattcagtaattattcata

SEQ ID NO: 88489 - DNA, 1596 bp, Homo sapiens
tccttcaccacaaaaacaaggttcgaggtgcctcaactcagagctgaaagcactgccagtagctcagactctgataagagtgaggcagaatgtggccagcgtgccaggtaaccgtctgcagttgcaataacagaattagaaggtgggggtgtcatggaatcttaggagctctgcattccaattgcccaggctttgctgaaacacaggcaccctastctcacctgagggtcaccaccaatggggatcattccttcagcattcactctcagtattcgtgtacccttgtgacaatgccacagacccgtgtctttcccaatacatctaagcatattcctcactgtttatctcttgtctgtacaacatcatcaaggcagaaacagtttcccaacaggttatattttcttaatggtagtcatgaagtcaccccacctgctctcagttaaaacagagcttaaggcttttccacaggtgtaagatatcaaacttttagcctgccctgatatcctccgggtcttctgcagttttttctgtatccactagaaagtgaatgaataattcatttttttaaaatattttctttcctgtctcagtattcttgctgctgcatcccattgttagattgatttcttctttcttactggggcaccttcttgggttttcattacattctagaccagtttgacatccctacgtccaaagctcttcctctatgtgggttgatttgttttttaatgtcactgagcactacattttatacttgtcacttatagatgtcattctagtgccccaagacctcttttcaaggtatcaagtgatcaaagtcatttatatagaggtctcctgaaaacatgtgtgaccatctatcttgggaagttttgtaaacctgatgctattttgttgtttccattttgttttcccatatactgaaaagaacagggccacgagcagttcttatggaatatggtttgatatatattttgttgagatgacctaacaccattgattttgggttgcattccactaacagaacatggcaagatcaaggttatggtcagggttggttggcgatcctcagtgttgctgtgcagtagaaggtgagtttgaggtgagaggaacaagtaggaaagagtgatcccctgaaccacctcttcgctttctcagctttcatccccacctaggttttgtgagcctggaacttgagagactgttctgtagcccaggtctcctaagattggctgctggacttgcctgagttgagggtgcagtgggttgaccctgggctgcccagcattcatgtggaagtgaaggaaggaggactggttaatcccatttgaaagcatccctctctgcagcccgcaccatcttccagtgacactgtaaggatactgctttgagatgtatcaaaggctttaagtcaatgtattttctagggtctgggagacctgacattctgtgtcagaatgaaaatctgtcaagtttctaaatgaaaaaactgcaggttcacaaagtgtcatgggttacttgaggtcacaaagggatgagttttcagcactgccaataaaagcaatcacaataattattcagtaattattcata

SEQ ID NO: 88490 - DNA, 927 bp, Homo sapiens
catcagcgccactcattgtctctcagtatggcctggacttgcccctgcatttaccctcatcctgctgagccatctccatgcactgcgcaattccatcagtgattcggggtcctcccaaggctccctgaaatgtgcacagggatcaggacgtcagacacattccagacacaaaggcaacccacactgtagagtgagcagctgtgttcccacttccctaatgttccagtgatgtcctcaaactgaagggaacactttccctttttaagggtctgttcttcatgtctcaatgcctctgatctagtgaacacaactgtcctgaaactgaaagaacctgctaaatttygagtttctggttaggtggctagaataggtttataagacttccttacttacctatgactgctgaagtttgaattcttagcagtatgattccttttcttgtaagctgagcagcttaggaaagattggccatgttgctgtgcaaaaagaggtaaacttaatttatactcaaagcatgcttgaatttgaaactagggcttccactcttccaaagttggattgtcactacctcaggcatgtgtcccgaagggctcatgtctctgttgtactcaaagttcaaatggagcccagcaagccagatctcctttacttctaagttccctcaacagtttctcctctgctttagagactgccttgaaaatattcttgtcctgctgttgtgttttggctttggaatgatgtgatgcagctcaatgggtcctacccccaagttgatcagagtaagaaacagctgggaaagtcagtgcaaattcaagttcatcatcctccttacagggattctgattcagagggctcaggtggggcctggaatgtgtttgttaacatgactcagatgtgcagtcagtttggggacccgctgataccatc

SEQ ID NO: 88491 - DNA, 781 bp, Homo sapiens
tttatttcccaacactagatgttagaaattcatctatgctaaaataagtagatttagtgtatttattttaacaactgtgtagtagttaaaacatatccccaatttgtttatccattaccaatgaataaacatttkgattgtattttaaagtattttttaaaagcttcagtggtcattctcataccttcctccttgtgcaaggcagaggtttctctacggcttatttttggaagagagatgggtaggtctcagagtatctcatgaagatgaactttactagatgatagccaaattgccctctgaagtgcttatactacttcctatttccaccattagcagagaattttcctattttgctgtattctaaagagtaaaccctcaaaaggaggtaggggcagaacaggaaacagataaaatttaacaagatacagctggggattctaagaagcagtaccatgaaaggcctctcaggtcctcctgaaatgtcctgactttactctgtaaacagtggaaagccttcaaaatctttaatatgaattttcattaatagggaaatattcactttgcttctttcttgaactttaaacaagttgcttaagcaaaagttctaaaaaacggccataacctcaaatatttattgattcagatctcaggaatctaggagattaagggctaagaatcaggtgtgggtggctcacttctgtccttagtttcttggctataatttgctgaatgttctcttcccctccatatctgccagttggaaatcttatgagaaatg

SEQ ID NO: 88492 - DNA, 781 bp, Homo sapiens
tttatttcccaacactagatgttagaaattcatctatgctaaaataagtagatttagtgtatttattttaacaactgtgtagtagttaaaacatatccccaatttgtttatccattaccaatgaataaacatttggattgtattttaaagtattttttaaaagcttcagtggtcattctcataccttcctccttgtgcaaggcagaggtttctctacggcttatttttggaagagagatgggtaggtctcagagtatctcatgaagatgaactttactagatgatagccaaattgccstctgaagtgcttatactacttcctatttccaccattagcagagaattttcctattttgctgtattctaaagagtaaaccctcaaaaggaggtaggggcagaacaggaaacagataaaatttaacaagatacagctggggattctaagaagcagtaccatgaaaggcctctcaggtcctcctgaaatgtcctgactttactctgtaaacagtggaaagccttcaaaatctttaatatgaattttcattaatagggaaatattcactttgcttctttcttgaactttaaacaagttgcttaagcaaaagttctaaaaaacggccataacctcaaatatttattgattcagatctcaggaatctaggagattaagggctaagaatcaggtgtgggtggctcacttctgtccttagtttcttggctataatttgctgaatgttctcttcccctccatatctgccagttggaaatcttatgagaaatg

SEQ ID NO: 88493 - DNA, 698 bp, Homo sapiens
ttggggcttgtcccttctagaatgcatccctggctcccctgtgtgcacacttctagttaggtttagcaatgtgggcacccgatggagcctggaagtgagaggaaggtgaggtccgtatttcttccctctccctccctgctctggcactgagtatctgacaatagctgcatctgtctattacttcagtggccactcttccacagccccaattctcagtgggtcccatagcattatttacctttgttcctttagctcccaccaaggaagacccagaggcattctcctcaccaaggcattaagaaatgcatgggtgaggggaacagcggcgtgcatgtaaaggtcctgtggcgcctctcctctacaggctggaggtcayggcgggagatgctgcatggatttgccctccctgctgtcagaacaacagggttctggaagagtagaggacaggccgtgggacttggctgtctagagacaaggcgggagggatttccttgagaggcagggacatgtggtggttactaatcattgtgaggtgtctgggatgtaatggatgggaaatctactaagaagtcaacttatgtaataattagaaaagctctagttctgaggacagagacctgttggagtcaccatagtggaaatttatgacctggtatccagttcagatacctggagcttcttgactggggggagattgg

SEQ ID NO: 88494 - DNA, 665 bp, Homo sapiens
tttcttaacttgactctaactgcacatgctgccttttctttccttttttgtctagaacatatttttctcctttggtctgactctactctgtaactcccccctcaacactttattgtctttattgacttttattgtctcctcttcatattagctagagtagaggtggggactttgtctcgcctctattcccatcatctgatatagtacctggcaaatgacaggcacttattaaatgcttgttggatggctgctggattgcatcattgctggttcagtggacgaagacttctgttttggggcttaaatttagtgacagttctgatgcaatgggttgattaaaatgctcccaaaccatctttttgttttgagaggcaggaatgtgatgtgactcatatgatccctgttatatatttttggctttctgttctttggtctagaagggatcaaagtgaagagcgtaagtttaagtatctctgtaatttaaggcaagttgtacattactggcttctgggtgttactaaggaacaattgtgtggaactgttctatccttttgttttacttttcagtatsaataacatcagccatttcactgaatcattaaaggcaaaatgtgaaagggaaggggagcctttcatccttcaaagtattcagagggcaaggagta

SEQ ID NO: 88495 - DNA, 881 bp, Homo sapiens
atagttcattttttagcttctcttattgacagagcaggatttgaacacaggactatttggcctcaaagcctgcactcttgctgatgggtcctgttgcttctctgcacatggagccagcagkgatttcatcaagtcctgaaggaaggatgggacttgagcaggtagaagaagggagggcatggcaggcaggggtgccacatggatgaagacacagaaatggtaggaaatgcaaggtgcattaggagacagaggcagccaagtgcacgatccctttccatccctctctcccttgttttgtccttcacacattcggttcctacttccactcccttataaccactgtttatgtcgttttgtagcacaagccctctgatatcatccacactccactccacccttcaatcggttggatcacatgggttccatcttccctgagaatgcccttcctcatcttgtccacctggagcatgacttacttatctgtcaaggcccaagatgactgtcacctcctctgtgacattccatatgagttgggatattctaatggttataacaacaatgccaaatgcctcagtgtcttaacacaagagttttagttctcactcagttgaatgagagttggctgtggtgaggcaggtgggctttgctccccagttacatgggggctcatgttccttctgtccagtggccccaccatcctgtagcacagaagtttgcaaacaatgacctgtttttgtaaataaagttttattgagactcagcctcactcattcagttacacgggctgctttagcacttcgatggtagagttgagtagctgcgacagagactgtgtggcccagaaaacagaatatttgccctcgagtgtttacagaagaggt

SEQ ID NO: 88496 - DNA, 881 bp, Homo sapiens
atagttcattttttagcttctcttattgacagagcaggatttgaacacaggactatttggcctcaaagcctgcactcttgctgatgggtcctgttgcttctctgcacatggagccagcagggatttcatcaagtcctgaaggaaggatgggacttgagcaggtagaagaagggagggcatggcaggcaggggtgccacatggatgaagacacagaaatggtaggaaatgcaaggtgcattaggagacagaggcagccaagtgcacgatccctttccatccctctctcccttgttttgtccttcacacattcggttcctacttccaytcccttataaccactgtttatgtcgttttgtagcacaagccctctgatatcatccacactccactccacccttcaatcggttggatcacatgggttccatcttccctgagaatgcccttcctcatcttgtccacctggagcatgacttacttatctgtcaaggcccaagatgactgtcacctcctctgtgacattccatatgagttgggatattctaatggttataacaacaatgccaaatgcctcagtgtcttaacacaagagttttagttctcactcagttgaatgagagttggctgtggtgaggcaggtgggctttgctccccagttacatgggggctcatgttccttctgtccagtggccccaccatcctgtagcacagaagtttgcaaacaatgacctgtttttgtaaataaagttttattgagactcagcctcactcattcagttacacgggctgctttagcacttcgatggtagagttgagtagctgcgacagagactgtgtggcccagaaaacagaatatttgccctcgagtgtttacagaagaggt

SEQ ID NO: 88497 - DNA, 1078 bp, Homo sapiens
gcccccaggaccctcctgatctggactcaggtcccacagctctctcctgcctgctctgctcagccacactggtcccttgcagtcaccccccacgccaggctggctcttgccgcagggcctttgcaccagccgctccctcctccctcttgctacgcacatggctcacttccttatctccygcgagtctgctcagtgagcttcttcttccctgaccacactaaggttgaattgtccacacctcacaccccatgcccctcctctccctcatgctgtcttactttttctttgtttcataccaagtatcaccttctgatacccttattgaaggatttcacttaagtatctactttaggagaatttgctgaaggcgatttatgattgctggtttttgtctgacttatatcagctcccccagggtgaaactctttgcctgttttgttccccacatgtcacaagcttctggagcactgccttgcacgcagtggacaccctgtggatgaatccccagtagttttccttggatcctcaaatttctccctgacactggagccacagagcatcatttcatgcccttgtacacagtatcattagagtctgcagaaaacaaaaatgaccctgcagtgtaagctgttggctcggctgctgttctcacctttgggctccacccatgccaaagcccttataggctcctgctctgtcacacctcagggcctttgcacatgctgtgcctttttctgcccagtggactcttgggtgtcattcaaagccctgctaaggtgttgcctcttccctgaggccctccaggacactcccaccctcctcagtcctgggaaacacttaatcccttcttcctttcctgcagtgacatacctatggcatttctcagtgtatgggtcccagtgtccccctgggtcatggctctgtgtccattgcaccatcagactgtgagctccttgagggcagaggcttggctcttgctctgtatcctgagcctggggcttggcacagggcaggtgcccagtcagtgtttgttggggaagacagagtaaatctgacacaagccaggagagaacaaaga

SEQ ID NO: 88498 - DNA, 1078 bp, Homo sapiens
gcccccaggaccctcctgatctggactcaggtcccacagctctctcctgcctgctctgctcagccacactggtcccttgcagtcaccccccacgccaggctggctcttgccgcagggcctttgcaccagccgctccctcctccctcttgctacgcacatggctcacttccttatctcctgcgagtctgctcagtgagcttcttcttccctgaccacactaaggttgaattgtccacacctcacaccccatgcccctcctctccctcatgctgtcttactttttctttgtttcataccaagtatcaccttctgatacccttattgaaggatttcacttaagtatctactttaggagaatttgctgaaggcgatttatgattgctggtttttgtctgacttatatcagctcccccagggtgaaactctttgcctgttttgttccccacatgtcacaagcttctggagcactgccttgcacgcagtggacaccctgtggatgaatccccagtagttttcctyggatcctcaaatttctccctgacactggagccacagagcatcatttcatgcccttgtacacagtatcattagagtctgcagaaaacaaaaatgaccctgcagtgtaagctgttggctcggctgctgttctcacctttgggctccacccatgccaaagcccttataggctcctgctctgtcacacctcagggcctttgcacatgctgtgcctttttctgcccagtggactcttgggtgtcattcaaagccctgctaaggtgttgcctcttccctgaggccctccaggacactcccaccctcctcagtcctgggaaacacttaatcccttcttcctttcctgcagtgacatacctatggcatttctcagtgtatgggtcccagtgtccccctgggtcatggctctgtgtccattgcaccatcagactgtgagctccttgagggcagaggcttggctcttgctctgtatcctgagcctggggcttggcacagggcaggtgcccagtcagtgtttgttggggaagacagagtaaatctgacacaagccaggagagaacaaaga

SEQ ID NO: 88499 - DNA, 766 bp, Homo sapiens
tactaattttccaggccccatgattaattcaggtattattatgagtcatacataaaaatcaagaaacatttcaaccatgaactgaaacacattaaaattggctttaatgaaaaaattaatttaaaaaataaaattggttttatgagaacatagtttggatgcctgtacaatcctgcataactaaaagayacatatagaagtatttactctcagtggtttttaaaagcaccatgatttaaatttttttttaattttaaagttttgatgacaatcacatcaatttaaatatccaacagtttgcaaatcactaagtactatttagttttaaaaacactaaatactattcagttttaaagcgttctgtgtaacgctttcttacacagaagccagtgatctcagatattaaagccactgattacaaagaagagaaagtagagcgagggattcagaaaaaaaaaataataattggcacataaactcaaaactcaggaaagaacagaggatgagaacctccacacttatatttaaattggaataggcagtatgctataatacaaagaaccctggaactatggttgggaggcctacgttacagttagaaatctatcaactgttatgctgcactgtgtaatgagatttgacttaggatccatacttgtaaaaggaggaagatgccagcatcacaggctgtgtacttagcacaagtgtatttagtgaaaacacatgttgctttgaagaccaaagaagactcgtgtaaatgaatttc

SEQ ID NO: 88500 - DNA, 766 bp, Homo sapiens
tactaattttccaggccccatgattaattcaggtattattatgagtcatacataaaaatcaagaaacatttcaaccatgaactgaaacacattaaaattggctttaatgaaaaaattaatttaaaaaataaaattggttttatgagaacatagtttggatgcctgtacaatcctgcataactaaaagatacatatagaagtatttactctcagtggtttttaaaagcaccatgatttaaatttttttttaattttaaagttttgatgacaatcacatcaatttaaatatccaacagtttgcaaatcactaagtactatttagttttaaaaacactaaatactattcagttttaaagcgttctgtgtaacgctttcttacacagaagccagtgatctcagatattwaagccactgattacaaagaagagaaagtagagcgagggattcagaaaaaaaaaataataattggcacataaactcaaaactcaggaaagaacagaggatgagaacctccacacttatatttaaattggaataggcagtatgctataatacaaagaaccctggaactatggttgggaggcctacgttacagttagaaatctatcaactgttatgctgcactgtgtaatgagatttgacttaggatccatacttgtaaaaggaggaagatgccagcatcacaggctgtgtacttagcacaagtgtatttagtgaaaacacatgttgctttgaagaccaaagaagactcgtgtaaatgaatttc

SEQ ID NO: 88501 - DNA, 669 bp, Homo sapiens
ttgggctaaactggtcagtgcatccctgagattggctaagaactggggcttttcttctagaacattttacaggggcttactgatcttggctagctcatgggtgagtctacatggggaagaatagtgtaacaagccacatttggtggctgcaagaattacatcgtacaggcagcttcctcttctgtctgtgggtaggggctgaccttgtcagctacggagctctgatggcaagaggascagttccacaactctcccttaccttggggcccaaggaagagtcagggtattaccagttgtcctgtggggaccatgacatatgggaaaaaaagtgtgcaactctcttcacttcctacagcagggattagaaaactaagattcatgggctgaattcagccccattctgtaccagcctatgagctaagaatgttttttcaatttttaaatgatccaaaaaagccaaaaggagagtaatattttgtgacatgaaaatgatatgacattcacatttcagtatttataaataaagtttattttattagaacatgtgcatgcttccttttttacattttgtttatggttacttttgcactagaacaacagagtcaggtgcttatgacagagaccaaatggcttacaaacactaaaatatttactagctgtccctttaca

SEQ ID NO: 88502 - DNA, 1940 bp, Homo sapiens
tcctttttacagctgttaaggtattttttagccagttttctattgatgctgtatatattgtttccaatcttgtggcaaattagaaatactttttatatacatggtagatttgcttttgtgatgggaggggaaaacttgtagaaatcaacattggaataagagttataggctcattagtaaatggccattaattaattaattaggctaaaaactgctaaattctctctttttgtttgagatggartttcgctcttgttgcccaggctggaatgcaatggtgtgatcttggctcaccgcaacctctgcctcccgggttcaagtgattctcctgcctcagcctcccaagtagctgggaccacaggcgcatgccaccatgcccagctaatttttgtatttttagtatagatggggtttcaccatgttgggcaggatggtcttgatctcttgacccttgtgatctgtccgccttggcctcccaaagtgctgggattacaggcgtgagccaccatgcctggcctgctaaattcttacattgtgtcaggctggtaaggtagacactgtcctcaaaaatctcaaagttgagggagggagtgatataagataatcaaagatttcactacagcaggataagtaacaatttcttccttcttttttaaggccctatgttgtccagactggagtgcaggggctatgtgtactgcagcctgaacacctgttttcaagggatcctcccatctcagcctcccaagtacttggtactacaggtactcgtcaagacgtccagctttgttacataaagttttttttttttttttttaaatcatgagttgccattacttcattggtgttttttaaagacttcttcctgtttggggttttgttttcttttggtacttcctttcggagagtaatttagcagtagctattttaactgttaatgtaaattcccacttctaataatagttatgaccccagagtagaattagagagtggcacctggggagaaaggtatgggaaggtatagttccacgacaagtacaatgtggcagataggagccaggattctacagctagactgcctgaattcaattcctaaacttgtcacttaacatttgtgtgagcttcagtacatacttcccacctcttaagaggttatttaacccttctttgccttagctttcttcatccgtataacagttttgtttttttttttgaggtggagtcttgctctgttgcccaggctagagtgcagtggagcgatctcagctcactgcaagctccgcctcctgggttcacgccattctcctgcctcagcctcccgagtagctgggactacaggcgcctgccaccatgcccggctaatttttttatattttttagtagagacagggtttcgtcgtgttagccaggatggtcttgatctcctgaccttgtgatccacccgcctcagcctcccaaagtgctgggattacaggtgtgagccaccgtgcctgaccaactgtataatggttttagtaatggcttctatttcacaaggttgtgaggatgcaattagttaaggtatgtaaagtaagtaaaatgttgcttcacacatagtgctattatatatttgatactatttaatttaaaataatataaaattgaaccaattatataaagcagaaatcacacatctcactacatttgacctctagcaatcttgtatctattactatgcatgacaatgggttcctattggaaaatccctatgagcagctactttataaacaaattttatgcccatttcgggaggaatgttattaactaaacattctattgcaacaaaaccaaaaattgacaagtggtacctaattaaactaaagagcttctgtacagcaaaagaaactatcaacagaataaacagacaacctacaaaatgagacaaaatatttgcaaactct

SEQ ID NO: 88503 - DNA, 1940 bp, Homo sapiens
tcctttttacagctgttaaggtattttttagccagttttctattgatgctgtatatattgtttccaatcttgtggcaaattagaaatactttttatatacatggtagatttgcttttgtgatgggaggggaaaacttgtagaaatcaacattggaataagagttataggctcattagtaaatggccattaattaattaattaggctaaaaactgctaaattctctctttttgtttgagatggagtttcgctcttgttgcccaggctggaatgcaatggtgtgatcttggctcaccgcaacctctgcctccygggttcaagtgattctcctgcctcagcctcccaagtagctgggaccacaggcgcatgccaccatgcccagctaatttttgtatttttagtatagatggggtttcaccatgttgggcaggatggtcttgatctcttgacccttgtgatctgtccgccttggcctcccaaagtgctgggattacaggcgtgagccaccatgcctggcctgctaaattcttacattgtgtcaggctggtaaggtagacactgtcctcaaaaatctcaaagttgagggagggagtgatataagataatcaaagatttcactacagcaggataagtaacaatttcttccttcttttttaaggccctatgttgtccagactggagtgcaggggctatgtgtactgcagcctgaacacctgttttcaagggatcctcccatctcagcctcccaagtacttggtactacaggtactcgtcaagacgtccagctttgttacataaagttttttttttttttttttaaatcatgagttgccattacttcattggtgttttttaaagacttcttcctgtttggggttttgttttcttttggtacttcctttcggagagtaatttagcagtagctattttaactgttaatgtaaattcccacttctaataatagttatgaccccagagtagaattagagagtggcacctggggagaaaggtatgggaaggtatagttccacgacaagtacaatgtggcagataggagccaggattctacagctagactgcctgaattcaattcctaaacttgtcacttaacatttgtgtgagcttcagtacatacttcccacctcttaagaggttatttaacccttctttgccttagctttcttcatccgtataacagttttgtttttttttttgaggtggagtcttgctctgttgcccaggctagagtgcagtggagcgatctcagctcactgcaagctccgcctcctgggttcacgccattctcctgcctcagcctcccgagtagctgggactacaggcgcctgccaccatgcccggctaatttttttatattttttagtagagacagggtttcgtcgtgttagccaggatggtcttgatctcctgaccttgtgatccacccgcctcagcctcccaaagtgctgggattacaggtgtgagccaccgtgcctgaccaactgtataatggttttagtaatggcttctatttcacaaggttgtgaggatgcaattagttaaggtatgtaaagtaagtaaaatgttgcttcacacatagtgctattatatatttgatactatttaatttaaaataatataaaattgaaccaattatataaagcagaaatcacacatctcactacatttgacctctagcaatcttgtatctattactatgcatgacaatgggttcctattggaaaatccctatgagcagctactttataaacaaattttatgcccatttcgggaggaatgttattaactaaacattctattgcaacaaaaccaaaaattgacaagtggtacctaattaaactaaagagcttctgtacagcaaaagaaactatcaacagaataaacagacaacctacaaaatgagacaaaatatttgcaaactct

SEQ ID NO: 88504 - DNA, 627 bp, Homo sapiens
atttaatgcttcagtgggcaasttggtataacagtttaatttttcactgaaatctaaatttgctcccagactgtatatttttctatcatattagataatcaatcagagcagaaatccaattttaactccatcaacacccctctggagaaagttacacagtgagcgccctctggtctaggctgctcgaggctggcgtgtgagcccacactgggatgtgcagatgaggagtggtcccttggctcaccgaggcctccccaggaagagactggctgtggttccccaggagctgaggccactggctgggtgcagggtgggggctgccagctgtccacggtgctgggggttcccccctgtcccctcatggccataaggaagaggccaggctgcagagaagtggccagacaaagcagtgacctcagggtcttccagagaccttcctgctgcttcttgggcattggacgattctagtgtttttcatgcgaagcagacggggcctttggaccttctgtggacaggggttctggaaaacccctgcccacatgtagacagacttgtgtccccaaaccacgttctgatcttggccctgcttcttccccatggagtcagtgagaggctgggacttcaatt

SEQ ID NO: 88505 - DNA, 2739 bp, Homo sapiens
gtctcttcagcatagtatttaatatacatatcaggcaatcaccatctcaagcatgattagactcaagtgctgccctccatcgtgtgagggatgctgggagactggaagcttagactttagctctttaagttggtgcaaaagcaattgcagtttttactattaataataataattgcctagccattgtgcagtaccttgcaagagctctttggcaaatgaaagaataattcaaagcaaagtmggccagatataaaacacttccaaatcacatttcaaaattgttctttcatgtcaactaggtgcatgtctgctaagggagtttttgcaaggacaggtggatagtgtgaggcctttacaataatcacatcaccatctggtactatctgtatggcagagcagttctgatgtagttgtagtattatagatcattacagagtatgccagtcattccatgatggaactgtgactggcagccttcattagcccaaagactgatgcaacagattgctttgagaaatagttttgaagcacatccatgaaacatatgatcctatgggttccagcattgatttctttgaggtatcattttacacttcagtttttcctggtagagtatttttcagagatgtctcttctgaggctaaattaggaatttctgttccttattcaagttccaagaattgtgcctttcctgccctctgcccaaactggaagatagaaaccgtgggaaaaaagtgtctttacaaactgcactgttatctaacttggtttatttagcatattgaggaagactttcacatccatggaatcctagttctattaattctctccaagctacaacagttgtttttttgtttgtttttttccgagtttctcggttccgccagcaaggcaggggtgggaggtgggcacccctgataccaaggctgacaggtagtgagttgatgtggaacttctgtttcctcctgttcagttcaggttctctctttctgatacttacccctcctcaaatagggaaacggagagaggggaaataagaagatgagccttaatagggtttacttaattggggtcataaagattctaaaaagtatgcattcctgcagttctgttctaggcactgtaagagctgaccagaaagagagcttctacccttataaccttcatccaactcagtcatgcctgggaaggatgttggtgctaattttagacacagagactaagatggacaaaggacaagtatcataaagcatttttggagccaggaacagatttaagttccttgcctcactgctgctcttactccaaaccacacaattgtacccaagtgaattgctgttagaattggtgcctttggaggagacaattgctcgtaattggtagctacaagccacttcactgagaaagcgtggggtcttagatgctttaagaaataatagaaagactgagcctgagtgagtcaggctcttctgagtcatacagcttttaggtcagtgtaaaatgccgactttctgaggtcttacttttttcccctctctggaagacctaaggcaaagatcgctctcaaagagatatcaaagaatagagacctttccctcagaacctacctctgcccagtgttaaccaaaatgtggtttcaaatcacctgttcaaagcccacaggctatttgttaaacatgcagattcttagtgctccctccacccacacagacactgcacaagaggccctgctttggaccactagttcctaaacatggcagaaaatctggatcacctgggagactttttaggttaaaaaccggaaacaatatgtaagcataaacatgtcaacaaaattagaggatgtccctctgcttgctgtgcttggtattatacttctatactgtttccctatgcgtgtacatataattttgttttgtttttgtgagacagagtctcacccactgttgcccaggctaaagtgcagtggcccaatggcactgctcactgcaacctctacttcccaagttcagcctcccgagtagctgggactacaggtacccacaaccacacctggctaatttttgtatttttagtggaactaaaaattttattatagtattttagtttcgccattttgaccaggctggtctcaaactcctgacctcaagtgatctgccctcctcagcctcccaaagtgctgggattataggcgtgagccattgcgcccagccagtgttgttttatggaaatgagtccgtattatgcatattgctctgcagcttgttgtgttttttttccccagcttgtttttaactaacagagtatcaaatggacttccttgcaaatctgtcccattcttttaacaccaggatcacaactcaaatgcctacaggggttaggcagataacataaatgagttaaatggatccagtaggaactgcagaaaactggagatgttccatccaatggcatcagatgttacccaaccacaaactaactactgccatttggaaatgttggcccagagttgccaaatttgagttttcaagaaaagcaagaaatctgaatttttgaaatgtgcaatctccagatttttaaatattggtaacaaattcacattaaatgcagtgaaccagcccaaatgccttcaatccagacactgcccctccagccatccttttgaaacttctattgccatgtataatgttccacggtgtaactgtcaatacttaacctttctcctattgctggacactt

SEQ ID NO: 88506 - DNA, 1067 bp, Homo sapiens
ttttaaatcttcacattacatattaaagcttctcacattgtattcctatttttgtctcatttaagttttaatctcctcataaaaggataagtgtcttttcttcagtcatcttaatgtgttaacctgcacttcatatcatcatgattttaaaacatgcattgaatgctgctacagtccaagaataacaacgcctgtggcctccaaggagtaagggacccctggaacatcagcaccagcaaaaggaagagagacactctcagttgtggggtgtctctccctgactcagcccccacctcactgagggtcttccatccccacagtttccatctcagatgcccagaagaatgggaggggccaaaggaggtccactttgtatatcatcaatgaaaccccctgtacccagtcccccaacaaggaagaacaacagataactcaatttaaaaaatgttacttgtggctgggcatggtggctcactcctagaatcccagcactttgggaggccgaggcgggtgggtcatgaggtcaggagtttgagaccagcctaatcaacatggtgaaaccccgtctctactaaaaatacaaaaattagccaggcgtggtggtgcgtgactgtaatcgcagctactcaggaggctgaggcaggagaattgcttgaacccaggaggcgggggttgcagtgagcggagatcacaccactgcactccagcctgggcracagagcgagaatcttatctcaaaaataaaaaagttacttgtgataaatgaataatttgggaagaagaaatcctgagttttatgatgcagaaggtatttctttatcatgtagacacttagagggcttcaattttggtagtaaataaccttcattaaaaaagttaatttttttgttttaccttcatatgagccctgtaatagtacttctaatgacatcatactcataaaatgacttttttgtttcctgatcaacagtggaaaggtttatgatgtgctatgtaatagtatgtgcaaacatcgcaggcacaatattaatagatgcacatatatgtgtgttacacattaaatattt

SEQ ID NO: 88507 - DNA, 752 bp, Homo sapiens
ttttttcttttgcagtgtttctgctttgaatcttcatagactgtatcccatggaagcaggaatataattactgtagtgcttactttttttcatgtctctactgaagagccaccctgatttatcttttactccaaggtagtgtggaactttacaaggatttagattatattagtcattttgcttggagatctctgcacacttttcaacatcatttctaagagccttgccacactcagtaaaagagggtgaggcttcaagaatctctgtgtaccaacgcaaattaggcaatttgtaagaagtccctagtagagcagagtggagagagggctcaggatctcgtgaggcctggggcagggaggtggacatgctatgagctcctttcacagtcaacacaaagttaacacatcttggaggaaaaaccgttactgtataatggaaggcagaaggcagggatgtctgtgcttggtgatgaagctataagtagtgagctgatttatgatggaggggtgaattgtgccatgaaagagactcccctcaattttattagccagattactgcccataygcggggtgaggagtgagcattttaaggcatttctctctgttttcaatatatcatctctggattcactattactgggacttgtgaatatagactagggattaaaacctgagtttgcttttaaaaaactttattttattaaatgagatttctgagcaactgatttcacttagtcttatcaaactattct

SEQ ID NO: 88508 - DNA, 993 bp, Homo sapiens
tatatattcttaagtatattttatatacatacacaaaatattaaatatactatatatatgtagaaagaaatataaaaatcataaatttaaaaagggaaaatagtatgggatcttgtataaatgttaatcatgtgtctttgtcctgaaaaataggattaacttaattttctgcactggagttaaaaagtaagagacatttaagaatattgtcaacagaatcaactgctttcataatattaaggaatgtaagaataaggatgtacttactggcattagtaaaatggtagttattaactgccttaaaaatgtgtgtacgataaaaaacaaggcagagccagattcgtgacttactaggaatctggctaatctttggaatcagtcaagaataagaaaaaatatgccattctttaaaattaagtaaagaaaaggcatccttattagacacaagagcacaaatgtttgccatcttcctggtgcaaatggtagaagaacagtgtcytgcaaaatatgaaaattcaagattttaccacaaaggcagttcaggtctaaattcaaaatgcccacttggttgaaacacacaactttgaaaattatgattaaccttgtcttaatctggagaaacatgtaaggcttcctaaagtgactaaaacacaaacacattaggaacacttttacaattcagggaatacaggaatttcagggaaaaccaagtcactacgatgagttaaaccatgcaaaactaaaaataagaccccttcctccccaaaccgaagtagatgagcaaacaaatcattatttggggaagtaagtagatacaatgaactaaaaaaccctgaactactgcaactggtttaaaatcttcaaggatacagaaagagagagagagagagaaaaaaaaaaacatttagacaaaaatagcacttaaaaaaaaaagactattgaatgagaaacaaatacaaattctagagaggaaacatagcaatagaaaagtgt

SEQ ID NO: 88509 - DNA, 587 bp, Homo sapiens
cattcaataactaatattcttagaagcagagaaaaatttcttaaaatgaggccattgaagtacaatgcttacttgtcatttggcttacaagtatcagaaataagcatcaatgaactaagaatgtattctcaagatgaaatactttttcctaatctcatagctgtcagactactatagaatagaaactaatgcttgtcaaaagttataacccagattagagttgtcttatgagcattcgatgcaaaaccaccaccaagcaatatcttccttaattagaaatgtgttttctggagggacaaactaaatcaaaattacaaaaatccgaaatccaactttaactgtacattttaatttaaattaaatttgcatgtattcaaggtgaaagttttaaagcactacacaaattaacatagtagatttttcaaacatatattgccttcatcttgtggggaaaatgaataaaattaatgtgttataatacccrtgagaccgcaagtacagtgcactttggaaaaacttagagtaaattgcttgaaattactgtcagcatcaaagttcaggctgacaagaagcctctcagtatcaca

SEQ ID NO: 88510 - DNA, 587 bp, Homo sapiens
aatgcatttgacaaaagtagcatatcaatgatacaataatttaaaagaattttttttaaagatatatttgttttgaactttgaaaaattaagtactgctgctccttggatagaaatttctgtctctaaagtaagagtacctcctgtttccaggttttaaaactgtatttaatcacagcaatacatgtgcatggctttaaaagtcaaatggaacacaatgcataaaagaaagaattggtcaatcagatttcaccaaaattaacattcgctctttgaaagacaccaagagaatgtaaagaaaagcctataaattgtgaaaaaatatttgcaagttatatttcatgaaaaacttgtgtcaaggggtatataaagaacacttaaaccttaacagtaacaaaacaataaaaaatggggaaatatttcaaatagacattgcrtcataacgataggtggaatgcaaataagcatatgaacagatgctcaacatcattagtctttagggaaataaaaattaaaggatcatagactatgaaaggtctcaggtttttccctgccttcatgctaacaacctagcctattactgtttca

SEQ ID NO: 88511 - DNA, 740 bp, Homo sapiens
atccaaacatatccaaaaagctaaagaggcaccatttgtcccccattggaatagcaggttttgcagcaattgttgcagtggatatacaaattgaagaacaggagaaatattaaaatgtcccttcacctgatccacatgcatgtggcagcccaaggctttgtgatgggaacaatgactgttgatgtcaactattccatgcactgagaattatgggcaaaacctaagccttagaagaagagatgcaggcttggcacagtggctcacacctgtaatcccagcactttgggaggctgaggtgggcggatcacctgaggtcagcagtttgagatcagcttggctaatagggtgaaaccccatctctactaaaaatacaaaaattagccagctgtggtggcgcgcacctgtaatcccaagtactccagagactgaggcaggagaatcacttgaactcggaggtgaaggttgcagtgagccgagatagcaccactgcactccagccagtgcacaacagggcaaggccccttctcaaaaaaaaaaagaaaaaaaaagagagtcttggtcttggtgctgtcttggtctttgtcttgttgcaggagcttgctctagttagacatgtcattattgaggttaagtgttcacacagaaaacatgttatttgatggaattcagacgataacacactattttgagtattgacttyctttcttgcaggcttgatttgcttggtgaccaaattacta

SEQ ID NO: 88512 - DNA, 590 bp, Homo sapiens
gtcattctctttaaattagccaatcggaattagtttagcctgtgcgtctaaccctagtcaacaggggaatgacacagcagcaaggggccacatgcatcagggataaagaaccccttcccctcccttgtccaagtgtacgttcaccattgttccatctgtaagggcgcacccttctatacagaagtaacttgccttgctgagaattaaaaagaaaattttatattcgagtgttatttcttttgcggcacggaaactttrtaacactgagacaggaggatcacctgaggccaggagttcaagaccagcctaggcaacatggcaagactccatctctacaaaaaattaaaaaaaaaaaaattagctgggtatggtggtgcacacctgtagtcccagctacttgggaggctgtggggaggaaagcttgagcccaagaggttgacgttacaatgagctatgattgcgccactgcactccagctgggcaaaagaacaagaccctatctctatttaacttgtaatggagtataacttgtaatgcctcccacaacgaaaagtgtgtctaaaatgaacttacagcaaacaacagagcta

SEQ ID NO: 88513 - DNA, 810 bp, Homo sapiens
cggctctcggcctcggtgggtgcgcgcccctcacgaccccggccccttgctccgctgggtggaggctggagccagccctcacgcttctctcttcgcaggtgtgtgtctgctgctgctgccggggcccgcgggcagcgagggagccggtgagtgggggagctggggtgcgtccaggcggtcgcaggggctgagcaccagcgggtacaagcgggactcagatccagccccttgggcttcagccckaccgcctgaggaggaaggcgcgaaggttgagccgccgcgtggcgcgcccgcgttaacccctgcagccgatctgctcctgctcacctgtttctcccatggtagggggcccctggggtccagtggggggacgttctccaagagcactaggaagaaggcctcctccaggcccacccacagccccagaccccgggcccgctgagcgccggcagcaggaggtcgaggaaggaggactccttgagcctcaccgaggagcgcaccagtcctgggctctgctgcgtttgggggtggaggagaagccgcccagacccgacttcaggttgccgtagccgagagagagggaggcgaacgtcgctgtcccaccttgtttgactcgctagctatgtttctaggtgtaacccctataatcagaagcactcgcggtctcactctacacgctagagagtttaaaaagtttgtaccacgtgtagaggtccgggtatgggtgtgtggtttggtgtattttccagtgtaaaaggcaacgctttcctaagagctaccgtttgttttccttgaaagtaggaatgaggg

SEQ ID NO: 88514 - DNA, 1001 bp, Homo sapiens
tttttaaatttgaatccccaagaccggcttgggtttcttataaggtggctttttttgttggggccggrggagtgggggaagaaatgtgtatttttgtggttacactcattgccatgataataatttttcagggagctgttttttcactgtttagtcccagcatttagcataatgctggtgcatagaagctgcatgattaatatttgtagaggtgtgaatatattttcaaaatagtacatatttatttaaagtatattttaagaaattatttatagttcccaccactgggacatatctgtggaattttattaaacttttctcagaaatataataaatgtttattgatgaaaacataagcaaataaaaaacagatatgatactaaaatccctctaattccaatatttaaaaaattcctattttaattagttcttgctaacctctcaaaatctaatgacataaacataatagtttattaatgtttatgggtctacagaacaactgaacatacttctcatgtgagctgcgcttggctcatttttgtatctgtcattaatggacagggcatttggggtcagcttcctctagcctggctggtctaggatgacctccgtccgtttggatgacttgtctctgttcctcatgatctctcatcttccagcaagctaaccacggtttattcttctcatatcagaaccagaattccaagagacaaagggaaaactgtgtaaggtctcctgagctctatgcttgggaatagcacaatgtcaatttcactgaattctgtttatcaaagcacgtaccaaagagcaggaaagatcgactctacttattgttgatagaagctctgaagtcatattgcaaagggaagggtggaatattgggacaatttttataatcaatttgctacaactcctttaaatttatatatatgggtataagtatttacatgtaaatttagatatgacttatgcaacataaatgtaataaaaagttattaaaa

SEQ ID NO: 88515 - DNA, 1001 bp, Homo sapiens
tttttaaatttgaatccccaagaccggcttgggtttcttataaggtggctttttttgttggggccgggggagtgggggaagaaatgtgtatttttgtggttacactcattgccatgataataatttttcagggagytgttttttcactgtttagtcccagcatttagcataatgctggtgcatagaagctgcatgattaatatttgtagaggtgtgaatatattttcaaaatagtacatatttatttaaagtatattttaagaaattatttatagttcccaccactgggacatatctgtggaattttattaaacttttctcagaaatataataaatgtttattgatgaaaacataagcaaataaaaaacagatatgatactaaaatccctctaattccaatatttaaaaaattcctattttaattagttcttgctaacctctcaaaatctaatgacataaacataatagtttattaatgtttatgggtctacagaacaactgaacatacttctcatgtgagctgcgcttggctcatttttgtatctgtcattaatggacagggcatttggggtcagcttcctctagcctggctggtctaggatgacctccgtccgtttggatgacttgtctctgttcctcatgatctctcatcttccagcaagctaaccacggtttattcttctcatatcagaaccagaattccaagagacaaagggaaaactgtgtaaggtctcctgagctctatgcttgggaatagcacaatgtcaatttcactgaattctgtttatcaaagcacgtaccaaagagcaggaaagatcgactctacttattgttgatagaagctctgaagtcatattgcaaagggaagggtggaatattgggacaatttttataatcaatttgctacaactcctttaaatttatatatatgggtataagtatttacatgtaaatttagatatgacttatgcaacataaatgtaataaaaagttattaaaa

SEQ ID NO: 88516 - DNA, 1001 bp, Homo sapiens
tttttaaatttgaatccccaagaccggcttgggtttcttataaggtggctttttttgttggggccgggggagtgggggaagaaatgtgtatttttgtggttacactcattgccatgataataatttttcagggagctgttttttcactgtttagtcccagcatttagcataatgctggtgcatagaagctgcatgattaatatttgtagaggwgtgaatatattttcaaaatagtacatatttatttaaagtatattttaagaaattatttatagttcccaccactgggacatatctgtggaattttattaaacttttctcagaaatataataaatgtttattgatgaaaacataagcaaataaaaaacagatatgatactaaaatccctctaattccaatatttaaaaaattcctattttaattagttcttgctaacctctcaaaatctaatgacataaacataatagtttattaatgtttatgggtctacagaacaactgaacatacttctcatgtgagctgcgcttggctcatttttgtatctgtcattaatggacagggcatttggggtcagcttcctctagcctggctggtctaggatgacctccgtccgtttggatgacttgtctctgttcctcatgatctctcatcttccagcaagctaaccacggtttattcttctcatatcagaaccagaattccaagagacaaagggaaaactgtgtaaggtctcctgagctctatgcttgggaatagcacaatgtcaatttcactgaattctgtttatcaaagcacgtaccaaagagcaggaaagatcgactctacttattgttgatagaagctctgaagtcatattgcaaagggaagggtggaatattgggacaatttttataatcaatttgctacaactcctttaaatttatatatatgggtataagtatttacatgtaaatttagatatgacttatgcaacataaatgtaataaaaagttattaaaa

SEQ ID NO: 88517 - DNA, 2983 bp, Homo sapiens
taatacatatataattgttagggcatagcatgaatgagcacatatagacacagtaggaaatacaaaaatataataatgcctaggttttattacatttatgtaaagagagggcacacagatggggtttcagtcagacacgaaggggaatgtaagtacggaatatgtgggaattctctatactctctttagagtttttctgtaagcctaaaattgttctaaaaaaaagtaaattttaataaattgataagttccaaagtctgcagatttcttgcaatctacattttcactggtcccttaagtgttttattttagatccaaagctgcttaactaactgaaatcccaagttgatacccacaggtagcaaaaacctgttagttcagttgtagactaaatagaaacctcaatcccttagtgcttagggctacctttaggtaatattttgcagaaaagaaaaataaaaaaactaacaaaaaatggttggtcttgtttgagtaacctggcctctgaatatttctgccttaaatcttgaagaaatcgtagattccctgaggccagcatttatagtgattcttctacttgctgcagtttccaagtaggatagattttatgtgcaattatggagaagaaaaattatatttatacagagattatattttgtggttattattactgcaaaaaagaataaaataaacttgcatcctaacaacgacaacaacaacataaaacatagtgttaagaacagggagtatgatttagaaggagggtgacaaaaaattattgttattttgtgttcagaaaatgaatacatcaatgcttaacatttatggagcaatataaaccagcttcagctatttctcttggggaaagaaatgaactggttgagagaaaaatgacacaaaacaaatagcatggctaactgacatgtagtcacccgaaccatgtttctgtggattatgtgcatcagagatctttgttttgttggtatttaccgataaactgttgaaaaatattataagctcatactcataaatatacttctaaaagaaatctgcaatgagagcaggaacccacagcatattaaatttataggacctggaaaagttaataaattattttttattaaggctggatttcccccttttctttgacacaatgatatatgcatgcaactaaatatcataagcctaatatttgggtgcctgggaaagaaagtaaaaatattcagctattaataaaaattatttcctaaggcatatattcatgggggattagttcagtctgagctctattcttttaaaaagaacattaaaaggcaaggtctttgctgggaaagtcaccttcccccatcttcttactttgcctggctcagctggaaaactacctcaattctctactctatttggggtgacgagacctcctgatcttgtgactaaatgaaaagctggaaaggttcttatttactcttgtacagagtcagccattttagaaacatttgtattcacagggctgttctcagtcagactaggctgcattccacgggcgcgtctctaatgcccgcatcagggtctggtcatgcaggcggatcttggtggagctgagttcccttcatgtccatctcatgcgcaggatgcagccgcaggatgcgccctagtacaagggaatcgtgctttgtgcagtctttcttcgttgtcatttttatgaagatgtgagccaaggagaataagaaacggagcgttatgactacattaataatcgcagagctgtatgttgtgaatgctacatagtaaatggaggaaacaaaaaactgaaacctgctttggctaattatgtaatgactgtgggtgaattgcctccctctcctctaaaattctattgtctctcttatgtgcataaaaaaggcgtttgaattcaggttctctgtgagtccttagtaatttcacacataaagtctaagtttttgccacataaacatagcttttcaagtgtgtgtctaatgtgtttacataaaacctctcacaaaaacattaacagtcccatgagaaggggaaatgggtatggtatatgcatcttccaaaggaaaaattattctrcagttctttccagtgcaagaacatatactttttagtatattacaaaatgtacgctacatttttgtctcaggaaaagacattagagatcaaaatacctaattcctgcctcatattggacacttgtgaatctctgagctaggtgatataaagtggtgcttaagagaatgaactcttgaaccacaatgtctggctcaaatcccagctgtaccacacaacattggtgcggcttggacaagctacaaaagctccttgtgcttccgtttctgcttctgtaaaatgggaattataatagtccctaccttgtaaaactgctaagagggttagagtttctatgagtaacttgtttagaacagtatctggtcgacagtgacagtgtaagcagtggtggctattactccttttttttgaactcgaaaatgtgctgatctaccttaggctacctccacagtaatagctcactgctattcagtctgtgttcgctcaaatgtcactattccacccctaaagaaaacaataacaagtgtatcccaggttcttgggaacatgcagatgtagctatatggtccttgccttcaagaaaatttgaacattaagggaaaaataagattttcagataacaggaaaaacaaatatcctcccaaataagatgaatatttaagaagaaatcaagatctcagaaatcacgaggcaaacggcactagccttcctaactgaaagccaacacaaaatattagctaactgtgagtgtatgtcagtagctgcatgattcatttttagttcttccttactcagtaataacccttcttaattctgctatagaaagtactgtttcccttaatagatgttaaaccaacactaattcctgtggtttgctgatcaatagcaaaatgga

SEQ ID NO: 88518 - DNA, 2983 bp, Homo sapiens
taatacatatataattgttagggcatagcatgaatgagcacatatagacacagtaggaaatacaaaaatataataatgcctaggttttattacatttatgtaaagagagggcacacagatggggtttcagtcagacacgaaggggaatgtaagtacggaatatgtgggaattctctatactctctttagagtttttctgtaagcctaaaattgttctaaaaaaaagtaaattttaataaattgataagttccaaagtctgcagatttcttgcaatctacattttcactggtcccttaagtgttttattttagatccaaagctgcttaactaactgaaatcccaagttgatacccacaggtagcaaaaacctgttagttcagttgtagactaaatagaaacctcaatcccttagtgcttagggctacctttaggtaatattttgcagaaaagaaaaataaaaaaactaacaaaaaatggttggtcttgtttgagtaacctggcctctgaatatttctgccttaaatcttgaagaaatcgtagattccctgaggccagcatttatagtgattcttctacttgctgcagtttccaagtaggatagattttatgtgcaattatggagaagaaaaattatatttatacagagattatattttgtggttattattactgcaaaaaagaataaaataaacttgcatcctaacaacgacaacaacaacataaaacatagtgttaagaacagggagtatgatttagaaggagggtgacaaaaaattattgttattttgtgttcagaaaatgaatacatcaatgcttaacatttatggagcaatataaaccagcttcagctatttctcttggggaaagaaatgaactggttgagagaaaaatgacacaaaacaaatagcatggctaactgacatgtagtcacccgaaccatgtttctgtggattatgtgcatcagagatctttgttttgttggtatttaccgataaactgttgaaaaatattataagctcatactcataaatatacttctaaaagaaatctgcaatgagagcaggaacccacagcatattaaatttataggacctggaaaagttaataaattattttttattaaggctggatttcccccttttctttgacacaatgatatatgcatgcaactaaatatcataagcctaatatttgggtgcctgggaaagaaagtaaaaatattcagctattaataaaaattatttcctaaggcatatattcatgggggattagttcagtctgagctctattcttttaaaaagaacattaaaaggcaaggtctttgctgggaaagtcaccttcccccatcttcttactttgcctggctcagctggaaaactacctcaattctctactctatttggggtgacgagacctcctgatcttgtgactaaatgaaaagctggaaaggttcttatttactcttgtacagagtcagccattttagaaacatttgtattcacagggctgttctcagtcagactaggctgcattccacgggcgcgtctctaatgcccgcatcagggtctggtcatgcaggcggatcttggtggagctgagttcccttcatgtccatctcatgcgcaggatgcagccgcaggatgcgccctagtacaagggaatcgtgctttgtgcagtctttcttcgttgtcatttttatgaagatgtgagccaaggagaataagaaacggagcgttatgactacattaataatcgcagagctgtatgttgtgaatgctacatagtaaatggaggaaacaaaaaactgaaacctgctttggctaattatgtaatgactgtgggtgaattgcctccctctcctctaaaattctattgtctctcttatgtgcataaaaaaggcgtttgaattcaggttctctgtgagtccttagtaatttcacacataaagtctaagtttttgccacataaacatagcttttcaagtgtgtgtctaatgtgtttacataaaacctctcacaaaaacattaacagtcccatgagaaggggaaatgggtatggtatatgcatcttccaaaggaaaaattattctgcagttctttccagtgcaagaacatatactttttagtatattacaaaatgtacgctacatttttgtctcaggaaaagacattagagatcaaaatacctaattcctgcctcatattggacacttgtgaatctctgagctaggtgatataaagtggtgcttaagagaatgaactcttgaaccacaatgtctggctcaaatcccagctgtaccacacamcattggtgcggcttggacaagctacaaaagctccttgtgcttccgtttctgcttctgtaaaatgggaattataatagtccctaccttgtaaaactgctaagagggttagagtttctatgagtaacttgtttagaacagtatctggtcgacagtgacagtgtaagcagtggtggctattactccttttttttgaactcgaaaatgtgctgatctaccttaggctacctccacagtaatagctcactgctattcagtctgtgttcgctcaaatgtcactattccacccctaaagaaaacaataacaagtgtatcccaggttcttgggaacatgcagatgtagctatatggtccttgccttcaagaaaatttgaacattaagggaaaaataagattttcagataacaggaaaaacaaatatcctcccaaataagatgaatatttaagaagaaatcaagatctcagaaatcacgaggcaaacggcactagccttcctaactgaaagccaacacaaaatattagctaactgtgagtgtatgtcagtagctgcatgattcatttttagttcttccttactcagtaataacccttcttaattctgctatagaaagtactgtttcccttaatagatgttaaaccaacactaattcctgtggtttgctgatcaatagcaaaatgga

SEQ ID NO: 88519 - DNA, 2983 bp, Homo sapiens
taatacatatataattgttagggcatagcatgaatgagcacatatagacacagtaggaaatacaaaaatataataatgcctaggttttattacatttatgtaaagagagggcacacagatggggtttcagtcagacacgaaggggaatgtaagtacggaatatgtgggaattctctatactctctttagagtttttctgtaagcctaaaattgttctaaaaaaaagtaaattttaataaattgataagttccaaagtctgcagatttcttgcaatctacattttcactggtcccttaagtgttttattttagatccaaagctgcttaactaactgaaatcccaagttgatacccacaggtagcaaaaacctgttagttcagttgtagactaaatagaaacctcaatcccttagtgcttagggctacctttaggtaatattttgcagaaaagaaaaataaaaaaactaacaaaaaatggttggtcttgtttgagtaacctggcctctgaatatttctgccttaaatcttgaagaaatcgtagattccctgaggccagcatttatagtgattcttctacttgctgcagtttccaagtaggatagattttatgtgcaattatggagaagaaaaattatatttatacagagattatattttgtggttattattactgcaaaaaagaataaaataaacttgcatcctaacaacgacaacaacaacataaaacatagtgttaagaacagggagtatgatttagaaggagggtgacaaaaaattattgttattttgtgttcagaaaatgaatacatcaatgcttaacatttatggagcaatataaaccagcttcagctatttctcttggggaaagaaatgaactggttgagagaaaaatgacacaaaacaaatagcatggctaactgacatgtagtcacccgaaccatgtttctgtggattatgtgcatcagagatctttgttttgttggtatttaccgataaactgttgaaaaatattataagctcatactcataaatatacttctaaaagaaatctgcaatgagagcaggaacccacagcatattaaatttataggacctggaaaagttaataaattattttttattaaggctggatttcccccttttctttgacacaatgatatatgcatgcaactaaatatcataagcctaatatttgggtgcctgggaaagaaagtaaaaatattcagctattaataaaaattatttcctaaggcatatattcatgggggattagttcagtctgagctctattcttttaaaaagaacattaaaaggcaaggtctttgctgggaaagtcaccttcccccatcttcttactttgcctggctcagctggaaaactacctcaattctctactctatttggggtgacgagacctcctgatcttgtgactaaatgaaaagctggaaaggttcttatttactcttgtacagagtcagccattttagaaacatttgtattcacagggctgttctcagtcagactaggctgcattccacgggcgcgtctctaatgcccgcatcagggtctggtcatgcaggcggatcttggtggagctgagttcccttcatgtccatctcatgcgcaggatgcagccgcaggatgcgccctagtacaagggaatcgtgctttgtgcagtctttcttcgttgtcatttttatgaagatgtgagccaaggagaataagaaacggagcgttatgactacattaataatcgcagagctgtatgttgtgaatgctacatagtaaatggaggaaacaaaaaactgaaacctgctttggctaattatgtaatgactgtgggtgaattgcctccctctcctctaaaattctattgtctctcttatgtgcataaaaaaggcgtttgaattcaggttctctgtgagtccttagtaatttcacacataaagtctaagtttttgccacataaacatagcttttcaagtgtgtgtctaatgtgtttacataaaacctctcacaaaaacattaacagtcccatgagaaggggaaatgggtatggtatatgcatcttccaaaggaaaaattattctgcagttctttccagtgcaagaacatatactttttagtatattacaaaatgtacgctacatttttgtctcaggaaaagacattagagatcaaaatacctaattcctgcctcatattggacacttgtgaatctctgagctaggtgatataaagtggtgcttaagagaatgaactcttgaaccacaatgtctggctcaaatcccagctgtaccacacaacattggtgcggcttggacaagctacaaaagctccttgtgcttccgtttctgcttctgtaaaatgggaattataatagtccctaccttgtaaaactgctaagagggttagagtttctatgagtaacttgtttagaacagtatytggtcgacagtgacagtgtaagcagtggtggctattactccttttttttgaactcgaaaatgtgctgatctaccttaggctacctccacagtaatagctcactgctattcagtctgtgttcgctcaaatgtcactattccacccctaaagaaaacaataacaagtgtatcccaggttcttgggaacatgcagatgtagctatatggtccttgccttcaagaaaatttgaacattaagggaaaaataagattttcagataacaggaaaaacaaatatcctcccaaataagatgaatatttaagaagaaatcaagatctcagaaatcacgaggcaaacggcactagccttcctaactgaaagccaacacaaaatattagctaactgtgagtgtatgtcagtagctgcatgattcatttttagttcttccttactcagtaataacccttcttaattctgctatagaaagtactgtttcccttaatagatgttaaaccaacactaattcctgtggtttgctgatcaatagcaaaatgga

SEQ ID NO: 88520 - DNA, 2983 bp, Homo sapiens
taatacatatataattgttagggcatagcatgaatgagcacatatagacacagtaggaaatacaaaaatataataatgcctaggttttattacatttatgtaaagagagggcacacagatggggtttcagtcagacacgaaggggaatgtaagtacggaatatgtgggaattctctatactctctttagagtttttctgtaagcctaaaattgttctaaaaaaaagtaaattttaataaattgataagttccaaagtctgcagatttcttgcaatctacattttcactggtcccttaagtgttttattttagatccaaagctgcttaactaactgaaatcccaagttgatacccacaggtagcaaaaacctgttagttcagttgtagactaaatagaaacctcaatcccttagtgcttagggctacctttaggtaatattttgcagaaaagaaaaataaaaaaactaacaaaaaatggttggtcttgtttgagtaacctggcctctgaatatttctgccttaaatcttgaagaaatcgtagattccctgaggccagcatttatagtgattcttctacttgctgcagtttccaagtaggatagattttatgtgcaattatggagaagaaaaattatatttatacagagattatattttgtggttattattactgcaaaaaagaataaaataaacttgcatcctaacaacgacaacaacaacataaaacatagtgttaagaacagggagtatgatttagaaggagggtgacaaaaaattattgttattttgtgttcagaaaatgaatacatcaatgcttaacatttatggagcaatataaaccagcttcagctatttctcttggggaaagaaatgaactggttgagagaaaaatgacacaaaacaaatagcatggctaactgacatgtagtcacccgaaccatgtttctgtggattatgtgcatcagagatctttgttttgttggtatttaccgataaactgttgaaaaatattataagctcatactcataaatatacttctaaaagaaatctgcaatgagagcaggaacccacagcatattaaatttataggacctggaaaagttaataaattattttttattaaggctggatttcccccttttctttgacacaatgatatatgcatgcaactaaatatcataagcctaatatttgggtgcctgggaaagaaagtaaaaatattcagctattaataaaaattatttcctaaggcatatattcatgggggattagttcagtctgagctctattcttttaaaaagaacattaaaaggcaaggtctttgctgggaaagtcaccttcccccatcttcttactttgcctggctcagctggaaaactacctcaattctctactctatttggggtgacgagacctcctgatcttgtgactaaatgaaaagctggaaaggttcttatttactcttgtacagagtcagccattttagaaacatttgtattcacagggctgttctcagtcagactaggctgcattccacgggcgcgtctctaatgcccgcatcagggtctggtcatgcaggcggatcttggtggagctgagttcccttcatgtccatctcatgcgcaggatgcagccgcaggatgcgccctagtacaagggaatcgtgctttgtgcagtctttcttcgttgtcatttttatgaagatgtgagccaaggagaataagaaacggagcgttatgactacattaataatcgcagagctgtatgttgtgaatgctacatagtaaatggaggaaacaaaaaactgaaacctgctttggctaattatgtaatgactgtgggtgaattgcctccctctcctctaaaattctattgtctctcttatgtgcataaaaaaggcgtttgaattcaggttctctgtgagtccttagtaatttcacacataaagtctaagtttttgccacataaacatagcttttcaagtgtgtgtctaatgtgtttacataaaacctctcacaaaaacattaacagtcccatgagaaggggaaatgggtatggtatatgcatcttccaaaggaaaaattattctgcagttctttccagtgcaagaacatatactttttagtatattacaaaatgtacgctacatttttgtctcaggaaaagacattagagatcaaaatacctaattcctgcctcatattggacacttgtgaatctctgagctaggtgatataaagtggtgcttaagagaatgaactcttgaaccacaatgtctggctcaaatcccagctgtaccacacaacattggtgcggcttggacaagctacaaaagctccttgtgcttccgtttctgcttctgtaaaatgggaattataatagtccctaccttgtaaaactgctaagagggttagagtttctatgagtaacttgtttagaacagtatctggtcgacagtgacagtgtaagcagtggtggctattactccttttttttgaactcgaaaatgtgctgatctaccttaggctacctccacagtaatagctcactgctattcagtctgtgttcgctcaaatgtcacyattccacccctaaagaaaacaataacaagtgtatcccaggttcttgggaacatgcagatgtagctatatggtccttgccttcaagaaaatttgaacattaagggaaaaataagattttcagataacaggaaaaacaaatatcctcccaaataagatgaatatttaagaagaaatcaagatctcagaaatcacgaggcaaacggcactagccttcctaactgaaagccaacacaaaatattagctaactgtgagtgtatgtcagtagctgcatgattcatttttagttcttccttactcagtaataacccttcttaattctgctatagaaagtactgtttcccttaatagatgttaaaccaacactaattcctgtggtttgctgatcaatagcaaaatgga

SEQ ID NO: 88521 - DNA, 2983 bp, Homo sapiens
taatacatatataattgttagggcatagcatgaatgagcacatatagacacagtaggaaatacaaaaatataataatgcctaggttttattacatttatgtaaagagagggcacacagatggggtttcagtcagacacgaaggggaatgtaagtacggaatatgtgggaattctctatactctctttagagtttttctgtaagcctaaaattgttctaaaaaaaagtaaattttaataaattgataagttccaaagtctgcagatttcttgcaatctacattttcactggtcccttaagtgttttattttagatccaaagctgcttaactaactgaaatcccaagttgatacccacaggtagcaaaaacctgttagttcagttgtagactaaatagaaacctcaatcccttagtgcttagggctacctttaggtaatattttgcagaaaagaaaaataaaaaaactaacaaaaaatggttggtcttgtttgagtaacctggcctctgaatatttctgccttaaatcttgaagaaatcgtagattccctgaggccagcatttatagtgattcttctacttgctgcagtttccaagtaggatagattttatgtgcaattatggagaagaaaaattatatttatacagagattatattttgtggttattattactgcaaaaaagaataaaataaacttgcatcctaacaacgacaacaacaacataaaacatagtgttaagaacagggagtatgatttagaaggagggtgacaaaaaattattgttattttgtgttcagaaaatgaatacatcaatgcttaacatttatggagcaatataaaccagcttcagctatttctcttggggaaagaaatgaactggttgagagaaaaatgacacaaaacaaatagcatggctaactgacatgtagtcacccgaaccatgtttctgtggattatgtgcatcagagatctttgttttgttggtatttaccgataaactgttgaaaaatattataagctcatactcataaatatacttctaaaagaaatctgcaatgagagcaggaacccacagcatattaaatttataggacctggaaaagttaataaattattttttattaaggctggatttcccccttttctttgacacaatgatatatgcatgcaactaaatatcataagcctaatatttgggtgcctgggaaagaaagtaaaaatattcagctattaataaaaattatttcctaaggcatatattcatgggggattagttcagtctgagctctattcttttaaaaagaacattaaaaggcaaggtctttgctgggaaagtcaccttcccccatcttcttactttgcctggctcagctggaaaactacctcaattctctactctatttggggtgacgagacctcctgatcttgtgactaaatgaaaagctggaaaggttcttatttactcttgtacagagtcagccattttagaaacatttgtattcacagggctgttctcagtcagactaggctgcattccacgggcgcgtctctaatgcccgcatcagggtctggtcatgcaggcggatcttggtggagctgagttcccttcatgtccatctcatgcgcaggatgcagccgcaggatgcgccctagtacaagggaatcgtgctttgtgcagtctttcttcgttgtcatttttatgaagatgtgagccaaggagaataagaaacggagcgttatgactacattaataatcgcagagctgtatgttgtgaatgctacatagtaaatggaggaaacaaaaaactgaaacctgctttggctaattatgtaatgactgtgggtgaattgcctccctctcctctaaaattctattgtctctcttatgtgcataaaaaaggcgtttgaattcaggttctctgtgagtccttagtaatttcacacataaagtctaagtttttgccacataaacatagcttttcaagtgtgtgtctaatgtgtttacataaaacctctcacaaaaacattaacagtcccatgagaaggggaaatgggtatggtatatgcatcttccaaaggaaaaattattctgcagttctttccagtgcaagaacatatactttttagtatattacaaaatgtacgctacatttttgtctcaggaaaagacattagagatcaaaatacctaattcctgcctcatattggacacttgtgaatctctgagctaggtgatataaagtggtgcttaagagaatgaactcttgaaccacaatgtctggctcaaatcccagctgtaccacacaacattggtgcggcttggacaagctacaaaagctccttgtgcttccgtttctgcttctgtaaaatgggaattataatagtccctaccttgtaaaactgctaagagggttagagtttctatgagtaacttgtttagaacagtatctggtcgacagtgacagtgtaagcagtggtggctattactccttttttttgaactcgaaaatgtgctgatctaccttaggctacctccacagtaatagctcactgctattcagtctgtgttcgctcaaatgtcactattccacccctaaagaaaacaataacaagtgtatcccaggttcttgggaacatgcagatgtagctatatggtccttgccttcaagaaaatttgaacattaagggaaaaataagattttcagataacaggaaaaacaaatatcctcccaaataagatgaatatttaagaagaaatcaagatctcagaaatcacgaggcaaacggcactagcyttcctaactgaaagccaacacaaaatattagctaactgtgagtgtatgtcagtagctgcatgattcatttttagttcttccttactcagtaataacccttcttaattctgctatagaaagtactgtttcccttaatagatgttaaaccaacactaattcctgtggtttgctgatcaatagcaaaatgga

SEQ ID NO: 88522 - DNA, 2983 bp, Homo sapiens
taatacatatataattgttagggcatagcatgaatgagcacatatagacacagtaggaaatacaaaaatataataatgcctaggttttattacatttatgtaaagagagggcacacagatggggtttcagtcagacacgaaggggaatgtaagtacggaatatgtgggaattctctatactctctttagagtttttctgtaagcctaaaattgttctaaaaaaaagtaaattttaataaattgataagttccaaagtctgcagatttcttgcaatctacattttcactggtcccttaagtgttttattttagatccaaagctgcttaactaactgaaatcccaagttgatacccacaggtagcaaaaacctgttagttcagttgtagactaaatagaaacctcaatcccttagtgcttagggctacctttaggtaatattttgcagaaaagaaaaataaaaaaactaacaaaaaatggttggtcttgtttgagtaacctggcctctgaatatttctgccttaaatcttgaagaaatcgtagattccctgaggccagcatttatagtgattcttctacttgctgcagtttccaagtaggatagattttatgtgcaattatggagaagaaaaattatatttatacagagattatattttgtggttattattactgcaaaaaagaataaaataaacttgcatcctaacaacgacaacaacaacataaaacatagtgttaagaacagggagtatgatttagaaggagggtgacaaaaaattattgttattttgtgttcagaaaatgaatacatcaatgcttaacatttatggagcaatataaaccagcttcagctatttctcttggggaaagaaatgaactggttgagagaaaaatgacacaaaacaaatagcatggctaactgacatgtagtcacccgaaccatgtttctgtggattatgtgcatcagagatctttgttttgttggtatttaccgataaactgttgaaaaatattataagctcatactcataaatatacttctaaaagaaatctgcaatgagagcaggaacccacagcatattaaatttataggacctggaaaagttaataaattattttttattaaggctggatttcccccttttctttgacacaatgatatatgcatgcaactaaatatcataagcctaatatttgggtgcctgggaaagaaagtaaaaatattcagctattaataaaaattatttcctaaggcatatattcatgggggattagttcagtctgagctctattcttttaaaaagaacattaaaaggcaaggtctttgctgggaaagtcaccttcccccatcttcttactttgcctggctcagctggaaaactacctcaattctctactctatttggggtgacgagacctcctgatcttgtgactaaatgaaaagctggaaaggttcttatttactcttgtacagagtcagccattttagaaacatttgtattcacagggctgttctcagtcagactaggctgcattccacgggcgcgtctctaatgcccgcatcagggtctggtcatgcaggcggatcttggtggagctgagttcccttcatgtccatctcatgcgcaggatgcagccgcaggatgcgccctagtacaagggaatcgtgctttgtgcagtctttcttcgttgtcatttttatgaagatgtgagccaaggagaataagaaacggagcgttatgactacattaataatcgcagagctgtatgttgtgaatgctacatagtaaatggaggaaacaaaaaactgaaacctgctttggctaattatgtaatgactgtgggtgaattgcctccctctcctctaaaattctattgtctctcttatgtgcataaaaaaggcgtttgaattcaggttctctgtgagtccttagtaatttcacacataaagtctaagtttttgccacataaacatagcttttcaagtgtgtgtctaatgtgtttacataaaacctctcacaaaaacattaacagtcccatgagaaggggaaatgggtatggtatatgcatcttccaaaggaaaaattattctgcagttctttccagtgcaagaacatatactttttagtatattacaaaatgtacgctacatttttgtctcaggaaaagacattagagatcaaaatacctaattcctgcctcatattggacacttgtgaatctctgagctaggtgatataaagtggtgcttaagagaatgaactcttgaaccacaatgtctggctcaaatcccagctgtaccacacaacattggtgcggcttggacaagctacaaaagctccttgtgcttccgtttctgcttctgtaaaatgggaattataatagtccctaccttgtaaaactgctaagagggttagagtttctatgagtaacttgtttagaacagtatctggtcgacagtgacagtgtaagcagtggtggctattactccttttttttgaactcgaaaatgtgctgatctaccttaggctacctccacagtaatagctcactgctattcagtctgtgttcgctcaaatgtcactattccacccctaaagaaaacaataacaagtgtatcccaggttcttgggaacatgcagatgtagctatatggtccttgccttcaagaaaatttgaacattaagggaaaaataagattttcagataacaggaaaaacaaatatcctcccaaataagatgaatatttaagaagaaatcaagatctcagaaatcacgaggcaaacggcactagccttcctaactgaaagccaacacaaaatattagctaactgtgagtgtatgtcagtagctgcatgaytcatttttagttcttccttactcagtaataacccttcttaattctgctatagaaagtactgtttcccttaatagatgttaaaccaacactaattcctgtggtttgctgatcaatagcaaaatgga

SEQ ID NO: 88523 - DNA, 1400 bp, Homo sapiens
ggatggtcacatcctctgctcccagtgggtctgtaatcttgtcgctctaatgaggcgagagcagatgaaaacattaggatagcgctaaggcaacacagaggtgtgcacctggctgagtggtgcagactccgagtgcctagagcaggtgagaaggcggtgctctggtggtggcaggtgaggtagacatgggtggggcattgaaggaaatacagggattgcctgggctgggccatcccccggtgccctgatttggtagtgggcatctgctgtttctgcctttgcagctgccctgctgtgtcccgcccaactgggaatccacacagtttggatagggctgacctcatgcatctctcagagtgcagggggtgggcactagatgccagcctggccagtcactgggtttcattcccttcaacccagtgattggctctggactcaatccagcccaacaaggctcaatctyaggtgagtgctgggaacatggagaaggggaaacactctctcctggatggctggatctagaagtaaaggtagcctggaggtgctgggcccgtgttgtggaaaggtcactctgagagtaaggcccatatggaggaaaggggagaggaaggggagagatctaatgtttgagcccctggatccagccacacctgactgcaaacatccctggaagttatttgaatcaataaattcccttcatttttgatgtcagtataagtcagggtttctgtcactggcaagtgaaaggggttttgttgccacagaaccccaaagatggtattatgctccaggaaacaagccagcatcagtccaccctactgaaaggataggagttggggaagggcgtatagtgaagtaaaagctatcagaaaaaggaaaatgcaaaagaaaattttaacaatgacccatgatgttgtagtcaagcacatgggtaataaaacctaggtctgtaaactaaagctgacctcttgcctgtgtaactggagtttgttatatatttcattgactggtactgattataaacctgtttatcaattgtagaacaaaaagcagaattagtcaccctccatcagatcctaagatgcctaacctttctttctctctacccactgaacctcatagtcaccctatcttaggtacagcctcactgagcagcaacgagaattttttttttttttttttttttttgaggaagtctccctctgttgcccaggctagagtgcagtggcccaatctcagctcactgcaacctctgcctcctggattcaagtgattctcctgcctcagcctcctgggtagctgggacaacaggcatgcaccatcacgcccagctaattttcatatttttagtagagacgggtttcaccatgttggccaggctggtctggaactcctgacct

SEQ ID NO: 88524 - DNA, 1400 bp, Homo sapiens
ggatggtcacatcctctgctcccagtgggtctgtaatcttgtcgctctaatgaggcgagagcagatgaaaacattaggatagcgctaaggcaacacagaggtgtgcacctggctgagtggtgcagactccgagtgcctagagcaggtgagaaggcggtgctctggtggtggcaggtgaggtagacatgggtggggcattgaaggaaatacagggattgcctgggctgggccatcccccggtgccctgatttggtagtgggcatctgctgtttctgcctttgcagctgccctgctgtgtcccgcccaactgggaatccacacagtttggatagggctgacctcatgcatctctcagagtgcagggggtgggcactagatgccagcctggccagtcactgggtttcattcccttcaacccagtgattggctctggactcaatccagcccaacaaggctcaatcttaggtgrgtgctgggaacatggagaaggggaaacactctctcctggatggctggatctagaagtaaaggtagcctggaggtgctgggcccgtgttgtggaaaggtcactctgagagtaaggcccatatggaggaaaggggagaggaaggggagagatctaatgtttgagcccctggatccagccacacctgactgcaaacatccctggaagttatttgaatcaataaattcccttcatttttgatgtcagtataagtcagggtttctgtcactggcaagtgaaaggggttttgttgccacagaaccccaaagatggtattatgctccaggaaacaagccagcatcagtccaccctactgaaaggataggagttggggaagggcgtatagtgaagtaaaagctatcagaaaaaggaaaatgcaaaagaaaattttaacaatgacccatgatgttgtagtcaagcacatgggtaataaaacctaggtctgtaaactaaagctgacctcttgcctgtgtaactggagtttgttatatatttcattgactggtactgattataaacctgtttatcaattgtagaacaaaaagcagaattagtcaccctccatcagatcctaagatgcctaacctttctttctctctacccactgaacctcatagtcaccctatcttaggtacagcctcactgagcagcaacgagaattttttttttttttttttttttttgaggaagtctccctctgttgcccaggctagagtgcagtggcccaatctcagctcactgcaacctctgcctcctggattcaagtgattctcctgcctcagcctcctgggtagctgggacaacaggcatgcaccatcacgcccagctaattttcatatttttagtagagacgggtttcaccatgttggccaggctggtctggaactcctgacct

SEQ ID NO: 88525 - DNA, 1506 bp, Homo sapiens
aggaaagaaggaaggggaaggggaagagaggggagggaaggaaggattggtttcacctctcttcctcccctattctaattgcagagactcctcacatagtacctgtgtcctctgagggcccagaagcacttcatcccttattgctcatatcaagcatcgaaaggaacctactgcccacccagctcatgccccaccagggtggacaatatttaagcaggcgtaagcttcctacatagaactcacatttcttcccctcctccaatcccaaaacgaagagtaatgaaatggagagaactcaacctccaagtttctaaagagctttggggatttttttggccaccacccagtaccccataaaagagggcaggcaaagtcctataacctttttcctaagagctcccacttgggaaggcctccagcagagtattttggtgccttgcaaaatccaaggccctgatagaagcaggaaatgtgattatgaccactctctctggcaattactggctcaggcactctaatagctcttagcaaaaaattacccgtccatcatgatgaagacagaaacagaagttacaaatgagtgccaaccgctgcagcacattgcctgcaaggttaacctttgggatcccgcaatctgtgacccatacctctaatagctgggaaacctgaggttccaaaaggcgccaatgcccacacccccagaggttgctcctacaactttcccagaagagctgtgtgctcttcagttaggtgactgcctctggtttcctatctaaagccactcctttacaggacaattctgcggccacagattgaggttgaattcccacttaaaatgtgattatatcccaagggtaagtgtaaatctacttggcatggsccaccaccctcccagaatctaaacatggcacttcttcccagttatatttggttccaagaaagaaacttccttgcattttggtttatcaagaaaacataaaactaaactgatacacagagagagtggggtgcagaagggtgcacattcaaactggatttttcttgagttgtaaggaaagaggataaatccccaaatgtcctaaacatgtgttgaaatagcaagtgactttagaagtcatcctacctctccaacacagtccccagtccccaaggcatgtgagccatttgcattctgtaggaacccccagctaagggaggcagaatagaggcatgattaagagcaggccctgataatcagacaaaccgggtccaaatactgacaacatcccttattagctgtgggtcttgggagagtgtttcttccaacttgatgactgatctgccaagtctctttttttaactcccttctctgggttgtcaggagagttaaatgagacgatgtgtaaattacccagtgcctagcacgtggtagccatagggtactcaccccgatgagtagtttctgtgattagcccagaggaacaacaaaagctgagactgactgacttattacttcttcaataacag

SEQ ID NO: 88526 - DNA, 663 bp, Homo sapiens
taaaaaaagaatcatttcagacctctgactcccagacctgtaaaataataaatgtgtgttgtttaaagccatgtgtgttgcagtgacttgttacagaagaaatagaaaacacattcaagacctctctgggtctgtttcctcctctgcaagatggaaggccctggactaaatacttctttttgttactgttgtcaggatacaattttcacaattaatttttttacttcctttctagctctcctgacgagaaaaattaattgagtacttaagacatgccaggtcctgttctaagtccttaatatgcattayttctttaaacctcaaaacaaggctgtaattgaggcaccattagcatctcctcccagatcaagaaaatcaaagccaaggaaggtaaagtcacttgcccaaagtcacacagttgtaaatggcagagtgaggatttcaatccacagtctggccctagagaagccatgatcttaaccagcaagcaaagccaatactggtgttctggttagggatgaggaagcccaagacctggtcacggtgacatggctagatagaagcaaatccagatctcatgatgccagggatttccccaacactgcacccgattgcctagcttccaaagcacatttggacagcaaatgagaatcataaggatcc

SEQ ID NO: 88527 - DNA, 1755 bp, Homo sapiens
cttctctatgggaagctcttattaatagtctgaagagtggaaagctttgcccttatacaatcagcactgtagtcgtttctttaaaaatatgttttaatgtgtgaaattgcaggatgccaacgttaccattaaaacccctctccagttccaataatttctccacttacatttcttcaccctttccccctcctcttttttttttttttttttttttttaattctacttcttccaaagcatatttcaaagtggtcagagcaggcttgcagggctaccaggaaggcaaatgcacagcctgccttttgtccaccagctgtagccacggagcagggtggtcccactgcatgtcgtaggcactgttcacggatcaaggaaactttccttcagaggaatttagactcgatgtgacgtttgtggcataaagagcgagatctagtctcaactctgttttgccattacttaggcacctactgcataccaggaagtctatatgtgacaattcaatttacttctcacaaccctggtgttgatgtagttggagagaaaaggcagcatgttcaaggtcaagagctagtgtgggttggtcagaacctaactcaggtcaaccagatgtgtccattgcttcccttccctccctgcctcccttcctgttttggctctgtctagtcattcaaaagattttctgagcacctgctctgctccagggtccaaggtgagtgaaaagtggcctccgcctttagagactcaactcttttttcatggacccccatggaaacacaaccccaggagccctatggccattgatcttcaccttctatctgtacaaaagaggaaggaggccttgagtcatccccacagttttttctagaaatgcattctccaaggcyatgagctctggaaaagtgggaagtgtgtggaaaaatcccctctctctcttgtctttactgaatctctaccaattcccagggcaatgggtaacagccacaacactttagcaatcctcctcttggctccttctgccttgtgttttagattcaatgctcatgtgccatattgtcaacacgcctgctcatggactattactgtcacacgcacacatacactcatggaaaaaaaaatcaatgcaatttgaatttctcttccccagacgagtctttgataaattgttgtggagagctattgatctcttattgcgatgtgatttttaaacagcattaaagtaaacatagtcttattgtgttcgttttactggataacacttatctagacaaaaggaggcacgaagctgccggagctactcagctttacctctaggaaagatacagcgaatcaccgccaataaaacaaagcaaaacaaaaagctcgccatgctgaacggaatgggaaaattgctctcttgtcactaattttgattgaattgagtcggcaatctctgaaccggttcactgatacaacaataggaaacatttaactgtttcttgcacctttaaacataaatagtaggtttttaagcagtcagtaggcgatgtgtgatcaaggttcagacagacgcagacaactgatcacccactcagatcccagacttgatggaaatgagatattgtccagaagagcgctctcagtggctgctgggtgagcaaggacttggcccttgtctgctgggagagatcaaggctcagggttagtgatatgaatgagcacgctggctgacacttactgaggactctctgtgcaccaggctgtgctctaagtgctat

SEQ ID NO: 88528 - DNA, 883 bp, Homo sapiens
tttccaagttgtcatcttccttctccaaaactaggtagaaggcagctccttgggaattgtgttggatgaggttgtgtgttcctgagaacattgctgggcaggtcgactgccatcctttttcagctgcttacagaaggaacatggctgggtcttcccctggtctttgtctctgctgtggactatgatagtcgagtcttgcatttggcggaatccacaatggctgtcacccaggcaggcctgtctgggaccagtgatgagctagtgctgagggacactgcatgttttctcttttgtacacagaaggtggtcatacctcctctcactatgcccaggcctgggacaatgcaggaggaccctagtggcctgaaatctatgttggcttgtcacttaattgacaatagaagaaatttatgaactggcaaaaaaaaaaaatgctactgcttaaaataaccacaaaccattmgacatacctcacattgaaagctgagcattaccgctcacacaatgacagcatccgtaagagggtgccagatgtgtgtgtggggagcttgcgtgcgtggatctggttctcattctttgtgtagcatcggacccaataacttttttttttttcattttcactggacacttattttattccttcggttttctggccagctgttgttcatggctctttctgtcctatagaatgcagatatagtcattgaaaccctaagttacctagtcgaaaccccaagtgaaaccccaagttacctaggaagggaaggtacaaggacaaggaagggtagggagggagccgcgtctagagcaaggcccatgggggccagcaccctgggtgaccacagccatcctcggtagactttaaacaacaacctactgaatg

SEQ ID NO: 88529 - DNA, 883 bp, Homo sapiens
tttccaagttgtcatcttccttctccaaaactaggtagaaggcagctccttgggaattgtgttggatgaggttgtgtgttcctgagaacattgctgggcaggtcgactgccatcctttttcagctgcttacagaaggaacatggctgggtcttcccctggtctttgtctctgctgtggactatgatagtcgagtcttgcatttggcggaatccacaatggctgtcacccaggcaggcctgtctgggaccagtgatgagctagtgctgagggacactgcatgttttctcttttgtacacagaaggtggtcatacctcctctcactatgcccaggcctgggacaatgcaggaggaccctagtggcctgaaatctatgttggcttgtcacttaattgacaatagaagaaatttatgaactggcaaaaaaaaaaaatgctactgcttaaaataaccacaaaccattcgacatacctcacattgaaagctgagcattaccgctcacacaatgacagcatccgtaagagggtgccagatgtgtgtgtggggagcttgcgtgcgtggatctggttctcattctttgtgtagcatcggacccaataacttttttttttttcattttcactggacacttattttattccttcggttttctggccagctgttgttcatggctctttctgtcctatagaatgcrgatatagtcattgaaaccctaagttacctagtcgaaaccccaagtgaaaccccaagttacctaggaagggaaggtacaaggacaaggaagggtagggagggagccgcgtctagagcaaggcccatgggggccagcaccctgggtgaccacagccatcctcggtagactttaaacaacaacctactgaatg

SEQ ID NO: 88530 - DNA, 883 bp, Homo sapiens
tttccaagttgtcatcttccttctccaaaactaggtagaaggcagctccttgggaattgtgttggatgaggttgtgtgttcctgagaacattgctgggcaggtcgactgccatcctttttcagctgcttacagaaggaacatggctgggtcttcccctggtctttgtctctgctgtggactatgatagtcgagtcttgcatttggcggaatccacaatggctgtcacccaggcaggcctgtctgggaccagtgatgagctagtgctgagggacactgcatgttttctcttttgtacacagaaggtggtcatacctcctctcactatgcccaggcctgggacaatgcaggaggaccctagtggcctgaaatctatgttggcttgtcacttaattgacaatagaagaaatttatgaactggcaaaaaaaaaaaatgctactgcttaaaataaccacaaaccattcgacatacctcacattgaaagctgagcattaccgctcacacaatgacagcatccgtaagagggtgccagatgtgtgtgtggggagcttgcgtgcgtggatctggttctcattctttgtgtagcatcggacccaataacttttttttttttcattttcactggacacttattttattccttcggttttctggccagctgttgttcatggctctttctgtcctatagaatgcagatatagtcattgaaaccctaagttacctagtcgaaaccccaagtgaaaccccaagttacctaggaagggaaggtacaaggacaaggaagggtagggagggagccgcgtctagagcaaggcccatgggggccagcaccctgggtgaccacagccatcctcrgtagactttaaacaacaacctactgaatg

SEQ ID NO: 88531 - DNA, 1530 bp, Homo sapiens
tatgtttgtaaatttttttcactctttgcagaactcaatctaccatctgcatattaataatgtgtggcatgctgcatgaaataatatagataatagaatcaagagtaaattattaacagtccacctcctgtttgcttcaaagtgctatttgcaaatggaaaaataaattagccgctaaaaacattaaattggttacaatcgaatccttcaacagagtaaagctgccatgggaactgactagatgattttaaagctaaaataagccttttcaatacatacttcagttttttacagaaaatatattaggatgtcagttcaaaatgcatatataattagaaatcagctttttctatcatgccagcttactttctgaaaagaatctatcgtaattaatttctttatttgattcggaaaccaaagggttaattaaagatagagacctctatttttagctgttactatagccagactcccattcagtctaaaaacagtcatgtattttacaccatttttaaccctgcaaagctgagactcatgcctacccaaattaaggataagcttaaatagcccatcctcagtcaaaaccatggcaaccagtacacagtacacatcctgcatcttgcccggtagtccttcaaattctttaatcacaagacaggaaatctgttttgtttggatgtcacttaagggcagattaatattacatgatggtcaaccatttgcttttatttaggaaaataaaaacctgtttgatggtgtaagctttacaattagagagagacaagagtgctttttattatttatttgtttactatcttttttcaaaaagatctgtggtaagtcccagaatcccaaaaggagagatgaagaaagtgagaagtattgggttgtgggctttctgcagttatgactgcagaaataactagcttggcagtcagggtaaataagaaaaataaaattggattctgtacagtgacactgccgaagtaccactcttaaactgggcaacatgaagagatctttgatatttctgtcttttgtttcaagttgaaaatagcttcatgatttttttctgattataaagtcaacagatgttcaagtagaccatccatgcactttagaagagtataaagaagaaagcaaacatcagcctaagtcacccaaaggcaactgttaaaatcatggtgactatcatcccaacagcactctgtgcatgtattttttttttttttttttttttgagactgagtttcactcttgtcacccagactggagtgcaatggtgcaatcttggctcactgcaacctccgcctcccgggttcaagcaattctcctgccttagcttcctgagtagctgggactacaggcgcccaccaccacaaccgactaatttttgtatttttagtagagamagggtttcactgtgttggttagactggtcacgaactcctgacctcaggttatccacccacctcggcctcccaaattgttgggattacagacatgacccactgcacctggccacatgca

SEQ ID NO: 88532 - DNA, 1530 bp, Homo sapiens
tatgtttgtaaatttttttcactctttgcagaactcaatctaccatctgcatattaataatgtgtggcatgctgcatgaaataatatagataatagaatcaagagtaaattattaacagtccacctcctgtttgcttcaaagtgctatttgcaaatggaaaaataaattagccgctaaaaacattaaattggttacaatcgaatccttcaacagagtaaagctgccatgggaactgactagatgattttaaagctaaaataagccttttcaatacatacttcagttttttacagaaaatatattaggatgtcagttcaaaatgcatatataattagaaatcagctttttctatcatgccagcttactttctgaaaagaatctatcgtaattaatttctttatttgattcggaaaccaaagggttaattaaagatagagacctctatttttagctgttactatagccagactcccattcagtctaaaaacagtcatgtattttacaccatttttaaccctgcaaagctgagactcatgcctacccaaattaaggataagcttaaatagcccatcctcagtcaaaaccatggcaaccagtacacagtacacatcctgcatcttgcccggtagtccttcaaattctttaatcacaagacaggaaatctgttttgtttggatgtcacttaagggcagattaatattacatgatggtcaaccatttgcttttatttaggaaaataaaaacctgtttgatggtgtaagctttacaattagagagagacaagagtgctttttattatttatttgtttactatcttttttcaaaaagatctgtggtaagtcccagaatcccaaaaggagagatgaagaaagtgagaagtattgggttgtgggctttctgcagttatgactgcagaaataactagcttggcagtcagggtaaataagaaaaataaaattggattctgtacagtgacactgccgaagtaccactcttaaactgggcaacatgaagagatctttgatatttctgtcttttgtttcaagttgaaaatagcttcatgatttttttctgattataaagtcaacagatgttcaagtagaccatccatgcactttagaagagtataaagaagaaagcaaacatcagcctaagtcacccaaaggcaactgttaaaatcatggtgactatcatcccaacagcactctgtgcatgtattttttttttttttttttttttgagactgagtttcactcttgtcacccagactggagtgcaatggtgcaatcttggctcactgcaacctccgcctcccgggttcaagcaattctcctgccttagcttcctgagtagctgggactacaggcgcccaccaccacaaccgactaatttttgtatttttagtagagacrgggtttcactgtgttggttagactggtcacgaactcctgacctcaggttatccacccacctcggcctcccaaattgttgggattacagacatgacccactgcacctggccacatgca

SEQ ID NO: 88533 - DNA, 745 bp, Homo sapiens
tcccctagagccacaggagagagcacasctctgctggatttcagacctctgtcatccagaactctgagagagtccatttctgtcattttaagccaccaatttgtggtaatttgttaaggcagctacaggaaactaatacagttattgatatggttcggctctgtgtccccacccaaatctcacgtcaaattttaattcccaatgttggagtaggggcctagtgggaggtgactggatcatggaggcagatttctcccttgctgttctcatgaaagtgagtgagttctcatgagatctggttgtttaaaagtgtatagcactatcctcttctctctcttcctccttctctggccatgtaggatgtacctgcttcccctcgccttctgccatgatggtaagtttccctaggcctttccagccatgcttccagtacagcctgcagaactgtgtgtcaattaaatctcttttctttataaactacccattctcaggtagttctgtgtagcaacagactaatacagtcattgatacaaaaacctgcacaaatcttaagtatggaatttaataaattatcacaaagtgtttattactttttcccattaaaaaaattaattaggcagattttcaaacatacacaaaaacagagagtaatataatgaataaggtaatattcactataagtaacataatgaatcctcatgtgcccaaaacccattttcttttttttattattattatactttaa

SEQ ID NO: 88534 - DNA, 745 bp, Homo sapiens
tcccctagagccacaggagagagcacacctctgctggatttcagacctctgtcatccagaactctgagagagtccatttctgtcattttaagccaccaatttrtggtaatttgttaaggcagctacaggaaactaatacagttattgatatggttcggctctgtgtccccacccaaatctcacgtcaaattttaattcccaatgttggagtaggggcctagtgggaggtgactggatcatggaggcagatttctcccttgctgttctcatgaaagtgagtgagttctcatgagatctggttgtttaaaagtgtatagcactatcctcttctctctcttcctccttctctggccatgtaggatgtacctgcttcccctcgccttctgccatgatggtaagtttccctaggcctttccagccatgcttccagtacagcctgcagaactgtgtgtcaattaaatctcttttctttataaactacccattctcaggtagttctgtgtagcaacagactaatacagtcattgatacaaaaacctgcacaaatcttaagtatggaatttaataaattatcacaaagtgtttattactttttcccattaaaaaaattaattaggcagattttcaaacatacacaaaaacagagagtaatataatgaataaggtaatattcactataagtaacataatgaatcctcatgtgcccaaaacccattttcttttttttattattattatactttaa

SEQ ID NO: 88535 - DNA, 1958 bp, Homo sapiens
tttaaatattttaaattttaaaataagtagtaatttaaattttaataataatttttcaatattacatacaatgtaatatacacatctgaattcccatattcatggctctttattacagggattcagataggatgtagttcaaactatatgcccctccttcctgaaatacagtcaatgatggtgaagtgtaatgtaatactcctggggttgtaagagaatcattagctctttttcctagagcaagatttacaaagtactttcaacatcaattattaggcatctgttacagtatttaagaactaagcctggagtcttttcacatgcaaaactgtatttgaagtcaacatatgtcctctaattaacatgttatattttactatatatgatatgcatgccagtggagttgaaggaactagaaaatttttatctggagatgatcaataataacagttttttcaattttattcactactaaatggataagggagtgtatgtcttcttcrtaactccatgcaaaaaccaatgtgtgtgaaatacagtaaaatgttgaacaacatgggtttaaactgcaagaatccacttatacacagattttcttccacctctgccattcctgagatagcaagaccaacacttcctcttcctcctcctcctcagcctattcaacatgaagacgacagggatgaaaacatttatgatgatccatgtccccttaataaattgtaaatatattgtctctaccttatgattttcttaacaactttttcttttctctagcttagtttattgtaagactgtagtataaaataaatatacaaatatgtattaatcaactgttcatgttattggtaaggctttcagtcaacagtaggctattagtagttaagttttgggggagtcaaaagttaaacacagattactgactgcgcagggagtcggtacccctaacccctgcagtgttcaatgcaaggtcaactgtacactgacacacacacacacacacacacacacacacacacacacacacatatatatatatttaattgagacggagtctcactttgtttcccaggctagagtgcagtggcgcatcttagctcactgcaacctctgcctccctggttcaagcaattctcctgcctcagcctcctaagtatctgggattacaggtgcgtgccaccacacccagttaatttttgtatttttagtagagatgaggtctcaccatgttggccaggctggtctcaaactcctgacctcaagtgatctgcccacttcagcttcccaaagtgctgggattacgggtgtgagccacagtgcccagcccactgacatatattttgagtcagcaatgacacaggaaagagagctgggatcacttcttcctcattattttccccatgcatccaggtagaaacgaggaatatacatgcacctttgcatttccaaatctatttatttttatttatattttttacttttttcttctataaccaatcatctaacctatttttgtttctagaaactccaattctttaaaaacaatattggtataaaatctcttcccttcccctctccacccatgcattcttcagtcctttagcagtcatgcttttctcatggcctatgtgtacctctctctttcttctctttgttttattcccttgtatggttcaaaattcctggaagaagataagcaggagccatctgtgtcccacaattaggagggggactcctgtgataaagcattggttcccaaatcttggagtttgtttaaaaatacagactatactcatcatcccacatttggttttccagatctccaaggttagggccctaaaatgtgtaattatggcaagctccctaagcaattctgatggagagagtccaaaaacagatacttgggaaccactcttacgaagcacagtgattattcttgaccatagacaagagcacac

SEQ ID NO: 88536 - DNA, 1958 bp, Homo sapiens
tttaaatattttaaattttaaaataagtagtaatttaaattttaataataatttttcaatattacatacaatgtaatatacacatctgaattcccatattcatggctctttattacagggattcagataggatgtagttcaaactatatgcccctccttcctgaaatacagtcaatgatggtgaagtgtaatgtaatactcctggggttgtaagagaatcattagctctttttcctagagcaagatttacaaagtactttcaacatcaattattaggcatctgttacagtatttaagaactaagcctggagtcttttcacatgcaaaactgtatttgaagtcaacatatgtcctctaattaacatgttatattttactatatatgatatgcatgccagtggagttgaaggaactagaaaatttttatctggagatgatcaataataacagttttttcaattttattcactactaaatggataagggagtgtatgtcttcttcataactccatgcaaaaaccaatgtgtgtgaaatacagtaaaatgttgaacaacatgggtttaaactgcaagaatccacttatacacagattttcttccacctctgccattcctgagatagcaagaccaacacttcctcttcctcctcctcctcagcctattcaacatgaagacgacagggatgaaaacmtttatgatgatccatgtccccttaataaattgtaaatatattgtctctaccttatgattttcttaacaactttttcttttctctagcttagtttattgtaagactgtagtataaaataaatatacaaatatgtattaatcaactgttcatgttattggtaaggctttcagtcaacagtaggctattagtagttaagttttgggggagtcaaaagttaaacacagattactgactgcgcagggagtcggtacccctaacccctgcagtgttcaatgcaaggtcaactgtacactgacacacacacacacacacacacacacacacacacacacacacatatatatatatttaattgagacggagtctcactttgtttcccaggctagagtgcagtggcgcatcttagctcactgcaacctctgcctccctggttcaagcaattctcctgcctcagcctcctaagtatctgggattacaggtgcgtgccaccacacccagttaatttttgtatttttagtagagatgaggtctcaccatgttggccaggctggtctcaaactcctgacctcaagtgatctgcccacttcagcttcccaaagtgctgggattacgggtgtgagccacagtgcccagcccactgacatatattttgagtcagcaatgacacaggaaagagagctgggatcacttcttcctcattattttccccatgcatccaggtagaaacgaggaatatacatgcacctttgcatttccaaatctatttatttttatttatattttttacttttttcttctataaccaatcatctaacctatttttgtttctagaaactccaattctttaaaaacaatattggtataaaatctcttcccttcccctctccacccatgcattcttcagtcctttagcagtcatgcttttctcatggcctatgtgtacctctctctttcttctctttgttttattcccttgtatggttcaaaattcctggaagaagataagcaggagccatctgtgtcccacaattaggagggggactcctgtgataaagcattggttcccaaatcttggagtttgtttaaaaatacagactatactcatcatcccacatttggttttccagatctccaaggttagggccctaaaatgtgtaattatggcaagctccctaagcaattctgatggagagagtccaaaaacagatacttgggaaccactcttacgaagcacagtgattattcttgaccatagacaagagcacac

SEQ ID NO: 88537 - DNA, 1958 bp, Homo sapiens
tttaaatattttaaattttaaaataagtagtaatttaaattttaataataatttttcaatattacatacaatgtaatatacacatctgaattcccatattcatggctctttattacagggattcagataggatgtagttcaaactatatgcccctccttcctgaaatacagtcaatgatggtgaagtgtaatgtaatactcctggggttgtaagagaatcattagctctttttcctagagcaagatttacaaagtactttcaacatcaattattaggcatctgttacagtatttaagaactaagcctggagtcttttcacatgcaaaactgtatttgaagtcaacatatgtcctctaattaacatgttatattttactatatatgatatgcatgccagtggagttgaaggaactagaaaatttttatctggagatgatcaataataacagttttttcaattttattcactactaaatggataagggagtgtatgtcttcttcataactccatgcaaaaaccaatgtgtgtgaaatacagtaaaatgttgaacaacatgggtttaaactgcaagaatccacttatacacagattttcttccacctctgccattcctgagatagcaagaccaacacttcctcttcctcctcctcctcagcctattcaacatgaagacgacagggatgaaaacatttatgatgatccatgtccccttaataaattgtaaatatattgtctctaccttatgattttcttaacaactttttcttttctctagcttagtttattgtaagactgtagtataaaataaatatacaaatatgtattaatcaactgttcatgttattggtaaggctttcagtcaacagtaggctattagtagttaagttttgggggagtcaaaagttaaacacagattactgactgcgcagggagtcggtacccctaacccctgcagtgttcaatgcaaggtcaactgtacactgacacacacacacacacacacacacacacacacacacacacacatatatatatatttaattgagacggagtctcactttgtttcccaggctagagtgcagtggcgcatcttagctcactgcaacctctgcctccctggttcaagcaattctcctgcctcagcctcctaagtatctgggattacaggtgcgtgccaccacacccagttaatttttgtatttttagtagagatgaggtctcaccatgttggccaggctggtctcaaactcctgacctcaagtgatctgcccacttcagcytcccaaagtgctgggattacgggtgtgagccacagtgcccagcccactgacatatattttgagtcagcaatgacacaggaaagagagctgggatcacttcttcctcattattttccccatgcatccaggtagaaacgaggaatatacatgcacctttgcatttccaaatctatttatttttatttatattttttacttttttcttctataaccaatcatctaacctatttttgtttctagaaactccaattctttaaaaacaatattggtataaaatctcttcccttcccctctccacccatgcattcttcagtcctttagcagtcatgcttttctcatggcctatgtgtacctctctctttcttctctttgttttattcccttgtatggttcaaaattcctggaagaagataagcaggagccatctgtgtcccacaattaggagggggactcctgtgataaagcattggttcccaaatcttggagtttgtttaaaaatacagactatactcatcatcccacatttggttttccagatctccaaggttagggccctaaaatgtgtaattatggcaagctccctaagcaattctgatggagagagtccaaaaacagatacttgggaaccactcttacgaagcacagtgattattcttgaccatagacaagagcacac

SEQ ID NO: 88538 - DNA, 802 bp, Homo sapiens
ggctgcagcaaggggctggaggcgtgagaagaaacagaaaagaacggagggccatttctgcctccccagtccggatcatcctcctcctccaccccagagccccagggtgctgagccttgcgcccctgcccctcaaggctatggaatgtcattgccactcagcgtgaaggttctggaggggacctcaaacaccaggcccctctgcccagagagccccagtggacccgctgagccagggacctgctccttggagccaaccaccttgtgacttgtgaattgtgttgagtcccgtttcctttttcccttttgtttattgctttgtgtatctggcagctttatcccaaagctgctctcacgtggtccctctgtcccatcctgccattttcctccctctggggccccttgcatgggagactgggagcagcgtccacccgccacccagcagaggctcaggtcctggagttaaaagagaagcacaggcaggggaygctctccaaactgccttcagcccgcatctttgaactctgcagtaggaagactcctgggcccccatgtccccatgcatatgcacctgcatgcatgtgacacacttctcggcccatggagaagactgtccgcacgggggtgtgagctgcccagcacccactgatcaattgctgcattcccagctgcctttaagctggcatggggcgccctctgaggcacgcccagcccctggggcctagactctggtgttctctaggaactgtctatctctgtgtgtgggagccacagacttgggctttcagacccccacaatggat

SEQ ID NO: 88539 - DNA, 749 bp, Homo sapiens
atttttaattttaactttccgtatttttatatttttcatttacattttcatgcaaatatattcacattttttatactttgatttcaattattttatttttttaatcttttagctcattactgtcactagaaaataatatgtggtaatattgattatggcaatataattagtgattttgctaaaatgaaggagtaaaatactgtctgaaataaatacattctaatttaagaattttgtgtttatatgttacattcttcatccaaactttgacagtccatcatcacaagagccagacatgaactataacacttagattcagtttttcttaaatattttgccaacttttagtcatatgaaagtcatagctttatagattatttgttctgtcattgtacaagtatatttgagaaggtaggataaaacacatgttaattagtggttccttagttttatatacgactttttttgttttgttttttaaatttttaaaaaatataaatagagatggggtcttgctatgttgaccaggctggtcttgacctcctggcttcaagcaattctcccatctcagcctctcaaagtgctgggattacaggtgtgagccaccatgcctggccagtatacaactcttaaatgcytacacatatggtttgtgacttctatttatacttttatcatagggcctctattcttagtctcataggtcccaaaatgttaggacagacctacacgcaaagaactttggacac

SEQ ID NO: 88540 - DNA, 581 bp, Homo sapiens
ggggtgagccaggcatcacctcctccaggaagctgcctctgactgcagggctgggtccagggatccttagggttccccagcccttgggctgctccactgtgatgttgaccccaacacatggccactgtgtgtccctggcagctccccgaccaggccttgagctctgcagggccaaaccctgctccaactacacagtatgggggctgggaggagaggctggctcctcgggacgttcacagtctgttcagacacagacaggggctgcggtggccagagatgggtctgagccgtggactgaggggtgggggagcsgtggtgagcaggagagtcctggtggaggtgagcacaggcatgagggaggggtgctgggaggcagtgcaggcaagggtgtcagcagagatctgctccggagacagagggggctgctctgagactctgaggcctggcagtgggagtggggagggatggaaatggtgtttagaggacagaagtggccagatgtggctgctgactaattatggggtgaagaaggggatttggacagtgcccatgtgtcacccactctggccccagaggatgat

SEQ ID NO: 88541 - DNA, 2355 bp, Homo sapiens
tggtgtaggaaagggggcactcacgaatagtgactccgtttagacgagacatttccccctcagttcccaggctctacctatcctgattcattcacctaaggaatcagctttgtccctgtaggaatttggattggcaacttttgaattaaagtctaatccagtggtaacagttcacccatggagtcagataacctggcttcgaatctgggaaccacccttatggctgagtggatttcactctctgcacctcagcttctctacctatgggtagtaatcccggagggatgtggtgaggcataagagaaaatccatataaagcacttaaatgagtgcctaggacagagacaacacaactgttccatcatcgtcatctttccaaagtgccactctgcatgtacctttaacttacacacacaaaaatggggtcatacagtaagtgctgttgatggacagatattgaccagctctgctcctttctctgtatctgtttcctgtcttataaatcaaaagggtcggctcagaagctttctgaggtcctttccaattctgacattctgtgactccaagatccaaggagggcccccagattccttcttgagctttcaaagcattcccgatgtgtgctttagagtgggtctggacagtgtatctgtcaagggggctgcaggcaagaggggagacacgaagccaaactatgagacaagcatgggaacagccttaaccgcaagctctagccttgaacccatccaaagaacactgatgtgagccaactgtgcatatctgttgattaatcttcccaggaaatgatgttctagaaccctccacagccacgtgacctccgccgccaacatcagccatcatctggactggtcttttcatccagggcactcgatggtggctagcaaaaggacccccagcccatgctgaatgccaggatttgtatttttatcttgccctgcaggctgcctcgccttgagcaatgctgtgtgatgacagagatattatcaccctaagctaaaatattcaccaataacgagacaatgaaaacagttgctagaagtctgcggtgaatgcagagggagcaaactctgttaattattcaggaaatcctcttcataaattcatttagatttctgcaaatgagttagtatttgattaaaaaaaacaaaacaaaacaaaaccctgggaactcagcccaagcagtagagtaggtataggcttgaacaagttcaggaatcagacagccttggacgttcagccccatgaccttaaacaagtctgtgccccctcaaaacttctgttacctgtctacaaagtggggatgctaatactaacctgtggtgttgggaaggtggaactaacaggatgcattctgtgtacttcacaaaaggtctggctcatgagcccttaatgcatgttatgaacagggtaacttcactgtggctttcttattaaccatccctgtgtatcgctctaaggagagggcagagtctcaaggctattcatgtttgaatgaaggtgctggaaagagacagaggcgtaagggatcctgcatgcctcatatgaagacacatgtgaacacaaggaaacatggctccagtgttgcagctgcttctgatttttcaagataaattttaaaagcataatatttatttgaaacctcctgatttttaaatgttaacattaaacaatgccggtttggcttctgtaaaacagactctaactcttcatatcctgaaagataacatgactttattaaggtataatagaagcttgtttctgtcttatataaaggtctgatataaaagtctcggtaagtggttgagagctagcaggacacttcttggtgttgggatcccaagtaccttctctttggttgctctgccaccgtaacacaaggcttccttctgatggtccaagatggctgccctggattctaccattatatgcacattccagccagcaagaaaggaaaagcagtggaaggcaggcccctctttttaaagatataacctggaaatcacaaatattacckccactgacagctcagtgtctagtgcattgccacaaagctgtatctatctgacagaggctgggaaatgtagtctctattctgagtggtcaaataccaagaaacaggagatctatgagtgaaagaaaaaagaaacaaagctacaacaagtaattcagacttaagaaaaacactatgacaaccaagcaaaatacagtcacgggccattttggagcaaaaaaaaaccattctttactgaggatgtgataagagagtgtccttataataaaattcctgtgtgttaaaactactgctgccttcaacatcaaaataggttccatgca

SEQ ID NO: 88542 - DNA, 1165 bp, Homo sapiens
tatccatataaataacaaggcaccttaaaactgtatgttgttgtttggacatagaatatttcttttctttatttaaacaaataaatgagtctgaggaattgttgctgccatgaattaggatttaatcatagcaaataatatcyaggacactatgaattaagcatgtaaatgatttaaaaattaagaataatctctcagatatcaattctgtatcaggctgaatttttaacagcttgcatagttttatctatatctttctagagatcaaatatcagcgagtgggaaataagggtcagatgacacaagccaaattgaaatgtgcaaatcaagcaacacttcacacactactcactttttattcctgatgagaatgcagtctgggagtcttataaaatttttgccaaggcagtcctctggaaaagcaaggtgtagctgcctttacatttcagtttgcaaataacccactggtgcttttttcttctatggtcactgctggtcttctaaacatgtggtagctgtgacacagtagtggctaagtgatcacacatcattacatcgtgcatacgtgattatttatgccttctcaaccacagtgtaagttacaagcaattatttttctgtctcctcagtgtaattacactgtaatctacagggacgtgtaattgcatagatgggttctgtactgaattacgcagctctcaggggctatgtgagatcctgggaggcttttaccagctagcagctgggcggtctctttgtgtaaacctggtggcctgtatatgggttatgctggagggagatttgcatcccagatgtgatgttgggctgccaagcaaacggcctaagggttagagagcctgtctgtttgatatcctgacctcatcaaatgacccctttacttcccatcctcagattatgaaatgcctttaaaaaaaaaggaagctcctacggaagcaaaattttcattggtggaaaatttctttacgatttagaaatcttttatttgtcattttcagattgcatgtacctaataagtacagaatgctttaaaatgtgcaaatcctcatacttacatctgtgcccaaagaaaacaatgaattggtttacgatgacaaaatgctaaataaatattacacgtttctttttttttaacaagaaacaaaca

SEQ ID NO: 88543 - DNA, 1165 bp, Homo sapiens
tatccatataaataacaaggcaccttaaaactgtatgttgttgtttggacatagaatatttcttttctttatttaaacaaataaatgagtctgaggaattgttgctgccatgaattaggatttaatcatagcaaataatatccaggacactatgaattaagcatgtaaatgatttaaaaattaagaataatctctcagatatcaattctgtatcaggctgaatttttaacagcttgcatagttttatctatatctttctagagatcaaatatcagcgagtgggaaataagggtcagatgacacaagccaaattgaaatgtgcaaatcaagcaacacttcacacactactcactttttattcctgatgagaatgcagtctgggagtcttataaaatttttsccaaggcagtcctctggaaaagcaaggtgtagctgcctttacatttcagtttgcaaataacccactggtgcttttttcttctatggtcactgctggtcttctaaacatgtggtagctgtgacacagtagtggctaagtgatcacacatcattacatcgtgcatacgtgattatttatgccttctcaaccacagtgtaagttacaagcaattatttttctgtctcctcagtgtaattacactgtaatctacagggacgtgtaattgcatagatgggttctgtactgaattacgcagctctcaggggctatgtgagatcctgggaggcttttaccagctagcagctgggcggtctctttgtgtaaacctggtggcctgtatatgggttatgctggagggagatttgcatcccagatgtgatgttgggctgccaagcaaacggcctaagggttagagagcctgtctgtttgatatcctgacctcatcaaatgacccctttacttcccatcctcagattatgaaatgcctttaaaaaaaaaggaagctcctacggaagcaaaattttcattggtggaaaatttctttacgatttagaaatcttttatttgtcattttcagattgcatgtacctaataagtacagaatgctttaaaatgtgcaaatcctcatacttacatctgtgcccaaagaaaacaatgaattggtttacgatgacaaaatgctaaataaatattacacgtttctttttttttaacaagaaacaaaca

SEQ ID NO: 88544 - DNA, 1058 bp, Homo sapiens
ggggcagttaatgggttcggtttcatgtttcagatccccttgacyttgtttgtatgtatatcacagtgtttatatagtcagatctttcagggactgaagcaagccccgaaaagacaaagtgcatcattagctgggtttttcaggatttcgtggccagtgtaaaacaaaagtgggagagtgatagggcagaaagtgctctattatttctgttgtcaacaaagactcagttacctggactgagagcactgcccttcccagcctgcaggaagactcaacgccggggtcctatgatgcacaagtgagagaagggggatgttttgcctgagaaggtatgactctgggggccaagcaggaggggatgagctgtcacatgggagagatgcaggctaagaactaaaactaatgaatggaagttacagagaggtaagaaatttttttccaagaactgcctgggacaaacacagctactccaggaagccacttcactgctgaaggtgttttgtgcaaaggtgtgctggcagttaaagaggaatgctgcagataagattcagctccataaaagagtgtgaagatgtctctcatccctgaagtttataggatgctccccacaaagaactgcagatttcctttctaactcattgactggagctcagggacaccatgggttgaagctatggctctggagggaactagcctagacttacatcctggtcctgatatttacttgctgtattaattctgcacttcagtttctccgtctgtaaaacaggggaaagaacagtgtctctctcataggggtaagtgtgaaatcaaatcattcaacccatgtaaagtgaattgagcttcttattcctattggctatgtggtgattgacatcggagctcccaaacagttcaatgggagaaggttgcaaatgaattctgcactcagatgctcactcaaatgtcttgagaactaggagaacccaggggaccctgtgacaaattttcaacaccatttggtccagccaaagggttgtttcagactggctttctcagtgcttgagagagaatctaaa

SEQ ID NO: 88545 - DNA, 1058 bp, Homo sapiens
ggggcagttaatgggttcggtttcatgtttcagatccccttgaccttgtttgtatgtatatcacagtgtttatatagtcagatctttcagggactgaagcaagccccgaaaagacaaagtgcatcattagctgggtttttcaggatttcgtggccagtgtaaaacaaaagtgggagagtgatagggcagaaagtgctctattatttctgttgtcaacaaagactcagttacctggactgagagcactgcccttcccagcctgcaggaagactcaacgccggggtcctatgatgcacaagtgagagaagggggatgttttgcctgagaaggtatgactctgggggccaagcaggaggggatgagctgtcacatgggagagatgcaggctaagaactaaaactaatgaatggaagttacagagaggtaagaaatttttttccaagaactgcctgggacaaacacagctactccaggaagccacttcactgctgaaggtgttttgtgcaaaggtgtgctggcagttaaagaggaatgctgcagataagattcagctccataaaagagtgtgaagatgtctctcatccctgaagtttataggatgctccccacaaagaactgcagatttcctttctaactcattgactggagctcagggacaccatgggttgaagctatggctctggagggaactagcytagacttacatcctggtcctgatatttacttgctgtattaattctgcacttcagtttctccgtctgtaaaacaggggaaagaacagtgtctctctcataggggtaagtgtgaaatcaaatcattcaacccatgtaaagtgaattgagcttcttattcctattggctatgtggtgattgacatcggagctcccaaacagttcaatgggagaaggttgcaaatgaattctgcactcagatgctcactcaaatgtcttgagaactaggagaacccaggggaccctgtgacaaattttcaacaccatttggtccagccaaagggttgtttcagactggctttctcagtgcttgagagagaatctaaa

SEQ ID NO: 88546 - DNA, 1058 bp, Homo sapiens
ggggcagttaatgggttcggtttcatgtttcagatccccttgaccttgtttgtatgtatatcacagtgtttatatagtcagatctttcagggactgaagcaagccccgaaaagacaaagtgcatcattagctgggtttttcaggatttcgtggccagtgtaaaacaaaagtgggagagtgatagggcagaaagtgctctattatttctgttgtcaacaaagactcagttacctggactgagagcactgcccttcccagcctgcaggaagactcaacgccggggtcctatgatgcacaagtgagagaagggggatgttttgcctgagaaggtatgactctgggggccaagcaggaggggatgagctgtcacatgggagagatgcaggctaagaactaaaactaatgaatggaagttacagagaggtaagaaatttttttccaagaactgcctgggacaaacacagctactccaggaagccacttcactgctgaaggtgttttgtgcaaaggtgtgctggcagttaaagaggaatgctgcagataagattcagctccataaaagagtgtgaagatgtctctcatccctgaagtttataggatgctccccacaaagaactgcagatttcctttctaactcattgactggagctcagggacaccatgggttgaagctatggctctggagggaactagcctagacttacatcctggtcctgatatttacttgctgtattaattctgcacttcagtttctccgtctgtaaaacaggggaaagaacagtgtctctctcataggggtaagtgtgaaatcaaatcattcaacccatgtaaagtgaattgagcttcttattcctattggctatgtggtgattgacatcggagctcccaaacagttcaatgggagaaggttgcaaatgaattctgcactcagatgctcactcaaaygtcttgagaactaggagaacccaggggaccctgtgacaaattttcaacaccatttggtccagccaaagggttgtttcagactggctttctcagtgcttgagagagaatctaaa

SEQ ID NO: 88547 - DNA, 745 bp, Homo sapiens
tatgaggtagatgctcttattgtccccattgtattgacagacaacatcgagattcaggagtcaaatactgtcacccaagcatggcagtaacagaactgggagctgagcccaggactgtccacagcccaaatctcacactccctgcgtggcaccaggcccttttaaccgtcattgatgagcactccctatgtaccagcaatgcgtttgtctatgtttcatgcctcattttgcaaattagccaacgggggcacagaagggagagatgacctgcccaaggtcactcagccagtaagtggcagagcccacagccttcgtgacagcctgccaagcccccagtgctcatccgggacttgctagagacagctgtgcccactggccaaccccagatcaggctcagaagggcarctgtgacattccttctcttcatgtctccaccctggcggatgtgggctctgccatcgggctccagggaaagtggaggcttccagtgaaagggagtggtttccccatgtggcctgggtcctctgggcttgggaatgcctctgttttgagctggtgaaacagaatttcccaccccctccgcaatggcacatcagagcccccactatgggccacagagcaagggccctatgaatcatgctgcattactgcaagaaatcattccagggcaggcagtggcggcccagcatgggacagcagtgtccgggtggagttggcgtcacccatccggagatgggaagcagac

SEQ ID NO: 88548 - DNA, 745 bp, Homo sapiens
tatgaggtagatgctcttattgtccccattgtattgacagacaacatcgagattcaggagtcaaatactgtcacccaagcatggcagtaacagaactgggagctgagcccaggactgtccacagcccaaatctcacactccctgcgtggcaccaggcccttttaaccgtcattgatgagcactccctatgtaccagcaatgcgtttgtctatgtttcatgcctcattttgcaaattagccaacgggggcacagaagggagagatgacctgcccaaggtcactcagccagtaagtggcagagcccacagccttcgtgacagcctgccaagcccccagtgctcatccgggacttgctagagacagctgtgcccactggccaaccccagatcaggctcagaagggcaactgtgacattccttctcttcatgtctccacccyggcggatgtgggctctgccatcgggctccagggaaagtggaggcttccagtgaaagggagtggtttccccatgtggcctgggtcctctgggcttgggaatgcctctgttttgagctggtgaaacagaatttcccaccccctccgcaatggcacatcagagcccccactatgggccacagagcaagggccctatgaatcatgctgcattactgcaagaaatcattccagggcaggcagtggcggcccagcatgggacagcagtgtccgggtggagttggcgtcacccatccggagatgggaagcagac

SEQ ID NO: 88549 - DNA, 1097 bp, Homo sapiens
tcttttatcttctttgtactgttttgtagtgttttctttttctttacacacatatttttattaacttcattttttgggatgtgattgtttgcctgaaaagtagtttccattttagatggctgccttattagaaaacccttgatcactagaattttttgaaacttagacatgcatctctgcattccatctgtatcagccaatgccattctgtaaattccctcctcgaaaactaaccacatgattttctgtggtatcatatgcagcaagattaccatagttagaaccaaagactaaaatacattgctccaaatttaattaaatttgaattcaatgagtttggtttctgctgaactgttcatttctgcaaaggatggggagtttctgatacaccaaactaatgagcacccaggaagccagcagggaggatcctctgatgatgtgggaccattcttgccaaccagaaatatgtctcctagcttaagaagtaactgatagtcctctagggaaccccagtatgcctcaggtaggaaatgtgcttccataagcaaaaatcaaccaaattttagaagatctatcattttcctcattttccaactcaatccccagaagagaactgtgcaatttaagcccactcaaatgttggggcacagagggacctaagaggaaaatgagaagctgggtaaagtaatgcactatggagactctggcaggaaattatttgtatgttcttcatgggctcggtctaaatgtggccsctgagcctaggacttcagggcttacttattttccagcccttcccaaccttctctgcagaaccagtatggggcctagagtcaaccttactcagcatttatgtggtcaaagacctgccgctctttgttttagattattttcaaccatctgcatatttctgtagcttcatggtctcttctgttttccactaccacctgtagtgggttgaatgatggtccccccaaaaaaatatgtccacatcgtaatccccagatcctgtaagtgttaccatatatggcaaaatgtgtaagtaggttaaggctattgagaggagaatattatcctgaattgtgtgggtgggccct

SEQ ID NO: 88550 - DNA, 1097 bp, Homo sapiens
tcttttatcttctttgtactgttttgtagtgttttctttttctttacacacatatttttattaacttcattttttgggatgtgattgtttgcctgaaaagtagtttccattttagatggctgccttattagaaaacccttgatcactagaattttttgaaacttagacatgcatctctgcattccatctgtatcagccaatgccattctgtaaattccctcctcgaaaactaaccacatgattttctgtggtatcatatgcagcaagattaccatagttagaaccaaagactaaaatacattgctccaaatttaattaaatttgaattcaatgagtttggtttctgctgaactgttcatttctgcaaaggatggggagtttctgatacaccaaactaatgagcacccaggaagccagcagggaggatcctctgatgatgtgggaccattcttgccaaccagaaatatgtctcctagcttaagaagtaactgatagtcctctagggaaccccagtatgcctcaggtaggaaatgtgcttccataagcaaaaatcaaccaaattttagaagatctatcattttcctcattttccaactcaatccccagaagagaactgtgcaatttaagcccactcaaatgttggggcacagagggacctaagaggaaaatgagaagctgggtaaagtaatgcactatggagactctggcaggaaattatttgtatgttcttcatgggctcggtctaaatgtggcccctgagcctaggacttcagggcttacttattttccagcccttcccaaccttctctgcagaacsagtatggggcctagagtcaaccttactcagcatttatgtggtcaaagacctgccgctctttgttttagattattttcaaccatctgcatatttctgtagcttcatggtctcttctgttttccactaccacctgtagtgggttgaatgatggtccccccaaaaaaatatgtccacatcgtaatccccagatcctgtaagtgttaccatatatggcaaaatgtgtaagtaggttaaggctattgagaggagaatattatcctgaattgtgtgggtgggccct

SEQ ID NO: 88551 - DNA, 708 bp, Homo sapiens
tggtgatcaggtagaagagtggatggagatgagattgaaaggcatccagggaacgtaaatgaccatccagggaaggagtacacacagagaaagagctgttattttagctagagggctgaattagtggtcatgggaaggtgtctaaagtcattattaacatacataactatgttaaaatattcatttgtttgcctatttgttcattttctagcttccccagaagaatgcagtctacatgaaggcaaggacaatgtccctcatgcatccaccacacctagagtcatacctgcatgtggtccacctcaataaatatttattgaatgtggaaggagagcagcctacctgaacatatgttagagacaaaatcattttcagcacacaagtcagtcacagccttgagacacgtgggctgattaatggggaaaatggcaggggcagggaatcacactgcaataaacttcccctaatcccatctcttccctttcagctacagccctttcttgattagagaagcaggaaaagttaatatgtggagatttttcctccccttccctgcctccrtgagcaccattaataatttagtgcaatctttcttcttattggtgcaagttatttgtaaaatgtcattatccaaaccattcactacatttgggggcatagcacatgctgaatgcctagttcccttctgtgggaactacctgcacacag

SEQ ID NO: 88552 - DNA, 676 bp, Homo sapiens
ctggggtggtggggacggatctttggggctgagtcactggggtggtggggactgacctgtgtatcacgggaggtttagtagccttcctgctcccacccactggattctgtgagcagccccttctcccattgcracaaccaaaaatgtcttcagacattgccaaatgcttctgggtgagagggcgcaaaatcaccctggtggcaattcatggagctgttggtcccacagccctttccagggtgccttcatgtccacagggaaccttcaaagtgccagggtctttggctgagtgggtgagaccttgggaaggcagagcatggagctgtcctgacacgggagcatttttttcccttgtgcacacatccgcctggcaaccgtgctacgagtcactgtggcctgcctcccaggtgcccctttgaattgtgcccacaaaccaggtggttaatcagctctccagcgctgcttggaagcgtccctgcctaagcgagcatgtaattaccagctcgcaccctcagccgtggacacgcaggagagcagcggcagaaacgggtggctcattgcaggagggggagcgggggactctggcctttgaagcgtgacatgaatgccaaagatgatggtgtccgtcccctttggagactggacatgttttgctggcctttactggaacacagcc

SEQ ID NO: 88553 - DNA, 676 bp, Homo sapiens
ctggggtggtggggacggatctttggggctgagtcactggggtggtggggactgacctgtgtatcacgggaggtttagtagccttcctgctcccacccactggattctgtgagcagccccttctcccattgcaacaaccaaaaatgtcttcagacattgccaaatgcttctgggtgagagggcgcaaaatcaccctggtggcaattcatggagctgttggtcccacagccctttccagggtgccttcatgtccacagggaaccttcaaagtgccagggtctttggctgagtgggtgagaccttgggaaggcagagcatggagctgtcctgacacgggagcatttttttcccttgtgcacacatccgcctggcaaccgtgctacgagtcactgtggcctgcctcccaggtgcccctttgaattgtgcccacaaaccaggtggttaatcagctctccagcgctgcttggaagcgtccctgcctaagcgagcatgtaattaccagctcgcaccctcagccgtggacacgcaggagagcagcggcagaaacgggtggctcattgcaggagggggagcgggggactctggcctttgaagcgtgacatgaatgccaaagatgatggtgtccgtcccctttggagactgracatgttttgctggcctttactggaacacagcc

SEQ ID NO: 88554 - DNA, 612 bp, Homo sapiens
cctgaagggaaagcggccacccagcagcccctggagccggcgtcctactgggcatgtcagctctggarccatgctcctctcactgtggtttttgcttccctattgaagggctttgggggccagatgaggggtttgggctctatcctggcaggaggggagaaggggtgggcagcctctgaaagtgtctgtggagaccaggtccagtctcattactggtggccagtggggcaaagggccttgggggctgtggagcagccactattgctcctgtttctaggaacttctctctctctccccaacctcatcactgaggagcatcctgtctagggtttctggaaggctctcttcttacttccttccagcctcatgtcctgatggcgttgtgtgccaggggactcacggaatattgttttcctctaacgactcagacaactgatgaaatacttggtgccttgttctccctaagacctgtcctcccaagggcctgctttcacatggctgccagggccttcaatgccgagtccgtgttcctcggggaccatcaacatgtggaacttatttttaatttaaaagaacaacagactccccaaccccattcccctcccccgcttg

SEQ ID NO: 88555 - DNA, 612 bp, Homo sapiens
cctgaagggaaagcggccacccagcagcccctggagccggcgtcctactgggcatgtcagctctggaaccatgctcctctcactgtggttyttgcttccctattgaagggctttgggggccagatgaggggtttgggctctatcctggcaggaggggagaaggggtgggcagcctctgaaagtgtctgtggagaccaggtccagtctcattactggtggccagtggggcaaagggccttgggggctgtggagcagccactattgctcctgtttctaggaacttctctctctctccccaacctcatcactgaggagcatcctgtctagggtttctggaaggctctcttcttacttccttccagcctcatgtcctgatggcgttgtgtgccaggggactcacggaatattgttttcctctaacgactcagacaactgatgaaatacttggtgccttgttctccctaagacctgtcctcccaagggcctgctttcacatggctgccagggccttcaatgccgagtccgtgttcctcggggaccatcaacatgtggaacttatttttaatttaaaagaacaacagactccccaaccccattcccctcccccgcttg

SEQ ID NO: 88556 - DNA, 612 bp, Homo sapiens
cctgaagggaaagcggccacccagcagcccctggagccggcgtcctactgggcatgtcagctctggaaccatgctcctctcactgtggtttttgcttccctattgaagggctttgggggccagatgaggggtttgggctctatcctggcaggaggggagaaggggtrggcagcctctgaaagtgtctgtggagaccaggtccagtctcattactggtggccagtggggcaaagggccttgggggctgtggagcagccactattgctcctgtttctaggaacttctctctctctccccaacctcatcactgaggagcatcctgtctagggtttctggaaggctctcttcttacttccttccagcctcatgtcctgatggcgttgtgtgccaggggactcacggaatattgttttcctctaacgactcagacaactgatgaaatacttggtgccttgttctccctaagacctgtcctcccaagggcctgctttcacatggctgccagggccttcaatgccgagtccgtgttcctcggggaccatcaacatgtggaacttatttttaatttaaaagaacaacagactccccaaccccattcccctcccccgcttg

SEQ ID NO: 88557 - DNA, 1716 bp, Homo sapiens
tcctcagagagcagccttatgggccccctttgaaagggcacagtgacccccctggtgtctgtctgttctgccctgcttggagaaacggcttcctcctctgagttcctaaaacatttatcatccctatgatttgccaggcaattagtcatgccctgccttgagtatctcttctattgttgtatcaaacggctgtttaacccttatcagcagtgcagttttcaatatcttgtctttctaactcgatgtgagcttccagagggctgtgcaaatgtccacccatgtccgtctcctgtgcccatggtccgtacacgtctggtcatcaccgtcagagggtaggactgtgtcctgcctttacaggtaaagtgtttagcatgcaaaatgcttagcacagacactggcacctcacaagggcccargaaagagccactagtgtttaccttgttattcatattattatctggtatacaagaatagctagtgagcaccctccatgtgtgggacactgtgcctggtgctgctgaagccacttgaaaatggtacctgtgaatttccccaaagccatctggaatcaagctggaaactctagctctgtttcctactgaagggagacacgtatcccctcagtgagaagtcttttcttcaaaggcccttggtcggtgtcaaggatccttcgagtctaggtgaagttggttggtttggtctccagagcggtgtgtgaatacaaatacaaataccgtattcacagaatagaggatttgtaggtggagatccttgtcaacctctcccccaaagtagtcagagaaatgccagaagagaaggagctctccaaaggggagtgggctgggctgggggagctcagagcaaaccgtacccatcatggctggaactcactcgtgtcccagctactcctctcactggctaaggaataaggtgagacagtacagaaggttgaggtcggagagctgggtggatttagggagatacagagatggaaactttgctgtggtcacgtcaagtcagacgatctgatataacttcatccacatcagcctccaccttctttataaaagctccctctggttcctgtgtggagaatgtttaggggtacaggagggaacccagaagtccagtggggggccttcacagtggcccagatgacctggattggaccagggaggtgggggtgggcagggcaaaggagagcaagaaaagccaggaccttctgaagccttcctcctggccccctggaccccagctcagggtctctccactccctccactccccttgtccccagtcctcctcaccctgtatcagggcttcctgttagcatgtttttggcctcatggatggggggctccatgagggcagagccttggtttacttgtccctgctcactgaccctaacaggaagaaaaggaggcctggtcttgcgtaccctccaggctgagctcctcacagtccctgcatctgaggcctgtgacagtcaggcctggaatgagaggagaaggctgatctcccaggctgtcaattgttccattctaacccaagcattctgacccatgctgcattcccgcctggggtttatgactctctttgagtccactctgcagcccacttcccagcaaagcctggtttgagggcagctgagaccagccccaggccccaggagaaaggagacctacatctccccagaagaccccagccccgtggacaat

SEQ ID NO: 88558 - DNA, 1716 bp, Homo sapiens
tcctcagagagcagccttatgggccccctttgaaagggcacagtgacccccctggtgtctgtctgttctgccctgcttggagaaacggcttcctcctctgagttcctaaaacatttatcatccctatgatttgccaggcaattagtcatgccctgccttgagtatctcttctattgttgtatcaaacggctgtttaacccttatcagcagtgcagttttcaatatcttgtctttctaactcgatgtgagcttccagagggctgtgcaaatgtccacccatgtccgtctcctgtgcccatggtccgtacacgtctggtcatcaccgtcagagggtaggactgtgtcctgcctttacaggtaaagtgtttagcatgcaaaatgcttagcacagacactggcacctcacaagggcccaagaaagagccactagtgtttaccttgttattcatattattatctggtatacaagaatagctagtgagcaccctccatgtgtgggacactgtgcctggtgctgctgaagccacttgaaaatggtacctgtgaatttccccaaagccatctggaatcaagctggaaactctagctctgtttcctacygaagggagacacgtatcccctcagtgagaagtcttttcttcaaaggcccttggtcggtgtcaaggatccttcgagtctaggtgaagttggttggtttggtctccagagcggtgtgtgaatacaaatacaaataccgtattcacagaatagaggatttgtaggtggagatccttgtcaacctctcccccaaagtagtcagagaaatgccagaagagaaggagctctccaaaggggagtgggctgggctgggggagctcagagcaaaccgtacccatcatggctggaactcactcgtgtcccagctactcctctcactggctaaggaataaggtgagacagtacagaaggttgaggtcggagagctgggtggatttagggagatacagagatggaaactttgctgtggtcacgtcaagtcagacgatctgatataacttcatccacatcagcctccaccttctttataaaagctccctctggttcctgtgtggagaatgtttaggggtacaggagggaacccagaagtccagtggggggccttcacagtggcccagatgacctggattggaccagggaggtgggggtgggcagggcaaaggagagcaagaaaagccaggaccttctgaagccttcctcctggccccctggaccccagctcagggtctctccactccctccactccccttgtccccagtcctcctcaccctgtatcagggcttcctgttagcatgtttttggcctcatggatggggggctccatgagggcagagccttggtttacttgtccctgctcactgaccctaacaggaagaaaaggaggcctggtcttgcgtaccctccaggctgagctcctcacagtccctgcatctgaggcctgtgacagtcaggcctggaatgagaggagaaggctgatctcccaggctgtcaattgttccattctaacccaagcattctgacccatgctgcattcccgcctggggtttatgactctctttgagtccactctgcagcccacttcccagcaaagcctggtttgagggcagctgagaccagccccaggccccaggagaaaggagacctacatctccccagaagaccccagccccgtggacaat

SEQ ID NO: 88559 - DNA, 1049 bp, Homo sapiens
tcaagttttctaaatgcctgtagctgtgatattcccattcctggtcactagagggaggaagtagtctttaggatgatagtacgattctgttttgtctgccctcaaagttcaagtttaagctgatatagatcagcttggcaaaaatagatcatatttcagtaaaataactgtggcatagtttctcacatatgtttggtactctttattattacaatggaatcacatttctattttatttaggctatcactgttacaaaagtaatattttctcaggctaattatctagttatgatcactgcctgtgataatactttaaaaaaaaaaagaaaaaaaaaaacctcatatgctcctgctttcaccagtcttaagagaaaccagagacaaaggctctgacctgaatgaccccacacctttgtatgctggttaaagatgcaccctttgaaatcaaacagatctgacgtcaagtcccagttctgttacttactagctgtttaatttaggcaagtcacttcagctctctaagccacaatttactcatatacaaaatgaatataataaaacaacttacagaattatcatgaaggtgaaatgagatatctgtgaagtgtttttcacaatatgctttcaataaatagaagctgacttgctcatttttattatttttatgctaagaattacattaaataaacaatattgtaggcagtataaaatcaatgtcaaattctattatgaaactgtaattgtataaaagttgagaaacaaaagtcatccatgtaaaataagtgaaaggtttgtggaagaaaagaagagttgaattggaccaagtagattggataccatttgaataatctgaggaagtcatgaaacactagcacatagtaataatgcttgtccactatgttacagttaattcctaatgattctagacatatggwattttgggctgatagggaaaacaaccctttttgctctaactaaagtgctttaccacattcttccacatatcactttaaagactttataaaatatattaagaaaaaactagatgc

SEQ ID NO: 88560 - DNA, 1049 bp, Homo sapiens
tcaagttttctaaatgcctgtagctgtgatattcccattcctggtcactagagggaggaagtagtctttaggatgatagtacgattctgttttgtctgccctcaaagttcaagtttaagctgatatagatcagcttggcaaaaatagatcatatttcagtaaaataactgtggcatagtttctcacatatgtttggtactctttattattacaatggaatcacatttctattttatttaggctatcactgttacaaaagtaatattttctcaggctaattatctagttatgatcactgcctgtgataatactttaaaaaaaaaaagaaaaaaaaaaacctcatatgctcctgctttcaccagtcttaagagaaaccagagacaaaggctctgacctgaatgaccccacacctttgtatgctggttaaagatgcaccctttgaaatcaaacagatctgacgtcaagtcccagttctgttacttactagctgtttaatttaggcaagtcacttcagctctctaagccacaatttactcatatacaaaatgaatataataaaacaacttacagaattatcatgaaggtgaaatgagatatctgtgaagtgtttttcacaatatgctttcaataaatagaagctgacttgctcatttttattatttttatgctaagaattacattaaataaacaatattgtaggcagtataaaatcaatgtcaaattctattatgaaactgtaattgtataaaagttgagaaacaaaagtcatccatgtaaaataagtgaaaggtttgtggaagaaaagaagagttgaattggaccaagtagattggataccatttgaataatctgaggaagtcatgaaacactagcacatagtaataatgcttgtccactatgttacagttaattcctaatgattctagacatatggtatttkgggctgatagggaaaacaaccctttttgctctaactaaagtgctttaccacattcttccacatatcactttaaagactttataaaatatattaagaaaaaactagatgc

SEQ ID NO: 88561 - DNA, 637 bp, Homo sapiens
gtcgcctaggccagagtgcagtggcgtgatcttggcgattctcctgcctcagccttctgagtagctgggaccacgggtgcgaaccacaatgccctgctaatttttgtatttttagtaaagacggggtttcaccaggttgggcaggatgatctcaatctcttgacctcgtgatccgcctgcctcggcctcccaaagtgctgggattacacgtgtgagccactgctcccggcctatttttaaatttttgagataaagtcttgctctgtcacccaggctggagtgcagtggcacgatctcagctcactgcaacctctgcctcccrggttcaagcgattctctcgcctcagtctgaggagtagttgggactacaggcgtatgccaccatacctagccatagatttttgtctttgaatataacacaacgtgggaaaagcatagtaaattcactgatgcctcacttatctcaaatgatacaaattttgaaccattattaaatttcacggaaaccattataatttatataaacaatatgctgcaaacatttgaaacaagtcatgtaatagcaagtctttacaaatttattagccctaggagaagtattattttttttttcttggatgccagaatcttgagaaca

SEQ ID NO: 88562 - DNA, 396 bp, Homo sapiens
tacctcaaaattaacacttcatatttcaatatagaaactgaactggaagagtcttctaaacagctcttctcctggctgctttaacactgattatgttaagacaatgtccaaatgtcgttgtaaaaatattaagtaaagtaatactcttgatagtggctttattttatgtcaagtgaaaggaaatggtaattcttgtggcaaacctaaaataaaaatattttagacagaaacattttgggaatgtgttgccttttggcttagaatagattaatatccattatgggaaaatttttttcattgtttcagttacagcagtaagtgaaacacacaaggtgtatctccacatactcttccattataacttcatgagtagtcagttcttttagcatrtgtgaa

SEQ ID NO: 88563 - DNA, 739 bp, Homo sapiens
cctctcgccatcgctcctttctgctccatgctaatggggcacatttagtgttctttcaaaccctgctcagtctgcagatgaggtgcattatcagtacaattgacccccaaacaatgcaggggttaagggtgctgagcccccagctgtgcacagacacaaatctgcatataactttttactcccgaaagcttaacaaccaagagcctaamgttgaccagaacccttactgagagcataaactgtgggataacacatattttggattatatatatacattcttacaataaagtaagctagggaaaagagaatgttattaagaaaaccacaaggaagagaaaatatatttactattgattaaatgaagtggatcatcataaaggtcatcaacctggtcaccttcaaggtgagtaggctgaggggagaagaggaggggctggtcttgctgtctcagaggttgcagaggtggaagaaaatccacgtaattcaaacccacctcctgtttcttgagcactgaccacgggcctggcacaaccagagctattgcaccaatccttactggggcctccattttaccgatgaggagactgaggctcagagaagaatggccacacagagaggagaagcatagccaggatctgaacactctctcctaagccgtagtgtgtctcccggacaggctcagtggaggatgcctcgtcctggcctggactgtcccaggctccccagggccagtaaaga

SEQ ID NO: 88564 - DNA, 2368 bp, Homo sapiens
cactgggctcgaggcagggctgaccaaatgggcacagcaggggtctgtggggacagggaagatctctggggcttcagcttgctctgcaaatcgcgcttgtctctttttctatggcaacaactcttttatccatagggttttggtgcaatcaactcatgtcagggaggctggttgagaacatgatcccatttcacagagtgcagctcacagcagcagagggtcaagccaaagctatgtcctgtaggaggcagaacaaggattagactgcctatctgtactgtcatcctgggacaattctatcctcttcgcaccccaagctacctctcctggttaggtgcttccttcccatatggggagctcagtactgcccagaaaagaatgcggttcttgcttcccataatcccaaagtatcccctacaccagccctcacctgggctctcatcccaatttagcgaaatccaggtctgtcacaggacccctaaattaccactcccaccgcgacccccatcatcccatacattataaagcactttgcactaagctccttccatgcctcatcccactgactgctcacaaccactttttaaggggagggtcctattatgattcttgctttctgaggctcagagaagccaagccacttgtccaagatcacacagtaagtcagtgactgtgctgggattcaaacttgcatctgtctgacttcaaagcccactggctatactatgtatgtatctcatctttaattcttctttcctcctggtctggagggtggcagaggctttcctcacccttcgcactccttcctgtttccaccacttcccatttctctcaatctatgtttttggactgctgtgggcagagagaaaacagtgccagcaactcactaactgtgaggatatttatgcctctgcaaacaccacacaagccttttgcatgatttggggctaaatgcagtgttacttaattaatgcacatgtaacactcgagaatattacacctattagaactcatggacaattaacactcaacgggctgctgccacaaccacgtcacatagacaaaggctccagaagcgcctcggtgctgaatcaattgcccagggaaaatgcctcctccctcctgcactttgtctacttttgccaccttgacctcagtgtcttcctcttcccctttcatctttaacttttctgtatttagccttttagcttggacaatttggcatcatgacgtattaaaatgatgacatataaaacctcgtattatacwttatattacatataatacatttctgctttgggagtgttttgtgcaaacaagtctctaggctctgtgctgccagggcttctgggtcatcaaatattttgaatttcctgctttcccaaagagactgattttctttctcattttaatatttataataggaaaagaagagtcaccttctccaggaagcatcccgtgatttcttcagcactttctcatacttctcatacttctctctactgataccctccagtgcttaagacatcatagactctatgtggcctggatccccgttgtctccccgcctgatgggggcgtatcccagagggccccaattctcacagctgtgaaatgaaacccagaaaacctttccatccactctctggggctgcagggagagcggagtaagatttggtgctatgcaaacccacagctgagtttgatgcagcatcttctcggtacattcacctttccaatctgtcaaatgggtgtgctgatcccatccttgaaagcttggctgagtgttaaaggaaccatcatcacatgtaaggagcctagcctactgccaagcactgtggtaagcgacgcagagcctgaattacataaatcaggagtccccacccccattccaaaaatagttgttgagtgcctactgtgtgcaagggctgcaatgcagattaagatacacatgaccccctgcttcaggaggcgtccagtctagtgggagtgataggcagtaaacccacaaacaagtaagtaaatggataatcctggcacatgctatatgttcggaaggaaatatctgaatgacaagatggtaatggataagatttttcctggggtggtcaaggagggcttcctggaggaggtgtcttttgggcagaggctaaagaaagagaaagagttgacaggtgacaaggaggataaatagcttcaagtggttggtgctctgcccatatcctcctgtcactcaccactcgcctgcaaggtggggagatgtctgcaggcgcctgcttggccccagtgtagaaggaagaggagtgtagggaataaatgccccttcctgggggaagcagccctccaccaatgacagatgggagctgga

SEQ ID NO: 88565 - DNA, 688 bp, Homo sapiens
acacaaacaaacagcctaaccaggtgacagaactccaaacagccccacggacctcccacccacctcgtttcttgggtggcatctggcttctgggcaccccccccgccaggggtggggtctgggtccctccctgctcatgacagttttcccagatgcaccccctcccaccctccctggcccccaccagcaccaatggaaaaactgatgctgtggtgcatttggagagaggctgcaggtaggcccggcccccacccaggtgagccggggccaccagcccctgcacatagacgggcccctcagactcggggcgctgggcaagggagcagacgcgtgtgtcaataaacactgcggtcggagagctgacccacgcccttgctggaattaagagcttattcataactctctctcaccaccaaaacacactttggagagggctaaagtaaacagtgccgtttaacctgacctcctcggggctcgtggctctgcccaggccctgccactcagaggggaaatttggyacctttcccctccagaccacttggaccaccccaaagtctcccacttagagaaataatcagataatctccggggtccagtgagggggggaggcgcatgttgggggagggtggtgatggatggagttgcagaggaggtggccccctgtgaccgagagcacgctgaggaatct

SEQ ID NO: 88566 - DNA, 688 bp, Homo sapiens
acacaaacaaacagcctaaccaggtgacagaactccaaacagccccacggacctcccacccacctcgtttcttgggtggcatctggcttctgggcaccccccccgccaggggtggggtctgggtccctccctgctcatgacagttttcccagatgcaccccctcccaccctccctggcccccaccagcaccaatggaaaaactgatgctgtggtgcatttggagagaggctgcaggtaggcccggcccccacccaggtgagccggggccaccagcccctgcacatagacgggcccctcagactcggggcgctgggcaagggagcagacgcgtgtgtcaataaacactgcggtcggagagctgacccacgcccttgctggaattaagagcttattcataactctctctcaccaccaaaacacactttggagagggctaaagtaaacagtgccgtttaacctgacctcctcggggctcgtggctctgcccaggccctgccactcagaggggaaatttggtacctttccccyccagaccacttggaccaccccaaagtctcccacttagagaaataatcagataatctccggggtccagtgagggggggaggcgcatgttgggggagggtggtgatggatggagttgcagaggaggtggccccctgtgaccgagagcacgctgaggaatct

SEQ ID NO: 88567 - DNA, 688 bp, Homo sapiens
acacaaacaaacagcctaaccaggtgacagaactccaaacagccccacggacctcccacccacctcgtttcttgggtggcatctggcttctgggcaccccccccgccaggggtggggtctgggtccctccctgctcatgacagttttcccagatgcaccccctcccaccctccctggcccccaccagcaccaatggaaaaactgatgctgtggtgcatttggagagaggctgcaggtaggcccggcccccacccaggtgagccggggccaccagcccctgcacatagacgggcccctcagactcggggcgctgggcaagggagcagacgcgtgtgtcaataaacactgcggtcggagagctgacccacgcccttgctggaattaagagcttattcataactctctctcaccaccaaaacacactttggagagggctaaagtaaacagtgccgtttaacctgacctcctcggggctcgtggctctgcccaggccctgccactcagaggggaaatttggtacctttcccctccagaycacttggaccaccccaaagtctcccacttagagaaataatcagataatctccggggtccagtgagggggggaggcgcatgttgggggagggtggtgatggatggagttgcagaggaggtggccccctgtgaccgagagcacgctgaggaatct

SEQ ID NO: 88568 - DNA, 688 bp, Homo sapiens
acacaaacaaacagcctaaccaggtgacagaactccaaacagccccacggacctcccacccacctcgtttcttgggtggcatctggcttctgggcaccccccccgccaggggtggggtctgggtccctccctgctcatgacagttttcccagatgcaccccctcccaccctccctggcccccaccagcaccaatggaaaaactgatgctgtggtgcatttggagagaggctgcaggtaggcccggcccccacccaggtgagccggggccaccagcccctgcacatagacgggcccctcagactcggggcgctgggcaagggagcagacgcgtgtgtcaataaacactgcggtcggagagctgacccacgcccttgctggaattaagagcttattcataactctctctcaccaccaaaacacactttggagagggctaaagtaaacagtgccgtttaacctgacctcctcggggctcgtggctctgcccaggccctgccactcagaggggaaatttggtacctttcccctccagaccacttggaccaccccaaagtctcccacttagagaaataatcagataatctccggggtccagtgagggggggaggcgcaygttgggggagggtggtgatggatggagttgcagaggaggtggccccctgtgaccgagagcacgctgaggaatct

SEQ ID NO: 88569 - DNA, 688 bp, Homo sapiens
acacaaacaaacagcctaaccaggtgacagaactccaaacagccccacggacctcccacccacctcgtttcttgggtggcatctggcttctgggcaccccccccgccaggggtggggtctgggtccctccctgctcatgacagttttcccagatgcaccccctcccaccctccctggcccccaccagcaccaatggaaaaactgatgctgtggtgcatttggagagaggctgcaggtaggcccggcccccacccaggtgagccggggccaccagcccctgcacatagacgggcccctcagactcggggcgctgggcaagggagcagacgcgtgtgtcaataaacactgcggtcggagagctgacccacgcccttgctggaattaagagcttattcataactctctctcaccaccaaaacacactttggagagggctaaagtaaacagtgccgtttaacctgacctcctcggggctcgtggctctgcccaggccctgccactcagaggggaaatttggtacctttcccctccagaccacttggaccaccccaaagtctcccacttagagaaataatcagataatctccggggtccagtgagggggggaggcgcatrttgggggagggtggtgatggatggagttgcagaggaggtggccccctgtgaccgagagcacgctgaggaatct

SEQ ID NO: 88570 - DNA, 584 bp, Homo sapiens
atatactatacataattgaattgtacgctttaaaatggtaactttcatgttgtataagttatatcttaatagaaaatatattggtaacattcagggcataaaatcttagagttgggattaaatggtcatcaatctcaaactcaaattccagtggtcaatartctttggttgaggtctcttccccaaactggagttcaaaaccatacaaaagagatgattcaattttgacgcgtttttatggctagaaaaatttccccctttttgacttgcaatcttccttccttaaacaatctcccacccttattcttgtgtttatgtgatgagcaaaacagagtaagtctatcattctcttctgtatcattcccttctatgtctctctttccaaaaaagttaatgtgaggatagtgacattgtcagaagttgtatcgtttcctctttttttggtgttatttagtttgtctaaaaccactgcaaatatcatcacacaatgttagctccccgtgtccctactttcctcttgccccccagcttcgttgattgagggccctgctccatgctcttttacaaagttgtgcttagctgga

SEQ ID NO: 88571 - DNA, 559 bp, Homo sapiens
gaattgattcttccttataactgtcatttagacatgcctcctctcctgaccttctcctattctcattgctttggtttgccccaaagaaaaggaagaaaagaaaagcagataaagctctcctttccccattacaactcccaagtaacacttttctcatttcttcctatcaaggcagaataggtgctgcccaccctcgtaccaagagatttcttacggtcacacaaagtaaatcatcattgccaactggcactgaacctaatgttcctcaatgatcagacctgagctctatccctatgtttcttccagaaaagttataaccattctcaaagttttcactggagagcatttaagatttaaggaaatatgycatcattctatttccttccaaaattatattatgcaagatataagcattatgcatcaatttgcattccacttctccccagtgtgagagtctggttaatacaattaaactggatcagtacctactaagcaactagatctctggaaagtctgaatgctgaagatggatgccctcggggaggggcttaacacagca

SEQ ID NO: 88572 - DNA, 872 bp, Homo sapiens
tttagccatatttcaaaagactgagatgctaatgcctgtgaacatgtgctatacactaactactcatggcctgaagcacagaccaaaaggtgaatgatatcccaaatgccacctcagttttggtcacaggtctggatacaactcattggttgatccaagcatctgatgttccaccttgacatgtgatgctatctctggaaaaagaaaatgtcgcaggtgttgagaaaaggtacaagtaccaactatcaaagaggagtaagatcccttcccaagacccctttatagtcagtctaatacmtttcggtttattcgcctagaatgctggacttctataccacataacaagattccacacactgaaacggaaccaacatcattagcttcttaccagtgttctgccatcgagatgcagtctgtcaagagaagcagcacagagtctcatgtcaagagaagtctgcagcggcagaaagacaactaaaaagagagacttcagtggaatttgagtcacctgacattagtcttaaaaaagatatttaaaatacagagaatcccactgatggaggagagaaaaataaccctctttttttctttaaagacaggcattgatatgagcgaaaggaaaagaactggggaagtctttgtatattgagagctcagtttatttttactctctgccaatagaggcaaggtaattctataagcaccatttaactttctcactacaaacaaaatagagtaagtcgtattaacgacttacttgcgttctaaacttccagctccagaacacttttttccccctgaaaattaaattgattcttacagaatggtacccaaatgtgtgatttcaaaggcagatcccaaaactgatggga

SEQ ID NO: 88573 - DNA, 872 bp, Homo sapiens
tttagccatatttcaaaagactgagatgctaatgcctgtgaacatgtgctatacactaactactcatggcctgaagcacagaccaaaaggtgaatgatatcccaaatgccacctcagttttggtcacaggtctggatacaactcattggttgatccaagcatctgatgttccaccttgacatgtgatgctatctctggaaaaagaaaatgtcgcaggtgttgagaaaaggtacaagtaccaactatcaaagaggagtaagatcccttcccaagacccctttatagtcagtctaatacctttcggtttattcgcctagaatgctggacttctataccacataacaagattccacacactgaaacggaaccaacatcattagcttcttaccagtgttctgccatcgagatgcagtctgtcaagagaagcagcacagagtctcatgtcaagagaagtctgcagcggcagaaagacaactaaaaagagagacttcagtggaatttgagtcacctgacattagtcttaaaaaagatatttaaaatacagagaatcccactgatggaggagagaaaaataaccctctttttttctttaaagacaggcattgatatgagcgaaaggaaaagaactggggaagtctttgtatattgagagctcagtttatttttactctctgccaatagaggcaaggtaattctataagcaccatttaactttctcactacaaacaaaatagagtaagtcgtattaacgacttacttgcgttctaaacttccagctccagaacacttttttycccctgaaaattaaattgattcttacagaatggtacccaaatgtgtgatttcaaaggcagatcccaaaactgatggga

SEQ ID NO: 88574 - DNA, 889 bp, Homo sapiens
ggatggcactgaagatggaagcctggagactctggcatgggatggatggtggtaatggagtctttgaacctggagcatggagtgggaaggaagaagtgagaaggcattcaaagtcaccagtgaggctgggcaccatggctcacacctgtaatcccagcactttgakaggtcaagacaggcagatcacttgagctctggagttcaagaccagcctgggcaacatgatgagacccccatctctattaaaaatagaaaaaatagccaggagtggtggtgtgtgcctgtagtcctagctactaggggagctgaggtgggaggatcacttaagcccaggaggtggaggttgcagtgagctgagattgtgccactgcactccagcccaggtgacagagtgagacattgtctcaaacaaacaaacaaattaaaataacacaaacacacacacaaaaacaaaaaaacaaaaatacaaaaacaaacaaaaaacagtcaccacagaagcaaactgttgtgtctctttgatgttgagggaaaaatcaaacgtgacttcagagctctaacctgaaaggttgagtgggaaacaaactcccaataaaagaacataaattatgtctgggggagaaaagaagacaaagttgagttcagcctttgctttattgattcttcttctgaaggaggttcttctaaaacagggagtcacatttagcctttgctcgttcttctcctcttcccaaaggggttcttctaaatgttgggctgaactagggctcaaacataagcttccttctctctccaggggatctcactcagccccaggacttgacacatccactcaaaatcctaaattcccatctctggctttgacatcttttctctacttcagattcatgca

SEQ ID NO: 88575 - DNA, 495 bp, Homo sapiens
taaattttacctatttatttcaagcaagtatttttaagtctcaagaaaataatcagacataccaaagaaatgcacctattgcaaatcctggtcttggtttatgtgtgttacagtggatatttctaatatatgaaaacttatttagacacagctgaatcacccatgagaaggtcaaatatgtgtaataaatgaatttgcttcacttgtttaatcccttggatcatttccagaataagtgctgacttcaatttagctcaccacacagaatcttttgatgtatctggggagaaaaaattcatagttaataaaaaacacacacacatacgcaccttcacacacatgcttgcatgggacaattatttaatagaagagagagagagtaaggttaaaaggaattgaaggaagggaccaattgtatggcttggccttatggaakaaaggagatttgaactacacctggaaagaataattattacagaggcattgaagaggata

SEQ ID NO: 88576 - DNA, 792 bp, Homo sapiens
aattaaattgttgcagattcttcctatgtgcacgtctttgatgcacacgtacaatgaatgttcccaaaaagtattaataaagaacacattttaacttctttttaaatcaccaatttcagtacaaagcagtgtgcacagaaratattcactaaattcttactaaatgagtgaatttcataggaaattggaaaatggatgatcataaaattacatctggaaggaaatcatgcccagaaaatttatctgatgactgcacacacaatttttgctaacattatgctgaaggaaacaagtgtatgacagtaacatgaaacacaacaatggttggtttacacttcacatcattcacttggtattctggtgtggagaaataatatttgatcaaaacttaatagcatttaaaattgtttatttgatctttattctaactagtgatatggatcacacaaaaggtgtttaggctctttcttctatggcatgagaatatttttaaaaatatatttagctactcaaaaagtacaatgatataaacagaatatggaaaactcaggagaaaaaacaggaattataattagtgacataatataaaccaaaaatgaagtgccaatctcaaatcattttttaaaatgtgtggtctgaaatattcaaaactgactctagaagaaatcaatactaaaatatttgtcatacaaataattaatgagaaggttatcaaagaacttcatcaaagaattcctctaataaagtccctgggcccagaattcatagttcagaaaggaaaagaaagaatgc

SEQ ID NO: 88577 - DNA, 596 bp, Homo sapiens
tgacygtccgtgcagctggctgcccttgaaaatatccgaactatccactgggaaaatgcctgtccccttggggtaattaccagagtttcaacatgcccaaagctgcctcatcttcagggggaacttgttctagcgattttagtatcaagaagctaatggtcccagggaaagggttatttttaatatttagctactgtgctaaaaatcacctaagtttctagagtcttgggaaatttcataagggaaagaacaaaggcaacttgttgactacccactggtcattctcctctggtcttattacatacatggatgccagtttagattgtgtttatataggaaaaattaaatgtgtgagcctccttaaggaacatcatcaatacagatatatcagatagttctgtccagcaaaaaacgtgcttatttgctacaagtaaatttttatttatttttctcacttccctcactccttcaaatttccaggtaaatagctgcccaggagttgcttcatctctgtcccaaaatacctagacaattgcgggataaggagaatggcagggagggagtagtggctaaaatcacacccttcaaaagaaagt

SEQ ID NO: 88578 - DNA, 1100 bp, Homo sapiens
tatatatgtactcagcactttgctcgttgctctgtggcttacaaagatagatgtgacacagcttctcccttccaagatgttacagtcttgtcagagaaataggcgaagctgcgcccctctaggtcccagtagacattgctaactggggtagacccggagggggttagcaacacaagaagcttaggcgtacctgcttgcccgcctcccggccctgaatccttactatagagagtcatctgttcaccaagtacaaggaccccctccccttggttttgccaaccttccatctctcccagcccttcraaatgtttcccagctgccccctggcggcgggttggtttgttttgtttcgctttgtctggtcttttcatgcgttgtggaatacacatgacaggcaagggaatttctcctttaagcttttgactaacaggtaactgtagcaaagcagctatcccctcttgctctgcttaaatgtttgaaaggagactttcaattctcaacagctaaagcataagggaaattctcttagaggtttggaaccccaaagaagcagtggggtatggctctccatacactccccgcgtcttcccaagtgccccttctcactgttgtctcactaaaggcacctgcagaaaataactgactcttaatgaatgcctttgtcagtgacccgacaagtgccccttgcctggaccaagatgagaaagccagtgttacttccaggaaccccatttccatggactgatggaatctgcccctgattctgctgtcggaggcgaaccagaccctatagaaggaggaggtgattttctgagccaaaatcaaagcgcgggtgggagttctgccaatattttctttagattagtttcatgctttctactctgggagcttagggcagtttatagtctgagtttcatttttaggtacacatttgtggtacacagacaaaaaaaaaacgtaagagagtgattcgggatcagcaaaaaggagaaagaaaaaaaaaagacgtgtctccttcactcacctgataaatcttttatatttactgacatttttgaataagtacattgtgcccatcactaaatgtataatatttcttt

SEQ ID NO: 88579 - DNA, 1100 bp, Homo sapiens
tatatatgtactcagcactttgctcgttgctctgtggcttacaaagatagatgtgacacagcttctcccttccaagatgttacagtcttgtcagagaaataggcgaagctgcgcccctctaggtcccagtagacattgctaactggggtagacccggagggggttagcaacacaagaagcttaggcgtacctgcttgcccgcctcccggccctgaatccttactatagagagtcatctgttcaccaagtacaaggaccccctccccttggttttgccaaccttccatctctcccagcccttcgaaatgtttcccagctgccccctggcggcgggttggtttgttttgtttcgctttgtctggtcttttcatgcgttgtggaatacacatgacaggcaagggaatttctcctttaagcttttgactaacaggtaactgtagcaaagcagctatcccctcttgctctgcttaaatgtttgaaaggagactttcaattctcaacagctaaagcataagggaaattctcttagaggtttggaaccccaaagaagcagtggggtatggctctccayacactccccgcgtcttcccaagtgccccttctcactgttgtctcactaaaggcacctgcagaaaataactgactcttaatgaatgcctttgtcagtgacccgacaagtgccccttgcctggaccaagatgagaaagccagtgttacttccaggaaccccatttccatggactgatggaatctgcccctgattctgctgtcggaggcgaaccagaccctatagaaggaggaggtgattttctgagccaaaatcaaagcgcgggtgggagttctgccaatattttctttagattagtttcatgctttctactctgggagcttagggcagtttatagtctgagtttcatttttaggtacacatttgtggtacacagacaaaaaaaaaacgtaagagagtgattcgggatcagcaaaaaggagaaagaaaaaaaaaagacgtgtctccttcactcacctgataaatcttttatatttactgacatttttgaataagtacattgtgcccatcactaaatgtataatatttcttt

SEQ ID NO: 88580 - DNA, 736 bp, Homo sapiens
ggtgccgccctgaccacacttccaagactatctcctcatgtgggttctccttacatcatacatttgaccgtgaaacccatgaagacaggcgtccaatggagaggagtgttggaggcctcttccctttccacatggccctagagcccagtgttttcaatgtggkgtgactcccttttccagcggcgaaatcgttcccccgcttcccagaagtgtgctttaaagacattttgtgataagggagtgcaggtaggaaggggtctaacctcccccagggctccctgcgcctcggcggctgaggaggtggcagtggaggccgcccgacccccctctcagcctccctgtgctgcgttccctgccctgccgggaaatggagattctgcgcctaaagacacacagtcacgctgctttcaaagtttcagttcccacggccattctaaaatggcccctggagagctctggcttcctcctgcgccccttcccgcgcccgcccctgggtgtctccgctggctccccagcatctcctcccagctcgggatctctctcactcattcctccctccctgattctcgcctccattctcccgctctccagcagggcgcagctccctcttgctctttctggagaagcagggatcccagagaccccctacgagctggttccctcccagaccccgtccctccagtcgctggctcagtttccttcagtttcctccagctcatctcctgcccacctcaaa

SEQ ID NO: 88581 - DNA, 542 bp, Homo sapiens
gtagaacacactaataagaagagcccrtggtcagagcacccctgcagattgtcaggagctaagaatggaggaaaagagagactcattaagccatgccccatggagaggcaatgggaggtgcataagaaatgtttctggaagtcctgaccagggcaatcgggcatgagaaagaaagaaaaagagaggaagtcaaactatccctatttgcagacaatatgattctatacctacaaaaccccatagcctctgctcaagacctccttgatctgataagcaactttagcaaagtttcaggatataaaatcaatgtacaaaaaccactagctttcctgtacaccaacaacagccaagctgagagccaaatcaagaacacaatcccattcacaatagtcacagaaagaataaatacctagggtatagctaaccatggaggtgaaagatctctgcagtgagaattgcaaaagactgctcaaagaaatcagagatgacacaaacaaatggaaaaacatttcatgcttatggatagaagaatcaatattgtt

SEQ ID NO: 88582 - DNA, 765 bp, Homo sapiens
cccttgaggccaggagtttgagagtttgaggccgccataagccctgatcacaccactgcactccagcctgggcaacagaggaagactctatctcaaaaaaaaaaaaaaaaaaaaaaaaaaagactaaattcatctgccagtttgcagaaaatacagagaacagagaaacatgttgaacagcaccatgaatatgcactcagcaggtccagatggtagaaactacagggcacatggcccagattcctcaacaaataaactgtaaagaaaatgatagaagaggattttgtattatgaagaacccaaaattcattacattttaaaaaggctagactaaaaaatacattaaatatcttccttctttttcaatggtccagcatccaaatccctgtgtaatgtttgaggactttgcatcatgagtcagatattctatttaccaatctcctttgggaatagggatgggaacatgacctagatgcagctggtcagatgactccaccaaaatcacctagactttctaccctgtcatcaagtgtcaagagaggtctgcacactgggaataaccaccagcttctccaaaaatcttaactctattaacatattaagacagaccctaaaaacccaaaataagcagacatctcttccaataagtgcactgagtctgaggccactctytccctgggcctttgccaccattttcaggggccagaaaggacctgcaaattaagcctaagacaaagctaccccaaatttattttcctctagtcc

SEQ ID NO: 88583 - DNA, 1366 bp, Homo sapiens
atcaattagtgtaacccagggtactgatggccttgatacatgatttagtcttgtcattacagtgtgtggaaatcagggctttagggggcatcatctgaccccatttctttttaccacaatggttcctgctacaatgtcataggtttttcgattatgctgaaaaaacagcagtgtgatgaaagcagtgaaaaaagaagcaatcaaaaaattcttgatcaaagctcgtatagtggacgttgtaatactaacatttgaggaaggaatcactaaaacccaacttagtgcaataagcactgatgtcacaactcgaagccccagcaggaacttccctggggtagctccacctgctcyccaaatgcaaattatctcatagaaacaaactaataatctgtatataagagccacaaccatcattttctgcaagtcttccattgatgtgccttcatctatttattccaatatgtaatgcatagcaaagagatatcctctatcccactaaggtgcataatgcttaagacaatggttgcctttacaaaaagagaataaagaaatccaccatccttgccataaatctgtggcccaaggatggaataacatattctctccctgcctctcgcccagtctcgctcaggcttcaccaaggggccatggatcctaccctcctcactggagcagctcagacgcctgcacatgagaagcctggtgtcccaggcccacgactggagcaagggtgctgacgccagcagctgcccacaggtcaggccccactgtccggagagaagcgccacccgaagagaagctctgtggggatggctgggggctgcagtaggcggggaaggtgaccaggcaccaggccaggcgaggcagcagcagccagactgccacagccagccatgcaccctccaggagcacccatgggtgctcagccacactggcctctcccacagtgccatagcttcgggcactttgcagcccgcctgctcctgcagccccacacgggagccagaggccatctccctgcacctcctgagcttgtggggcggcttcaatccatcagcagcagcggccccgaggcctgcggctgtgagccagccccggggggcccccgtgggggcatgggatggtggcagcaggagggcccctcagaaaagggatgggcttgtggtcccctctgccctcacacacctgggagggtggcctcgtgccccctcgggacccccgccatcatcgctccagcagcaccccccgcaccacctgccactgctctgtccctatacgcccttccaaaatctcctccaattatcccccatccatccaactccacagttccccgctccaggaaccatggacaaaactgtttcactgc

SEQ ID NO: 88584 - DNA, 895 bp, Homo sapiens
ttttgtgtggaatatttgaaagttatcttgaaagtaaaggtcagagacaggaattgaaacagggcttaattcttaaacaagaaggtataagatattgcagttgatggaactgtggtgagcatgttccccaagggtggtgagcatgtctgtgtgggcatagaagatacatgtacgaacatttttattttattttatttagatggagtttcactcttgttgcccaggctggagtgcagtggcgcaatctcggctcaccacaacctctgcctcccgggttcaatgattctcctgcctcagcctcttgagtagctgggattacaggcatgcgccaccatgcctggctaattttgaatttttagtagacatgggatttctccatgttggtcagggtggtctcgaactcctgacctcaggtgatccacttgcctcggcctcgggattacaagtgtgagccaccatgcccagccaaacatttttatttttaatagsttaatgaatgtataatgattaaatgtttagcatgtattaaactatgatttcatgtagtttttttaaccataccaaccatgatttcatatggattatttaagcataccaaccataatttcatgtacattattgcttaagatagtaatgatataaaattttcttaaaattattcatgtaaaagaaacaagtcagttaaaaggaaaatattaagtaaaaatgtacaggtggcacccaaatatggtaaaaattgtgaagcagtttaatgaataactgaactttgggaaatgctagattagagaattggaaatactcttttaaataaacacttgctatctatgattatcctatggatgagtgtccaagaaatagagatgcatatgttgtatgtttttaaaatgtacaggat

SEQ ID NO: 88585 - DNA, 2602 bp, Homo sapiens
tgcatagaattcaattatacattttaaaaataacttccagtgattcttctttgcttctatgcaaaaactccccacaaaccaccctatttgtaataatctctctaaaggagactctccatagtgctatcagacaatttgttataattgggggagtattaaagaatacaagattcaggctgggcatatcctgtttggaattctgattcttccacatacttgtgtgactttagataggtttacataaactttctgaatctatgttttctaagccacacaatgcaagaataattattataaagatttacttgattggtgtagacaaaggacccaattcagtgttcagtatctaaaataactccataaaaggcagacattattcacaataactcagtttaactctatttccacttgctcttctctcagcagaaatgtagcgctgtcattcatataagaatagcattatgatgggctcagcctgcatataattgttttcaagtgaagtcctagaagtctacttcttggtttaattgataatttcttttgttcattcaatactaatcatatgtaaaacactgtactagatgcgggtaaaagtccttcctttcctccttcctcactcctggttactctcaggcatccttacaattctcagtatgcctcagcccaaatcaccgttcactgtagtagtccaactctagatgaatgacaattttgtatttaaaacaaaataattggacaagtccaggaaaaatatttttgatatacagcaaataacctttgctttcttttgtgcaggttaaataattcatgttcctttacctttgaagcacctgttcacatgtggaatatttctgcaaataatccttcagcattttccccttcttcacaagcacagaataagaagagcacaattttctggctctacaaagcagcaactttgagctgtgtgtaggtgatgtaatctattgctgtgtctaaataacaatatcaattgttgactaaaaataacaatagaataagtaaaacacaacaaggaagatattaactaaaaccttaaaaaaaaactccattaaaaattaaccaaataaatgacatatgctggattctattaatgactacacagcaatctccagactgtatttgcttttgtctttattgacctgagttttcctgactctcatccttcagactttcctcctatgtcctcctccagccaaagtcaagcctgcaaaccttggtgaaggggtgggttgcccctccacacctgtgggtgtttctcgttaggtggaatgagagacttggaaaagaaaaagacacagagacaaagtatagagaaagaaataagggggcccaggggaccagcgttcagcatacggaggatcccgccagcctctgagttcccttagtatttattgatcattcttgggtgtttctcagagagggggatgtggcagggtcatgggataatagtggagagaaggtcagcagataaacacgtgaacaaagctctctgcatcatagacaaggtaaagaattaagtgctgtgctttagatatgcatacacataaacatctcaatgccttacagagcagtattgttgcccgcatgtcccacctccagccctaaggcggttttcccctatctcagtagatggaacatacaatcgggttttatacgatgagacattccattgcccagggacrggcacgagagagatgccttcctcttgtctcaactgcaaagaggcatgccttcctcttatactaatcctcctcagcacagaccctttaccggtgtcgggctgggggacggtcaggtctttcccttcccacgaggccatatttcagactatcacatggggagaaaccttggacaatacctggctttcctaggcagaggtccctgcggccttccacagtgtttgtgtccctgggtacttgagattagggagtggggatgactcttaacgagcatgctgccttcaagcatgtgtttaacaaagcacatcttgcacagcccttaatccatttaaccgtgagttgacacagcacatgtttcagagagcacggggttgggggtaaggttatagattaacagcatcccaaggcagaagaatttttcttagtacgaacaaaatggagtctcctatgtctacttctttctacacagacacagcaacaatctgatctctctttcatttccccacaccttggcccccttgttttttttttttgtttttttttttctgcaccaatctcttggcaatcatttccactattgaggcttcagttctcactgcagagctggatctacttgaaatctatcatcattagtcaaacatatcaacccatgtacaagacagcttcacttgggtgacctctcttcagtccaaatctaaatgcaacatggcttcctctattgcccacccccacccccgtctcaaacagcaccctttctaaattaataggccatgatcaaaaccttaatgattttctcctttgattcctattcaactgtcatagaaacagtcttgttcacttttctatacctgtgcatgcaaagatgactggcatggagtaagaattacataagtgtttgctaa

SEQ ID NO: 88586 - DNA, 3503 bp, Homo sapiens
gcgtgacaccaagtgccagccccagggctcctcaggggaggagaaggggaccccgaccacactcagggggtgcgtgctgcgggccgggcatcaggagggggtacctggggggtgtcttcctggaaccactgctccgtttctcttcccaaatgttctcatgcattcattgtggattttctctattttccttttagtggagaagcatctgaaagaaaaaggccggactcgggctgttcaacttcaaaagacaccaagtaccagtcggtgtacgtcatatccgaggagaaggatgagtgcgtcatagcaactgaggtcagtgcaggcagcagccgctccctcctcctcggcatgggagcacctgaagctggagcacgggaatcggtctcaggctaacttcccatttgtcttgtggccccccaggtgtaaaatggaagtgagatggcaagactcccgtttctcttaaaataagtaaaattccaaggatatatgccccaacgaatgctgctgaagaggagggaggcctcgtggactgctgctgagaaaccgagttcagaccgagcaggttctcctcctgaggtcctcgacgcctgccgacagcctgtcgcggcccggccgcctgcggcactgccttccgtgacgtcgccgttgcactatggacagttgctcttaagagaatatatatttaaatgggtgaactgaattacgcataagaagcatgcactgcctgagtgtatattttggattcttatgagccagtcttttcttgaattagaaacacaaacactgcctttattgtcctttttgatacgaagatgtgctttttctagatggaaaagatgtgtgttattttttggatttgtaaaaatatttttcatgatatctgtaaagcttgagtattttgtgatgttcgttttttataatttaaattttggtaaatatgtacaaaggcacttcgggtctatgtgactatatttttttgtatataaatgtatttatggaatattgtgcaaatgttatttgagttttttactgttttgttaatgaagaaattcctttttaaaatatttttccaaaataaattttatgaatgacaaccagaaggcgtagttacttggctttgccttagagcggaggtgtgctcactcacctgcggcccgcgaggctgagggcagaggtggccttggtgtttctcttttcaaggctttggtttccctggatccatgagaagcagcccsttcctctcctccctcaggaagctgcttgctggccatcatgaggtgacttggtaagagcaggcacgcgcatgaagcagccgcgattttctaattccatccccccatgcatttattagttctttccgcagaaagaatgagcgttcctcattcattcattcattcattcattcattcattcattcatgtcagtgtagacttgtgagttattttgtacccagtgggtcacagctgtcatgattttgtcgccgtttgacgccaacatggccccagacggggcgtgggagtcacggaagctgctcctccgcttcccgtcggtgggcagccccgtctctaagcgcgtcccgcctgctggctcagcaggaccgcacgggctccctgtgggctgacccctcatttgccgctttgccccccgctaagcccgggttccttatggtagtgattgcatttttaacttgcgcgtacctcaaagcgctgagcggttcccaggatggaaagagggcgaccgatgtagcaggagctgcgcggaggcactggcgctcactcccctcagacccgactccgcttgcatttcctccttgcattaagggcacgttaaatgccaggccagcaacaccagcaaagaggagaagtgttttgctaagaacattgagcttgaatccgatgacagctctcagtctcattaccagttacggaaacacgggactgaaaactccttcctcgacgccccacgcatctgcgcagccgaatccagggaactctgtagccaaataaattgcaaggaaaaaacaagaaaatggtgagggggaacccatagatacaaagagacacggacatatcaatccatcgcagcgtctggatctggttcctgtttcaaacagtttaaaaattttatgaacccactggagacatgtaagcgctgactgggatatccacatgattttaaagtgcacctgctaaatagtttagatgtgatgtgttattactgttcagtttaaaaagagaccttatcttttagagaaaattctgaaatatttatggatgaaacaatacgaggcctgggactgattcggagccccccgccgcgggcacggtggcacggggagtcccacgagcactgctgggggtcgctgcagctgggagtggcccatgggggcgctcacttccgtgttctttcctctttcgtacacgtttgaaacttcccataagcaaaagcattaagccggaccatacagtgaatacacgcacacgcaaacacgacagtttccgggtgtgtatggaccgccgtgtctgtgacgtgacccacagcagaatgcatctgagggaggcttgctgtggttgcatacgcacatcgcagatgagaaatcttacaaggccaaaagcaagccaattaaactgggtggagagcgggagtccggtcaaggacgctggtagcagagtctcaggctcgctggtggcgcgcctaggtgattgcccactctgctgagtccttgaaagggaaacggcagcgtctgcagcagtgctgggagcacctcctcccgtctgcaggggacggtgcctttcagggcacggttctgcgcatgtgctcagctggcgccagcgaacggcttccggctgctcttagcgtggagttcaaaatccttgacttggcctctcaggtcatgcaccatccggctcccgcctgtcttggagcctcgtttcgttattctcccacgggtctgttaccgctcggctccagccagcgccctggcagcctggttctccatccgcccccactctgcgactttgagtgggatcttccatctgtctggtgacttccagtgtgaccttcttccgccacgaaaatgacccgcctgggttacctgccgcacgtgatggtgctcttgcagtttgccctgtggcatgattaattcgtgtagctgtttgtttagtgggcgtgtgtcccaggagactgcaacctcaaagagggcgggctgtgttggccctggttcaccactgcaacccaatccccacttgaggctgaagcaagaaaacgttctctatccatgtgagctataatttgagaacacacagacacacactcaggacatttcatcatgaaagaagcttcattctcgtgttcactcttaccaatgtcactaggagtttcgaaccataacatgaagccaaacacagggattatctgagcggatgaacatagtattctgtttttattctaataactggctgcctagatacagccctgtatatggtaagagtgcgtctacttgg

SEQ ID NO: 88587 - DNA, 679 bp, Homo sapiens
actaagaacttcttgtgtgattcaagctaacccctcgattatcagaagcagatgtttcaaacgactgaagatcagtgaggcatatcytatttacaggttaataattggctactagatgcaggtgcaccaaatggtcttagagacattagataggagagacaatgtcagtgctccccctaccctgcctcccctaatctaaagcctactctgtttcttttatcaagtgattggctgtatgttaacagagcctggggcactttcctgttgaaatgcctttaatcccaagcaactggattgattttttttttttttttttggatggtttagattggacgactgattattggacagaatggcatcttgtcgacacctgcggtctcctgcattatcaggaagatcaaggcagctggtggaatcattctaacagccagccactgccctggaggaccagggggagagtttggagtgaagtttaatgttgccaatggaggtatgtggttcagtatatgccttaataatcacgatttctttcctcttatattattatagtctcacagtgaccctttgatgatagacaagcaaggtgcagaggacctagctcagaaaaatttagtgaggtgcccaaagtgatccaacaaagaagtggcatgatgggctcatgaacccatttgggtggtct

SEQ ID NO: 88588 - DNA, 679 bp, Homo sapiens
actaagaacttcttgtgtgattcaagctaacccctcgattatcagaagcagatgtttcaaacgactgaagatcagtgaggcatatcttatttacaggttaataattgrctactagatgcaggtgcaccaaatggtcttagagacattagataggagagacaatgtcagtgctccccctaccctgcctcccctaatctaaagcctactctgtttcttttatcaagtgattggctgtatgttaacagagcctggggcactttcctgttgaaatgcctttaatcccaagcaactggattgattttttttttttttttttggatggtttagattggacgactgattattggacagaatggcatcttgtcgacacctgcggtctcctgcattatcaggaagatcaaggcagctggtggaatcattctaacagccagccactgccctggaggaccagggggagagtttggagtgaagtttaatgttgccaatggaggtatgtggttcagtatatgccttaataatcacgatttctttcctcttatattattatagtctcacagtgaccctttgatgatagacaagcaaggtgcagaggacctagctcagaaaaatttagtgaggtgcccaaagtgatccaacaaagaagtggcatgatgggctcatgaacccatttgggtggtct

SEQ ID NO: 88589 - DNA, 679 bp, Homo sapiens
actaagaacttcttgtgtgattcaagctaacccctcgattatcagaagcagatgtttcaaacgactgaagatcagtgaggcatatcttatttacaggttaataattggctrctagatgcaggtgcaccaaatggtcttagagacattagataggagagacaatgtcagtgctccccctaccctgcctcccctaatctaaagcctactctgtttcttttatcaagtgattggctgtatgttaacagagcctggggcactttcctgttgaaatgcctttaatcccaagcaactggattgattttttttttttttttttggatggtttagattggacgactgattattggacagaatggcatcttgtcgacacctgcggtctcctgcattatcaggaagatcaaggcagctggtggaatcattctaacagccagccactgccctggaggaccagggggagagtttggagtgaagtttaatgttgccaatggaggtatgtggttcagtatatgccttaataatcacgatttctttcctcttatattattatagtctcacagtgaccctttgatgatagacaagcaaggtgcagaggacctagctcagaaaaatttagtgaggtgcccaaagtgatccaacaaagaagtggcatgatgggctcatgaacccatttgggtggtct

SEQ ID NO: 88590 - DNA, 679 bp, Homo sapiens
actaagaacttcttgtgtgattcaagctaacccctcgattatcagaagcagatgtttcaaacgactgaagatcagtgaggcatatcttatttacaggttaataattggctactagatgcaggtgcaccaaatggtcttagagacattagataggagagacaatgtcagtgctccccctaccctgcctcccctaatctaaagcctactctgtttcttttatcaagtgattggctgtatgttaacagagcctggggcactttcctgttgaaatgcctttaatcccaagcaactggattgattttttttttttttttttggatggtttagattggacgactgattattggacagaatggcrtcttgtcgacacctgcggtctcctgcattatcaggaagatcaaggcagctggtggaatcattctaacagccagccactgccctggaggaccagggggagagtttggagtgaagtttaatgttgccaatggaggtatgtggttcagtatatgccttaataatcacgatttctttcctcttatattattatagtctcacagtgaccctttgatgatagacaagcaaggtgcagaggacctagctcagaaaaatttagtgaggtgcccaaagtgatccaacaaagaagtggcatgatgggctcatgaacccatttgggtggtct

SEQ ID NO: 88591 - DNA, 1714 bp, Homo sapiens
catctgtagtcccagctactcaggaggctgaggcaggagaatcgcttaaacccaggaggtggaggttgcagtgagccgagatggagccaccgcactccggccttggtgacagagcgaggctccatctcaaaaaaacaaaacaaaacagtaaaagaaacacaaaaggaaacacaatagatcaccaggcaatctggagggtcagggacctggaaaagagggatgggttgagtggtagacctggccagacaggagcaggcaggatcctgctagtttaaatgatcccctagtttaaatgatcccttttgctgctaatctgaattgagaccctgaggcaaagctggatctttgtcttactgctggactaggttacttgcttagtaactttatcttttgccttttttcttttttttttactttatttaaaatttgtctggattggatgaatccttggaagccatctccaattctcgttggaggaaaaacaatcaatagtaaagaaatcatctttcttggagagttctacccctaagccctagcttggtgactctaccctgctgcttttcctacgtgccccattgactgcatctcccatcaccttgttctcttcctgctgcttcttatgggccttgattgacatgagatgtagctgcttgcctggtcagtgggtggtaatcttctggaatgagcctcactacaaatgtgggattctgatgttttcatcagactcttcttcagtacctgagctgtcccagggagtgagtttgcatttattccatggtcccgtcttcactgcaatattgtgtcctacttgacctactatgacctggtctgaactatgacattaagtggagcacagctaggttgtatatgaatatatttcagtcattgaatactttacaaagtagaagaagcatgttcatgtataagcacaaaaactgatacaataattgttcaccacaaaatttttccaggattttagattcacaagctcacttacccttttgttcataaaaagtctgaacaggcactagggaatactgcctctgtttcatagaatcattagaggcctattgtttatttcggtctttcattaggcccagtggccaacacatatcactcttatttaagaggtgtaacagcaatagaaaaatgtgtgaagacttcagttagtttaatttctgactaaagttgatgtttctccatgctgtgaaaactcttgtattttttttaaaaacactcactacttttattttttatttcttttttagaggcagagtctttctctgtcacccaggctggagtgcagtggtgcatagctcactgcaacctcaaactcctgggcacaagcgatcctcctgcctcagcctccagagtagctaggactctaggcacatgccaccattcatggctattatttttagttttatgtagagacagcatctcactatattgcccaagctggtctcaaactcctgacctcaagtgatccttctaccttggcctgtcaaagcgctgggattacaggcatgagccattgcacctagccaacacccaccactttttacctccttacctaacctataaagcattgttgctttytctttcacacatcactgcccattgctgcaacactataaacccagccttttttcctttacctgcaaaaggaagaccctttaattgcttacctcttaaaaaaaaaaaaaaaaaaaaa

SEQ ID NO: 88592 - DNA, 949 bp, Homo sapiens
tgcgtaccttgtgtgggggaggcactgctaaatgctttgcatggacgtacctccttacctctatgaggtaggtggccattatgatgctcatagaggctggacagctaatatgaggcggagcctgtatttgggctcaggcagtctgactctggtgcccctgctgtgaagagctgtgccmtgctgcattcctcctgtagctgcacgaaagggtgtggaatcttctagaaacagtgagttctatatgagtggagtgtggtggtgggagaatagatggagtaaagccttttgtgtaaacataccatgctaagtactgggagatagaaacgaaatgagagatttttttgttttgttttttgagatggagtcttgctctgtcgctcaggctggagtgcagtggtgcgatctcagatcaccgcaacctccaccttccaggttcaagcaattctcctgcctcagcctcctgagtacctgggactacagacacacgccaccacgccggctaatttttgtatttttttggtagagacggggtttcatcatgttggccaggatggtcttgatctcatgacctcgtgatccacccaccgcagcctcccaaagtgctgggattacaggtgccagccaccacacccagccaaaataagacatttctttgcccctgccaccaagatatttaacatcttacaggactaacaaaacctaacatgaaccagtccagattcatatgatagaatatgaaaatgttttctggaaagaatagccagagtcccagtctggttactagaagacactttccctgtcctttccccacctgtagcccttccaagctggaatgtgcagaggtgaggaacagacagagagatggcagggaagctattggcaaggtgggaatcttaggaaggaagtgattccggttcttgaaaaagagaaccggattccgtcaagtaga

SEQ ID NO: 88593 - DNA, 1120 bp, Homo sapiens
ctgaaataaaaagatataccaattaattgggtaccatttcaattcacattttattctttgaagatattctgttatttgtgattataatattaaaaatgaaatcccccaatttatctcttcatattagaatttttcagattaatctaaaaatttaactgtcaaataagaaactgtaggctgggcacagtggctcacgcctataatcccagcactttgggaggccgaggcgagcaggttgcctgagctcaggagttcgcaaccagcctgggcaacacggtgaaatcctgtctctactaaaatacaaaaaattagccagatgtggcagcgtgcgcctgtagtcccagctacttgggaggctgaggcgggagaattgcttgaacccaggaggcggaggttgcagtgagccaagatcatgccactgcactccagcctgggcgacagagcgagactctgtctcaagaaaaagaaaagaaaagaaactgtaaaagtactacaaaaaacgcaagtgagtatatttataatcttaggttgcaaaatgtctttctcttaatgctacaaaacccaataccaaaagaaaaagtttgtgataaactgtgattatataaaatctaaaattttgattggcaaaaagtaaactaccataaactaagtcaaaagacaaatgtcaaactgagaataatatytgcaatacaactgaagttaatatgactaatagaaaaagacccttcaaaatctgtaaggaaagaactaacataccaattgaaaaatggacaaagttcatggccaggcaattcaaaagagaaaaaatataaagggacaaaagagtacagaaagatattctacttctcagtaataaaataaaccaaaaaaacaaaccagcaaaaaaacccaaagcaaaacaaaacattttttacccttcagattgggcaggaacaggtggcatctgtctcatgctataatggagaatgtcaacgcagaacaatttttctggggcacaaaatagtaacatatatcaaaaatgtaaatgagcatgccctttgccccaggagacccagtgctaggaatttatcttaggaacgtaattggacaagtgtgcaaacctgtgtgttcaagggtcttt

SEQ ID NO: 88594 - DNA, 829 bp, Homo sapiens
ccttcactggagtggcagctctgtcagggcataagtttttgccatttttcctgctcagcacctagaacaatatctagcctataactagccctcattttcatttgtatggaatgaatgaataaacaaataaatcagttttctgcctcttatcagctgcgtggaaccagacatctcccctccattttgaggtccctaagttattcctgggaaatctcagggactggcatcttctgccagacctctgacacccaagaaaccattggtggtaggcagaggcccctgtgagctgctgccaatgtctacactgaggcagcccctcagatcccaagctaaggtcactgatgtatgttcacagccagatgctgctgcttctgtcatggaaggatcttctccaaagtccactcttctgtaaaactgtgctgtgatgtgggaatagcacacacacccccacacaccctcacacatacatacacacacacacactgtcacacacatatgcacaaacacctgttaccttctttacccagacccttgggccagagcagccttgtgcccccattttttttcttttggtgaaactcactttctggctttactctcaggagcggggcaaggagttgggggaggaggactggaggtggggtgggaggcgtaactaaatcagaagttccgagtgaggaaggctcccctccaacacagaggcattcttctgacttagctaaacaagcttctggcaggaaaaataatttccctggcacaatatggtgccttatgccaattacctctgcgaggayccgcccactggccctccaggccatctggacaaaag

SEQ ID NO: 88595 - DNA, 746 bp, Homo sapiens
tagaagctgcagtgatctaagtagcagcaagtttgcgcgtatatcctttttgttttgtttgtttgaatgtttaaataatgtttaataagtttaaattatgttaaatatgctgaaatgtgttaaatatgtttatgtttaattgttaaatatgtttaaattgtaatgttgtttaaattatcacactgctgccacagtccccttgcatgaaattctgcactatacatactaattgtagtaaagttacccctatatctcaggcagggcaaacaactctggaagataattttcactgaagtctaaccaaacttcattaaatggattctgataagattataaatgacatgaaaaataatattttaacatcargtcatcaatttaagaaaagggtgtgcttagacacatttttaaagtttttaaaaagtaatattctaccctcctatagtcctcagaattaaagcatagtgaacaggaaagaaaaggaaaataatgcaactgagtgctaaggcagaacatcttgccagatgtaatgaaagtggcgtattcacagtcatgggttgcttaacgaccaggaaacgttcaaagaaatgcatccttaggtgatttttgtcgtcatgtgaacctcatagagtgaacttacacaggttctacacacctaggctctatggtatagcctgttgctcctaggctacaaacttgtacagcatgtcactgagctgaatcttgcaagcgtttatacacaatgataa

SEQ ID NO: 88596 - DNA, 1278 bp, Homo sapiens
catctattgggctcttaccacatggcaggacttgtgcctggcatttcatctgcactaactcagttaatgtccacaggccttagtcaggtgtctggctcttgggaggggtgctgtcaatgagagctattatttttgttgttattgtgtttatgattacaagagaccataagagacaaggaatcaaaagctgtgtttctccattatcagattatcaagggaacatcagtgaagaatatacataagacctcatgtaaggaacaaattaagcatgattgtgtctgtattctagcagtttatcatctacaacatacaattatttgagagaggaggcgtaggaagagggagcgagggagcgagaacatgcatataggtaaatrgaccagtatacatgctattctgttctgttttgtaagcatgttttctggaaaatgactgttagacagcagatgtagcactcacatttgtgagttttcatttcagcagtttactgaagtgaaatttagagaaatgggataaagtctctaacatttctagtaagttctatcaatcagaaaaccctggagtttggtaaagtcattgttgaagatgatcattggtaaaagtttctactgcattatggtataagccaggatccatgcaagattttttttaaaaaaattatgcttcaggccaggtgcggtggctcacgcctgtaatcccagcactttggaaggctgaggcaggtggatcatgaggtgaggagtttgagaccagcctgaccaacatggtgaaaccccatctctactgaaaatacaaaaatcagccacgcatggtggcatgcacctgtaatctcagctactcaggaggctgaggcaggagactcgcttgaaccaggaggcggaggttgcagtgagccaagatcacgccactgtactctagcctgggagacagagcgagactccttctcaaaaaaaaaaaaaaaaatacacttcagtcaagtggatgccaccttgtatgtaagtctcatggtgtaggcactctctcagcccatgatcactctggatgcttgcagagatcttctgtcagaatcaactttgtttctaatggaggaaaaaaaactattttaatatagtcattattgctgtatgtcattgtaaacagcctattaacccttttccatttaccctgagaatactcactgatggcacttgcagctgcagcgtttaccccgagataactttcatcatgcaaaatctcttttaatattattttcacatcgctctagtatatcgactttgg

SEQ ID NO: 88597 - DNA, 933 bp, Homo sapiens
tagacaccataaggagactttaattaagagactgtttacaatggagtgtgcattacaatgggcagggttaaaggaaactgacaaagcatagtacagcacctgggaccagcaatactggagagctgttactacctctagtcctgaagctgcaaagggaggaagagcaattataacattcacagaggctagaagtatagacaagattccctggcaggagccttgaaaaagggacacacccacacygtagtgacctgtcaaggagggagccaagagaataaaatctcaacctcacttctctctgactctccagtatcttgctgctgcctttcattggctggaaacaacaggcagcaaaaagacaaggaagtctgctgacatggtccatatggatcagggtctggaggccagagcagggtggaaaagggtaaaaaggcaaacaaaagaagcccaatatccaccattctctgcataggtctctgttatggcacttgctgtttagtgccaggtcccctagaggctgggaaatgctggtgaacagagaattagtttgtttatatctgcaccctcaaaatctggcatatagtatgtgatcgataaatggttataagaattaccaggtacatcatacagcacctggtaaaatagaaagattagggattctttttagattatccacaggcatgaagcaatcatgaacttcttcctttcatgcaatattttatcagcaccactgtgtgaggtattattcctgccatccaggagctctttatctcaaactagaaactcctagagcaaggaaagcagttatgcatcctctatttcacatttccccagtgtggatactgtaggtcactggtttgatgtgatgctcagagatgtcacatcagagtccattgtcaagtgtaaagtctgtagattaagcaaatgtcttct

SEQ ID NO: 88598 - DNA, 1099 bp, Homo sapiens
cagattacaaagacatgatataaaaaatgtaaaataaatcatattaataattgtatatatataaaataacttgaaaatatttcattatattgggttaaatattttaaattaatttctcttggttatttatattcttttgaatatctagaaatgttaaacctattctggcttgcattctattttagttgcatagatctgctccagtccctgtttaccccctctgacatctaacaccatgttcctttcattcttcagttcctgccacactggctgcctgtcagtttcttttctacctctgatccttctcttttgctgttccttgtgtgtggaatgctcttcccattggaattctcatggccggctccttctcatccttcacatctcagcttcaacgtgctttgctgtcagagtctagagtagacttcctccggttactttagtccccactcactgtttattttctttgtggtctgcatcacacgttgtactgtagttattggtctgcgcgtttttttgttttgttttgtttttgtctgtttccgcwactactcagtaaaagccacgaggacaagaactctttcctggcatgaaacagaaactcaaaatataattttaaaagactgccctgaaaagtcttggcagatatactgaagagtccccagactctagaccaatgtgataaatgtgtggaggagtcccagattccaagtcccaagatcaagctttagatttacaaatagtgccatcattgttattaccattattgtttttagtggctgggggttaaagacctctggggaattctgaggaacgggggtggggtgcagagcatgactcctgtgacctgcctgtggggtctttctccatcagcagaaatgaaagtggcgcagaacatgccagaccttctcacagctagaacccaccattctatggcttccttttacccttgggccaaaacctctcaactctttatgctgacctacaggactataagcacataattgatgctcaaggagtatttgcttgttatctcctctcattattaaaaaaaaacaaaacaaaacgtgttggctattgtgaatagtgctgcaatgaacgt

SEQ ID NO: 88599 - DNA, 697 bp, Homo sapiens
atgggtcctcccaacaggcttcccttctctccatcagtattttgttcttggaaatacagaggctgtataaataagcgagctggttggctaaagccagtgagtcacacagctgagagtcttcccaaattcaccctgttttaggtagactcctataccacatgcgcatgcacaccttgtgtttttaatttctcagcatcaccatgggagatacatgactatctgagggtcgagacatagcacagtcatttttcagaccataacaacgcacccaagttaagatgaatattaacatctcctgtgctcttgctgrcaaatagctgatcaaaaccttaaggcttcctctgtcacaaaaaataacacgagttctgagtggcatgtgagacttagcaagaggcccctctcgcctcacaatgtgagctgcacatgtgcacccacacttgagtctgacccctaagcatttccaacaccagggatgttaaaggtaagcttttttgaaacagctctttcctttgtatcttttgctctttactcacaaaagacaaaaagaataagtgtatttataactctttgcaaccaatgagaattccacatggggcgggggaagatgggaaaaagtgatctgtaacctttcatgatatcctgtttgcccctctgggaatttgtgtaagcgaagtcatgtcagtggaagcagcaacac

SEQ ID NO: 88600 - DNA, 694 bp, Homo sapiens
tcttttccgcacttggggaagacgaatgccgaccattggctcagacaccataccacacaggcatttctgraggcatttcgcggcgttattatgggaagttgcgcggaccggggccttcgcgctacagccgaggagtctcagcgcctgccaggcgggagccgcacttccggcgaggtgtcttcgggagggggcgccacagcccgtggcagtgccggcctcccgccttaaccagcccgactcccgccgcgccagcaccgtggggagcgagtgggtcccgcccggccgcggcctggacctggcagccgggcttcgtgggcgctctgagccgtggcccgtggcgcggggtgatccttgtgcctggcgccggcctcagaaccccgtttacggctttccgcgcatacggaggttgctggggaccccgacacctgcgcgccctcgactggggcccgctccagcagtgaagacccaggcccttccctgggccgtggctgctcttggtgcctcatgggagcgcccggggtagggactcggctagtgacctgtaggacatgaggggcgagctgggagccgattcgcccacggcgtctccttcgccatggaggccccccacccattccactccggggttgcggccacgcaccataagagcaccttcaggtctgagctctttaggggtgggagtaggcagttcgtg

SEQ ID NO: 88601 - DNA, 694 bp, Homo sapiens
tcttttccgcacttggggaagacgaatgccgaccattggctcagacaccataccacacaggcatttctggaggcatttcgcggcgttattatgggaagttgcgcggaccggggccttcgcgctacagccgaggagtctcagcgcctgccasgcgggagccgcacttccggcgaggtgtcttcgggagggggcgccacagcccgtggcagtgccggcctcccgccttaaccagcccgactcccgccgcgccagcaccgtggggagcgagtgggtcccgcccggccgcggcctggacctggcagccgggcttcgtgggcgctctgagccgtggcccgtggcgcggggtgatccttgtgcctggcgccggcctcagaaccccgtttacggctttccgcgcatacggaggttgctggggaccccgacacctgcgcgccctcgactggggcccgctccagcagtgaagacccaggcccttccctgggccgtggctgctcttggtgcctcatgggagcgcccggggtagggactcggctagtgacctgtaggacatgaggggcgagctgggagccgattcgcccacggcgtctccttcgccatggaggccccccacccattccactccggggttgcggccacgcaccataagagcaccttcaggtctgagctctttaggggtgggagtaggcagttcgtg

SEQ ID NO: 88602 - DNA, 694 bp, Homo sapiens
tcttttccgcacttggggaagacgaatgccgaccattggctcagacaccataccacacaggcatttctggaggcatttcgcggcgttattatgggaagttgcgcggaccggggccttcgcgctacagccgaggagtctcagcgcctgccaggcgggagccgcacttccggcgaggtgtcttcgggagggggcgccacagcccgtggcagtgccggcctcccgccttaaccagcccgactcccgccgcgccagcaccgtggggagcgagtgggtcccgcccggccgcggcctggacctggcagccgggcttcgtgggcgctctgagccgtggcccgtggcgcggggtgatcsttgtgcctggcgccggcctcagaaccccgtttacggctttccgcgcatacggaggttgctggggaccccgacacctgcgcgccctcgactggggcccgctccagcagtgaagacccaggcccttccctgggccgtggctgctcttggtgcctcatgggagcgcccggggtagggactcggctagtgacctgtaggacatgaggggcgagctgggagccgattcgcccacggcgtctccttcgccatggaggccccccacccattccactccggggttgcggccacgcaccataagagcaccttcaggtctgagctctttaggggtgggagtaggcagttcgtg

SEQ ID NO: 88603 - DNA, 1516 bp, Homo sapiens
tccgtgggaaaattcaagttaggacgcaatgcgaggcctcttaaatctttaagatcctcgggtcagctcaaagagtctttagcaattcgttgttttgtcttgagaccattatcggtccctaagcacctaattatttaatggcagccctctgggtatatcgggtagactgataggtcttatctaacattcaaacacaagtttctggaggaaactctcatctgacttcctccttycccacccgccgcccactgtcatttattttattaaatggaacccatttaaaatccaaatttataattattaaaaagcagtcttattacatattcttgaagatttggttgtgtacgatcatttaatcatgtagtttaatttctgtgttgttcccacattgccaacttgatggaggagagcagacccgaggacttttcaacctccaataaaaaagaagaggactttatggctggggtgaaaaggggctggtgagctacgacaatggggcagcatagctttactatgtgcaaaagcattcagacacatggcgacccttttgcaataaaactttattgatgatcgtttgaaagttatggcaactccaaggttataaaacttgtcataaaataccaagcagtcattagtttacctgacctcatttcaatataaacttccacaaaacattttattttgttccttcttataagtggagaaaagaagttgaagaggttaaatacagcggcccattattgaggatccaaaatctgcaatttgacactctgaccttcatccctgcaaataaagcagtaaaatttacattttattctttaatgttccgttattgcagaaaagttaatagtgtgtaaatgttattgtagaaaagataataacagctatgttttagttccaactgcccatttttagcacataacctgtgtttaattttggatggagactttttcctctttggaagatttgtaagatatatttaacaattattaaagaatatttgctccccgagctatgcaatagaagtctaagaagcaaatggccacatgttgtcatgtgacctgaagagttgttcaaaatattcaattagtatttacagctattgagaggttagatgactaatcactacctcttgccaccctcagtcatgagcttaaagaaaggcagctgccctgagattggcacgtacaactatactacagaaaataacccaaactgatgttccaagaaagctccaggagataaactggagtttgtcaaaatcatcatttctggtccaactgtatgagtggacttaaaccatggatcagagaacagccacagaacactgataactttgagtggcttctcatcgctccaaactccactttggattggctgaagctcgtgtttccttaatgctgtgtagctaaggccaatctacctgcttttggggatttgtgagcaagtacagatggcaaaggttgactttgtgttagctgcatggtgatttctccaaaacatgtaaaagtctgga

SEQ ID NO: 88604 - DNA, 1359 bp, Homo sapiens
cttggttacgtatcttctggaaatattgggttacagctaatcatctttctgtattgtctgacttctccaaatctttaatattccacagtgggctgtgaatgcacaagtgtgaaacatagtatgcaatatttccctaacctatttgcacagagaattatttgttattggggctttcctccccacaccagactttagaaaatacagacctagaatttaaccagtagatcaaatgaaactttagttttatgtttaaaacaaagttgaaaaacacgcttctctaatcacatgagtgyttttctctttggattgagactcctctgcccaaatttgtatatagcttagtgtgtataacaggggaggggagggatttcaactactccttggagctgtcaagtactgaatcccactgattagcaaggagtttctctcaacgtctgaacagcttcttgccctggagtaatatgtcgctgagtcatagggaaacattgcttggtaataattgatgtacagctaaatcttctaagcactttttaactatacaaatgcttcttgcccccacgaacaatgaacaagagaagaggcttccttttaactttaaattaactagcatttcaaagagttccagaacatctttcaaactcacttctctgaggacatctaaataggaccagtgactccctgaaggcaccttctaccccagagctctgtttcctttagatactgaagtacaataaagttgctttatagtcatagaggaaataaacaggctgctgttctcaaagaatgcgaagcccttacctgtgccttgaagataggaacgtttatgagtcccaggggacagggacagcccccggatgtgagtagtttccagagaaacaagttgatctgaagtttttcctggagagttggaaaatctgccacatgtcatccagcgcttatttctttggtgggttttacacttgggtgtcattcagcagttttatgagagcaagacaatggatagagaagccataaaaaaaattcttctagttctttaaggtatgagtcatctttaccattgaaacctttggtcacagcctgaatagaagaggcaacatgcactgctttttttttttttttttttttttttggtaggggtggagggagaagagttttcaaatgtgttgcttccattcaggagggaaagattatttagggatctattgatttttcatatgtggtttgattgcattttccctcacttgagtttctggatgtgctcatagattgaacctcagttatgtgggaactttcagtgtcagtttctaagagtaagaggcacggcagcattaatttgaccttctccatgataagggatcc

SEQ ID NO: 88605 - DNA, 986 bp, Homo sapiens
atatattgtactgcatcttgcttttctctcattatatcttggaggctgttccatatcagtaccttaatgcctacagagcaccatgtcatggatttcttaatacaagcttgtccaaaaatgagctaatttggattatgagaatttaattttactagttttataagacacccctaatctggcttatcagcacctcatttcatgagtgccacctttattttctgacctgcatcataagcaccactgtgaagccatctttgccgtggtgtaattggtgggttggtgaagttctctcagatagttcatttgctgctttaaagtggtaataatcttgtatgcatttgcatagttttcattgatttctttgctctctttactggtctgtcacccctagattgaaagtttaattacgtaaacattaaaatatgtatactttactgaagtaattgtgtgccatttatttcagtggtaattaaattcttttgatgtggagaaatcaccaaatgagttttttaaggaaggttaattctctcaaggcgggatgactgtgttctactatttctctagctctttgtggtcagtgcttctttagggccttcatttaattcctcacttgtttaccagtgattgagaaacttctaaaatcactcacaccttttgttttaggcttgattkcagcaaagagcatgtagtcactaagtggagtggtgagtaggccccgctatttctaacttattccatataaatagttaaattcatgtaagttgaattcgagtatggtgtggctcctttatgataagaattgacctaattcaggtggagctgggaaggagatgcccaggcagcttctctttcatccatgcaaacatgtgttgacctcttgctaggtaatattaggtgctctgggtccaaaggagaatcatttgtggttcctgcccacaaaaaaacttgtagtctagtaggagacggttaatgggtacaaacaaaca

SEQ ID NO: 88606 - DNA, 914 bp, Homo sapiens
tgttactttagcatatattatctgtagtgtaatttttatctgtagtgtattttttacagtaaccctatgaggtcagttggacaaagtattctttttagatgagaaagcagattcagagagactaacaggccttactcaaggggggtgaatgatagagcctgaatcttaagcttggtttttttcactttaacatttttttcccctatatcatactatttgtttctttcctctgggtctaaggcaattttagagggaagtgggggttagaaagagggagaaggtatggccattcatcagaaacccttcaagagggaaggagcagaatattctgttaaaaacagggcctctrcaggcagactgcttaggttctgatctcagctctgctacttcctggctttgtgacctgggacaagtaagtctgtctaacttttttctgcctccacttctcatctgtgaaatggatgtaataatagtactgtactcaaaggattattatgaggagtaagtcaaaggaattaatatttgcaaagtgcttaggacagtgtctagcacgtcatgtattatagaagatttgttaaataggaagaatatgggtgattatcacacgctaatagaatttagaaagttataaatcgatagcacttaaacttctgatggtaagaagttaagcataactaggatgttttgtttatttttgctgggttgctacagtcttttgcttccattttaaacttccatttttcagctgcaatatattgttcttttctggtgccactctctttactcatcttcatttgaaattaaaaaaaatttttccagaaatctgcaatgatgaattactatctttttgccaataacctgattatagcccagactttcccgtattcaaatcacacaaccaaaatgtatgtgta

SEQ ID NO: 88607 - DNA, 926 bp, Homo sapiens
tgcatccatgtgaaatcagattttttcttatacagataaatagatgtagtaataaatacagattgagtcaattgccaacatgatgtccccatcaccctaggataatttagtgtgcattcctttcctacaaagaaggatattctcctacctaagccaatccagaaatgcaggtttttccttttttaggtgtctgcctggctgccactgccacctcagcagtacatgtctgtcactggagctggttttagggcaggccaggagagagaaaagagggggagaaacaacaacaaagatcttccccattctctcaggctcataggaatccccattcctagtcctctggtcagaaagacaggattcccccaaaaattttgttgcttgcacccaagcacagttccctgatttgtcctgcccttgggccaaagctgggagagaacggaataaggggcgaggggcagctcagactcccaccaccttaatagttttccatgttctgttttctgctccaattcacctgctattgtttacatttctgtcattaggtagttgtctttcgtgtgtcttctaacaggtcttcagttgttattactgggatagactttacagggcctattccttcttggtagatactagaagtcccagcttcctttctatgtctttccatggrgaaggccagctttatgagggcacaacctgcacagtcctacgtggtcctgtgctcagaagggccctgtgctcagtttaatgctctattgttgctgtcttgacattcttaatgattttatctttgaacatgggtgagtgaagttccatgaactaatggtgcacatgcaggagcaaaagataacacagaatatccatgcgcactaccaatcctttccatccccattagcatgtagcattcttggtgtcccgtgagtataaaa

SEQ ID NO: 88608 - DNA, 569 bp, Homo sapiens
gacacaaatcacaccctacgtgtttgtttttcagagatgccgtgtgttgtgtgtgtgtgtgtgagagagagtgaaagagagagtgggtggggggagagaaagagagaattaaaactgtaagactagttttagtaggtattgaattctacagaaagttaaattctaaaacatatgtattgttcgtgttataaactgtttgaatcaattgagtccatagataaaataacaacaacaaaaatcccacatcacctccratagaaacaaagtcaatctatttttgttgcaatgcagattaaataatcagataattaataatagagttgacttttttcaaatatcttattttctgattataaaattaacatgtactcattaaggagactcagcagtttattaaaaaaaaaaagataatttacagtctcatcacctagatccatcctccattaatgttctggtcttgcaaacttttaaaaaatatacataaacacactcacaaatgtgcttttacttttagaaaaatcagctcatatgatataaatatgaaaaaaacatttgataacttggttttg

SEQ ID NO: 88609 - DNA, 611 bp, Homo sapiens
acatatatgtgtatatatggatgtatatatatacataattatctgcacttgtaacatatatgtgtgtatatattcatacatgtgtgtatatatacatatgtgtgtatatatacacatgtgtacatgtacacatgtgtatatatacatatrtgtgtacatgtacacacgtgtatatatacatatatgtgtacatgtacacacgtgtatatatacatatatgtgtacatgtacacacgtgtatatatacatatatgtgtacatgtacacacgtgtatatatacatatatgtgtacatgtacacacgtgtatatatacatatatgtgtacatgtacacatgtgtatatacatatatgtgtatatgtacacatgtgtatataattggtcagtcacagacacatggtgctaaaccagatccgtttccctttgaagctctccttttaactatgacatcaaccttctccacacatacttttggaattgttttgtagctagatcttttcctttttatgttctggctcaggtgataagcttagaaaagccttttttttttttcctttttaggcaggaaagtgtatcatctgtttagatgaaagtgcaggtaataaggtaa

SEQ ID NO: 88610 - DNA, 599 bp, Homo sapiens
tatttccttgacaacagccagtttaagatggaatactaatcattcttctgtgaaaaccgtggctactctgtcgttggaaatttgtgtctttataagactctagcccttaccccagttactcagcccccactctttttctcttcttttgctaattgttccagcttcaacattaccattaaaaattataaatttagtttattaattgaaaattatgtgaatttggagtctaaaataaaatattcaacttgacttttaaaaagcagccatcctcagccctattcctcactcctcccagaagcaaacatttttcaactcttgtagcttgttctatttgaattataatgttacttatttttcagttttagcagttatctattgatttttagttactgaagtttaagatttaactcatacctcttgtatctaacacctacatatgtatttccgatcccctagccgcccactgtagttttattgtaattttggttagatgagtgcttcttatttctggctgtacattagaatcactagcaaacttgagtgaacaaatctagatacctgagactcaccctcacaaattcagctttatgtgtttkggg

SEQ ID NO: 88611 - DNA, 1002 bp, Homo sapiens
ttaagggcatatatattgaaatgtgaaagatggacatttttgtttgtgtatattttctttacctctaaatatttatatatatacatttttgagatggggtctgtttcgcccagcctggagtgcagtggtgtgatctcggctcactgcatcctccatgcctcccaagctcaagcaatcctcccacttcagccccccaagtagctgggaccacaggcacacgccaccatgcctggctaatttttttttattttttagtagaaacagggtttctgtatgttgcccagactagtctcgaactcctgagctcaagatatccacccacctcggcctcccaaaatgctgaaattacaggtgtgacccactgcrcccagcctttaaatatttatcttaaaaaatagtatcaagatgttcctttaaataattcatcaagtttccttaaaatgacaagagctgcctcatggagcaataatagatacattcgtatctgcatcatatggggcaaatgtgggcagtaggattgcggttttatttttaaaccattttcatttgattagtctcaaatacttaaaaatcagaagattttgcatttaaaaagtctgaatttctggctgctttaaaaaaaaaaggacatgtctggcagacttgaccccctttctcctacagtgacacctgtctatagctgcactcatggctgactctagaagagctgtgttttctctccacttcagtcctcaccattctctattgttttgggtacttaaaacagttttacttggtattagctgcttggcacttgccatttagcttggaacacctatccatattgttgacttgaaaaaaaagttactcatatcttaggtgaaaacattgttttgtagatagtgtgcgtgaatacagatatgtgtggggaggaagaggaaaggtttatctcaaggtcatttgttggatcctgattcatttttctattgatttttaatttttatgtaatgagcatggattatg

SEQ ID NO: 88612 - DNA, 1002 bp, Homo sapiens
ttaagggcatatatattgaaatgtgaaagatggacatttttgtttgtgtatattttctttacctctaaatatttatatatatacatttttgagatggggtctgtttcgcccagcctggagtgcagtggtgtgatctcggctcactgcatcctccatgcctcccaagctcaagcaatcctcccacttcagccccccaagtagctgggaccacaggcacacgccaccatgcctggctaatttttttttattttttagtagaaacagggtttctgtatgttgcccagactagtctcgaactcctgagctcaagatatccacccacctcggcctcccaaaatgctgaaattacaggtgtgacccactgcgcccagcctttaaatatttatcttaaaaaatagtatcaagatgttcctttaaataattcatcaagtttccttaaaatgacaagagctgcctcatggagcaataatagatacattcgtatctgcatcatatggggcaaatgtgggcagtaggattgcggttttatttttaaaccattttcatttgattagtctcaaatacttaaaaatcagaagattttgcatttaaaaagtctgaatttctggctgctttaaaaaaaaaaggacatgtctggcagacttgascccctttctcctacagtgacacctgtctatagctgcactcatggctgactctagaagagctgtgttttctctccacttcagtcctcaccattctctattgttttgggtacttaaaacagttttacttggtattagctgcttggcacttgccatttagcttggaacacctatccatattgttgacttgaaaaaaaagttactcatatcttaggtgaaaacattgttttgtagatagtgtgcgtgaatacagatatgtgtggggaggaagaggaaaggtttatctcaaggtcatttgttggatcctgattcatttttctattgatttttaatttttatgtaatgagcatggattatg

SEQ ID NO: 88613 - DNA, 1002 bp, Homo sapiens
ttaagggcatatatattgaaatgtgaaagatggacatttttgtttgtgtatattttctttacctctaaatatttatatatatacatttttgagatggggtctgtttcgcccagcctggagtgcagtggtgtgatctcggctcactgcatcctccatgcctcccaagctcaagcaatcctcccacttcagccccccaagtagctgggaccacaggcacacgccaccatgcctggctaatttttttttattttttagtagaaacagggtttctgtatgttgcccagactagtctcgaactcctgagctcaagatatccacccacctcggcctcccaaaatgctgaaattacaggtgtgacccactgcgcccagcctttaaatatttatcttaaaaaatagtatcaagatgttcctttaaataattcatcaagtttccttaaaatgacaagagctgcctcatggagcaataatagatacattcgtatctgcatcatatggggcaaatgtgggcagtaggattgcggttttatttttaaaccattttcatttgattagtctcaaatacttaaaaatcagaagattttgcatttaaaaagtctgaatttctggctgctttaaaaaaaaaaggacatgtctggcagacttgaccccctttctcctacagtgacacctgtctatagctgcactcatggctgactctagaagagctgtgttttctctccacttcagtcctcaccrttctctattgttttgggtacttaaaacagttttacttggtattagctgcttggcacttgccatttagcttggaacacctatccatattgttgacttgaaaaaaaagttactcatatcttaggtgaaaacattgttttgtagatagtgtgcgtgaatacagatatgtgtggggaggaagaggaaaggtttatctcaaggtcatttgttggatcctgattcatttttctattgatttttaatttttatgtaatgagcatggattatg

SEQ ID NO: 88614 - DNA, 2395 bp, Homo sapiens
gttcacatggtgaaacccccgtctctactaaaaatacaaaaaattagccaggcatggtggcaggcacctataatcccagctactcaggagggtgaggcaggagaatcgcttgaacctgggaggcggaggttgcagtgagccgagatcaagccactgcactccagcctgggcaacaaagcaagactctgtctcaaaaataaataaataaataaataaataraataattcagctcctaggctgtctcctagaggaacatcaacatttccagggcatggtagttacaccatcacctttgtgtgaacctctgtgttaacttccactacaaaattctgtcattgggccaggtgcggtggctcacgcctgtaatcccagcactttgggaggctgaggcgggcggatcacgaggttaggagatcgagaccagcctggccaacatggtgaaaccccgtctctactaaaaacacaaaaattatctgggtgtggtggcgcatgcctgtaatcccagctactcgggaggctgaggcaggagaatcgtttgaacccaggaggcagtggttgcagggagccgagatcatgccactgcactccagcctggtgacagaggaatactctgtctgaaaaaaaaaatactgtcattgatctattgttttattgtgtttacatttctgtttcactagatagtaagaccctcaaggacatggactgagtctgattttcctgtggtcttgtttgtccagctgtccatgcatgatctccatatgggcatcccacaggcacatcaccatgcccactgctgaactcatctgaagcactctctgaatgtccatacatcacccaagcctctatcattgcgtctcccacatgagcttgctgtttcctatttatgagtctgactctcctactaggtagtgaacaactgaagacagaaaccaggtgagtttcatttgttcttctatccctgctgcccaacacagtgcctgccacatagaggttaattcatgttcattgaactgaaccagatatttgtatcttcagggccagttacctaagaaatgctcaagacctgtttgttacattacattctagaaaagatgcttctcccaaagccttctgcccaccctccttctctggcaggcttggattaacactgagagccaatagtttgtcacatagcaacaatagtaaagaatgagctactgccgaatagagcagatgcttgcctgctccagagagcagagcagagctattttgagatcctttaggtagagtcacagtctgataggtccacccattgtggctacagttaccacacatggcatcagcttagggggtacaaggcatcaaaaaaatcttatttgcatatcagtttcttttgccatcctttggagaatccttttagaatataaaggactaggccgggtacggtggctcatgcctgtaatccgcgcactttgggaggcagaggcaggcagatcaactgaggtcgggagtttgagaccagcctgaccaacatggagaaaccctgtctctactaaaaatacaaaaaaattagctaggtatcgtggcacatgcctgtaatcccagctacttgggaggctgaggcaggaaaattgcttgagcctgggaggcggaggttgcggtgagccgagatcatgccattgcactccagactgggcaacaagagtgaaaccatgtctcaaaaaaaaaaaaaaaaaaaaaaggaaaaaaaaaagaatataaaggaccaaattttaggtatttttttataattttctaattatgaagtcaattgggcttttgtttataatactgttaacattttaatattccactgaattactgtacagatgtgctaattgatagataagatgaccacatattctagggccgggcgtggtggctcacacctgtaatcccagcactttgggagcccaaggcgggtggataacctgaggtcaggagctcaagatcagcctggccaacgtggtgaaaccctgtctctactaaaaatacaaaaattagctgggcatggtggtgcatgcctgtagtcctagctgctcaggaggctgaggcagaagaatcgcttaaacccgggaggcagaggtagcagtgaactgagatcgcaccactgcactccagcctgggtgacagagtgagactctgtctcaaaaaaaaaaaaatgaccacatattccaaaataggacccaggtgtcctatattccaaaaggcaggacccaggtgtcagcccaaacttcccagcatcatacccatggccctctgttgtctggctgggcccaccttttcagtgtcctctcctgcctgggcacatgatgctttacccatggtgagcagcattcaggcaccaatgtgacaggtgcttatgctcatgcatta

SEQ ID NO: 88615 - DNA, 975 bp, Homo sapiens
aaaaagtttaatggacttacagttccacatggytggggaggcctcacaatcacggtggaaggtgaaaggcatgtcttacatggatggcagcaggccaaaagagagagagagcttgtgcgggggaactcctctttataaaatcttgtgagacttattcactattgcgagaacagcatgagaaagatccgcccctatgattcaattacctcccattgagtccttcccatgacatatgggaattgtaggagttacaattcaagatgagatttaagtgaggacgcagccaaaccatatcatatcccatatataccaatgttatgtatcaataaaaatatatatattaaatttgctaactgaatcaaagacttgatcccattaactttcaactctctcataacagcctaccatcagcatcccattgccatgaactattattcataatattattatttattaatatcaatcataacattattacataatttatttttgaaatttaaatctagagtttctgctgaggtccactgttatcatttgagacacttttttaaaatttgaaatgtatgatggagaccaattccccttgtttgcttcagaataatttttgcaacaaggcattctaaattcaagaactgccataatttctgtagttctacatagtgcattatagtttctttaacttagtttgtcattaaaagtatccaaaattctgctataaaagttacaagtggaattttcagcaatgtagtttcatagctttgctgacaattctttgattaaaattagaatataagctccatgagagctggaattttgtctgctgtatttgctgctccatcaccagcactaaaagaatgccagacacacagtaagacatcaatgaatattttttccaatagaaatatcataaactaaatgatattcttcacctgggcataaataaactactagatatcacaaaatattgataaactg

SEQ ID NO: 88616 - DNA, 975 bp, Homo sapiens
aaaaagtttaatggacttacagttccacatggctggggaggcctcacaatcacggtrgaaggtgaaaggcatgtcttacatggatggcagcaggccaaaagagagagagagcttgtgcgggggaactcctctttataaaatcttgtgagacttattcactattgcgagaacagcatgagaaagatccgcccctatgattcaattacctcccattgagtccttcccatgacatatgggaattgtaggagttacaattcaagatgagatttaagtgaggacgcagccaaaccatatcatatcccatatataccaatgttatgtatcaataaaaatatatatattaaatttgctaactgaatcaaagacttgatcccattaactttcaactctctcataacagcctaccatcagcatcccattgccatgaactattattcataatattattatttattaatatcaatcataacattattacataatttatttttgaaatttaaatctagagtttctgctgaggtccactgttatcatttgagacacttttttaaaatttgaaatgtatgatggagaccaattccccttgtttgcttcagaataatttttgcaacaaggcattctaaattcaagaactgccataatttctgtagttctacatagtgcattatagtttctttaacttagtttgtcattaaaagtatccaaaattctgctataaaagttacaagtggaattttcagcaatgtagtttcatagctttgctgacaattctttgattaaaattagaatataagctccatgagagctggaattttgtctgctgtatttgctgctccatcaccagcactaaaagaatgccagacacacagtaagacatcaatgaatattttttccaatagaaatatcataaactaaatgatattcttcacctgggcataaataaactactagatatcacaaaatattgataaactg

SEQ ID NO: 88617 - DNA, 1311 bp, Homo sapiens
tcatgcctgtaatcccagcactttgggaggtcaaggcaggtggatcacctgaggtcaggagtccaagagcagtctggacaacatggtgaaacccrtctctactaaaaatacaaaaattagctgggtgtggtggcaggtgcctgtaatctcagctacttaggaggctgaggcaggagaattgcttgaatccgggaggcagaggatgcagtgagcagagattgcaccattgaactccagcctgggtgacagagtgagactccatctaaaaaaaaaaaaacaaaaaacacacaattctcacgatgtagccaaccacattaacaataaaaacaagaatgatctctttaacccttatgccactgcataagggttttcttcactatgctatctatacctgatttattctttaaaaaacacaattcagaaatcattccctcttcactgtgtctgcttccaccctgacactaagtaggacaggttctctaactctttctaataactaaaaccattggttaaaaatccagataaatctccactacaggatgttttctatgaaattgcaattatccttttaattgtctattttctgccttaggcaaaagatttttattttttttctttaggacactcatttctaaattggagttcagtggtgtgatcatagctcactacagcctctacctcccaggagcaagggatcctcttgcctcagcctcctaagtagctgggatcacaagcacatgccaccacacctggctaattttattttttgtagaaacagagccttgctttattgcccagactggtcttgacttgaagaaagaagaaagtaagccaagcatggcagcacatgcctataatcccagcattttgggaggctgaggcaggaaaattgcttgaggccaggaattcaagaccagcctgggcaacaaagcgaggccctgttgctaaaaaaataaagtaatagcttggtgtagtggcatgtaccttatggtcccagctacttgggagcctgaggcaagaggattgcttgagcctgggagattgaggctgtgatcatgatcacaccactgcactccagcatgggtgacaaagcaagaccctgcctcacacacacacaaaaaaagtatggcaaaggtactttactccagaaaaatgagaaaaggggtgctcacaaaattaagtaattgttctacagaaagcgattcctccagtaaaaataacatcagccttcatttttctttaggatttgggttataggattggtaattcagcgtgaagttcacggatgcctgtaagtaaactggaatctga

SEQ ID NO: 88618 - DNA, 1629 bp, Homo sapiens
gtggatcacttgggtcacaagttcgagaccagcctggccaatatggtgaaacctcatctctactaaaaatacaaaaattagccagatgtagtggcagccacctgtaattccagctactggggtggctgaggcaggagaattgcttaaacccagaggcagaggttgcagtgagccaagatggcgccaatgagattgtgcctgggtgacagagcaagatcccatctcaaaaaaagaaaagaaaaaagaagaaaggcaggaaggaagagagagacagaaagaaagaaagaaagaaagaaagaaagaaagaaagaaagaaagaaagaaagagagagagagagagagagaaagaaagaaagaaagaaagaaagaaagaaagaaagaaagaaagaaagaaagaaagaaggaagaaagaaagatggaaagaaagaaaaccagaatagtctggtgacataggaatcaggaaaagaagagaagtttaagaatgaaggaatggatctattatgttaaattggaatacaaggttgtgtaataataaagaattctgtctgaaaccaagaatttctgagttgacatactgacagtcttaaaacatccctcaacttcttgaaatcttgcttatctcatctacaagatatgcataaaatagtattaaatatttttggtcgagttgtgaaacaatgagatactgcccaatgacaaattacaaaataagctatgatttaaagatcacgctatactaccttcatgaaatcaattggtaatattttctgtatgctaaggaatagttttaaaaactggaagaagagccagctgacttaaggtctttggggaaaaacaaactttaacaacttttatttcacttatttgcattttcartatttcagctgcatctttactcaaatgttttgcttcctagttgggtaataagtattgtgcttacacgtcggagaggatgcaagaacgagtaaattcaattttaaacaataactagtaggaatttataaacaaaaaatactaaaaccataagaaatattagctccattaagggaaccacctcatacaaatctggctcttaaagtctaaaaacacagcagttaaaaccctatatttcacaaaaagttcatcaatttctccctcttccctagctagtctgaaaatgggtttgatttctaggaagagaatgtttaagcaatgctacaaaagttctgagttattttaatttttgttgaagcaaatctaggtagaaatcctgaatttagagatactattcataggttgacaaacaccctagccaaggcaacatactgaattagttacaaggtaggtgaaataaatttgatgacaagaaaatttaaacgtgctggaaacattgacaattcatgaactatagctactgataactccacttaggataccctaaccagatgtaatcgaagagctgagataaccatcaatatccagcctttaaactcaggtttaaaaggagaacgaacagcatccagatgagttcctgccatactacttctgtgaaaatcaaagatccaaatagaggttttcatgttaaatacaatgcactcatcagagatctggcaggaaggagactactgcagtctctcctacatctgggca

SEQ ID NO: 88619 - DNA, 1629 bp, Homo sapiens
gtggatcacttgggtcacaagttcgagaccagcctggccaatatggtgaaacctcatctctactaaaaatacaaaaattagccagatgtagtggcagccacctgtaattccagctactggggtggctgaggcaggagaattgcttaaacccagaggcagaggttgcagtgagccaagatggcgccaatgagattgtgcctgggtgacagagcaagatcccatctcaaaaaaagaaaagaaaaaagaagaaaggcaggaaggaagagagagacagaaagaaagaaagaaagaaagaaagaaagaaagaaagaaagaaagaaagaaagagagagagagagagagagaaagaaagaaagaaagaaagaaagaaagaaagaaagaaagaaagaaagaaagaaagaaggaagaaagaaagatggaaagaaagaaaaccagaatagtctggtgacataggaatcaggaaaagaagagaagtttaagaatgaaggaatggatctattatgttaaattggaatacaaggttgtgtaataataaagaattctgtctgaaaccaagaatttctgagttgacatactgacagtcttaaaacatccctcaacttcttgaaatcttgcttatctcatctacaagatatgcataaaatagtattaaatatttttggtcgagttgtgaaacaatgagatactgcccaatgacaaattacaaaataagctatgatttaaagatcacgctatactaccttcatgaaatcaattggtaatattttctgtatgctaaggaatagttttaaaaactggaagaagagccagctgacttaaggtctttggggaaaaacaaactttaacaacttttatttcacttatttgcattttcagtatttcagctgcatctttactcaaatgttttgcttcctagttgggtaataagtattgtgcttacacgtcggagaggatgcaagaacgagtaaattcaattttaaacaayaactagtaggaatttataaacaaaaaatactaaaaccataagaaatattagctccattaagggaaccacctcatacaaatctggctcttaaagtctaaaaacacagcagttaaaaccctatatttcacaaaaagttcatcaatttctccctcttccctagctagtctgaaaatgggtttgatttctaggaagagaatgtttaagcaatgctacaaaagttctgagttattttaatttttgttgaagcaaatctaggtagaaatcctgaatttagagatactattcataggttgacaaacaccctagccaaggcaacatactgaattagttacaaggtaggtgaaataaatttgatgacaagaaaatttaaacgtgctggaaacattgacaattcatgaactatagctactgataactccacttaggataccctaaccagatgtaatcgaagagctgagataaccatcaatatccagcctttaaactcaggtttaaaaggagaacgaacagcatccagatgagttcctgccatactacttctgtgaaaatcaaagatccaaatagaggttttcatgttaaatacaatgcactcatcagagatctggcaggaaggagactactgcagtctctcctacatctgggca

SEQ ID NO: 88620 - DNA, 1629 bp, Homo sapiens
gtggatcacttgggtcacaagttcgagaccagcctggccaatatggtgaaacctcatctctactaaaaatacaaaaattagccagatgtagtggcagccacctgtaattccagctactggggtggctgaggcaggagaattgcttaaacccagaggcagaggttgcagtgagccaagatggcgccaatgagattgtgcctgggtgacagagcaagatcccatctcaaaaaaagaaaagaaaaaagaagaaaggcaggaaggaagagagagacagaaagaaagaaagaaagaaagaaagaaagaaagaaagaaagaaagaaagaaagagagagagagagagagagaaagaaagaaagaaagaaagaaagaaagaaagaaagaaagaaagaaagaaagaaagaaggaagaaagaaagatggaaagaaagaaaaccagaatagtctggtgacataggaatcaggaaaagaagagaagtttaagaatgaaggaatggatctattatgttaaattggaatacaaggttgtgtaataataaagaattctgtctgaaaccaagaatttctgagttgacatactgacagtcttaaaacatccctcaacttcttgaaatcttgcttatctcatctacaagatatgcataaaatagtattaaatatttttggtcgagttgtgaaacaatgagatactgcccaatgacaaattacaaaataagctatgatttaaagatcacgctatactaccttcatgaaatcaattggtaatattttctgtatgctaaggaatagttttaaaaactggaagaagagccagctgacttaaggtctttggggaaaaacaaactttaacaacttttatttcacttatttgcattttcagtatttcagctgcatctttactcaaatgttttgcttcctagttgggtaataagtattgtgcttacacgtcggagaggatgcaagaacgagtaaattcaattttaaacaataactagtaggaatttataaacaaaaaatactaaaaccataagaaatattagctccattaagggaaccacctcatacaaatctggctcttaaagtctaaaaacacagcagttaaaaccctatatttcacaaaaagttcatcaatttctccctcttccctagctagtctgaaaatgggtttgatttctaggaagagaatgtttaagcaatgctacaaaagttctgagttattttaatttttgttgaagcaaatctaggtagaaatcctgaatttagagatactattcataggttgacaaacaccctagccaaggcaacatactgaattagttacaargtaggtgaaataaatttgatgacaagaaaatttaaacgtgctggaaacattgacaattcatgaactatagctactgataactccacttaggataccctaaccagatgtaatcgaagagctgagataaccatcaatatccagcctttaaactcaggtttaaaaggagaacgaacagcatccagatgagttcctgccatactacttctgtgaaaatcaaagatccaaatagaggttttcatgttaaatacaatgcactcatcagagatctggcaggaaggagactactgcagtctctcctacatctgggca

SEQ ID NO: 88621 - DNA, 1629 bp, Homo sapiens
gtggatcacttgggtcacaagttcgagaccagcctggccaatatggtgaaacctcatctctactaaaaatacaaaaattagccagatgtagtggcagccacctgtaattccagctactggggtggctgaggcaggagaattgcttaaacccagaggcagaggttgcagtgagccaagatggcgccaatgagattgtgcctgggtgacagagcaagatcccatctcaaaaaaagaaaagaaaaaagaagaaaggcaggaaggaagagagagacagaaagaaagaaagaaagaaagaaagaaagaaagaaagaaagaaagaaagaaagagagagagagagagagagaaagaaagaaagaaagaaagaaagaaagaaagaaagaaagaaagaaagaaagaaagaaggaagaaagaaagatggaaagaaagaaaaccagaatagtctggtgacataggaatcaggaaaagaagagaagtttaagaatgaaggaatggatctattatgttaaattggaatacaaggttgtgtaataataaagaattctgtctgaaaccaagaatttctgagttgacatactgacagtcttaaaacatccctcaacttcttgaaatcttgcttatctcatctacaagatatgcataaaatagtattaaatatttttggtcgagttgtgaaacaatgagatactgcccaatgacaaattacaaaataagctatgatttaaagatcacgctatactaccttcatgaaatcaattggtaatattttctgtatgctaaggaatagttttaaaaactggaagaagagccagctgacttaaggtctttggggaaaaacaaactttaacaacttttatttcacttatttgcattttcagtatttcagctgcatctttactcaaatgttttgcttcctagttgggtaataagtattgtgcttacacgtcggagaggatgcaagaacgagtaaattcaattttaaacaataactagtaggaatttataaacaaaaaatactaaaaccataagaaatattagctccattaagggaaccacctcatacaaatctggctcttaaagtctaaaaacacagcagttaaaaccctatatttcacaaaaagttcatcaatttctccctcttccctagctagtctgaaaatgggtttgatttctaggaagagaatgtttaagcaatgctacaaaagttctgagttattttaatttttgttgaagcaaatctaggtagaaatcctgaatttagagatactattcataggttgacaaacaccctagccaaggcaacatactgaattagttacaaggtaggtgaaataaatttgatgacaagaaaatttaaacgtgctggaaacattgacaattcatgaactatagctactgataactccacttaggataccctaaccagatgtaatcgaagagctgagataaccatcaatatccagcctttaaactcaggwttaaaaggagaacgaacagcatccagatgagttcctgccatactacttctgtgaaaatcaaagatccaaatagaggttttcatgttaaatacaatgcactcatcagagatctggcaggaaggagactactgcagtctctcctacatctgggca

SEQ ID NO: 88622 - DNA, 550 bp, Homo sapiens
tgtcctctaggttcatccatgttgttgcaaatgacagaatttcctgatttttaaaggccgaataggattccattgtgtatacaaatcacatttgcaaaatctgttcatccattgttgcatacttaggctgaggaaacccattttctatggggcaagtatttgttcttgcctctgaaacctgcctttgtggatccagatacaaatatcagacaaaacgtacttcagttttggtagttgctaacagtggtttaagaatattcctggatattggccaggcrcggtggctcacgcctgtaatcccagcactttgggaggccgaagtgggcggatcacaaggtcaggagatcgagaacatcctggctaacacggtgaaaccctgtgtccactaaaaatacaaaaataaaattagccgggcgtggtggcgggcgcttgtagtcccagctactcgggaggctgaggcaggagaatggcgtgaagccgggaggcggagcttgcagtgagccgagatcacgccactgcactccagcctgggcgacagagggagactcct

SEQ ID NO: 88623 - DNA, 1210 bp, Homo sapiens
tagatgaaaagggcatctaatttcctatgtactaccatggaatacatcaatctaagaaacaaattattttctctggtagagaaacacatatacacatgtgtgttaaatactcacttatttactaaaaacaataaacatttaaggaggaattacagtgtgtcaggttctatattaggtgttggatatgcagaaaggagtaagacaattttgcctttaaaaacctgtagcatatattatatgtctgtattgggttatttgcactggataagtcagaaaaataatggctttagattccaaattttagctccccctacttctttttagtttataacacagatagagctggtcttcagcatctttcccttgcataccaccatgtgattctgtttgtgccccctcagtgacattccatctcccatgccagtttccactgctttcatgctttctccaacctcaaaatgaactcttaggaagagctaattagtctaccctggttataaggaatttctaataagaactttctgtattaactctcccgtggttatttgccttgaggcaaagccagcaaaactgtatgctcatraaagaaagataattttcagataccttcaggtatattatttacttgtgagtaagccacagctaccaaataatttccatctgaatttgcagctaagtctgaagtttaacactttctacgttttctattccaccaaatgtcctgctttcaggccaaaatctgcattgtgggtgtggaagggaggagaggggatcccccccacagtatttcaggtctacatactaggcatggggatactacagtttgtacatttattatcaaaagtaatattctgatgtgcctttatcagttgtgcagatgacccccaacttacgatggttcggctttggttttttgacttcacaatggtgtgaaggcaataatccttcagtataaactgatttttgaattttggtttttgatcttttctttggatagcaatatgtggtatgacactatctcaaaatactgggcagtggtagtgagcacattgcccagtcagccctgtgaacacgaggtgacacacctgatactctacagtgtactgtgctgccagatgattttgcccaactgtaggctaatgtaagtgtttgagcatgcttaagggaggctaggctaagcagtgatgatcagtaggttgggtatattaaa

SEQ ID NO: 88624 - DNA, 1534 bp, Homo sapiens
atcaagtatctcagtttctggttagagcaatattattttcactctttcattaatttctggtttattttattttaggtgctagagatgacactgcagagtagagaacaaaggaatcttagtaattgttcaatccaatctccacactttaaagatgaagaaactggtattgagaaaaatacacagcttatccaaggttgcactgctggttggtagctgagatgaatttagaacccacatctgatgactacaccatattgctcccagttttcctgtctgttccacatgtaaaagtctgactcttcacttctcctttgagtatatagacttttaacatttttgtatgtcaagatggacttttcctcatacccagcccctgccttttctcctcccttcataccttgcaggatctttaacagaatttaaaaggagttttttgttttgttttgatgtatctaataaaagtcaagggagggagagggccagtataagcaagagtacagtttcctagtttgtagatgcggtagtctgaggaatcagaaacacacaaasgtttggagaactggtacatgctcccaggtgggaagccaggactcttggtaggatcttgaggacaaggcaaaggacaataagagagcgaggggatcctagaggtggaatcaaggaagagaaactagagagagaaaaaggaactggctatccatccatgatggatcctgtgtggactgatgggtggcttggcatcatcctttagtagacttcatgtggttgaataattggccaatggaaggaatttcttttttggtaacagactctgtgtgtacagttatgggtcttaatttataataaaaggttacattgaaaattgagcatattggcaactttgggctttaatattactactgtgctatttaggtcccaaccatcctagctaatctgggcattcttgaaacagctctcattattggtatgtcaaaccgtctcatagggcatgtacttaacaaaagtggagtgaagggttcaggatgcataaatggggtgaagctcgtggtattccattcctttttactgaagccactcctaccagctgccttctagattgttcaccttatatgagcatggtgcagtatagaagttgtagactttggcctcagacagatctaaattctaatctcagatcactacttcctggttgaggacaagatttctttaaccaccccaagtcccaattttctcatgtctaaaatggcagaaataatgtgtactttgcagggttgttgtgagagttaagtaatatgggtaatgcacttgggacagtgcttcacacaaaattgtcagtaaatggtgatctttcttttcctggcactacaaagctgaggagaggagggagggagggagatgaatgtctggaggaagaaagggcaggagtttcttcatctttgagtgaaggagcattgagggttagcagggatataggaatagtgagttggctgggaagaaaaaaaggattaaaagaggaaaagaataggaaaaaaga

SEQ ID NO: 88625 - DNA, 801 bp, Homo sapiens
atcccaatcaaagtagaaccactcttcatataaatctcatcccaaacccacaaatgacaaaatcatcccagtcaattcccccaagcccatatgaccttactgctccagtactcatcactgatgtactacaatttctttcttttttctttttctttttttgagatgtagtcttgctctgtcgcccaggctggagtgcagtggygcgatctcagctcactgcaacctccacctcctgggttcaagcgattctcctacctcagctgcctgagtagctgggattacaggcaggcgccatcatgcctggctaatttttgtatttttagtagagacagggtttcaccatgttggtcaggctggtctggaacttctcacctcgtgatccgcccgcatcggcttcccaaagggctgggtttacaggcatgagccaccacacctggctgatatactataatttctgcatctcttagtttaacctctgtccttcctttatcttcttgcctgcaaaacagatgccattctgttgtctccacatcagcttcctttttagcacttcaagttcaaagtgcatatcaccaaagcaatagagggacaaggacattgggaagggtacttatacagaaccacctttggatagggtgcttaaccgctcagtgccgcagtttcctcatctgtaaaataggaataacattattcccagccacagtgcctgatccatgatgctcagcattggccattgtcattattaattttagggataggtaaatgtatgaaactgaccaaaagcaggcatagaactgcata

SEQ ID NO: 88626 - DNA, 801 bp, Homo sapiens
atcccaatcaaagtagaaccactcttcatataaatctcatcccaaacccacaaatgacaaaatcatcccagtcaattcccccaagcccatatgaccttactgctccagtactcatcactgatgtactacaatttctttcttttttctttttctttttttgagatgtagtcttgctctgtcgcccaggctggagtgcagtggcgcgatctcagctcactgcaacctccacctcctgggttcaagcgattctcctacctcagctgcctgagtagctgggattacaggcaggcgccatcatgcctggctaatttttgtatttttagtagagacagggtttcaccatgttggtcaggctggtctggaacttctcacctcgtgatccgcccgcatcggcttcccaaagggctgggtttacaggcatgagccaccacacctggctgatatactataatttctgcatctcttagtttaacctctgtccttcctttatcttcttgcctgcaaaacagatgccattctgttgtctccacatcagcttyctttttagcacttcaagttcaaagtgcatatcaccaaagcaatagagggacaaggacattgggaagggtacttatacagaaccacctttggatagggtgcttaaccgctcagtgccgcagtttcctcatctgtaaaataggaataacattattcccagccacagtgcctgatccatgatgctcagcattggccattgtcattattaattttagggataggtaaatgtatgaaactgaccaaaagcaggcatagaactgcata

SEQ ID NO: 88627 - DNA, 741 bp, Homo sapiens
tcctaataaccatttcaaactcatctctcctcaaaccccaaaagcctctccacaattctgttttagctaagaacagtaattcctattttactgagaaaatgaatcacaagagaacttccacagattctcactgccatatctctacctaccaacatccatacccatatattccgccttcctgtctgttactatactcttactttatctaaacccaggcccctcaaccagtgcaccaaagatggcattcagtaaatatttgttgaattgaatcaagtctgtttccaacccacttggcaaattcttgaaaagcctagattgacttgacatccagaaggcctctaagtataactgtctggggaagagctatttattgtcatttaagcagtcaacaaatatctaataagcattactatttaagaggtattttgcttgtcactacgaattcaaagtccataaggaaactgcaggagttctatgttcaaagtaaagtaagagaaagaaatctagtacttgtatattaaaaaaacaaacaaaatttatgattactattattttaacagatggggtcctgctttatctctcaggctattcacaggcataataaaacagtgcactgcagccttgaattcctggcctcaaaatgtcctcccrcctgagtctcctgagtagctgggactatatgtgtgtgccactgtacccagttccaaatttttaaaaaacaggttacccagctcataactt

SEQ ID NO: 88628 - DNA, 565 bp, Homo sapiens
tcgctcacgctgggagctgtagactggagctgttcctattcgtccatcttggctcctccccctcgtattttatcattttaaagaattctattttaaatatatttagttaaactccatttgtcttttaaatttatgtttttacctgtagtaattactttcatcttcttacctcaagtatatttttaatctgcctttttatgacttcctcaattacatgtttagttcatttactttcacatttttcatttaataatacaaaggaagtcaagatrtgattttgccaacaagtacaactttgaccagatgcctagactccccgtctccctcatttcttagacaatatgtcttctcaaatgtaattgagagtgcgttttttccctcattctcatgggttaagtctattaagtaaagatttttcattgttcttcatagaataaaatctacatattctcctgatttgaaatggactttgtcacagattttataggttatgcttcaaagatttaaatgtaaatcatagcgatgaggagaatgtcataatgtctagagactttattatgataga

SEQ ID NO: 88629 - DNA, 526 bp, Homo sapiens
aatgtggaataacacttgaaaattaaaatattggtttccaatttcagcttttcacacagaatcgtgattttattgtttattagctaatgtattcagaatgactcaacagtagtccacctttatctgggctttgctgtctgtagtttcacttacccatggtcaactactgtctgaaaatattaagtagaaattaattaaatggaaatttcctgaaataaacaaytcataagttgcacaccattctgagtattgtgacaaaatcacatgctgtctactttgtagagtcactatttgtccagtgacttcatgctgtctacaccacctgccctttgtcacttactagcccttttggttaccagaatgactgttcagatagcccaatacttgtggtcaagtaactcttattttacttaatagtggccccaaagtataatagtagtgatgctggcagctcagctatgccaaaaaagaagctataatgtacttcctttaagttgaaaggtgaaagttcttgacttaataagca

SEQ ID NO: 88630 - DNA, 529 bp, Homo sapiens
gagacgttatcagaaacctatcttctaccttagggataattgttttagggctcagcaaagttcccttgttagtccaggtagtcctagacaattgggacatgctagatttcctgttgggtaaacaggagggagtctgtgcagtgttaacaccacttgcttcacctatttawacacctcaggaaaagttaaaacctgagtagaaaaaatctcccaacaagtgacatggttatctccactaatagccccatgcctgattgttttttggggttattaacctggattcctcaagctttagatcattttttacagggatttctgaaactcagattttcactcctttcattagggcttattatttaccttatagtctgctattctcttaggtgttatgctaaaactgtggatgaaagtagtaatgtcttgttatgcaaaccttgggaactcaaccagatacctgtgagtacatgcagacaactgatgtttcagtcctcatatgggtacaatcgcaacctcaactgtgctgtcagca

SEQ ID NO: 88631 - DNA, 934 bp, Homo sapiens
tttgtggcttctggtacgtaagatgatacttatactacctatgatacatgtgataaatgatatttatttccaatcaatcagcaaaggcttcaaggaaaagataaggtttgaaattcttaaaggagtaaaacatagatctttactaatctataagcaattaaaatgattgccaattataattctggcactaagtatatgagtttgccctaactattaatctatctgattagcctcctgagtagtaagggaggcatacctgcatatactgagacaattcagtaacatcttttcctggcacatctacttcagtaagagcctgagtttttgtttctaaaaatgtctggagcttttctgagaggttctcaaacagttctactttggtttttagctcctccattttggcaagagtttctttgtgtttatgacttgcttctgaaaaccgagcagacaagtctttcattttggcttgcagtgaggatgcagtggatggatctgttgtttccataaatttcttcactttttcattcatggcatttatactgctctgacgacctgcaatatcctgttccaacatctaaaataaaccaaatattgcatatcttttattatgatgcttataaataatgtgacagaatttttttaaatgactattcctaacaacataagcttgcacaacctgtgcctaggaaggttaacagttgaaactgaatgacaagtttggtctgtcccttgaggaatgccatcttaaatctctctgagagagtgaagarcagctggctagttggtcgaaagaggcaggaggctgctgctactcagcaacccctagaatctaatggagcctggggattagccatggtcctaattcttaaaagactagacaagactgatctgattaacctcatgtgcagctggctgaaacaatgataaacaagat

SEQ ID NO: 88632 - DNA, 728 bp, Homo sapiens
tgcatgtacacaagagcatgagataccactgccacaggaataaaatattccacatattaatgaagttaaggaaagtaatcaaagatgaaccagacttatttcctaaagtaatattttttaaagaaaatttaccctgttcatattgttactcaaattgacagaattctgagttaatatagtataaagctatcatttacttctgattaaaatatatctgaaggccaagacaaaaacgtaaacacagtaatatcaaaaactaacatggtagtcaagcattaaccagaatctgagaaaatttttttttwaaaataacatcagtgaaattcaaacaagaaatataagctatcgaatgtatggccttcaatgtgtgaaacagaaggatttgacatgcagaccaatgaaaactagaaatcctgtttcttaaaaggctaaatgtaaatttgccatatgacccagccattccaatcttaggtacatactcaagagaaataaaaacatatatccaccaaggactttcacagtaatattcctagcagcattgttcataataaccaaaagttggaaacaacccaaaattccacctactggtgagtgaatagataaaatatgatatttgcccaatggaatattatttggcaatttacaaaaggaatgaactatggatacatgatatgacacagatgaatgaatagataaaatatgatatttgcccaatggggtattatttg

SEQ ID NO: 88633 - DNA, 1138 bp, Homo sapiens
tgagacggagtctcgctctgtcgcccaagctggagtgcaatgccgcgatgtcggctcactgcaacctccgccgcctggattcaagcctcagcctttcctgcctcagcctcccgagtagctgagattacaggcacccgccaccacgcccggctaattttttgtatttttagtagagacggcctttcaccttgttagccaggatggtctcgatctcctgacctcgtgatccgcccgcctcggcttcccaaactgctgggattacaggcgtgagccaccgcgcccggacactttaaatctgttacaaaaaccgtgcaatactttggtccggggttggagcggccgagggtcggtacagccttttaggagcgcagccccggggtcggcggcaccgcgtcagaggagagcggaatggccagcccgctgcggaatcccgcggacttgctggtcaggctggggggccggggtccaccgggtcagaccctggagggtgggaccgcccggactcgggaggtggttgacggggtgggccccgtcgggtccgagtccgccccagccgtgggatcagctcggacgacggttcgccccccagaaccccgctgcagcgtggggaagtccggcccccgcaggctcggggctgcgtccccaccagaaggcgcttggagtgaggctggcggtcccgcggtcccgggccggtcgccgagcgctcccagcggggacaggcccctccaccgctcccttcgccgcagccccctccccgccccgagggtggctgggcccggaggaggggcgccccgccccgtccgtgcatccggctccgccccttgctggaaaggctacgtattcagccctggaggtgccatcccgggccgcgactccgctccaggcaggacccccaacccgcccagcccgctccgccttgcgccccggacccgcggccgaccccagacccgctgcccgcttcgcgcccgaggcctgcgccccgacggacgcccgtgcccmgcttgccacgcccacgcccggcgccccgaccgcggaggactccccgaggtgccggcggagggggtggctcgcggctcaggctgcccccgacgtgcccggctcaccgccccctcccctgcagccccgcccgccatggccc

SEQ ID NO: 88634 - DNA, 1046 bp, Homo sapiens
agcagcctgggtgacagagtgataccctgtctcaaaaaaaaaaaaaaaaaactgtacacattttgttaaaaatctgtacatattttgtgcattttttctttkgtttttctgtgagacagtcttgctctgtcactcaggctggagtgtacccaggcaggagtaagtgcagtggcacaatgtacagattattattattattattttgagacagggtgtccctctgtcacccagcctggatgcagtggcatgatcatggcccattgcagcctcaacaccccagcctcaagtaagtctccacacttcatggctcactgcagcccaggctaattaccattattattattattattattattatttaattttttgtagagatggggtcttgctatgttgcccaggctcgtcttgaacaggggatccttacaccttgacctcccaaagtgctaggattacaggcatgagccactgtaccctgccaccttctgtatttaagtaagtctgggggaaattttttggtgagacactgggttgtcttatgcttgttggagacaactctttaagggcctcaattgctaatgtctcatcatgggaatttaagaactgctaagaaacatcttcatcagccccacgaaaccagatggccacacagactctaacatggcaaatctgaggcttcctggggtcataactgggatagtgagttacagattcagaccatgactgggtgttgtggcttacaactgtaatcctaatgatttgggaggcctagatgggagaatcccttgaggcggggagttcaagaccagcctgggtaacatagtgagaccctgtctctacaaaaaattaaaaaattagccagccatggtgacatgtgcctgtagtcccagctactctggaggctgaggtgggagaattattgcctgagcccaggaggtcaaggctgcagtgagccaaggtcacaccactgtgccccagcctgggcaacatagccagaccatgtctcttaaaaaaaaaaaaaaaaaaggccggcgcagtgcctcagcctg

SEQ ID NO: 88635 - DNA, 836 bp, Homo sapiens
tgatgcaatacaccttaattttaaatattcttaaaataatttgcttcaatgatacatccttaagtgccttgtctacctactattattacacaacacctcatgtccttgttttcagtttcctgttaggaacacacacatttattaccacaatatctgtctattatctgatgggaaaaggtataataatgggtcattggaacatgaggagaacatttgygtgatggttgatattaagccaaaggtgttttatattctttcagaggatatagtccagatgccataacattattagcagaagctggaaatgtgctttgaaggatatattcctgacatttctgtggaaacaacaagactgtgaatggaaagccttcaggcatgaatgggcttaataagtcacggattctgggtcagtgtttgaaaggctagatttgtatagttaaaagtatgctaaaggacatataagtccccatggaaattaagtggccgataaactcactattatttgtatttctaaatatttctcctcatgacatgtttttttctggaattcagagtgacttttgcttgcaagtcttgttacatttaatgcttttttcttgttcactcattgtgagtctgaaagttccagctgatctgttccatctgtgacactctgctgagtctggtctgtctgctgtacaataattgagattgtttacttgcaccttttacaagttgtgaactctagtaagtgcctagtaaataccaaaacatccttatgaagtaagtagtattgtttgcatccctagttgaggaatttgaggtagaggcataagttggcacattagtaaacattt

SEQ ID NO: 88636 - DNA, 836 bp, Homo sapiens
tgatgcaatacaccttaattttaaatattcttaaaataatttgcttcaatgatacatccttaagtgccttgtctacctactattattacacaacacctcatgtccttgttttcagtttcctgttaggaacacacacatttattaccacaatatctgtctattatctgatgggaaaaggtataataatgggtcattggaacatgaggagaacatttgtgtgatggttgatattaagccaaaggtgttttatattctttcagaggatatagtccagatgccataacattattagcagaagctggaaatgtgctttgaaggatatattcctgacatttctgtggaaacaacaagactgtgaatggaaagccttcaggcatgaatgggcttaataagtcacggattctgggtcagtgtttgaaaggctagatttgtatagttaaargtatgctaaaggacatataagtccccatggaaattaagtggccgataaactcactattatttgtatttctaaatatttctcctcatgacatgtttttttctggaattcagagtgacttttgcttgcaagtcttgttacatttaatgcttttttcttgttcactcattgtgagtctgaaagttccagctgatctgttccatctgtgacactctgctgagtctggtctgtctgctgtacaataattgagattgtttacttgcaccttttacaagttgtgaactctagtaagtgcctagtaaataccaaaacatccttatgaagtaagtagtattgtttgcatccctagttgaggaatttgaggtagaggcataagttggcacattagtaaacattt

SEQ ID NO: 88637 - DNA, 836 bp, Homo sapiens
tgatgcaatacaccttaattttaaatattcttaaaataatttgcttcaatgatacatccttaagtgccttgtctacctactattattacacaacacctcatgtccttgttttcagtttcctgttaggaacacacacatttattaccacaatatctgtctattatctgatgggaaaaggtataataatgggtcattggaacatgaggagaacatttgtgtgatggttgatattaagccaaaggtgttttatattctttcagaggatatagtccagatgccataacattattagcagaagctggaaatgtgctttgaaggatatattcctgacatttctgtggaaacaacaagactgtgaatggaaagccttcaggcatgaatgggcttaataagtcacggattctgggtcagtgtttgaaaggctagatttgtatagttaaaagtatgctaaaggacatrtaagtccccatggaaattaagtggccgataaactcactattatttgtatttctaaatatttctcctcatgacatgtttttttctggaattcagagtgacttttgcttgcaagtcttgttacatttaatgcttttttcttgttcactcattgtgagtctgaaagttccagctgatctgttccatctgtgacactctgctgagtctggtctgtctgctgtacaataattgagattgtttacttgcaccttttacaagttgtgaactctagtaagtgcctagtaaataccaaaacatccttatgaagtaagtagtattgtttgcatccctagttgaggaatttgaggtagaggcataagttggcacattagtaaacattt

SEQ ID NO: 88638 - DNA, 836 bp, Homo sapiens
tgatgcaatacaccttaattttaaatattcttaaaataatttgcttcaatgatacatccttaagtgccttgtctacctactattattacacaacacctcatgtccttgttttcagtttcctgttaggaacacacacatttattaccacaatatctgtctattatctgatgggaaaaggtataataatgggtcattggaacatgaggagaacatttgtgtgatggttgatattaagccaaaggtgttttatattctttcagaggatatagtccagatgccataacattattagcagaagctggaaatgtgctttgaaggatatattcctgacatttctgtggaaacaacaagactgtgaatggaaagccttcaggcatgaatgggcttaataagtcacggattctgggtcagtgtttgaaaggctagatttgtatagttaaaagtatgctaaaggacatataagtccccatggaaattaagtggccgataaactcactattatttgtatttctaaatatttctcctcatgacatgtttttttctggaattcagagtgacttttgcttgcaagtcttgttacattyaatgcttttttcttgttcactcattgtgagtctgaaagttccagctgatctgttccatctgtgacactctgctgagtctggtctgtctgctgtacaataattgagattgtttacttgcaccttttacaagttgtgaactctagtaagtgcctagtaaataccaaaacatccttatgaagtaagtagtattgtttgcatccctagttgaggaatttgaggtagaggcataagttggcacattagtaaacattt

SEQ ID NO: 88639 - DNA, 836 bp, Homo sapiens
tgatgcaatacaccttaattttaaatattcttaaaataatttgcttcaatgatacatccttaagtgccttgtctacctactattattacacaacacctcatgtccttgttttcagtttcctgttaggaacacacacatttattaccacaatatctgtctattatctgatgggaaaaggtataataatgggtcattggaacatgaggagaacatttgtgtgatggttgatattaagccaaaggtgttttatattctttcagaggatatagtccagatgccataacattattagcagaagctggaaatgtgctttgaaggatatattcctgacatttctgtggaaacaacaagactgtgaatggaaagccttcaggcatgaatgggcttaataagtcacggattctgggtcagtgtttgaaaggctagatttgtatagttaaaagtatgctaaaggacatataagtccccatggaaattaagtggccgataaactcactattatttgtatttctaaatatttctcctcatgacatgtttttttctggaattcagagtgacttttgcttgcaagtcttgttacatttaatgcttttttcttgttcactcattgtgagtctgaaagttccagctgatctgttccatctgtgacactctgctgagtctggtctgtctgctgtacaataattgagattgtttacttgcaccttttacaagttgtgaactctagtaagtgcctagtaaatacyaaaacatccttatgaagtaagtagtattgtttgcatccctagttgaggaatttgaggtagaggcataagttggcacattagtaaacattt

SEQ ID NO: 88640 - DNA, 299 bp, Homo sapiens
atttgaaagaaaagatgatgcttctcttttacatgatggctctcaatgaaaatgctgtcctctcattstgctcctagtcttgcttctatttccaggaacgatgcccctctctggacactctgcgttcataaattgggtttggcttatttaggattagtggccctcttctggctaagtttatgatattctgctctctttctgtgggagacagagtcaggctcattatgttgaaataatgtttgctgcttaaaagttttcacatagaaccttgagctcttcagggaaaagatactatataa

SEQ ID NO: 88641 - DNA, 939 bp, Homo sapiens
tgcatcacagagtcaacaatggtgaaagcctttatgtgtgtagcaaatgtggaaaatccttcagacaaagctccaccttcagtcaacactggagaaatcatactggcacaaggtgttaacaagtgcagagaatatgggaaatcttttacccaaagaaatctccttgctgaaaaccacaaagttcacacaggagcacaacctcatgagtgctgtgaatgtggcacatctcaccatagttctaacctcagcgaacattggacagttcacacttgagaaaagccctttgaatgcagtgaatgtaggaaatcctgtagagaaggtactggtctctttcaactaycagaatgttcacacaggtgttaagcctgttgagggaggggaatgtgagaaatcatttagaggaaaatatgacctcatgagtcactagagagagaaagaccttatgactgtggtgaatgtgggaaatcttttacctgtgcctctaccttccattgccatcagagagccctcactggagacaggccttacgagtgtagtgaaagcagaaagtcttctatcactagatcaacactaagttgacatgagaaagtacatcctggagaaagcctttatgagtgtagtgaatgcgcgaaatccattacccaaaggaatcacttcagtacacacctgccaaatcacataacagaaaggccttagatgtgtaggatatgtgcactttcctgttcagtgcggcaaccctggaggaaagtctccatgaggaggcttcagcctgaattgaatctcatacatccaaatgttcacagtggggagataccctatacgtttcagttatgtgagtagcaatgtgtagctatgttgtactttataacctaccccaaactattgccagagttatggccaagcccattttacctccaccatctggtagaaccacaaagt

SEQ ID NO: 88642 - DNA, 772 bp, Homo sapiens
ccgcctctcttaggtctcctctgaatcagcagcaaccctgggtgggaggggcagacttttgttattccaaattaaatgatgagaaagctgggcaaaagggaatgaatcgatttgcccaaggtcttaagtgctcctgcctagaaggcaggttttttaaagagagaagatgactttttaaaataattgatgtttttttaaaatgtaagaaaagtaaacaaatatatcaggtcataaataataagactcatttaagtccatcaatcttccccagattcatctaaaaatcaatacgatcatgattcaagatccaaagggctgattaagcccctaggcatatagttgtactccttatacctcatctcttcttataaatcggcatatgatgttcatcaatgttttttcctttttgaataactttttaattttactatgattctaaatttacagaagagttataagaatgatacaagtaactcccatatgcaatttatccaaatttccccagttattcacattttatatcatttactttatcattctgcctctctctgtatacatacatatatataatgtatcctataagtatatatacatatacatgatacataatttatacatatactttttttaagagaaagctatagatatcatgcccgtttatccctaagtatttcagtgtgtattttcttttttgtttttgagacagagtctcgctctgtcaccyagtggcatgatttcagctctttgcggcctctgatttcccaggctcaag

SEQ ID NO: 88643 - DNA, 621 bp, Homo sapiens
tggtggtactgggtaactttttttggggggggtgactttttaaaataaactttttttaattgacataygacatatacacctttatgtatatgaccaggtcatagtgcatagcttgaattacagcagagtgagaatgaccatgcagttaccatccaggtctagaaataaaatattgttggtgctgagctatattttcaatttcattatccatggaagaatattatttattactagcatgagacaaggatcagcatttattgtgtttccatttttcgttctccctggtgtagtacatgagaagtttgcccttcttttcgtaaaggagggtgattaggaaagagaagtcctaaaaggacagcttgcacctctgccatccatgagttctagaaagaatttcaagttgaggatgtagaaattgaacctctttttttttttttttttttagatggagttttgctcttgtcacagagcctggagtgcagtggcacaatctcggctcactgcaacctctgcctcccgggttcaagtgaatctcctgcctcagcctcccaagtagctgggattacaagcgcctgccaccacgcccagctaatttttgtatttttgatagagacaggcgga

SEQ ID NO: 88644 - DNA, 722 bp, Homo sapiens
tttaatttttgagacagggtctgtcgcttaggctagagtacagtggtgcaatctcggctcactgcaacgtccttgcaaattcaagtgattctcatgcctcagcctcccgcgtagctgggattacaggcgcctgccaccatgcccggctaatttttgtatttttaatagagaaggggtttctccatgttggccaggctggtctcaaactcctggcctcaagtaatccayctgccttgacttcccaaagtgctgggattacaggcatgagccactgcccctggcctccggagaacggcagggaggtgcttgagaaagccctgggcctggggctgcctctccagtcacttcttaggactgatttcagcatgggatacaggcttattcaagctgaaggggccccaagaatgaaggttccaggcaggaggcccctagagcagagcccatgtcttgcagctctccagcacccacacagttccatttcgtgaatgtccccactaccctcccaggtacttgcaagctgttcttaattctcctgggcctttcacccctacaacttggggtcaccctggatgctcgtcttgtctcccacccttgccccatccatgtctcagcttggatgtctcttctttcaagaggtcctccctgaacctctgggttctcagatctgcccccgccatcacacagcctgccttcctgctcttctccaaggcccctgagtagta

SEQ ID NO: 88645 - DNA, 960 bp, Homo sapiens
aaaaagaactgagtaaaattaacttttttttctaatttccaaaaatctttttacatggcataaaaaatgccttggaaatctatgttgtttgtcaagggtggaggcagtttttaaatgtttcaaaacagctgtttccatcttctttgttaataacaacaacaaaacaccataatcatggaggcttgatgaaacagaggcaaatcaggtgagagttatcatcactcttcgcttcctccacttaccctttcctattgtacatgcacacctgggtaaactgggggagttgctagagatgccaagcaaaggtcttagttgtaaataacatgcaaattgacccctctmatttttttactcgccactactcaatcacccgtgatggacttggaaattgacattgttatggaatcagttttatgaacatttaggtgaaagtaaggagatctggaaatgtaccctgcattttccagacttgctcaccattctttgtgtgataccggattatgtcgggaagatagtgtgtactataatggccatttttcatccacgttgaaaaaaatttacatgtgtggaaaatagtatcacataagaaaaacatttatgacagcaacaacaacaaaatattccataagccatgacataccaagagtagagcagtgggggtggtctactataggtgcaagcattaagggaagagagtgcatattgagaatttgaaaaaaataaagctaactaaaatcagttttcatttttagcatgttaacagttctacacaatgccactgataaaatcctgctccttccttcaaataatttggaaggggtggtagtgtaagttctaaataattggttatgcccagaatagcctgcttccactgtccactggtaaaccactattaaaagggttgcattgttaggttacactcttgcttttcaactttgaaactttgattgattgaggtta

SEQ ID NO: 88646 - DNA, 565 bp, Homo sapiens
catgtcattatttttagtattttcggggattgggaacaaatacatcctttcccacaaaataatataaaaattggtcaaattcttatctggccctggaaagcctatttaacatgcaataaaactaaatgtaatgytaaccccagcactttggggggccaaggcgggcggatcacttgaggccaggaatttgagaccaacctggccaacatggcaaaaccccatctctaccaaaaaatacaaaaattagccaggcgtgcctgtagtcccagctacttgggaggctgaggcacaagaatcgcttgaacctgggaggcagaggttgcagtgagccaagattgtaccattgcaccccagcctgggtgacagagtgagagactcttccaaaaacaactataaaaagaatattaaatataatgctaagagtcttattcttccattgattctacaaaaaatgggcccaacctttacctgagaagtcaggataccagaacacaccacttactactttagttccagcctccccatgataatttctactgtagtcgtccagacagagggattccta

SEQ ID NO: 88647 - DNA, 609 bp, Homo sapiens
ggaggacataattggtgtytggaaggagaaactcagaactacctttattataatttattataattattgtgccctatgggaagctttcttctgaaaaggttcagtgtgatgggcccaaaaacagactctggcaaagactgcttggttttaaaccccaactatgccacttacgaactgtgggacctttgtcaaaataattccactctctggacctcactttcctgatgtactgcatggagatgatgataatcatttatccctcccagtggatgagaggacttagtgagtcccttagaacagcgtctggcttgtataaagactcagtaaatgttccctgttctactgctgcactgtgagcctgcccccgagctgaaggcagcctgcagacctgcttgctttactccatctggcattgttagatttttttttaaaaaaattagttgccaacattctaaaatcgctagatttcatgaaaaaatctgattttttttccccttatgaaaatcagaagacctggcaaacctggggctagctatgtcttccgtagtggtaacatttagtcaaatctgcaaaccagaagatggaagttatctccagtttaccctgaac

SEQ ID NO: 88648 - DNA, 852 bp, Homo sapiens
agtgcccgctgtgggcagatgccatcctcccaggagaaggaaacttctatcaggtcaactttgttctgacactgcagctccttttcaagagcatgagagagcagttctgttgctcctggaactggtcatggcccagagtctcctttcgatccagccctcccaccagaacagtgtgctgctcacccagtctttgttctctacccagtaccctagtcagatggtagatgtcccagagatattccaaggtacatctcctgagaaggggatacactgaacttccctctatcccaagaaagcttggaagaaactgcctaggggtcttccccactgagggatttccctggctgggcacattctccactagccacaggaaagatctctggaccaaacactgcccacatggtctgaaagcagaagtgagtcatctccaagttgaccctatccccaatgagtagacttctgaagatccagaaccacaagatgtttttttctgtcaactaaaatcattttaattgtttttcttttacttttactgctattaagtaaatggcttaaatataaaccaggtagagctagaattctaaggtaaagttctacgactgtggatcatttaaacatgactcttatgagttagctgcttccattttattctatttttaggtagtgttattacagtagttttcttgttaataaatccacaatwtaatctgaaacagcaagaaatttgtcttttttctaataataaatttattttttttctcttttggttttattgctattatttatatgtttatataataccttaaatggagatttgatcagattatgacttttaagatagtattttataaa

SEQ ID NO: 88649 - DNA, 852 bp, Homo sapiens
agtgcccgctgtgggcagatgccatcctcccaggagaaggaaacttctatcaggtcaactttgttctgacactgcagctccttttcaagagcatgagagagcagttctgttgctcctggaactggtcatggcccagagtctcctttcgatccagccctcccaccagaacagtgtgctgctcacccagtctttgttctctacccagtaccctagtcagatggtagatgtcccagagatattccaaggtacatctcctgagaaggggatacactgaacttccctctatcccaagaaagcttggaagaaactgcctaggggtcttccccactgagggatttccctggctgggcacattctccactagccacaggaaagatctctggaccaaacactgcccacatggtctgaaagcagaagtgagtcatctccaagttgaccctatccccaatgagtagacttctgaagatccagaaccacaagatgtttttttctgtcaactaaaatcattttaattgtttttcttttacttttactgctattaagtaaatggcttaaatataaaccaggtagagctagaattctaaggtaaagttctacgactgtggatcatttaaacatgactcttatgagttagctgcttccattttattctatttttaggtagtgttattacagtagttttcttgttaataaatccacaatataatctgaaacagcaagaaatttgtcttttttctaataataaatttattttttttctcttttggttttattgctattatttatatgtttatataataccytaaatggagatttgatcagattatgacttttaagatagtattttataaa

SEQ ID NO: 88650 - DNA, 861 bp, Homo sapiens
ttttagaaaatawaaaggagatcatgagactctactgctcaaagccctccatgcccccaaatcacactgaggctcaaatctaaacattcaacgaaggtccaccaggctatggataacctggtctttgcttgtctctgtctggcccctccaatccggcttctgactttccttctggaccaataacatgtcacacttacactgcctcagagcctttgcactggctgtttcctctgtctagagtgctttccaccaattatgcatgtggctgcctcccttttctcattgacatcccagcttatattgaatgccctccatctctggcttcctctctggtccccagccttatttatggcttcagactctcatcctctcttaaatcatttaatttccatattattatagtttatatcatttagcccttcttatgacagtcctctaggatagaggttgttgattttagaaaaaaggcaaaattgttgctgtgtttctaaatcattttagtaaacttattaaggtaaatattagtaatattagtaaacttatagtttactagttatagtaacttatagttactaatatgctaatattactaatattagcatattagtaaacttattaaaataccactcattgtttgcactcccctctggaaggtaaggaacagagagtttatcttattcaccacagacactgcctttgtatcttgcacatgagagtcactcacttaagatttgggaaggaagggatacatagaagtgaatccagtgcaaagacctcctgagatctcagatctgtccacctgtcagggcctcccagagcaggttctgtacacctgtgggtgtcttcatgaaatctcacctt

SEQ ID NO: 88651 - DNA, 1451 bp, Homo sapiens
ctactgstaggcttggcatacattaagtcctcagtgaatacttgttgaatgagtgaagtaatcagtggaggcctgctactgataaatattacttcgaaaaatttttggacagctgttgccaatctttgaaccattgtcatttactttcatgtatcttcctcctttctttgttcatgttattcctctgttggtacagccttcctttggaagggtaaattttgcttgtccctcactacttggtttagacatcactttattttagaaaggtcccttttccaaatcttcttccacactaacctcgccaggtatcctttctctatatcccaatagtatcctgcacttgactgtataacacagatactatttgtgcaattagttttcttcctaatgagaccatatggttcttggaggaccatgactatgttatattaatcttccaactcccagcataaacaatgaaatctaggaatttggaaggactcaaaattgtttaacactgcataattgataggtccattttgttataatagccatctcccctctaccatgttttgcaagattctgtgtaacaaaacaagctatgctgattatgaaatagtaattttattcttcattttttatcaactaaaatatacgtaactatcagagtttttgataaggataggaaatcagaaattccaaaggatgtgataaaaatcttgcctgtgcagctttgtagtggggaatgcacaaattttgcaacatttttttctgaaacgttgactcaagggaatatgacttgatagatattaggttggtgcaaacacaattgtggtttttgccattaaaagtaatggcaaaagccacaactacatttgcaccaacctaatagagttgtaggctctagatttagagtttctttttcttttctttgtaatttttgttgcttgtattaggaaacaaaatatgcaaaagtagagaaaatactatacagacaccagcattttgccttttttttttttttcctgcagagttctctttattttcagaaatgaagtcattatggtttgtcttgtctttcacgtcttcccttccctgcctcagtctccagtatggctaggcatgacagtggtactaatcttgtctttggttaaattttgattttttgttcatcctggatctttttgtgccttaatattgatttgtgaaactttagtttctgattgatccatgttttctactcattagctgtttaaccattggattacttatactttaggcagcgttatcacccaaaaaaatctagccaagaaaagcaaactgtgaggtatttccaaggcatggtaatcatgacgttctcttaaagcatcaggcctgaatccatggcctggctgcatatgttaaagtgctgaggtatgttttctgtctgttcccacatctcaagagagaactcccagccacagacagtgcct

SEQ ID NO: 88652 - DNA, 1818 bp, Homo sapiens
tggaacaccagcactgggcctcccttctccaggcagcacccagcacaatattccagcctgggggacaggactgatagatgctgtcccctcatgttctggcagatgcccaggcatgacttcaaagctggaaacaacatgggaatcccaccatcagagctcacagcctstccattctgcaggatttcaaggccaaggaatagcttttctgcctgtcattccgccattaaggagtcagtcatttggctatgtaaatctttcaaatgtttcttttttaaaatgtaggtaatttcagaaagtattttactttccaccttggttgtcaattaagattgggaccggggagttgagttggactctttatggggccaggttactgggggagaggtcctgaagtcaaacaaggaccttgtacttgcagtgatgagccctgctttgagagaaatgccagcaccaccagccaataagatggagagagggaggagggtggagtatgtaaactgaggcacaaaagctggggccaaagcaaacactttataattgttattattattattatttgagatgaagtttagctcttgttgcccaggctgggtgcagtggcacaatcttggctcagtgcaatctccccctcccgggttcaagtgattctcctgcctcagcctcccaaaaagctgggattacaagtgtctgccaccacaccagctaattttttgtatatttagtagaaatggggctttatcatgttgaccaggctggtcttgaactcctgacctcaggtgatccacccatcttggcctcccaaagtgctgggattacaggcatgagccaccacgcctggctgcaaacaccttattaacagataccttagttgaagttaaacaccctagttaatagccagcatcttcattaactgttaacaccctagttaactgcaaacaccctacttaacaaaaagcttacttgttgaacactgtagtatatagttaacagtgaacactctagttaacagcaaacattgtttttaacagttaacaccctggtaaactgtggacatgctacttaacacacacttttgttgacagtgaacatgttagtccacagtgaacacatcctagttaacaggtaacaccttcattaacagttagcaccctacccaacaacaagccctttagctgacagtgggtctttggcagaaaattaggttgaggcactcactgagggttttgggagagggaggaagctcagcctctggctctgtccttaggcctggcccaccagccccacagcgctacctccatgcagtagtgccctctggcttacagggggaaacaggaaaccacagctgggatgtgaattctcagcctgagtgccctgtgcttccctggaggggaactcaagttcctcttttgtgtcagagatgaaagtctgagctacagtaggtggggagcttggagtgatttgtgtgtctctctttcctctcaccctcccttcctccttgctcttggtctcactgttagcccccagctggctgtgtctggggctcccttttctcctctaccttgcactccagctgaccatctcgtttctggatccttctctttgctcatcatctttcctcaaactctctctctctctttctttttttttcttttgagacagagcctcattctgtcacccagactggagtgcagtggcacaatctcagctcactgcagcctctgcctcctgggttcaagtgattctcatgcctcagcctcctgagtagctgggactacacgtgtgcaccaccacgcccggctaatttttgtatttttagta

SEQ ID NO: 88653 - DNA, 1818 bp, Homo sapiens
tggaacaccagcactgggcctcccttctccaggcagcacccagcacaatattccagcctgggggacaggactgatagatgctgtcccctcatgttctggcagatgcccaggcatgacttcaaagctggaaacaacatgggaatcccaccatcagagctcacagcctctccattctgcaggatttcaaggccaaggaatagcttttctgcctgtcattccgccattaaggagtcagtcatttggctatgtaaatctttcaaatgtttcttttttaaaatgtaggtaatttcagaaagtattttactttccaccttggttgtcaattaagattgggaccggggagttgagttggactctttatggggccaggttactgggggagaggtcctgaagtcaaacaaggaccttgtacttgcagtgatgagccctgctttgagagaaatgccagcaccaccagccaataagatggagagagggaggagggtggagtatgtaaactgaggcacaaaagctggggccaaagcaaacactttataattgttattattattattatttgagatgaagtttagctcttgttgcccaggctgggtgcagtggcacaatcttggctcagtgcaatctccccctcccgggttcaagtgattctcctgcctcagcctcccaaaaagctgggattacaagtgtctgccaccacaccagctaattttttgtatatttagtagaaatggggctttatcatgttgaccaggctggtcttgaactcctgacctcaggtgatccacccatcttggcctcccaaagtgctgggattacaggcatgagccaccacgcctggctgcaaacaccttattaacagataccttagttgaagttaaacaccctagttaatagccagcatcttcattaactgttaacaccctagttaactgcaaacaccctacttaacaaaaagcttacttgttgaacactgtagtatatagttaacagtgaacactctagttaacagcaaacattgtttttaacagttaacaccctggtaaactgtggacatgctacttaacacacacttttgttgacagtgaacatgttagtccacagtgaacacatcctagttaacaggtaacaccttcattaacagttagcaccctacccaacaacaagccctttagctgacagtgggtctttggcagaaaattaggttgaggcactcactgagggttttgggagagggaggaagctcagcctctggctctgtccttaggcctggcccaccagccccacagcgctacctccatgcagtagtgccctctggcttacagggggaaacaggaaaccacagctgggatgtgaattctcagcctgagtgccctgtgcttccctggaggggaactcaagttcctcttttgtgtcagagatgaaagtctgagctacagtaggtggggagcttggagtgatttgtgtgtctctctttcctctcaccctcccttcctccttgctcttggtctcactgttagcccccagctggctgtgtctggggctcccttttctcctctaccttgcactccagctgaccatctcgtttctggatccttctctttgctcatcatctttcctcaaactctctctctctctttctttttttttcttttgagacagagcctcattctgtcacccagactggagtgcagtggcacaatctcagctcactgcagcctctgcctcctgggttcaagtgattctcatgcctcagcctcctgagtagctgggactacaygtgtgcaccaccacgcccggctaatttttgtatttttagta

SEQ ID NO: 88654 - DNA, 530 bp, Homo sapiens
caaatgaagtaagagctgtaaacaggctgggtgcaggggctcatgcctgtaatcccatcactttggaaggtcgaagtgggaggatcactgagcccaggagaccagcttgggcaacatagtgagacccactccctcaacaaaaaataaaaacttaaccgggtgtggtggcatgttcctatagtcccagctacttgggaggctggggtgggagggtcgcttgagcccaggaggtcgaggctgtggtgagctgagatcgtgccactgctctcagcctgggcgagaccctgtctcaaacaagcaacaaacaaaaaaccaagctgtaaacagaccttgtgtggcttttgtgtccaggaggtggggaggtgttattatatgcagargtgacaggctgcacagcaatgatctgcagtgtctacaccatctttcctccacaaagtcaagatggggcatcatctcctaaagggtctctgaaagcacaccaccattagctggttcagtatcactccatttccccctgccccctaaccccc

SEQ ID NO: 88655 - DNA, 643 bp, Homo sapiens
tgtctgtgacatccgggagcttacccagcgagcttccagcctttgcctgtgtactctctgcagtggagtgacccagagtgcatgataagattaactccaggggtggggtaggtcaagatacaaacattactctcatctgcagatattgttcataaggaagggaaatgacctagaatgacacagaaagggctgataacaaatcagggtgaccaaggatgacacctcccccccgccaactccacgaggggctgacaaaactgtgccctatcctagagataggcttccggaatgaccaggatgggtcagcatagctagaaaagggggtcccagagcagaatgtggtgcatgggtctgccygatagagggaagctggtgggcccaggccatcaggccagaaaactgcatcttcctcatcccctcccctccagaatcttgtcctattcaccaagtccccttatgttttataattcagtcccccagcccttctgggacgtctgtactacatttctctttaacttgaacagcatgctgccggatgcatgcatgcccgaacacatggaccctgtatttacatatgcacatgcctagaccggtgtgcacatggggtcctgaggagttagtagctgtggacatgcgtgtagct

SEQ ID NO: 88656 - DNA, 723 bp, Homo sapiens
aagcccagctccccaagccacaaacttgctgagtgactcccctgggcctcagtgacccatcagtgaaatgaaggcgataatcttgcctggggtgccccaggcgctgtggctaagtgacaaagagcagtgggtagcgttagtccttgtatggctagcagagcagaaagagccttcacagactgattttagtgtgtctggaatcttgggcattcccagatcaccccttagctaccacctgtactattagttacttaatatatttctttaaaataacttaaagtattttaaaggaatatgaaacattacttgttatgatgtactagtttatatatatatatatatatatatatwtttttttttttttttttttttgagatggagtcttgctctattgcccaggctggagtgcagtggtgtgatcttggctcactgcaacctccacctcccaggtccaagtgattctcctgcctcagcctgccgactagctgggactacaggcgtgtgccaccatgcctggctaatttttgtatttttagtacagacatggtttctccattttggccaggctggtcttgaactcctgacttcaagtgatctgcttgcctcagcctcccaaagtgctggtattacaggcatgagccgccactcctggcctacttatatatttctttctagcactacttaaagtaaattcaaagtattcaaacaaaaaagttggatccc

SEQ ID NO: 88657 - DNA, 723 bp, Homo sapiens
aagcccagctccccaagccacaaacttgctgagtgactcccctgggcctcagtgacccatcagtgaaatgaaggcgataatcttgcctggggtgccccaggcgctgtggctaagtgacaaagagcagtgggtagcgttagtccttgtatggctagcagagcagaaagagccttcacagactgattttagtgtgtctggaatcttgggcattcccagatcaccccttagctaccacctgtactattagttacttaatatatttctttaaaataacttaaagtattttaaaggaatatgaaacattacttgttatgatgtactagtttatatatatatatatatatatatatttwtttttttttttttttttttgagatggagtcttgctctattgcccaggctggagtgcagtggtgtgatcttggctcactgcaacctccacctcccaggtccaagtgattctcctgcctcagcctgccgactagctgggactacaggcgtgtgccaccatgcctggctaatttttgtatttttagtacagacatggtttctccattttggccaggctggtcttgaactcctgacttcaagtgatctgcttgcctcagcctcccaaagtgctggtattacaggcatgagccgccactcctggcctacttatatatttctttctagcactacttaaagtaaattcaaagtattcaaacaaaaaagttggatccc

SEQ ID NO: 88658 - DNA, 723 bp, Homo sapiens
aagcccagctccccaagccacaaacttgctgagtgactcccctgggcctcagtgacccatcagtgaaatgaaggcgataatcttgcctggggtgccccaggcgctgtggctaagtgacaaagagcagtgggtagcgttagtccttgtatggctagcagagcagaaagagccttcacagactgattttagtgtgtctggaatcttgggcattcccagatcaccccttagctaccacctgtactattagttacttaatatatttctttaaaataacttaaagtattttaaaggaatatgaaacattacttgttatgatgtactagtttatatatatatatatatatatatatttttwtttttttttttttttttgagatggagtcttgctctattgcccaggctggagtgcagtggtgtgatcttggctcactgcaacctccacctcccaggtccaagtgattctcctgcctcagcctgccgactagctgggactacaggcgtgtgccaccatgcctggctaatttttgtatttttagtacagacatggtttctccattttggccaggctggtcttgaactcctgacttcaagtgatctgcttgcctcagcctcccaaagtgctggtattacaggcatgagccgccactcctggcctacttatatatttctttctagcactacttaaagtaaattcaaagtattcaaacaaaaaagttggatccc

SEQ ID NO: 88659 - DNA, 723 bp, Homo sapiens
aagcccagctccccaagccacaaacttgctgagtgactcccctgggcctcagtgacccatcagtgaaatgaaggcgataatcttgcctggggtgccccaggcgctgtggctaagtgacaaagagcagtgggtagcgttagtccttgtatggctagcagagcagaaagagccttcacagactgattttagtgtgtctggaatcttgggcattcccagatcaccccttagctaccacctgtactattagttacttaatatatttctttaaaataacttaaagtattttaaaggaatatgaaacattacttgttatgatgtactagtttatatatatatatatatatatatatttttttttttttttttttttttgagatggagtcttgctctattgcccaggctggagtgcagtggtgtgatcttggctcactgcaacctccacctcccaggtccaagtgattctcctgcctcagcctgccgactagctgggactacaggcgygtgccaccatgcctggctaatttttgtatttttagtacagacatggtttctccattttggccaggctggtcttgaactcctgacttcaagtgatctgcttgcctcagcctcccaaagtgctggtattacaggcatgagccgccactcctggcctacttatatatttctttctagcactacttaaagtaaattcaaagtattcaaacaaaaaagttggatccc

SEQ ID NO: 88660 - DNA, 611 bp, Homo sapiens
agaccctgaatcacttcagacctagtctatatacaatggttgttttacaagcaatgtcactctggatcttgtgcacaggagactgacttcaatgacagttccttctctacaacactctcacttagaggaggccaggtatttggaaaactttggcgccagagatggcatttcatgccacttcctggtcagcactaagtattaccctcctgttttagaatatgaatcacaacttctccttaaaaagagctggggtggggggtgggaagagagggtgggtggaaggaaaagaaaaaasaaattcatacaatctaagccatgctaattttccatcttgctttaagatctcccttcagttgtagaggcaagggaggactatggatttcaatggaatatgggggaattgccatcgccctacagatcccattggaatgtatgctctgtgagagcagggaccagcccttgctctgctcagtgccagacactcagtgcccagaactgtgcctagcacacctacagcttagtgactctctgttaggtggacagaactgatttatgactgggcatagtggcttacgcctataatcccaacactttgggaggccaaggcgggc

SEQ ID NO: 88661 - DNA, 1127 bp, Homo sapiens
ctgagattttggtgtttgacacatacatttgcatttcctggaataaaacccatttggtcgcgatgtttttgtttgtttcgttttgttttgagacagcgtcttgctctgtcgccaggctgcagtgcagtggtgcgatctcagctcactgcaacctccgccttccgggttcaagcaattctcctgcctcagcctcccaagcagctgggactacaggcatgtgccaycacgcccagctaatttttgtatttttagtagagacggggtttcaccatgttggccaggatggtcttgatctctggacctcgtgatttgccagcctgggcctgccaaagtgctgggattacaggcgtgagccactgcacccggccatgatgttattttttaacgtgttggtggatttcaattgcaaataatttgttttctccattgatatttttaagcaagattgttttgtgtgtgtgtgtacaacctactggattttgatagcaacattatactcactacataaaaatcatttaatttttttttcctatgctctggtaaagtttaaggaacactggaagtatctagtgtttaaggctaatagctattaaactcaactggacctggagttttttggagggaggggggcagctctgtggcaattttcttgagttcatctatggaaaaaaaaaaaagtctgtttgaactttatatatctctgttaaggtcagttttggtgaattattttcctagaaaattcacttttttaaaattaaaggcttgaatgcagaaaattgacaattgcagctagattttctcacgtatttccagagtgtgtgaaaaatagatgattatttatttgagacagggtctcactttgttggccgggctggagtgcagtgacacatttatggctcactgcagcaatcctcccacctcagcctcctgagcagctggaaccacagacatgcaacaccacacccagctgatttttaaatttttttgtacaggtggagtctccctatgttgtccaggctggtctcaaactcccagactcaagtgatcttcctgcctcggcctcccaaagcgctaggattacaggtgtgtgtcactgagcccaacctatttcttcttttgatgactag

SEQ ID NO: 88662 - DNA, 1127 bp, Homo sapiens
ctgagattttggtgtttgacacatacatttgcatttcctggaataaaacccatttggtcgcgatgtttttgtttgtttcgttttgttttgagacagcgtcttgctctgtcgccaggctgcagtgcagtggtgcgatctcagctcactgcaacctccgccttccgggttcaagcaattctcctgcctcagcctcccaagcagctgggactacaggcatgtgccaccacgcccagctaatttttgtatttttagtagagacggggtttcaccatgttggccaggatggtctygatctctggacctcgtgatttgccagcctgggcctgccaaagtgctgggattacaggcgtgagccactgcacccggccatgatgttattttttaacgtgttggtggatttcaattgcaaataatttgttttctccattgatatttttaagcaagattgttttgtgtgtgtgtgtacaacctactggattttgatagcaacattatactcactacataaaaatcatttaatttttttttcctatgctctggtaaagtttaaggaacactggaagtatctagtgtttaaggctaatagctattaaactcaactggacctggagttttttggagggaggggggcagctctgtggcaattttcttgagttcatctatggaaaaaaaaaaaagtctgtttgaactttatatatctctgttaaggtcagttttggtgaattattttcctagaaaattcacttttttaaaattaaaggcttgaatgcagaaaattgacaattgcagctagattttctcacgtatttccagagtgtgtgaaaaatagatgattatttatttgagacagggtctcactttgttggccgggctggagtgcagtgacacatttatggctcactgcagcaatcctcccacctcagcctcctgagcagctggaaccacagacatgcaacaccacacccagctgatttttaaatttttttgtacaggtggagtctccctatgttgtccaggctggtctcaaactcccagactcaagtgatcttcctgcctcggcctcccaaagcgctaggattacaggtgtgtgtcactgagcccaacctatttcttcttttgatgactag

SEQ ID NO: 88663 - DNA, 1127 bp, Homo sapiens
ctgagattttggtgtttgacacatacatttgcatttcctggaataaaacccatttggtcgcgatgtttttgtttgtttcgttttgttttgagacagcgtcttgctctgtcgccaggctgcagtgcagtggtgcgatctcagctcactgcaacctccgccttccgggttcaagcaattctcctgcctcagcctcccaagcagctgggactacaggcatgtgccaccacgcccagctaatttttgtatttttagtagagacggggtttcaccatgttggccaggatggtcttgatctctggacctcgtgatttgccagcctgggcctgccaaagtgctgggattacaggcrtgagccactgcacccggccatgatgttattttttaacgtgttggtggatttcaattgcaaataatttgttttctccattgatatttttaagcaagattgttttgtgtgtgtgtgtacaacctactggattttgatagcaacattatactcactacataaaaatcatttaatttttttttcctatgctctggtaaagtttaaggaacactggaagtatctagtgtttaaggctaatagctattaaactcaactggacctggagttttttggagggaggggggcagctctgtggcaattttcttgagttcatctatggaaaaaaaaaaaagtctgtttgaactttatatatctctgttaaggtcagttttggtgaattattttcctagaaaattcacttttttaaaattaaaggcttgaatgcagaaaattgacaattgcagctagattttctcacgtatttccagagtgtgtgaaaaatagatgattatttatttgagacagggtctcactttgttggccgggctggagtgcagtgacacatttatggctcactgcagcaatcctcccacctcagcctcctgagcagctggaaccacagacatgcaacaccacacccagctgatttttaaatttttttgtacaggtggagtctccctatgttgtccaggctggtctcaaactcccagactcaagtgatcttcctgcctcggcctcccaaagcgctaggattacaggtgtgtgtcactgagcccaacctatttcttcttttgatgactag

SEQ ID NO: 88664 - DNA, 485 bp, Homo sapiens
cagacttcaactgaattacatcaccatctttcctggttcttcagcttgtaaatagtatgtcatgggacttcttggcctctgtaattgcatgaaacaattcccataataaatcttctctatatgtattgcattggttctgtttctctggagaactctgactaatataattcctaagagtggaatttctgggtcatatgtaattctatgtttagctttttgaggagccaccaaattgttttccacagcaacttccaacagtgacaagggtttcttttttcttttataggttcagtattctttattataaacaatcagacaacagtgtaagtgtgcatttgatggawaaccgaagccaagttattataatagaaagcatgacttcgctcaaatagagtttctttgttgttgttgatctgttttacattaatttgaatttaacatatgctaggatcacctaaatttgtcatacagttctgctattaaaa

SEQ ID NO: 88665 - DNA, 743 bp, Homo sapiens
atctgatgttggttattgcatgtcataagtctagggtcagcagtctggggatagccctgggaattggctccgagtttgtcataattggagtaaccactacaagaaagatggggaggcaggcatgggcataatgagagggtatgtttgtctggaagtcagggagtaggctgggacatataatagttgcttgtgaaagcagyagtctcattttgagactctacctttgaaatgcctatgttgtttaaatctctgtcttgatggctggcaatgttgcttttccaaccaaaaagtttaacagtcatggactgcatgccaagtcccatgcaaagcattttatatgtgctaactcattcactccttaccacaaccctgtattgttatcttcattttacaagtggatagacagggctcaaagagaagaggtcaattagatggcagaattggtatttgaatatggtttgggtgattccaatgtccacaggtatgctgtatgtcaccactctgtgttccttatcggcccatgctgtgtttagttttgagttgacttttgaaaggtgagtaagatttcaatagcaaaaatagggagggctgtccaatttgagataccagcacatgaacaggcaggaaggcaggtgtagatacaaagggagatgtggttctatgtgattggattataaactatacaagggtgctgttatagggagaaatgagatttgaaagacaggttaacgccagatggtgaa

SEQ ID NO: 88666 - DNA, 2279 bp, Homo sapiens
ggcaggtggggcaatccagagccatgggggcttcccatgggaattgggaggtcccaaggcagatgcaggggttccacaggaggagtcccagagccaccaagcgctctcctgtcccagggagcagtcaacaccatggactgaacagttactgggcttcaagctctgggccaggctggggcatgtggggccatgagggagctcagagtgggagacagagagacaattgtgctcagagggcacccatttctgggtgtaatgtggtcctgagattttggctgagaagggtttccagggtttcatatgtgttatggagctgcttcctctccccagcctcaccttgcaggaatcccagtgaatatattgccaccctatttgagctcagtgccctcatagtgtaatggcaccagcagatctgcctgtgcatggacttcctgtactacccattcctgaggggtgatgcttctgcagggcctgtgaccttgtgcacaactttagacaccatcatcctggagcagccctgcaccctcactagccagggtgttcatgacttcctcaagaccaaggccacgttcaagacttgggacttcagtgatgcacttgtgctgggcaaggtggcttctccagtatcttaatttgggaggtagaatgcagcttgagatcaaatgtctgatcaaagaacttgaacttgagctggagggctctggggagccatagaaggtgctggataaaggagggacagtcagatatattttagagatgactgtagaaggctgcctggaaggagtgaacaagagccaggagacccgggagggagcttgtggggcaggtctggagatggcaagggagggatcctgcttggatgaaaagtcttcagggactgtctcaggttacactcaggtgccctcagagctaatgtgttcagaggtcttgtctccaggatgaaaatgggaaggagttgtcagatgaggacatataaatggaggctggcatcttcatgagtaccagcggtggtcccggtgtgggtctctccatccagggacatggtggatggacactacatcactccattctgcccttcctttccctcctcccattctcccgagggcctcagtgcatgggcgctgtccaacctctggtgctgaagcagccaagagacgcaagcctgcgtggctgcctcttaggatatgacagcacagccactggcctctactgaatcctatgcaacctcagaagacacccaggagtgatgccatcatgtggtgcaagagttctgagggaccacaatcctgaagacattgaatggtgggtgcagggcctcatggcctgttccccagctcctctcattggctctgctccaggtggtgaagggggataacatttctgtcaattctgccacgattgcctagcaggaaaaggagcagagcccagaagcagggcctggtatgcagcctgcctaacaaggaagaatttataggctctgtggacagaaagatctgggagtccatatctatcacccactagcttgctgagacattagtaaagtcagttttctggactacatttctgtcatctgtaaattaagaggaatttcttctaccccacaaggcttcttggataattagtgacagtgtgtgtagagtaggtgccacccagccagcatttggtgtccagaacactcctcttcccccttgattttctgcctaaatttgcattttcttcttaagattttcactccccttaattctgctcttccctctgatttctgccttactgtatatcccatggagtcaccaggatcaaagtgggtaacagtcatgtatgcatgtatgtgtgtgtacatatacacattgttggggctggagtgtggtgtgtgggtaagtgtatgagttggaatcactgactgaaactctccacaccaggctgtgttcctgctcattgctggaggtactgtcagggtccctgtcctcaacccctggtctgacacttgcagatcaggcaggacattctggaggaatcatgcccttggaaggatccctgaggagtgactggtgggtattggtggataaataccccagctcccttgctttgggtgggtgactctgaggcacatgttctgtgctgtctctgcagatgtacctggcagggcwgagtcctggctgccacaggggaaactttcttgatgaaggtccctttaactgctgcattcctttcctgtctcagttccccactcctctactggtgtttcctgggatacgcaccctaaggaagaactggcagtc

SEQ ID NO: 88667 - DNA, 1542 bp, Homo sapiens
agacttggctgcctgagatggaaaaggcattggagaccctcagttgttctctgctgaggaagtatttagtgctcttctctcccagaacgctattgggattagattgcttaggtctgggagtgttaacttcttgcttaggctcctgttgcctggccctccttaacactttgtggttccctcctcagagaaaggcacagttctaaggctggaacgatttccctttgtcacgcatgtccatgtgaagagaccaccaaacaggctttgtgtgagcaacaaggctgtttatttcacctgggtgcaggcaggctgagtccaaaaaaggagtcagcaaagggtggtgggatcatcattagttcttataggttttgggatcagttaaggtggggcagaaacaaatcacaatggtggaatgtcatcagttaaggctattttcacttcttttgtggctcttcagttgcttcaggccatctggatgtatagtgcargtcacaggggatatgatggcttagcttgggctcagaggcctgacagtatgtaatctgcatttcccaaaagactgtcaccaatgagttgaaataattgattgactgtcacctacattctacttgttattgccctctctcaccaccaataaaagacctaccagcatttctattcaaacaagccattgttcatgcaaaatggacttaaggctgtccactccagctgcgctcaccccactggcccaacaaagcctgtgccacagctgggatcccttctctgcaaacatgaggaaacttgggttttgtgaattggtaagttgctcaagggtgcacacttcgaagagacagacctggatcatcaatttatacttctgcctctaagggcactaccttccttctgggttcgagctgatcaacttctcatctcaatacaaaatcaacacaacactttatgccacttgtttatattacttcatattacttcttactttcacggtcacacagattcgtttcctttggcaaacaaactaaaattgtggcaattaagtgagaaggttagggaagaaggttaggacaggaggggtgtggtctgaaaggcctcacaagaccaaagggcagtgactcctaaggacagggagctcagggattcattgtacaggcccgaggtgggagcggtgcgaagagcaggcctcatggtttgtcagggcggagcatagtttagtcaacattatgtactcaaggctagtaaatacaccacagacttcattagctaagcagcaatccatacagatattaaccaattgcccactctgtgccaagcacatatgccatcgtttggtgattttcacttattcatacaatcttctcaacaagtctgtaaggtcttttgggacagagaaagtctcctgcatcttgtgctctcttaccactttttgcttaatagattttgttgtttcaaattctaaaaaggaaggaaattaaacaattcttaaccaaatgatcattctcaaacagggtcagtgccctctcttgggatgcaaatcctatgtatcttattcca

SEQ ID NO: 88668 - DNA, 1542 bp, Homo sapiens
agacttggctgcctgagatggaaaaggcattggagaccctcagttgttctctgctgaggaagtatttagtgctcttctctcccagaacgctattgggattagattgcttaggtctgggagtgttaacttcttgcttaggctcctgttgcctggccctccttaacactttgtggttccctcctcagagaaaggcacagttctaaggctggaacgatttccctttgtcacgcatgtccatgtgaagagaccaccaaacaggctttgtgtgagcaacaaggctgtttatttcacctgggtgcaggcaggctgagtccaaaaaaggagtcagcaaagggtggtgggatcatcattagttcttataggttttgggatcagttaaggtggggcagaaacaaatcacaatggtggaatgtcatcagttaaggctattttcacttcttttgtggctcttcagttgcttcaggccatctggatgtatagtgcaagtcacaggggatatgatggcttagcttgggctcagaggcctgacagtatgtaayctgcatttcccaaaagactgtcaccaatgagttgaaataattgattgactgtcacctacattctacttgttattgccctctctcaccaccaataaaagacctaccagcatttctattcaaacaagccattgttcatgcaaaatggacttaaggctgtccactccagctgcgctcaccccactggcccaacaaagcctgtgccacagctgggatcccttctctgcaaacatgaggaaacttgggttttgtgaattggtaagttgctcaagggtgcacacttcgaagagacagacctggatcatcaatttatacttctgcctctaagggcactaccttccttctgggttcgagctgatcaacttctcatctcaatacaaaatcaacacaacactttatgccacttgtttatattacttcatattacttcttactttcacggtcacacagattcgtttcctttggcaaacaaactaaaattgtggcaattaagtgagaaggttagggaagaaggttaggacaggaggggtgtggtctgaaaggcctcacaagaccaaagggcagtgactcctaaggacagggagctcagggattcattgtacaggcccgaggtgggagcggtgcgaagagcaggcctcatggtttgtcagggcggagcatagtttagtcaacattatgtactcaaggctagtaaatacaccacagacttcattagctaagcagcaatccatacagatattaaccaattgcccactctgtgccaagcacatatgccatcgtttggtgattttcacttattcatacaatcttctcaacaagtctgtaaggtcttttgggacagagaaagtctcctgcatcttgtgctctcttaccactttttgcttaatagattttgttgtttcaaattctaaaaaggaaggaaattaaacaattcttaaccaaatgatcattctcaaacagggtcagtgccctctcttgggatgcaaatcctatgtatcttattcca

SEQ ID NO: 88669 - DNA, 1542 bp, Homo sapiens
agacttggctgcctgagatggaaaaggcattggagaccctcagttgttctctgctgaggaagtatttagtgctcttctctcccagaacgctattgggattagattgcttaggtctgggagtgttaacttcttgcttaggctcctgttgcctggccctccttaacactttgtggttccctcctcagagaaaggcacagttctaaggctggaacgatttccctttgtcacgcatgtccatgtgaagagaccaccaaacaggctttgtgtgagcaacaaggctgtttatttcacctgggtgcaggcaggctgagtccaaaaaaggagtcagcaaagggtggtgggatcatcattagttcttataggttttgggatcagttaaggtggggcagaaacaaatcacaatggtggaatgtcatcagttaaggctattttcacttcttttgtggctcttcagttgcttcaggccatctggatgtatagtgcaagtcacaggggatatgatggcttagcttgggctcagaggcctgacagtatgtaatctgcatttcccaaaagactgtcaccaatgagttgaaataattgattgactgtcacctacattctacttgttattgccctctctcaccaccaataaaagacctaccagcatttctrttcaaacaagccattgttcatgcaaaatggacttaaggctgtccactccagctgcgctcaccccactggcccaacaaagcctgtgccacagctgggatcccttctctgcaaacatgaggaaacttgggttttgtgaattggtaagttgctcaagggtgcacacttcgaagagacagacctggatcatcaatttatacttctgcctctaagggcactaccttccttctgggttcgagctgatcaacttctcatctcaatacaaaatcaacacaacactttatgccacttgtttatattacttcatattacttcttactttcacggtcacacagattcgtttcctttggcaaacaaactaaaattgtggcaattaagtgagaaggttagggaagaaggttaggacaggaggggtgtggtctgaaaggcctcacaagaccaaagggcagtgactcctaaggacagggagctcagggattcattgtacaggcccgaggtgggagcggtgcgaagagcaggcctcatggtttgtcagggcggagcatagtttagtcaacattatgtactcaaggctagtaaatacaccacagacttcattagctaagcagcaatccatacagatattaaccaattgcccactctgtgccaagcacatatgccatcgtttggtgattttcacttattcatacaatcttctcaacaagtctgtaaggtcttttgggacagagaaagtctcctgcatcttgtgctctcttaccactttttgcttaatagattttgttgtttcaaattctaaaaaggaaggaaattaaacaattcttaaccaaatgatcattctcaaacagggtcagtgccctctcttgggatgcaaatcctatgtatcttattcca

SEQ ID NO: 88670 - DNA, 656 bp, Homo sapiens
cagcctgggaaggctcagggtgctgggcccccacctgggagctgagagtggtcctgctctgcacttcccagacacccccagcagggtgcaccaccacacccagcctgcccagctctgctgcaggacatgggccagcgaggccccacagagcactgggacggggggagctcgggcagggggagccaagctgggcgtcaggggcctggggacgcaccacccccttggtttccacaacttgaaaacaagaactgatcagtcactgattcacagtccaaaaaccaacccccaaatcccagggcttctarcaacaaaggaggacctctctcacttctgggtcagcaagaacttcagggctgggcccactccatgtctcctccctgcagaaggaccctctgctctccgtccccagagcaaggcagtgggctgcctgggtttggagcagctgggtagggcgagggcaatgggtgggataggggggatgcagcccaggggggtgcagacaacaggcaaggagcaggccgggggccttgccagggccatctgtgtccctggtcactgagggtggcaggggagactggaagggaaacagacacccaggtggggagggccccaagccagtccccacggcagcccctgcaggcctcagtgcttctgga

SEQ ID NO: 88671 - DNA, 656 bp, Homo sapiens
cagcctgggaaggctcagggtgctgggcccccacctgggagctgagagtggtcctgctctgcacttcccagacacccccagcagggtgcaccaccacacccagcctgcccagctctgctgcaggacatgggccagcgaggccccacagagcactgggacggggggagctcgggcagggggagccaagctgggcgtcaggggcctggggacgcaccacccccttggtttccacaacttgaaaacaagaactgatcagtcactgattcacagtccaaaaaccaacccccaaatcccagggcttctaacaacaaaggaggacctctctcacttctgggtcagcaagaacttcagggctgggcccactccaygtctcctccctgcagaaggaccctctgctctccgtccccagagcaaggcagtgggctgcctgggtttggagcagctgggtagggcgagggcaatgggtgggataggggggatgcagcccaggggggtgcagacaacaggcaaggagcaggccgggggccttgccagggccatctgtgtccctggtcactgagggtggcaggggagactggaagggaaacagacacccaggtggggagggccccaagccagtccccacggcagcccctgcaggcctcagtgcttctgga

SEQ ID NO: 88672 - DNA, 1159 bp, Homo sapiens
tacctatcaaccctatgaggtaagtcccactattttcctcattataaaagcatcgtgaagggtatgtatggagtaaatagtgatcaragctatttaccggctagagctcagcacagaactttaaactcaaaagagtccaatccaagacaaacaaaagaaagtgagatttatacagtaggcagtaaaacctacagaactcaccaactcaagcaacagttagaagtcgatctgtaaagacattcaaaaaggagtcagactagatttgtagaagatacaatcaagctatcttactaaaatgtctttaccctttgaggttgccattaaggaggacaaccacaccctctccactcctattgccaacatgtttctgtgtccccctataaaaattctgggctgggtggaccagaaatttggccaagtgtggtttttttctttttaattatgacataagttggggaatggtacatgaattctttgtgggtatctcaagatggttgtaatttatgctctgcttgaatctgttttaattgatagcctaaattccacagaagcctatttaaagcaagctttgtactctgtagaaatgggatctttcagaaaaacgacttgctgaagaatgaattgccacaaagaaagcaggtagaggattttccctttggcatctatcatctagtcagcatttatctggagttacttcatggctatatttctttaagaaattacatttcagagaaaatacatttcatgtcaggaaaataggagagattagcttaaaagagaatccccatgtaaaactcacatagtggcttcagtcctcaggaaacccaagggtagactcatctggtgttgctcaaagcagcgtctgtcttgtttttctaacactggtggtttccacaaaatacactagcatcctcctttggctttgtgacctttaccctaattgaaacactgtatgtgttctggacaaaccatgaaaaagaaacagaagagaagaaagagcaagagtgaccatctagttcacagagaactaaccttatctttggaaaggaagtaagaaaagaaaaatgaaagatactggagagttcagaaacctccagaggaagggaaaaaggacacatgaagagataggattgctctatgtgtcaggataaatagctaa

SEQ ID NO: 88673 - DNA, 1159 bp, Homo sapiens
tacctatcaaccctatgaggtaagtcccactattttcctcattataaaagcatcgtgaagggtatgtatggagtaaatagtgatcagagctatttaccggctagagctcagcacagamctttaaactcaaaagagtccaatccaagacaaacaaaagaaagtgagatttatacagtaggcagtaaaacctacagaactcaccaactcaagcaacagttagaagtcgatctgtaaagacattcaaaaaggagtcagactagatttgtagaagatacaatcaagctatcttactaaaatgtctttaccctttgaggttgccattaaggaggacaaccacaccctctccactcctattgccaacatgtttctgtgtccccctataaaaattctgggctgggtggaccagaaatttggccaagtgtggtttttttctttttaattatgacataagttggggaatggtacatgaattctttgtgggtatctcaagatggttgtaatttatgctctgcttgaatctgttttaattgatagcctaaattccacagaagcctatttaaagcaagctttgtactctgtagaaatgggatctttcagaaaaacgacttgctgaagaatgaattgccacaaagaaagcaggtagaggattttccctttggcatctatcatctagtcagcatttatctggagttacttcatggctatatttctttaagaaattacatttcagagaaaatacatttcatgtcaggaaaataggagagattagcttaaaagagaatccccatgtaaaactcacatagtggcttcagtcctcaggaaacccaagggtagactcatctggtgttgctcaaagcagcgtctgtcttgtttttctaacactggtggtttccacaaaatacactagcatcctcctttggctttgtgacctttaccctaattgaaacactgtatgtgttctggacaaaccatgaaaaagaaacagaagagaagaaagagcaagagtgaccatctagttcacagagaactaaccttatctttggaaaggaagtaagaaaagaaaaatgaaagatactggagagttcagaaacctccagaggaagggaaaaaggacacatgaagagataggattgctctatgtgtcaggataaatagctaa

SEQ ID NO: 88674 - DNA, 778 bp, Homo sapiens
cttgagcaagccaccttcactggatctacatttcctcatttggaagatggggataacrcctagcttatagagctgttgtgaggattaagtgcaacagtagatataatgtgctttgttagtgcaatgcagagcacatgggaaacaaaaaaatatatagaagctcctggaatgattagtagtaatagtaacacttggcacacatgttagcccagagcatggagtccactggcccaaaggtagagttagccattagtgactaggccggagacaaacaaccaaacacgattgataacaaggaaagaaagcggaggctatatcctctgcaaggtgggacccatcagggctacccaggactaggttgcagtttacttagggcagtggttcttaaactcaagcatttatcagaatcctctatagggcttattcaaagatagatgcctgggccccactcccagtgtttctgattcagtaggtctggagtggggcctgagaacttgcatttctaacaaattccctggtgttgctgatgctgctggtctagaaaggcccctttgagcatcactgtcttggaataaagaatctcaggactacagtcttgttcagttccaggcatcagagttgcctttcttttgggttctttttccttcttagtaaaaatccactttaaaaatgccgcctatgtcttggcagaataagggaaattgcccataactggtccaggagagctagagctatcagaggactgctcaaaaccagggatgatagtgacctctaccca

SEQ ID NO: 88675 - DNA, 778 bp, Homo sapiens
cttgagcaagccaccttcactggatctacatttcctcatttggaagatggggataacacctagcttatagagctgttgtgaggattaagtgcaacagtagatataatgtgctttgttagtgcaatgcagagcacatgggaaacaaaaaaatatatagaagctcctggaatgattagtagtaatagtaacacttggcacacatgttagcccagagcatggagtccactggcccaaaggtagagttagccattagtgactaggccggagacaaacaaccaaacacgattgataacaaggaaagaaagmggaggctatatcctctgcaaggtgggacccatcagggctacccaggactaggttgcagtttacttagggcagtggttcttaaactcaagcatttatcagaatcctctatagggcttattcaaagatagatgcctgggccccactcccagtgtttctgattcagtaggtctggagtggggcctgagaacttgcatttctaacaaattccctggtgttgctgatgctgctggtctagaaaggcccctttgagcatcactgtcttggaataaagaatctcaggactacagtcttgttcagttccaggcatcagagttgcctttcttttgggttctttttccttcttagtaaaaatccactttaaaaatgccgcctatgtcttggcagaataagggaaattgcccataactggtccaggagagctagagctatcagaggactgctcaaaaccagggatgatagtgacctctaccca

SEQ ID NO: 88676 - DNA, 724 bp, Homo sapiens
aaggtcaatcaacttctctgtgcctgaaaagatgcttttctttagagaaaacaatactctyattcaagggaatgaacacacaagaggatatcaaaaatgtgcttggggtgggagttgtatcagtcctgctgcatgacaaatcacccaaaacttagttgctttaaacgacaaccatattcttgctcacaagtctctgagaaaaaggagaaatgcttaagatcccttgaagcctagacttggaactggcatatcatcacttcctccatactctactggccaaagcaagacccaaggtgagcccacttcttaatgaaaggaactgtaactttacagtataaggatgtagagaggcggaaggtttgtggccatttttgcaatctacgacagagaggtcttcttagtttaggaaagtctgagacaaagattccaaagcaaatggtttacttggaaaggaaaggaaataccggtaggggagagaaaaatggagacacagagaagcagcagccagtaaagggtgcaaagccaagtcggctggcgctctgggcagctggagtataattccactggagaactctggaagctggtgcaggacacaggcctcatcatcatcctacctaaaggaggacgccaggatgtttatacatcaatccatgatatggtttggatctgggtccctgcccaaaactcacattgaattgcaatccccgatgatggagatggatcc

SEQ ID NO: 88677 - DNA, 724 bp, Homo sapiens
aaggtcaatcaacttctctgtgcctgaaaagatgcttttctttagagaaaacaatactcttattcaagggaatgaacacacaagaggatatcaaaaatgtgcttggggtgggagttgtatcagtcctgctgcatgacaaatcacccaaaacttagttgctttaaacgacaaccatattcttgctcacaagtctctgagaaaaaggagaaatgcttaagatcccttgaagcctagacttggaactggcatatcatcacttcctccatactctactggccaaagcaagacccaaggtgagcccacttcttaatgaaaggaactgtaactttacmgtataaggatgtagagaggcggaaggtttgtggccatttttgcaatctacgacagagaggtcttcttagtttaggaaagtctgagacaaagattccaaagcaaatggtttacttggaaaggaaaggaaataccggtaggggagagaaaaatggagacacagagaagcagcagccagtaaagggtgcaaagccaagtcggctggcgctctgggcagctggagtataattccactggagaactctggaagctggtgcaggacacaggcctcatcatcatcctacctaaaggaggacgccaggatgtttatacatcaatccatgatatggtttggatctgggtccctgcccaaaactcacattgaattgcaatccccgatgatggagatggatcc

SEQ ID NO: 88678 - DNA, 724 bp, Homo sapiens
aaggtcaatcaacttctctgtgcctgaaaagatgcttttctttagagaaaacaatactcttattcaagggaatgaacacacaagaggatatcaaaaatgtgcttggggtgggagttgtatcagtcctgctgcatgacaaatcacccaaaacttagttgctttaaacgacaaccatattcttgctcacaagtctctgagaaaaaggagaaatgcttaagatcccttgaagcctagacttggaactggcatatcatcacttcctccatactctactggccaaagcaagacccaaggtgagcccacttcttaatgaaaggaactgtaactttacagtataaggatgtagagaggyggaaggtttgtggccatttttgcaatctacgacagagaggtcttcttagtttaggaaagtctgagacaaagattccaaagcaaatggtttacttggaaaggaaaggaaataccggtaggggagagaaaaatggagacacagagaagcagcagccagtaaagggtgcaaagccaagtcggctggcgctctgggcagctggagtataattccactggagaactctggaagctggtgcaggacacaggcctcatcatcatcctacctaaaggaggacgccaggatgtttatacatcaatccatgatatggtttggatctgggtccctgcccaaaactcacattgaattgcaatccccgatgatggagatggatcc

SEQ ID NO: 88679 - DNA, 724 bp, Homo sapiens
aaggtcaatcaacttctctgtgcctgaaaagatgcttttctttagagaaaacaatactcttattcaagggaatgaacacacaagaggatatcaaaaatgtgcttggggtgggagttgtatcagtcctgctgcatgacaaatcacccaaaacttagttgctttaaacgacaaccatattcttgctcacaagtctctgagaaaaaggagaaatgcttaagatcccttgaagcctagacttggaactggcatatcatcacttcctccatactctactggccaaagcaagacccaaggtgagcccacttcttaatgaaaggaactgtaactttacagtataaggatgtagagaggcggaaggtttgtggccatttttgcaatctacgacagagaggtcttcttagtttaggaaagtctgagacaaagattccaaagcaaatggtttacttggaaaggaaaggaaataccggtaggggagagaaaaatggagacacagagaagcagcagccagtaaagggtgcaaagccaagtcrgctggcgctctgggcagctggagtataattccactggagaactctggaagctggtgcaggacacaggcctcatcatcatcctacctaaaggaggacgccaggatgtttatacatcaatccatgatatggtttggatctgggtccctgcccaaaactcacattgaattgcaatccccgatgatggagatggatcc

SEQ ID NO: 88680 - DNA, 724 bp, Homo sapiens
aaggtcaatcaacttctctgtgcctgaaaagatgcttttctttagagaaaacaatactcttattcaagggaatgaacacacaagaggatatcaaaaatgtgcttggggtgggagttgtatcagtcctgctgcatgacaaatcacccaaaacttagttgctttaaacgacaaccatattcttgctcacaagtctctgagaaaaaggagaaatgcttaagatcccttgaagcctagacttggaactggcatatcatcacttcctccatactctactggccaaagcaagacccaaggtgagcccacttcttaatgaaaggaactgtaactttacagtataaggatgtagagaggcggaaggtttgtggccatttttgcaatctacgacagagaggtcttcttagtttaggaaagtctgagacaaagattccaaagcaaatggtttacttggaaaggaaaggaaataccggtaggggagagaaaaatggagacacagagaagcagcagccagtaaagggtgcaaagccaagtcggctggcgctctgggcagctggagtataattccactggagaactctggaagctggtgcaggacacaggcctcatcatcatcctacctaaaggaggacgccaggatgtttayacatcaatccatgatatggtttggatctgggtccctgcccaaaactcacattgaattgcaatccccgatgatggagatggatcc

SEQ ID NO: 88681 - DNA, 560 bp, Homo sapiens
aaggaggtaaaattacatactagaatgcccatcacaatttaacagggagattgtttatgaagatttgcagtttccttgcagccatttaactacatcttttccacttaagatgacataggaatcactcatcacatctctgatatgttacagagcccagtagatttgtttataatgaacacctcaaaattatatgtttttataacaccttaaaactattaaaacctgcatgatctctctattttrctggtgtgaaaccatgtagatagatggtgggaactcaaacccttaccatggcaatttagttaacctcagcttcttcatggtaaaatggtaaagtgtgatgaggagggaaggttaaatggataataagaaaaccacctggcaaactatttttaattatgatggaagatttgtttgaactgttttaactttatgcccactcaatatttttgatatttatgtataaatcctactttctgaacatttcttaaaaaacaatctctgttcttaaggaagttccaaaatattgttatttaatcaaaatgaagatgataaaatta

SEQ ID NO: 88682 - DNA, 1331 bp, Homo sapiens
cataygcattgtatttttaaatagaaacagtcacaaaaaaatagacaaatgtctacaagtaaaatagatgtgtgcattgagaaaggcaagggttaagtccaggcctggttctcaagctgagatgggactgccttgtttgaagaggactatttatgaatgaagactctcaggagtctggtgggggggtgaggggtggagagcaactcccaaaatccagacaagagcctttggtattaggggaagattttctaattgttacagtcaggaatggggatcattcctttatgatagctgaaaatacatccccctcctcactccctagaaacccttgagtctcgcctttaggcccttttagggtctgcttctatagctgatggcggtgatctcttttcctgggactcttaagtgtaggacatggaggaaccagaactctaattagcagcaggacctattatttttccaataaggttaacattcaagggaaagaaaagcctctttctttctcaggaagtgtgtgaggatataggctcacattgagaagagaaatgtgaaaagcatattagttacattgaccatgggatgcctggtttgtgagtgaaaatcaccggaatgaccttgaaggatctgagatctagaaaggatgctcaagacttgggtggactgtttgatcctaaaataacatatcactaaataaacagaaaaaggccttgaagtacagataactacatgggagcagggtatcttgacactggatttatagatgacctcattgtttattttttgaatatctgcactttctaaagtttgataatgactacttaggctgagtctaggagtatacccggttgacaaatggaggaggcatattgcagaggcagaggggagaacagagaagagctcggagtcatgaagcagcatagggcaatgtggaacacgtggtgcagcctggctgggatgggcaggagaggggcctgtgtcagaaaaccaataacagggatagtgcacctggcaggggacactgggtttatcctacagggaactgggagccagtgaaagtgaggatgtcccatctacagatgaattgcagagaggaaaaagttacatataatcacttatccctcccccatgggtaactcagttacctggagagaacagcagattgaaaggtactgttctgaaatgctaactggttctttttacatgagatgaacccaagaccaaatcggattaccctagacacaaatttgatgggcagttttaaagtaacgtgcagtaacttttcaagctcgatgtagaaatatccagaacttatagtaaactgtgtacatgca

SEQ ID NO: 88683 - DNA, 628 bp, Homo sapiens
tgagaactgagtctcaccccagcccacacacatgctcctggcgaagacacctgctgtcctcctgcccctacacagggtaagtcactctccttacctgctgagaggcagccgtgtgacaggcctgggcaagggacagaggctggcggtggcagcagctgtcagtcgtcagatgagaggtgaattcagagcttctgctttgaggtcacctgaaagcacaaccagagacatgtctagaggtgtggggactccctggcattgctcccagagtccccatccaccctgtcccatggttcccctctcctcaarctcagcagccttccccaaaagcctggggactccatatcagaccttggggagatggggagctcgaggcagacagagaaccctcagatctgacccagagcagactggaaacacaacttcagggccacaggccaccccgggcctcaccagactgctcccctggaccctgcaaaccttcatgcccagtcgctctgccccccaacacaaggaaccccagctccagccaaacctatgccaaatggaaacaggtcacgtgttttcttcttataaaaatatacacttggggccgggcgcggtggctcatgcctgtaatcccagcactttg

SEQ ID NO: 88684 - DNA, 669 bp, Homo sapiens
aaaattcatggcttagaaaagtttcttcacctcacttagaaaacaagataattatgagtagccagaattttagcttaaatatgacttaatattatggctattaggaggtagtaagagtaaattaaaacttacttttcaaaccagagggtgagatttgtggtatggcgaatcatttttaataaatttggagaatttatttctttatcttctttggtccacacactccctacaagttcagacggttgaactttcctatggaattgaaaatcagtgcaacttaacctataaaggatttgtattacttaaagatcttctaaaacttaataagaaaaagacaattaacccaaaagacagatgaacacatatatgaacaagtaattcagagaggaatagayccaaatagctacaaacacgaaaacacactttatcccttactcagggaaaataacataaaactacaatgaaatcccattttactcattagatgaacaaaagtctgataactcaaggccaggcgtggtggctcatgcctgtaatcccagcgctttgggaggccgaggcagatggatcacctgaggtcaggagttcgagaccagcctgaccatcatggaaaaaccccgtctctactaaaatacaaaattagccgggcatggtggcacctgcctgtaa

SEQ ID NO: 88685 - DNA, 372 bp, Homo sapiens
catttgagtttcaggtacaatgtggaaataaatccttttggatatagagtctgactgatatttatttttgccaaattcttcattgtgytgccaagatttccacaaggatgcaaatatctcaaacatcaattaagaatactggcaatgttttcattattaaatgttttgggttttttttgttttttttttttgagatggagtctcgctgtttcacccaggctggagtgcagtggcagcaatcttggctcactgcaacctccacctcccagattcaagagatccacctgcctcagcctcccaagtagctgggactacaggtgtgcaccatcacgcccagctaattttggtattttcagtagagacagggtttca

SEQ ID NO: 88686 - DNA, 1029 bp, Homo sapiens
gcctgtgaaataaagaaaactctcacacatattgcagataggcagatatatttctacaaccatctgaagagcaatttggcaatgtttattgaagttgaagacaggcctaggctagcaaatcccctctttggtatatagcctagagaaattcatgcacatatgtaaatgtaaacatgtataaaaatacttactgtagcattgcttataatagcaaaagcttaggcataacccaaatgtccatcaacattaacaggaataaataaattacattcagaatggaatactacccagcatttaaaatgacttgactatggacaaatggacaaatctcaaaaacaaaatgctgacaaaaatagcaagtttcaaagtaaagcaactctaccaactatttatgaatagacacaattagtaaaaacaatacaatgagcaggccaggcacaatggctcacgcctgtaatcccagcactttgggaggccgaggcaggtggatcaccaggtcaggagatcgagaccatcccggctaacatggtgaaaccccgtctctactaaaaatacaaaaaattagccaggcatggtggtgggcacctgtaatcccagctactcaggaggctgaggcaggagaatggcattaactcaggaggcggaggttgcaatgaacaaagattgtaccactgcactccagcctgggcaacagtgtgagactcagtctcaaaaatataaatacataaataaaaataataataatacaatgatcatggaaagtataaacacaaaattcaaaatagtaatcatctcagtgggaaggtggaaggggagaaaagaaaatgggtaagggaagaataaaataggacaatgctgtgctgttayagtagtgcacatctgcacagagcagggggcactgttgatatagattttaatacaaatggcatcatctagatttttgcagcactatatcaggaggtttaatgttatctaaaattatcatttcttaggcataattttattgtttgtatgtttgaaatcttacat

SEQ ID NO: 88687 - DNA, 722 bp, Homo sapiens
cctgtccctcagtatattccatcctccctgtgctatagagagcagaggagagaagacctagtccctgccctgagtcgaggggggccygctggattttgatgtctgtgtaggagtttgctaggcaccccagggcaaggatgtgccccaggtggccgggtcatggggagaagcagagggtgttggggaggtggaggcagggtgggctggctctgtccttctccctgccacaggctctggtttggggtgaggaggaagaagtttgttgtccacaaatatgaccccgtcatttcccagctcagggactgcctatacagacaacatccgaagaccccagtatgatttctgggctgcgttggttaggggagcgcactgggctgaggccagctgggatgaggacccacagggtagggacggggtagacagggccagccctggacagccccgcccctggtggccccaggatgaccacagttggatgcttgagttctggggtgtcccctaaagcaaaagcctcggtgttgccgtcatagctcaaagcaggtttggggcaactttgtgatactcctcatggtacgcccacctcacttccaccactggtgacgtcgagagccaggtaacgacgccccatccaagggccgtgagagggagtggtctgaaagcaccaacaccgggggctggcacaaggtctcactcattcattcctgcattcattcattgaacaa

SEQ ID NO: 88688 - DNA, 722 bp, Homo sapiens
cctgtccctcagtatattccatcctccctgtgctatagagagcagaggagagaagacctagtccctgccctgagtcgaggggggcctgctggattttgatgtctgtgtaggagtttgctaggcaccccagggcaaggatgtgccccaggtggccgggtcatggggagaagcagagggtgttggggaggtggaggcagggtgggctggctctgtccttctccctgccacaggctctggtttggggtgaggaggaagaagtttgttgtccacaaatatgaccccgtcatttcccagctcagggactgcctatacagacaacatccgaagaccccagtatgatttctgggctgcgttggttaggggagcgcactgggctgaggccagctgggaygaggacccacagggtagggacggggtagacagggccagccctggacagccccgcccctggtggccccaggatgaccacagttggatgcttgagttctggggtgtcccctaaagcaaaagcctcggtgttgccgtcatagctcaaagcaggtttggggcaactttgtgatactcctcatggtacgcccacctcacttccaccactggtgacgtcgagagccaggtaacgacgccccatccaagggccgtgagagggagtggtctgaaagcaccaacaccgggggctggcacaaggtctcactcattcattcctgcattcattcattgaacaa

SEQ ID NO: 88689 - DNA, 1387 bp, Homo sapiens
ataataggtaggtaatacattaaaaacatcctttaatcaaaagtctatttcaaagttttacaaccacaagtcaaatttattttctgagggaattaatcttaatttatataatcaaaaacaatagaygcaggaggaaaacatgaaagcaaattctgaggaaatatttgtttcatagattcaggaaaacatttttcttcagatatgactgaatagtaataatttttgtcttacagttctttcacttgctttacttcagcatttacattagcattaatataattttatctacgatatattatttcaattattttatatacatcttcacttctaatttttctaaatatacttattgtattgcttcatttttttcattttcttctcatcatattaaccaacttaaattataatataaataattttgatagagagaataggaacattatccaatatgaacaccaattttgatgaaattcctgagaattaaatcttccaaaaactttatacatttaaatcagaatttttacacttctaaaaatagtatcttaaaatatattcaaataagcatgtaatcttaaaattattagttttctttagacaatagggtatggcgactatatttagcaacaatatattatatattttaaagttgctagaagagaagacttgaatttttcacaaatacacaaatgataaacactcaaagtgatggatgcctcaaataccctgactgatcattacacgtctatgcatgtaacaaaataccacatgcaccccataaataagtaaaatattatgtaccaataaaattagttttctcctaattttatttatttaattttatattccttcaattttttttgtaattgctatattggttagggtatacatagaagaaatgatatgattttacctattgaggaaaatattttgtgtgattttttaaaattccaaatgaagcttatttaaattgtctgtgccttggtgtgcttttttccttatattagtctaggaaatctcaattcaactgaaacaccttctttctaacttattttatcttatctaacttatctagcttactttctctttctaacttactttatcctagtgctcttgaatctattaatatgtaactatttccttactgagagtcagttaaacaagacttctttataacctctttgtctctttgcttccattcttttagattattgttaaattactgggtcccaggtgcaaggcttattctttccaaacagctgtgattagtggaatactattagtatctatattattcatatgtgatttaatcatagaaattccagttttacctcactagaattgttagatgaaatttctacattccctatcattttacttgtaacaattt

SEQ ID NO: 88690 - DNA, 1387 bp, Homo sapiens
ataataggtaggtaatacattaaaaacatcctttaatcaaaagtctatttcaaagttttacaaccacaagtcaaatttattttctgagggaattaatcttaatttatataatcaaaaacaatagatgcaggaggaaaacatgaaagcaaattctgaggaaatatttgtttcatagattcaggaaaacatttttcttcagatatgactgaatagtaataatttttgtcttacagttctttcacttgctttacttcagcatttacattagcattaatataattttatctacgatatattatttcaattattttatatacatcttcacttctaatttttctaaatatacttattgtattgcttcatttttttcattttcttctcatcatattaaccaacttaaattataatataaataattttgatagagagaataggaacattatccaatatgaacaccaattttgatgaaattcctgagaattaaatcttccaaaaactttatacatttaaatcagaatttttacacttctaaaaatagtatcttaaaatatattcaaataagcatgtaatcttaaaattattagttttctttagacaatagggtatggcgactatatttagcaacaatatattatatattttaaagttgctagaagagaagacttgaatttttcacaaatayacaaatgataaacactcaaagtgatggatgcctcaaataccctgactgatcattacacgtctatgcatgtaacaaaataccacatgcaccccataaataagtaaaatattatgtaccaataaaattagttttctcctaattttatttatttaattttatattccttcaattttttttgtaattgctatattggttagggtatacatagaagaaatgatatgattttacctattgaggaaaatattttgtgtgattttttaaaattccaaatgaagcttatttaaattgtctgtgccttggtgtgcttttttccttatattagtctaggaaatctcaattcaactgaaacaccttctttctaacttattttatcttatctaacttatctagcttactttctctttctaacttactttatcctagtgctcttgaatctattaatatgtaactatttccttactgagagtcagttaaacaagacttctttataacctctttgtctctttgcttccattcttttagattattgttaaattactgggtcccaggtgcaaggcttattctttccaaacagctgtgattagtggaatactattagtatctatattattcatatgtgatttaatcatagaaattccagttttacctcactagaattgttagatgaaatttctacattccctatcattttacttgtaacaattt

SEQ ID NO: 88691 - DNA, 586 bp, Homo sapiens
gttgcraccgcagggaggaactgctgctgccagggtgaagaaacactgctatagtggaagctgcgggagcgagagaatgtaagcaagcctagaggaagaaaacaggaaggaggaagtcacttcctcccccagcctcagtctctcagtaccactttatcctggcagagtagaaagtggtttttcagatgctagtcctagcatcacaaagcaaaggtgaagttagagtggagagagaatagcttcataaatagcctactttttcactcctctaactccattcatttttacctctaatttttccttcttactttctatcatttcttttttcttctttttgaggtttttttttttcttagacggaatcttgctctgtcgcccaggctggagtgcaatggcgcagtctaggctcactgctacctcttcctactgggttcaagtgattctcctgcctcagcctcctgagtagctgggactacaggtacgtgccaccgcacctggctaattatttttagtagagatggggtttcaccgtgttggccaggctggtcccaagctcctgacctcatgatctgcccgcctcggcctc

SEQ ID NO: 88692 - DNA, 586 bp, Homo sapiens
gttgcaaccgcagggaggaactgctgctgccagggtgaagaaacactgctatagtggaagctgcgggagcgagagaatgtaagcaagcctagaggaagaaaacaggaaggaggaagtcacttcctcccccagcctcagtctctcagtaccactttatcctggcagagtagaaagtggtttttcagatgctagtcctagcatcacaaagcaaaggtgaagttagagtggagagagaatagcttcataaatagcctactttttcactcctctaactccattcatttttacctctaatttttccttcttactttctatcatttcttttttcttctttttgaggtttttttttttcttagacggaatcttgctctgtcgcccaggctggagtgcaatggcgcagtctaggctcactgctacctcttcctactgggttcaagtgattctcctgcctcagcctcctgagtagctgggactacaggtacgtgccaccgcacctggctaattatttttagtagagatgkggtttcaccgtgttggccaggctggtcccaagctcctgacctcatgatctgcccgcctcggcctc

SEQ ID NO: 88693 - DNA, 1307 bp, Homo sapiens
aaaaacatttaaaaaaattaaagccatattagaaacatttatagaatgtatgtgatgggaaagacagttactttggaaaaatcaaactgaacaaaatggaagtagcaaagatagtcacacacacacacacacacacacgcccttaaatatgtaggatgaaattatccaacacacatatgcatccatatgcaattcctttgtcacacgatgcctttggwtgcccttaatatcaatggcaatcacatgaaaaaaaataactaccatgtgtatatgcttgcagaaatttgcatgtccaattgcataaatttactgagaagaagataggtcttcacttgctatgtgtgtgccacatacataaggaagatgggcttggtcactttttgctctcttacagaataaatttcttatttaattaatataattttatgaatagtggatgtgttaggagtaattgtgatgggctccagctgtgtgtgaagcaaagacaggcattgctatttaaatcaacaaaagtatgcttaaattcatgccaatctacacaaagaatagttggtggccacaaaaagacttcctagtctcaatcacagtatcattgcgaagggcatagcaaaaagatttttttaaatgaatttgatcaaatgatggacagtaagtgcattttttttagtgtgacttcataaggaagtaagtagtgatcaaaacatttcttttattatgtatcagccaggatccagtcaggaaacagaaaccagaccagtaatttgagcagggaaaatccaatgtaaagaattgttaactggtaattaactggtaaacaaggataaattgctaagaagcatgaatggaactctgaagaattcagcagtaacatataaagggagcagccactaactctagggctgtcatagagaaccaaagaaggaataaactctccctctccaccgaggctgagattaagaacccattggtgtgggtctggtcatagaccaccggatgacaaggaagtttgctgaggtgcagcaggctaataatggcaagcaggaaactgcctgctgaattctagcaaaatctcactgggaagccactcactggcagctgaggagccagtagaaagtactgaaactaagaagagaatttccttcagtgtttccagcactttctactgacaagacctaacagtggtgtcagctgacagaggacaaaggttttcagaatccagctccaggatcacaaaagagggcaaagaagggtatatttggtgcagaaaatcagtaagtttaaggaggattttcccctcgctacgtttt

SEQ ID NO: 88694 - DNA, 584 bp, Homo sapiens
atggctcagttggaatattattttttctgtgacacttcctttattcctctgatcatatataaatattgttctactctcagcatctccatatttacttagtagtatgtagatttcaagccactctagaatttttgattatttatttaggtgtatttgttatctcctttacttgattttatgctaggtgggagagaggcttatttctaaatcctgttggtatacaacataggacctaacaaagatttattcagtgacttaaattttgcttctaaaaatgtaataattccactagttttgagttttaaaaaatgatgaaaakttacttgtaactatagggaaaatttctgtttcctttaagataaaattgacattttgatgttttgggcattgtgttcagttgtatgcagaattaatctcccaatatcaaggtctttcattcaaattattttctttagcaaaaaggccatttggcaagaaatgttcttttgaaccctatagctcttgaattggtgccatcgtgttaaaatccctaacactgttttgtaccatttgaattgggatgtaaaaagaaagctattattaac

SEQ ID NO: 88695 - DNA, 647 bp, Homo sapiens
acacttggcgagagcttgaggagaggtatgaaggactaggacctcccttaccagccactgggaaggagcagagagcacagggaagaacatgtgtaaactaactcagtaccttaggtcttgttcagtccgaaaacactgaccaatagatggcagcctttccccttcccaccagccagaaaaacccacctgtcccctcatgcaggaggccctggagaaacaggcaggagsctcttcagtattttagggaaggttaatggctctaaaatgagttgataacaaaatagggggagaacgtgcatggttatccttgctgaagacatctctgttaagaagaaaacaaaagtgctttcatctttactattttgtatacaagctaagtttttaagcttgaaatgcaattttatgactgagatactgttatattttgaaatgttgtgaacctataacttttgctagtttgccaagtaaccatatattttaaagtaagttctttaggagaaagtgtttaacagaaaagtagtcatctgtcttggagccagagcagggaagtgataagattagcatgaggagttttgggcaagaagcatgaataggaaagaaaaataaaagttaggaaacaaaagaaattactaccctaagaaaaaaga

SEQ ID NO: 88696 - DNA, 881 bp, Homo sapiens
tctaatatatgagacaaatataagccaaaaatacatgtcaatgactatgagaactatgtgatatgcattgattaaaacaaattttgaaaatacctgatttctagtttccaaagtggaacaccagaaatccaatgtgatatgatcacccttgcttagcagttaagggcatgcttttgaatcagatgagcttgagtgttgcagtacaattgatacactgttttaccttaggcaagttactttattgctgtaatcctcacttttctcacttagaaagtgggaatgataattttatttgtctcaaaagactaatgtgataaatgagatatttttgtagcgtttagcatcatgccagcacatatgtggttaaaatatgttaacaatcatttgtgagtwattacatgtttctatgttaatgaatctcactgtagggaatgatgaatgccagagaatactcctggctctaggaaagcaggtaaaatactggagatttttttttctcctttctctttaattctttgatttatataaccatgaagtatcaaaagagtaatgttaatcggtatagaagactgaaaagttaaatattattatgttaaaatggctttgtgcagtctaagatctaattttgttgaagaaatgaattcatttactacaaaacactatctcttttactgcaaatgatttgtatgtaaattgccttgctaggagattctagaattgtacaccaatgcctttctccctacctttcaattaagcttttatgtatagatcagaactcaatcacttggtcatgagtagagcatgctaataacttattctggcatggaaatttaaaaacatttatcaaacatctatacaagagatatttcctcccaactttt

SEQ ID NO: 88697 - DNA, 741 bp, Homo sapiens
aaaattagctgggtgtgatggtgcatgcctgtggtcccagctacttgggaggctgaggtggcaggattacttgagaccgggaggtcaaggctgcagtgagctgtgattgtgccactgtactccagcctgggtgacagtgagaccctgtctcaaaaaaaaaaaaaaaaaagtccttmctttttaagcctgaataatattccattgtatagatgtatcgcacttgtttacccatggacatcatttgggttgtctccacaagcatgtattccttttttttttttttttttttttgagacagtgtctcactctgtcactcaggctggagtgcagtgatgcaatctcggctcactgcaatctctgcctctcggcttcaagcaactctcctgcctcagactccctagtagctgggattacaggcatctgccaccatgcctggctaatttttgtatttttagtggagatgaggttttgccacgttggccaggctggtctcaaactcctgggcaatccacccgcctcaccctcccaaagtgctgggattacagatgtgagccactgcgcctggcaagaatgtattcttatatgaaagaatatcagtgaatcttgttgattctcactcccaaaaattcattggatggttttagttcctgattgacacagaagagcccagcaggcaggccctctctccttccatgtctataatcagatggcctcttaagccaggcccccctctcacattct

SEQ ID NO: 88698 - DNA, 741 bp, Homo sapiens
aaaattagctgggtgtgatggtgcatgcctgtggtcccagctacttgggaggctgaggtggcaggattacttgagaccgggaggtcaaggctgcagtgagctgtgattgtgccactgtactccagcctgggtgacagtgagaccctgtctcaaaaaaaaaaaaaaaaaagtccttactttttaagcctgaataatattccattgtatagatgtatcgcacttgtttacccatggacatcatttgggttgtctccacaagmatgtattccttttttttttttttttttttttgagacagtgtctcactctgtcactcaggctggagtgcagtgatgcaatctcggctcactgcaatctctgcctctcggcttcaagcaactctcctgcctcagactccctagtagctgggattacaggcatctgccaccatgcctggctaatttttgtatttttagtggagatgaggttttgccacgttggccaggctggtctcaaactcctgggcaatccacccgcctcaccctcccaaagtgctgggattacagatgtgagccactgcgcctggcaagaatgtattcttatatgaaagaatatcagtgaatcttgttgattctcactcccaaaaattcattggatggttttagttcctgattgacacagaagagcccagcaggcaggccctctctccttccatgtctataatcagatggcctcttaagccaggcccccctctcacattct

SEQ ID NO: 88699 - DNA, 741 bp, Homo sapiens
aaaattagctgggtgtgatggtgcatgcctgtggtcccagctacttgggaggctgaggtggcaggattacttgagaccgggaggtcaaggctgcagtgagctgtgattgtgccactgtactccagcctgggtgacagtgagaccctgtctcaaaaaaaaaaaaaaaaaagtccttactttttaagcctgaataatattccattgtatagatgtatcgcacttgtttacccatggacatcatttgggttgtctccacaagcatgtattccttttttttttttttttttttttgagacagtgtctcactctgtcactcaggctggagtgcagtgatgcaatctcggctcactgcaatctctgcctctyggcttcaagcaactctcctgcctcagactccctagtagctgggattacaggcatctgccaccatgcctggctaatttttgtatttttagtggagatgaggttttgccacgttggccaggctggtctcaaactcctgggcaatccacccgcctcaccctcccaaagtgctgggattacagatgtgagccactgcgcctggcaagaatgtattcttatatgaaagaatatcagtgaatcttgttgattctcactcccaaaaattcattggatggttttagttcctgattgacacagaagagcccagcaggcaggccctctctccttccatgtctataatcagatggcctcttaagccaggcccccctctcacattct

SEQ ID NO: 88700 - DNA, 741 bp, Homo sapiens
aaaattagctgggtgtgatggtgcatgcctgtggtcccagctacttgggaggctgaggtggcaggattacttgagaccgggaggtcaaggctgcagtgagctgtgattgtgccactgtactccagcctgggtgacagtgagaccctgtctcaaaaaaaaaaaaaaaaaagtccttactttttaagcctgaataatattccattgtatagatgtatcgcacttgtttacccatggacatcatttgggttgtctccacaagcatgtattccttttttttttttttttttttttgagacagtgtctcactctgtcactcaggctggagtgcagtgatgcaatctcggctcactgcaatctctgcctctcggcttcaagcaactctcctgcctcagactccctagtagctgggattacaggcatctgccaccatgcctggctaatttttgtatttttagtggagatgaggttttgccacgttggccaggctggtctcaaactcctgggcaatccaccygcctcaccctcccaaagtgctgggattacagatgtgagccactgcgcctggcaagaatgtattcttatatgaaagaatatcagtgaatcttgttgattctcactcccaaaaattcattggatggttttagttcctgattgacacagaagagcccagcaggcaggccctctctccttccatgtctataatcagatggcctcttaagccaggcccccctctcacattct

SEQ ID NO: 88701 - DNA, 797 bp, Homo sapiens
gatcctggttctgattttttattttttattttttggtcacccttttcttttatgctgagccacctttcaggaactccagtgcccttttctgctccttggcctgagtcaagaccttgcccaggccatgaaatatatttttacagtctgacaactcaatggggggacttctgcttctgggaagatactttcccctattcttcccactgagtgcagctcaaaaccatggactttatatatacagtaaacataagaaggctctgaaaggtagaaagaagaaggcagacgggccagggaccttgggccccaagtgtcataggccgaattgtgtccctccaaaattcatatgctaacattttcatccccagtgattgcatttgaggataaagtctttaaagaggtaaggaaaatgaggtcatttagagtgggccctgtcrtgccggacccctactgacttcagtagagttggtgccatgtttgagaggctgaagaagagacctggagccagtgcatgagacatagggtttattgaggggacttacatacagggtggcccagtggtgatgggctgcacaggaaaactgcaaccacctgtcaaaagcatgtggtttacatagcattttcacttagcaccctcccctggcaacctccatctggcaaccttcattcaacccatgatgaagcctgcattccatgggatgggtcaagggttccaatgctcctcatagataaggaatgaatctccaggttggccactccaagttattgctgtcaggtacatctgccatataggccctaat

SEQ ID NO: 88702 - DNA, 1409 bp, Homo sapiens
tttcaattcatacacaaaagaaagcaaggctggtgagtacggaaggtgtctcactcagcacttcttgtccctgcccctggccacacaggccagccacttggattcctcctcaaggtggtctgcttcagctacaaggggcagggagcatttgaaggatggtgcattyaaagaagggggagctaatgatgggatggggacatggacatataccactggcctctctgggaaccaaatggctccctctgagtgacctaccttaagaagctctggtgtgctaagcagaccccagctgggccaccatggtctacagatacactcagtaagggaagcaagtgagagagaggaggggatccaggcaagggtaactaggatgtggaagggacttgaaatgtatctgtgttttgtttccaggatatcttatcatgagttcttccagaagcaggtactgagacaaagaattgagggcaggtagttcatttggacctaatcccaggaagcaccagtagggacatggggaagtgagacagggaaagagtgcagggtcaaggaagttataccactgtgcccaagtggggctcagtcctactagggaactgtgggagccagtgtagaatacacaccttgaagttaccctgcccaaggggttgggtttaagagtttaagaaagaggaaagaaagatgaaatgcagctcaacattaaatcggccagaagcccctctcaggtttatttctctaagataaacctgtctttgactgttgagcctcatttcctgtttctttcctctttctttaactcttacactggggagctgtgatttttacacatcagttattggctgagggttgctcccaagacctgcttaattcaccaggacttctggcctgccaagcgtggagacagaaggccttccttacctgcagaaaatccttagtcaaagaaatcaaatgcagggcagctggaagttggctggagcacaccgaggtggtaagccctgacggatgtggagtgggcactgggtacttactgtctgctacaaaggatgaagccaacatcaattacacatgctctcgttctgtgacacacacacacgcctcttgcacacctcttacactggcttcatttttcctgactcacactgctccctctcaacacaacacctttgcatatgccattctggatgtctgagccactcttctactctttctgttcccccttccatgagttaagttctacttattcttcagatcttggctcaaatgccccttcctcttgccccctcccaccccagggcaagatcaggtcctcctgttgcacattgtcccagctccctggcctgtaagtgtgtcattataggtctttaagtttaggtgattaatgctgtctcctccatcagactgtgaggaaggga

SEQ ID NO: 88703 - DNA, 1383 bp, Homo sapiens
ggtccatttattaatctgtatctttttaaagcattttatgagcatctgttaaattgaaaatatttagctttatgattatattaaggcttgaaaattgtccagtcctaaagtgtattttccttttttagttttttttagttagtatagacactgacttttcattctccccttgcttccgcatgtccctatgagatcaggggttttgttgtgccagtagargctcccttatcaccttttgtgtagaggagcctctggggagaaagcaatgccctgaaaatgctctgtggtacaatttcaggtttaagaagctcgctcccatttggagtttcccgtggatggccgaactgctccaagaacattcctccagttataggcattttgtcgtttttccttttgggaaatactttgtgtgtacctttattacgggttttgatagtggagctgagaggccccgagtattgggattggagccacaatttcttctcttctttgtatcttacccagtgtcttactcagcagctcccgccgtgctgtgacaccccagaatgtgtcatttcgaaacgtcacagctgccactaggtcatatgggagcgtggagctggctgggggagaggtgcaggtcagtgatggtttttttttcccacatgggatctttgaagaaaattttaaaatggcactcttattttcaatccaaatattcatatattgtattttccagaaacataatgagggaatgaaattgtggtttaagaggctgtgcttctcaagtgtaggtcctgtggctttagtagcaaggggtaggcctcctggcaggatgagggggcttggcgggtgtgttaaatattggtggggtgtgggtcagcttcccctttgggcttggctttctcaacctccatactatgaagcagtcctttgacttaaattcagtgtggcaggtcacctttaaaagaggggccttcgtaaactgcttcgtgcacgataaccctttatgactcttaattgggggtagccgagcagtgggtgattttgatataccatatgtcctgtagcacaacagggcaagatgatggagatttccaggagtcctctacttagcaagaaggaaaataggtttaataatgtttacattttgatcgttgtttcttagatgtgttgctagaggaaacgcttatagttttgtttgttttgaaaatgaaattcctgtggaaaggtcattgcaatgccagcccctgtcatttctagcccacttatcccagagctcatctgcagtgtgtcaggtctggcttacttctctaaccaaaaaaggcaaagaatgtgtaagccctgctctcttcagcaaattgtctgggtgctccgtgatgggtggagttcacggtgtcagct

SEQ ID NO: 88704 - DNA, 924 bp, Homo sapiens
cattagacaaaggcagggagatctttctaaccactcacggaggctgcttcactaatagtaatctgccacttccagtccagctagaacttcttcctgcccactctccacattggacacattcatactcccactcatttctccatgttgtttgtrcactgtaatgtatcctcctgaatctttgttgcattttggcaaactcctattcattttccaacaagaggttcaaatgtcaccaatccatgcaactatcactaattctccccctcaggtatttcacattgatttatgtacaaactcctatttcactagcactgttggaccaccgtgtgtacacctaccagtctcttccattggcaatgggacctcagagtcagggatcatgttgttcttaatactggatcttcagagcctaagtacagatcttggtattcagtaagactcagtagttgctgaatagttgactctgtatctccagactaggcgtggggctgagtacacactaactgtggttcctaggcttgagggtatagacttaggaaatatgcagattgaatcaccagggaattatgtgaaaataaccctgttgctcctaccatgtgtttctgatcttggtgaattacaaaagtggaggatcaccatcactttttttttttttttttgtggtaatcgcagggttgggcctggttagtacttgaatgggaaaccatcactttcttgatctctcattgcttaaataaatgatcaatttatcaatgtccttaattgtgatctaatctgccctctccccactagacttgtcttagtctaggtttcacatttctcatcagacacagatacctggagaaagcatcaaacatgaaagatagagatcaaaacaaacaagcagaacaaagcaatttggagggacttgttgacaactaaaaa

SEQ ID NO: 88705 - DNA, 615 bp, Homo sapiens
ctgtctgtctcagaccaatcacagtgttcagggagatgggatcaccgactgacttggtttgacccacgtgcccatttctggtactgacartgaggtcaactccattcaaactaaatggactgaaaatatggaggggtgttttgccaaaagaaatttgagatattgctgccaaactaagaggtatgggaagctgtgtggctctaaaccagcgtatgttcactataatcatgtggattttgtaattgatgatcacagttggctgagcagatgtagaaactcaggaagagaagcattagccatcctgctgctggtcctctccaggtagactgcagaatccagcggccttcagagtcaggcatgcacatgtacagacctccctggctcttttgagggacacaactttgattcaattcaacatgtatttattaagcaattattacatgccaggcactgcacatgtccctgattataaatcatgtgcactttattaaaagaaacaatagagtccatggtgagcccctggaatttttagaacagttttattgaggtttcacctccataccataaaactcgcccattttaagtattaaattcaataattttaatagatttata

SEQ ID NO: 88706 - DNA, 615 bp, Homo sapiens
ctgtctgtctcagaccaatcacagtgttcagggagatgggatcaccgactgacttggtttgacccacgtgcccatttctggtactgacagtgaggtcaactccattcaaactaaatggactgaaaatatggaggggtgttttgccaaaagaaatttgagatattgctgccaaactaagaggtatgggaagctgtgtggctctaaaccagcgtatgttcactrtaatcatgtggattttgtaattgatgatcacagttggctgagcagatgtagaaactcaggaagagaagcattagccatcctgctgctggtcctctccaggtagactgcagaatccagcggccttcagagtcaggcatgcacatgtacagacctccctggctcttttgagggacacaactttgattcaattcaacatgtatttattaagcaattattacatgccaggcactgcacatgtccctgattataaatcatgtgcactttattaaaagaaacaatagagtccatggtgagcccctggaatttttagaacagttttattgaggtttcacctccataccataaaactcgcccattttaagtattaaattcaataattttaatagatttata

SEQ ID NO: 88707 - DNA, 615 bp, Homo sapiens
ctgtctgtctcagaccaatcacagtgttcagggagatgggatcaccgactgacttggtttgacccacgtgcccatttctggtactgacagtgaggtcaactccattcaaactaaatggactgaaaatatggaggggtgttttgccaaaagaaatttgagatattgctgccaaactaagaggtatgggaagctgtgtggctctaaaccagcgtatgttcactataatcatgtggattttgtaattgatgatcacagttggctgagcagatgtagaaactcaggaagagaagcattagccatcctgctgctggtcctctccaggtagactgcagaatccagcrgccttcagagtcaggcatgcacatgtacagacctccctggctcttttgagggacacaactttgattcaattcaacatgtatttattaagcaattattacatgccaggcactgcacatgtccctgattataaatcatgtgcactttattaaaagaaacaatagagtccatggtgagcccctggaatttttagaacagttttattgaggtttcacctccataccataaaactcgcccattttaagtattaaattcaataattttaatagatttata

SEQ ID NO: 88708 - DNA, 615 bp, Homo sapiens
ctgtctgtctcagaccaatcacagtgttcagggagatgggatcaccgactgacttggtttgacccacgtgcccatttctggtactgacagtgaggtcaactccattcaaactaaatggactgaaaatatggaggggtgttttgccaaaagaaatttgagatattgctgccaaactaagaggtatgggaagctgtgtggctctaaaccagcgtatgttcactataatcatgtggattttgtaattgatgatcacagttggctgagcagatgtagaaactcaggaagagaagcattagccatcctgctgctggtcctctccaggtagactgcagaatccagcggccttcagagtcaggcatgcacatgtacagacctccctggctcttttgagggacacaactttgattcaattcaacatgtatttattaagcaattattacatgccaggcactgcacatgtccctgattataaatcatgtgcactttattaaaagaaacaatrgagtccatggtgagcccctggaatttttagaacagttttattgaggtttcacctccataccataaaactcgcccattttaagtattaaattcaataattttaatagatttata

SEQ ID NO: 88709 - DNA, 783 bp, Homo sapiens
gtgggtgtttaaaagtggggcatttgtaagaaaagaaaaaagagttggtataatttctgcagcccattggcaggctgtggaaaatttgtatgtaattcacatattcacatagtgaaattttaaatgttttgagtaaatttcttttttaaagaagaatgttggtaaatctttttctttcttttttgagaaaaatttgcccctaactataaattctcaatttatgagcttcactaacatgggatgcatccagtcgttcacagagtcaatagatcacaaatatttagcaagcaactattacctaaggttgctcttccaactccaggaacaatttgtttgtgtcacataattggaaartcttcagctgagggtctgatctctttctttgtggcctcctctctgccctccctcacacttgctttgtccaattgctgcttctgttgagaatcatgagcatttcccggggctcagtacctgctgcttcacacataccagaagaggcagaattgctcttagtagccctcctggaacaaaaggaggcatctttcccagagttcccaagagtcatctccacccgagttatgacacattaatacacaccacaaaaacaagtccacattcctcacactgagggacaggcctgtcctcctaaaaatgcaagaccaaaaatggagaaggaataaattcccagagaaaactcttgagtgttaggaaaaaaaggagattaagaaatggttgctctcaaggcaatcaatatgcactcacaaactcacgttatttgaggat

SEQ ID NO: 88710 - DNA, 783 bp, Homo sapiens
gtgggtgtttaaaagtggggcatttgtaagaaaagaaaaaagagttggtataatttctgcagcccattggcaggctgtggaaaatttgtatgtaattcacatattcacatagtgaaattttaaatgttttgagtaaatttcttttttaaagaagaatgttggtaaatctttttctttcttttttgagaaaaatttgcccctaactataaattctcaatttatgagcttcactaacatgggatgcatccagtcgttcacagagtcaatagatcacaaatatttagcaagcaactattacctaaggttgctcttccaactccaggaacaatttgtttgtgtcacataattggaaaatcttcagctgagggtctgatctctttctttgtggcctcctctctgccctccctcacacttgctttgtccaattgctgcttctgttgagaatcatgagcatttcccggggctcagtacctgctgcttcacacataccagaagaggcagaattgctcttagtagccctcctggaacaaaaggaggcatctttcccagagttcccaagagtcatctccacccgagttatgacacattaatrcacaccacaaaaacaagtccacattcctcacactgagggacaggcctgtcctcctaaaaatgcaagaccaaaaatggagaaggaataaattcccagagaaaactcttgagtgttaggaaaaaaaggagattaagaaatggttgctctcaaggcaatcaatatgcactcacaaactcacgttatttgaggat

SEQ ID NO: 88711 - DNA, 783 bp, Homo sapiens
gtgggtgtttaaaagtggggcatttgtaagaaaagaaaaaagagttggtataatttctgcagcccattggcaggctgtggaaaatttgtatgtaattcacatattcacatagtgaaattttaaatgttttgagtaaatttcttttttaaagaagaatgttggtaaatctttttctttcttttttgagaaaaatttgcccctaactataaattctcaatttatgagcttcactaacatgggatgcatccagtcgttcacagagtcaatagatcacaaatatttagcaagcaactattacctaaggttgctcttccaactccaggaacaatttgtttgtgtcacataattggaaaatcttcagctgagggtctgatctctttctttgtggcctcctctctgccctccctcacacttgctttgtccaattgctgcttctgttgagaatcatgagcatttcccggggctcagtacctgctgcttcacacataccagaagaggcagaattgctcttagtagccctcctggaacaaaaggaggcatctttcccagagttcccaagagtcatctccacccgagttatgacacattaatacacaccacaaaaacaagtccacattcctcacactgagggacaggcctgtcctcctaaaaatgcaagaccaaaaatggagaaggaataaattcccagagaaaactcttgagtgttaggaaaaaaaggagattaagaaatggttgctctcaaggcaatcaatatgcrctcacaaactcacgttatttgaggat

SEQ ID NO: 88712 - DNA, 566 bp, Homo sapiens
tgtaaaggagtttgacactgaagtcaaactgccttagttcaaacacggtttctatccattagctgtaatttttctttctgtgggtttctttacctgaaatgtgagtaaaataacaatacataacatcagccaggaaccagttaggaaaacagaagccatactaggtattacaattatggggactgaacatggggaattggtcatactcagggtccactagggcttgtggatgataattgtcaaagccctgacatacagtaaatgtattaaaaatataagttaygggtgcaaaatagttaatgacattatgccttacattgaggttttgtcatttctattgttggatgcttaaaaatgaattatttagaaagaaaaatggaataattcaattggaaattcaaatgactaataattgaaaaaaggaaaattgaggtgaaagagtggaaaacagttattcaactcactcattctttgcttccaaaagaacactagtgagaatttctacttaagagcaaagaaaaagaaaaactaattaatgctgtcagagtcagccattattttagtcc

SEQ ID NO: 88713 - DNA, 566 bp, Homo sapiens
tgtaaaggagtttgacactgaagtcaaactgccttagttcaaacacggtttctatccattagctgtaatttttctttctgtgggtttctttacctgaaatgtgagtaaaataacaatacataacatcagccaggaaccagttaggaaaacagaagccatactaggtattacaattatggggactgaacatggggaattggtcatactcagggtccactagggcttgtggatgataattgtcaaagccctgacatacagtaaatgtattaaaaatataagttacgggtgcaaaatagttaatgacattrtgccttacattgaggttttgtcatttctattgttggatgcttaaaaatgaattatttagaaagaaaaatggaataattcaattggaaattcaaatgactaataattgaaaaaaggaaaattgaggtgaaagagtggaaaacagttattcaactcactcattctttgcttccaaaagaacactagtgagaatttctacttaagagcaaagaaaaagaaaaactaattaatgctgtcagagtcagccattattttagtcc

SEQ ID NO: 88714 - DNA, 1159 bp, Homo sapiens
agtagtagatgacaacagaataagcaatgaccgatctgctttctttccctttgtggaagacagaaaaataggctaagsaaagaagtactagtgaagacaacacaggaaagaaatgagactcatggatacagcattccagagaaaataaagcaatggctttttaaaaggaaactgacgggtatgttatagggacagtaagaagaccagcatggctggaatagaataaaggagtagaaaggcagttggcaaaaataagccagacagaggggatgccaggaaatgggtggggaagagctgtcagccattgtaaggcttctgactttttctctgcaacaggaagttgttgctaagacctcacagactattccatctacttcacaatcacaaaagcaaagacatctctgagtgagagattgacagaaggaaaggacagggaataggatgaacaaaaatcaggaaaatgttgtcttgacagcttaattgttgctttgcaattttcctcccttatcttacttttacccagtgcaatttgataccaaagtttttcaagtgagtttcatcaattccttttatttctttatcacaatcaaatgaacctaggcaccaagaccacaggctgatcaaaataacagagaaagaatgtaggttttttaaaatatgaaaatgtggttccatttttggattcattcacttaggttaatcttgattatggttatttggtgagaaatcaaatatttttgaaggccagaagggaatgtctatttggataaaacatgttgaactaaatatggttcaccaaattattatatttacacattgtccacacaagaaaaatctgaaatctccagtttcggcgatcaactttttaacctttcaaggaaattttcctgtagaaagaagtaattgtatataatgaggtgtgattacgttaagtggaaggagatgtactatccttgccaactgtgctagcgagttgtttgcctggccttcccgaatgtgtcagcaagaacttctccaaaataagagaagaattccatccaaggccatttctcagataaaaagaaggcagaagagtattttatatcaaaggcaaatacggcaaaaaattactcttaaatctcggtcatttttcttccagattaaagaaaagccagggaac

SEQ ID NO: 88715 - DNA, 1159 bp, Homo sapiens
agtagtagatgacaacagaataagcaatgaccgatctgctttctttccctttgtggaagacagaaaaataggctaaggaaagaagtactagtgaagacaacacaggaaagaaatgagactcatggatacagcattccagagaaaataaagcaatggctttttaaaaggaaactgacgggtatgttatagggacagtaagaagaccagcatggctggaatagaataaaggagtagaaaggcagttggcaaaaataagccagacagaggggatgccaggaaatgggtggggaagagctgtcagccattgtaaggcttctgactttttctctgcaacaggaagttgttgctaagacctcacagactattccatctacttcacaatcacaaaagcaaagacatctctgagtgagagattgacagaaggaaaggacagggaataggatgaacaaaaatcaggaaaatgttgtcttgacarcttaattgttgctttgcaattttcctcccttatcttacttttacccagtgcaatttgataccaaagtttttcaagtgagtttcatcaattccttttatttctttatcacaatcaaatgaacctaggcaccaagaccacaggctgatcaaaataacagagaaagaatgtaggttttttaaaatatgaaaatgtggttccatttttggattcattcacttaggttaatcttgattatggttatttggtgagaaatcaaatatttttgaaggccagaagggaatgtctatttggataaaacatgttgaactaaatatggttcaccaaattattatatttacacattgtccacacaagaaaaatctgaaatctccagtttcggcgatcaactttttaacctttcaaggaaattttcctgtagaaagaagtaattgtatataatgaggtgtgattacgttaagtggaaggagatgtactatccttgccaactgtgctagcgagttgtttgcctggccttcccgaatgtgtcagcaagaacttctccaaaataagagaagaattccatccaaggccatttctcagataaaaagaaggcagaagagtattttatatcaaaggcaaatacggcaaaaaattactcttaaatctcggtcatttttcttccagattaaagaaaagccagggaac

SEQ ID NO: 88716 - DNA, 987 bp, Homo sapiens
atcatctttctctcaccagtctgtaggatttctttaaaaatatcaacactctttcagtcataygtattgctaatacttttctttaacccattttttttaacattttttgtggtgccatatgtgacatcatttttattgacaataaacattacaaaaaattcaaagaataacaagtaatttgacaaatatataaacaagttaccatatataccatcatccagaaacaatagtaatatgtggtgaatattattcaatacttacatctctccacacaaattcagaatggcaaaaagatagatacatgtatagagtttaatgaaaatgagcttctatcatacctgatgtttttgaacaaaaacattaagatacattcacttgattaaaaacagaaacaataaataaaatgaaaacaatttttaaaatacaactgtttctgcagtgcataaattattcattattaaaatataaaagtttaaagaaaccgttaagatagggatgccatttaaagacttatactataattttaccaatggattactttctaatatgaaaaataagataattgggatgcttcacattcctttcccatctaacaatttttgttatattagctgtaatttatgaaatatattttctgttttgtaaccagaattattccagtacataataggtactattttcaggagtaagaaaactcaatgtcataaggaaattatttctcccaaattaatacatggttcaaatgcaatttcagtcaaaattctaatgagattgattttttatcttgacaaactgtaaaagctatgtggcagcttaatacggaaaaaagtaaggtgtgatttcctactagacatcaagttataataattaaagacagtatagcaatgaagtatcacttaaacacagtaaagaactcaagcaggatttgtgttacaattgatatatgcaacaggtataaaccacactggaaaataaagagctgttgta

SEQ ID NO: 88717 - DNA, 987 bp, Homo sapiens
atcatctttctctcaccagtctgtaggatttctttaaaaatatcaacactctttcagtcatacgtattgctaatacttttctttaacccattttttttaacattttttgtggtgccatatgtgacatcatttttattgacaataaacattacaaaaaattcaaagaataacaagtaatttgacaaatatataaacaagttaccatatatrccatcatccagaaacaatagtaatatgtggtgaatattattcaatacttacatctctccacacaaattcagaatggcaaaaagatagatacatgtatagagtttaatgaaaatgagcttctatcatacctgatgtttttgaacaaaaacattaagatacattcacttgattaaaaacagaaacaataaataaaatgaaaacaatttttaaaatacaactgtttctgcagtgcataaattattcattattaaaatataaaagtttaaagaaaccgttaagatagggatgccatttaaagacttatactataattttaccaatggattactttctaatatgaaaaataagataattgggatgcttcacattcctttcccatctaacaatttttgttatattagctgtaatttatgaaatatattttctgttttgtaaccagaattattccagtacataataggtactattttcaggagtaagaaaactcaatgtcataaggaaattatttctcccaaattaatacatggttcaaatgcaatttcagtcaaaattctaatgagattgattttttatcttgacaaactgtaaaagctatgtggcagcttaatacggaaaaaagtaaggtgtgatttcctactagacatcaagttataataattaaagacagtatagcaatgaagtatcacttaaacacagtaaagaactcaagcaggatttgtgttacaattgatatatgcaacaggtataaaccacactggaaaataaagagctgttgta

SEQ ID NO: 88718 - DNA, 562 bp, Homo sapiens
ttccgaactatggaaggtaattgttgtttatgccaccaagctatggtaatttgttatagcagcctaaactaacatacagcacaattttttcgatacaagttctcattctctctcccaggctggattacaatggcaggaacatggctccttgcagcctcagcctcctggttgtaagcaatcttccctcctcagcckctactgcagcaggcacatgacaccatgaatagctattttttttttttttttttttttttttgtacagaaagggtctaaccatgtgggtcaggctggccttgaagtcctgagttcaaatgacataaaccagtgaacccagccaacacaacacactttgaaataaccaaaaagacaagggaaacgcaaaagaaagttagaaaaatgacaccaatccaaagcacagcaatacaaaaaaaaatagataaaattagactatatcaaaataaaaaaaacctgtgcaccaaaggacacaatcaacaatgttaaaaggcaactcagagtgggagaatttttttttttttttgagacagagtcttacttgtcgccc

SEQ ID NO: 88719 - DNA, 562 bp, Homo sapiens
ttccgaactatggaaggtaattgttgtttatgccaccaagctatggtaatttgttatagcagcctaaactaacatacagcacaattttttcgatacaagttctcattctctctcccaggctggattacaatggcaggaacatggctccttgcagcctcagcctcctggttgtaagcaatcttccctcctcagcctctactgcagcaggcacatgacaccatgaatagctattttttttttttttttttttttttttgkacagaaagggtctaaccatgtgggtcaggctggccttgaagtcctgagttcaaatgacataaaccagtgaacccagccaacacaacacactttgaaataaccaaaaagacaagggaaacgcaaaagaaagttagaaaaatgacaccaatccaaagcacagcaatacaaaaaaaaatagataaaattagactatatcaaaataaaaaaaacctgtgcaccaaaggacacaatcaacaatgttaaaaggcaactcagagtgggagaatttttttttttttttgagacagagtcttacttgtcgccc

SEQ ID NO: 88720 - DNA, 1004 bp, Homo sapiens
tccagcctaatttctatcaaaataggttattcacaaaatatagtaagaaattaccaggagcacagcagtgtatcctgtggctgagaactactatgcctagggttgccaaatatagcaaatacaaatacaacatgcctagttatacttgaattttagataaacacygaacaatatttcaacataaacataatgcaatatttggaacacatttatgcaaaaaattgtttgttgttcttctaaaatttgtttaactgggtatctggtattttacctggcaatcctaactgtactagataatgccccatacccaacacaataccaggatccaataggtattggttgaatggataaatgaatggatgaatagataaataaataaacaagtgtttgcttacaatctctacttctcttttttgggcacaatatttaggcaaatgtcagcatatgtcctattttatatcatctgcaacatcatcttctgcccttggaatcagagcttatcactgagggtcaagagggtcatttggcctgggctacacagtttcaaagggtttttattttagatttttcaaaattatctttagattacattacttatggggatggcattggggtataaaagtgaaagaaaatcactgagggccaagagggtcatttggcctgggctacacagtctcagagggtttttattttagatttttcaaaattatctttagattgcattacttatggggttggcattggggtatagaagtgaaagaaaatgtctatcaaacaactttaaaattaactgattaatagaccacaccaccagccttgcattagtttactactgccactctaacaatttaccacaaactctgtggcttaaaacaccacaagtgtattatcttacaagtctgaccatcagaagtttgaaaatgtgtcttagagggctaaatcaaggtgttggcagggctgcatcccttttggaggctctagaggaaaatccatcccttgccttt

SEQ ID NO: 88721 - DNA, 1165 bp, Homo sapiens
ttgaaatgatacttaatagccctctctattcccctgttctaaactagatctttcctctttatcttttccatcctcttccacagtgcatgactccctttcccctcatcaaacctgtcattaggtccagtcagttctacactcaaaatccttcatgggttgggcgaggtggctcatgcctataatcccagcactttgggaggccaagacgggcagagtgcttgagttcaagagttggagactagcctgggtatcatgggaaaaccccatgtctacacaaaatacaaaaattaattgggcatggtagtacgtgcctgtggtcccggctactcaggaggctggggtgggaggatcactcgagcccaggaggtcaaggttgcagtgagccaagatggccccactgcacgccagcctgggtgacagagccagaccctgtctcaaaatccttcatatccacccccattggcttccacctatttcagactaataatccaattctggattattgtatagccttttgatttttccactaccaccactttcatttcccacaaatcctccgtaaaggtgctagacagtcccagagaccctcaaaatagtgtgaatctcactatatgcactcactttctatcacttacatgatacagtcctgatccatcagtagctcatggaaggtcttctgacaggcctgctccactacaagtttcttcttgcattttcaggatccaggctattgcacttgttgaaccttctcagaaatgtcatgttatttcaygtatttgtttcagaacatgctggttgtctctgtccaggaggttggccttccccctaccccattgcgatctctcaccccatcctgactcctccccaccactccatcctcaccctatgtcctgatagaaatgtctgacttcacagtccttgcactgaaccaaaatgcagtgctcttttccaaaggcagctattctggctattccaagctatgtccagtgccgacttccctaacaggcacagtaggcacagtggctagggcccacaataattttaggagtccatgaaaatgtttaattttacttaaaatcagaagagaaaaataactgttatgttcatgtatatgcatgtatatggcatgcatatgtatacatctatgtatatgtgtgtatatttt

SEQ ID NO: 88722 - DNA, 1165 bp, Homo sapiens
ttgaaatgatacttaatagccctctctattcccctgttctaaactagatctttcctctttatcttttccatcctcttccacagtgcatgactccctttcccctcatcaaacctgtcattaggtccagtcagttctacactcaaaatccttcatgggttgggcgaggtggctcatgcctataatcccagcactttgggaggccaagacgggcagagtgcttgagttcaagagttggagactagcctgggtatcatgggaaaaccccatgtctacacaaaatacaaaaattaattgggcatggtagtacgtgcctgtggtcccggctactcaggaggctggggtgggaggatcactcgagcccaggaggtcaaggttgcagtgagccaagatggccccactgcacgccagcctgggtgacagagccagaccctgtctcaaaatccttcatatccacccccattggcttccacctatttcagactaataatccaattctggattattgtatagccttttgatttttccactaccaccactttcatttcccacaaatcctccgtaaaggtgctagacagtcccagagaccctcaaaatagtgtgaatctcactatatgcactcactttctatcacttacatgatacagtcctgatccatcagtagctcatggaaggtcttctgacaggcctgctccactacaagtttcttcttgcattttcaggatccaggctattgcacttgttgaaccttctcagaaatgtcatgttatttcacgtatttgtttcagaacatgctggttgtctctgtccaggaggttggccttccccctaccccattgcgatctctcaccccatcctgactcctccccaccactccatcctcaccctatgtcctgatagaaatgtctgacttcacagtccttgcactgaaccaaaatgcagtgctcttttccaaaggcagctattctggctattccaagctatgtccagtgccgacttccctaacaggcacagtaggcacrgtggctagggcccacaataattttaggagtccatgaaaatgtttaattttacttaaaatcagaagagaaaaataactgttatgttcatgtatatgcatgtatatggcatgcatatgtatacatctatgtatatgtgtgtatatttt

SEQ ID NO: 88723 - DNA, 1614 bp, Homo sapiens
ttttcagtttttaaccatataaactatattgccatgaacaactttgtggctgaattttagcatagtttttgattgtttccttaagataaattccaaaaagtaattacccttgagccttttacaactacatccaagtcctaaaaccacaattcagccaaatgacaccaagtctgaatcatcctgtctttgcagatcccagtaccaatgattcctgttgttataattaaagatatttcaataagctaacatttattgagcactttcttatgtgctaactactttttctttttttgaggcagagtctcactctgtggcccaggctggartgcagttgcacaatctcggctcactgcatcctctgcctcctggcttcaagcaattctcatgcctcagcctccctagtaactgggactacaggtgtgtgccaccatgcccagctgatctatattgccacaaagttgttcatggctatatagatttttgtatttttagtagagatgggattttgctatgttggccaggctggtctcaaactcctgagttcaggcaatcctcccacctcagcctcccaaagtgttaggattacaggcgtgagccactgccagctaacagcttttcacatacgttatttaaccctcatatcaaccctattttgtagatgagattataatttatatattagaaaactgaggtttgatggcattaaaaaatttgagatcacagaggtagggaacatttaattcaggggatcctcctgccttagcctctcgagtagctgggacgacaggccacaggccacagtgcctggctaatttttttaaatctcttttagagacagagtctcattttgttgcccaaacttgtctcgaactctgtggctcaagcgatcctcctgccttggcctcacaaaatgctggtatttcaggcgtgagccaccatgaccggcctgaatattagatttgaaaacacactctgttgaatatgatgatggacaattattccattttattgtatatccttggagttacagttctcttgactatgctctatacatttttgtgaatttacattttgaggtagaatgcagtaatatacccttttcttacgatagataaattaatgatgtttaagagctatcatgaccagtatcattttagcagtgcaatttttaggaactaaataataataataatacttgtattattattaccattctgatcttaatatcattgcatcaatttatttagcaccttctgtgttccagacacctctcatgcacatcacgtttcattctggaaacaaccatacatgatactactgtccccattttacagatgaagaaagtgataaaatgatttgcgcaaagtcacttagctagtaatgaggaaagccagatttcatcccagacatgctgacttgctatagtttaccaccatcccacctcccacaaaggaaaaaatcccatctggcctctacttccagactgacttctcacactgggaactaggagtttggagttgtggttccttttccttcttctccttctttctctttccctcctcctcttcctccacctcctcctcctccacctcttcctccccttttgtctctatt

SEQ ID NO: 88724 - DNA, 733 bp, Homo sapiens
aatctcgcttttatttcaatacgagtagaatttaaaaatatgacatctataataaaattgatactttttttttctttttttgagacggagtctcgctctgtcgcccaggctggagtgcagtggygcgatctcggctcactgcaagctccgccttccgggttcacgccattctcctgcctcagcctcccgagtagctgggactacaggcgccagccacctcgccccgctaattttttgtatttttagtagagatggggtttcaccatgttagccaggatggtctcgatctcctgacctcatgatcggcccgcctcgacctcccgatacttttttaaaatgtaagatctggtggaaatatgtgaaacctaatcagtaagaataaaaattcaacatctgagtcttgtgtaacaaactaaatattcaagtatgtattacataataaatgccagtttgcaaaaatatgaactcattcaaacttaaagacttaaatctggattgcactgacctgctttatgctgtgattcttactgtgctatctgcatttctcataagactaaacagatttttactttctcctcagaataattcttttgccaaaagggtcctagaatgcttgtgctgctataacagtggccaagccgaactcagaggtggaggtgggtgacaggaggaggtgagaaatttatggccttgagggtgcttaaaatggtcctaagcaatttcagagccccag

SEQ ID NO: 88725 - DNA, 1411 bp, Homo sapiens
cataaatattcatggattataaaactctagtgatgcctgagaccttagagaccatttagtctattgtatctcaacagggatctatggactagatatattagaatgatccctggaaattttcattctatggtactgggatgaggataaaaagctgtattttttataaaaataaaaacttcccaggtgattctgcacagtaagacttggaaacccctcccatttgataatttcttacttttgcggatgaattaacaggcctaggaaggagaataaatcttttctttatacagaatttcttgcttggactctcgatcacagcacagttgacttttgagcagttatttacaactccagcactatgtactaaaagagattgaagctgttcagtttggaagatctatgttagggaaacagcacctagggtaaatcctggagcagattgtgaagtcagtcccaaatgtcgtttgggcaaaagtgttttttgcttctattgctgcaatatgcataacttatgctgtgggacatattcaaacaggcagaaagttacaattagaaggaggcaataacatacattgctatcactgaatttagagaaataataattgaagtcatcattaaagtcaaagctggatgcattttggaagcgtaatcaggttctgaagggccccagtgcaaattattcacggctttggaggttgttctcagctacatactacaattaggaatgtagggtgtactttaatackcatgggtagttctggttctgtgacactaacctattttggaggctcatacgcctatatcaattgtctatgccagtacctcctcagatgtgtatctgtacattatttttcttaatgatactgaacacttttatatgtgaggcacaaccacaaagcattttacagtcagataagggagtaagacaacttgcataggattgaaataaaacattagtttacttagtagtatttgctcagaggcaagaattatcacattcagtttgcggaagataatgagaaacattgatggcatatgaggtgggccttggagaatggggtgagtggagacagacgagagagagagagaggaatgcaagaaaggagatagaaagaatgaatgaaagcattcattccaggcttccaggcacagggaactgcatgaataacgctacagatgaatgagagtacaaaatagatcaggataacccagagacttaaactttgcagacattatttgaaaggacattccaccctcttagtttccttaagaagctttcaactgaaagctcctgtcttctgcacattaataaagagtaatggttttcatagattggtggtaaacagagagctgtagttggacatcacctgtagaccaaatagggtactaacagaaacgtagaactctgaca

SEQ ID NO: 88726 - DNA, 1411 bp, Homo sapiens
cataaatattcatggattataaaactctagtgatgcctgagaccttagagaccatttagtctattgtatctcaacagggatctatggactagatatattagaatgatccctggaaattttcattctatggtactgggatgaggataaaaagctgtattttttataaaaataaaaacttcccaggtgattctgcacagtaagacttggaaacccctcccatttgataatttcttacttttgcggatgaattaacaggcctaggaaggagaataaatcttttctttatacagaatttcttgcttggactctcgatcacagcacagttgacttttgagcagttatttacaactccagcactatgtactaaaagagattgaagctgttcagtttggaagatctatgttagggaaacagcacctagggtaaatcctggagcagattgtgaagtcagtcccaaatgtcgtttgggcaaaagtgttttttgcttctattgctgcaatatgcataacttatgctgtgggacatattcaaacaggcagaaagttacaattagaaggaggcaataacatacattgctatcactgaatttagagaaataataattgaagtcatcattaaagtcaaagctggatgcattttggaagcgtaatcaggttctgaagggccccagtgcaaattattcacggctttggaggttgttctcagctacatactacaattaggaatgtagggtgtactttaatactcatgggtagttctggttctgtgacactaacctattttggaggctcatacgcctatatcaattgtctatgccagtacctcctcagatgtgtatctgtacattatttttcttaatgatactgaacacttttatatgtgaggcacaaccacaaagcattttacagtcagataagggagtaagacaacttgcataggattgaaataaaacatwagtttacttagtagtatttgctcagaggcaagaattatcacattcagtttgcggaagataatgagaaacattgatggcatatgaggtgggccttggagaatggggtgagtggagacagacgagagagagagagaggaatgcaagaaaggagatagaaagaatgaatgaaagcattcattccaggcttccaggcacagggaactgcatgaataacgctacagatgaatgagagtacaaaatagatcaggataacccagagacttaaactttgcagacattatttgaaaggacattccaccctcttagtttccttaagaagctttcaactgaaagctcctgtcttctgcacattaataaagagtaatggttttcatagattggtggtaaacagagagctgtagttggacatcacctgtagaccaaatagggtactaacagaaacgtagaactctgaca

SEQ ID NO: 88727 - DNA, 1411 bp, Homo sapiens
cataaatattcatggattataaaactctagtgatgcctgagaccttagagaccatttagtctattgtatctcaacagggatctatggactagatatattagaatgatccctggaaattttcattctatggtactgggatgaggataaaaagctgtattttttataaaaataaaaacttcccaggtgattctgcacagtaagacttggaaacccctcccatttgataatttcttacttttgcggatgaattaacaggcctaggaaggagaataaatcttttctttatacagaatttcttgcttggactctcgatcacagcacagttgacttttgagcagttatttacaactccagcactatgtactaaaagagattgaagctgttcagtttggaagatctatgttagggaaacagcacctagggtaaatcctggagcagattgtgaagtcagtcccaaatgtcgtttgggcaaaagtgttttttgcttctattgctgcaatatgcataacttatgctgtgggacatattcaaacaggcagaaagttacaattagaaggaggcaataacatacattgctatcactgaatttagagaaataataattgaagtcatcattaaagtcaaagctggatgcattttggaagcgtaatcaggttctgaagggccccagtgcaaattattcacggctttggaggttgttctcagctacatactacaattaggaatgtagggtgtactttaatactcatgggtagttctggttctgtgacactaacctattttggaggctcatacgcctatatcaattgtctatgccagtacctcctcagatgtgtatctgtacattatttttcttaatgatactgaacacttttatatgtgaggcacaaccacaaagcattttacagtcagataagggagtaagacaacttgcataggattgaaataaaacattagtttacttagtagtatttgctcagaggcaagaattatcacattcagtttgcggaagataatgagaaacattgatggcatatgaggtgggccttggagaatggggtgrgtggagacagacgagagagagagagaggaatgcaagaaaggagatagaaagaatgaatgaaagcattcattccaggcttccaggcacagggaactgcatgaataacgctacagatgaatgagagtacaaaatagatcaggataacccagagacttaaactttgcagacattatttgaaaggacattccaccctcttagtttccttaagaagctttcaactgaaagctcctgtcttctgcacattaataaagagtaatggttttcatagattggtggtaaacagagagctgtagttggacatcacctgtagaccaaatagggtactaacagaaacgtagaactctgaca

SEQ ID NO: 88728 - DNA, 638 bp, Homo sapiens
atatacttattattaaagcatattgttcaattatcttgttcaaataattggatttttaagtgtatttacttgactttttaggaaatgtttaaattgattctgtgaggtaggaaagtgactataggtttatctatatgtgtttctgatagtcaaaaaaagatgaagtaattgtcataattgtgacatagaatccattagaagtgaaataatatagttggtgcaaatactatgctagtgataaacatgagtggtgagaatgaaacagattcttcccaatttgaactttcatattctggtaggcaggctgtttacatgtgaggatatttttaacacttgattgaatttctccaaattttatataaaataatgagtatccaattatgatcagtagtaaataaaaagtggaatgtttgacttaacactcaactctgcagctgaaccattgtggagaaactaaggttcggaatgacagccacacaagttagagaagattttaggaaactggaattgattaccttgaaagaaataagactaatgaggtgattcagacatgtttcaaatgcagaaggtagtgatcatgtatcaatcagtattttttggtgaaaacagtagaaggcttgatcttcagctgcatycag

SEQ ID NO: 88729 - DNA, 2489 bp, Homo sapiens
tggtgatgtgacccatgctctcgtcagccccttgtcaaccttaggaccaaaattcaacccttgtggtgactgtggaggggcctcagaagctgcatctgagtgactgagtcctctgtgaaactactgttgtgcttcctgttatgtacctgtctaagkaaaatcagagtaaggtaagccaacaatgtcttgtgagtttgactaataatctgaacttaaacttactactgtggtcttgcaactggtctttcataatgctttgcttatgaaaataataatttctaggtcaaggctatcactaagcacacactttgtcttgctcccaaggaagaccaatacttggcttttactatttttgagtccttgaactgtttccttttattctatatatactacttgggccacaagcagtaatccaaggcaaactgtaccaatctatttcacactatgaccctgttgagctgagatcaccccatgagttttcacatagaaaaatgatcagcttgttaaaaaaaaaaacaaaaaacaaaaacagtggtctatgtaatagcagttttgacccaatggtaggagtctgtaacagtttctcttggagtgattcatatattacgaaatctattttcaaacatcatggtacatttccccacaacttcctttaaaaaaagatgggcatagacattacaagacaaaaattgttacataagcacattaccctttaaataatttaaaggaaacatgttggctgaaaataaggcagatttggagcatacaagaagccacaaaggtggcttgtatacagctgcaactttaagaccctgagaaataatcaaacttctatcgtacaatgactgaattttcaatttcatgtcttttaaaattattttttaaaaacaatttcaattttgttttagatttgggggggcaagtacagatttgttacatgggtgtactatgagatgctgaagtttggggtatgattgatcctgtcacccaagtaataagcatagtacccaacagtcagtttttcaatacttgtcccctccctcaattttatgtcttgaaagaaaaagaaaacatgcaccctgcaatttatgtaatttttataattgttacttataaaaatatatccaaatttaacttctacaaaataccattttaatttaattaccagctagtaggtctgccgatgctgatgaactagaagcagcctgagatgcaggttggggttcagaagcactacttccaaatgcatctatccgttatccattgtgcagcggaaaagtaagaaagtgtaaaaagtaagtacagtaagtaatttaagtattatgtagagaaatgcagagacatgacagtgtacagtgagcttgtcttttgtgggtgtgtgaaatgatcacatgaattgaattatgctctgaccggtttattctctcaaaaagagttctaaaatattaacaagtaatacctctttgtaagattaagggaattcttttttttttctaagaataaaatttttggactaaaccttgtcatctgtcaaaacagaagcaaggttttaaactttttacctaaaggtaataaaacagaatttttccatttagaattctattaaatgtttaaaaaattaataaacttaattcaaggagcagcaatatgatttgtacctacatgtcaaggtttagtgtttatctgacacaagtcttgagcccctaaatgtcagacactgcaacatctttgtattcctcatgtacgcatcatggaatgtccatgatgcttcaatgtacaggaggtactcaatgtgggttaagctttctaaggatagtatttaagctcaagagctaattcagtacatcttcctgccctcagataacacataaaggaagagggaaatatatttaaatcagcaacacattttccaatccttctaactctttgtaaggatagcaaaacattataaataaacctacagaataatgtacaacatctagacttatgctttcagttttaactggcttgttttcatttctaaattatctattaataggtcatgtttatttggcttttaagaacttagagatgttgatttagccaacagatcaggatcaccaaggaagaacagttgaaggaaattccagtcaggtaattctacattaggatgaagaacaaaaagttgaaaacaccaagtgaaaaattatgtgttttgttaggtcatgcactgaaagttatgatgaaatgatgaggatgaagatgatgatgacgaagaaatgaaaatgatcttaaaaacttaagtttacatttaagagacagaattttatatagcctaaagaaaaaatgatgaaatataataaaatagatttaaaaattattctgaagaaaaaaagattccttaagtgttgatggaggagaaatacgcacccccaaaaaggtctatgacacctgaagaatccacctttgctggcgaggcagtggttgcaggagatggtgctgcaaatgca

SEQ ID NO: 88730 - DNA, 2489 bp, Homo sapiens
tggtgatgtgacccatgctctcgtcagccccttgtcaaccttaggaccaaaattcaacccttgtggtgactgtggaggggcctcagaagctgcatctgagtgactgagtcctctgtgaaactactgttgtgcttcctgttatgtacctgtctaagtaaaatcagagtaaggtaagccaacaatgtcttgtgagtttgactaataatctgaacttaaacttactactgtggtcttgcaactggtctttcataatgctttgcttatgaaaataataatttctaggtcaaggctatcactaagcacacaytttgtcttgctcccaaggaagaccaatacttggcttttactatttttgagtccttgaactgtttccttttattctatatatactacttgggccacaagcagtaatccaaggcaaactgtaccaatctatttcacactatgaccctgttgagctgagatcaccccatgagttttcacatagaaaaatgatcagcttgttaaaaaaaaaaacaaaaaacaaaaacagtggtctatgtaatagcagttttgacccaatggtaggagtctgtaacagtttctcttggagtgattcatatattacgaaatctattttcaaacatcatggtacatttccccacaacttcctttaaaaaaagatgggcatagacattacaagacaaaaattgttacataagcacattaccctttaaataatttaaaggaaacatgttggctgaaaataaggcagatttggagcatacaagaagccacaaaggtggcttgtatacagctgcaactttaagaccctgagaaataatcaaacttctatcgtacaatgactgaattttcaatttcatgtcttttaaaattattttttaaaaacaatttcaattttgttttagatttgggggggcaagtacagatttgttacatgggtgtactatgagatgctgaagtttggggtatgattgatcctgtcacccaagtaataagcatagtacccaacagtcagtttttcaatacttgtcccctccctcaattttatgtcttgaaagaaaaagaaaacatgcaccctgcaatttatgtaatttttataattgttacttataaaaatatatccaaatttaacttctacaaaataccattttaatttaattaccagctagtaggtctgccgatgctgatgaactagaagcagcctgagatgcaggttggggttcagaagcactacttccaaatgcatctatccgttatccattgtgcagcggaaaagtaagaaagtgtaaaaagtaagtacagtaagtaatttaagtattatgtagagaaatgcagagacatgacagtgtacagtgagcttgtcttttgtgggtgtgtgaaatgatcacatgaattgaattatgctctgaccggtttattctctcaaaaagagttctaaaatattaacaagtaatacctctttgtaagattaagggaattcttttttttttctaagaataaaatttttggactaaaccttgtcatctgtcaaaacagaagcaaggttttaaactttttacctaaaggtaataaaacagaatttttccatttagaattctattaaatgtttaaaaaattaataaacttaattcaaggagcagcaatatgatttgtacctacatgtcaaggtttagtgtttatctgacacaagtcttgagcccctaaatgtcagacactgcaacatctttgtattcctcatgtacgcatcatggaatgtccatgatgcttcaatgtacaggaggtactcaatgtgggttaagctttctaaggatagtatttaagctcaagagctaattcagtacatcttcctgccctcagataacacataaaggaagagggaaatatatttaaatcagcaacacattttccaatccttctaactctttgtaaggatagcaaaacattataaataaacctacagaataatgtacaacatctagacttatgctttcagttttaactggcttgttttcatttctaaattatctattaataggtcatgtttatttggcttttaagaacttagagatgttgatttagccaacagatcaggatcaccaaggaagaacagttgaaggaaattccagtcaggtaattctacattaggatgaagaacaaaaagttgaaaacaccaagtgaaaaattatgtgttttgttaggtcatgcactgaaagttatgatgaaatgatgaggatgaagatgatgatgacgaagaaatgaaaatgatcttaaaaacttaagtttacatttaagagacagaattttatatagcctaaagaaaaaatgatgaaatataataaaatagatttaaaaattattctgaagaaaaaaagattccttaagtgttgatggaggagaaatacgcacccccaaaaaggtctatgacacctgaagaatccacctttgctggcgaggcagtggttgcaggagatggtgctgcaaatgca

SEQ ID NO: 88731 - DNA, 2489 bp, Homo sapiens
tggtgatgtgacccatgctctcgtcagccccttgtcaaccttaggaccaaaattcaacccttgtggtgactgtggaggggcctcagaagctgcatctgagtgactgagtcctctgtgaaactactgttgtgcttcctgttatgtacctgtctaagtaaaatcagagtaaggtaagccaacaatgtcttgtgagtttgactaataatctgaacttaaacttactactgtggtcttgcaactggtctttcataatgctttgcttatgaaaataataatttctaggtcaaggctatcactaagcacacactttktcttgctcccaaggaagaccaatacttggcttttactatttttgagtccttgaactgtttccttttattctatatatactacttgggccacaagcagtaatccaaggcaaactgtaccaatctatttcacactatgaccctgttgagctgagatcaccccatgagttttcacatagaaaaatgatcagcttgttaaaaaaaaaaacaaaaaacaaaaacagtggtctatgtaatagcagttttgacccaatggtaggagtctgtaacagtttctcttggagtgattcatatattacgaaatctattttcaaacatcatggtacatttccccacaacttcctttaaaaaaagatgggcatagacattacaagacaaaaattgttacataagcacattaccctttaaataatttaaaggaaacatgttggctgaaaataaggcagatttggagcatacaagaagccacaaaggtggcttgtatacagctgcaactttaagaccctgagaaataatcaaacttctatcgtacaatgactgaattttcaatttcatgtcttttaaaattattttttaaaaacaatttcaattttgttttagatttgggggggcaagtacagatttgttacatgggtgtactatgagatgctgaagtttggggtatgattgatcctgtcacccaagtaataagcatagtacccaacagtcagtttttcaatacttgtcccctccctcaattttatgtcttgaaagaaaaagaaaacatgcaccctgcaatttatgtaatttttataattgttacttataaaaatatatccaaatttaacttctacaaaataccattttaatttaattaccagctagtaggtctgccgatgctgatgaactagaagcagcctgagatgcaggttggggttcagaagcactacttccaaatgcatctatccgttatccattgtgcagcggaaaagtaagaaagtgtaaaaagtaagtacagtaagtaatttaagtattatgtagagaaatgcagagacatgacagtgtacagtgagcttgtcttttgtgggtgtgtgaaatgatcacatgaattgaattatgctctgaccggtttattctctcaaaaagagttctaaaatattaacaagtaatacctctttgtaagattaagggaattcttttttttttctaagaataaaatttttggactaaaccttgtcatctgtcaaaacagaagcaaggttttaaactttttacctaaaggtaataaaacagaatttttccatttagaattctattaaatgtttaaaaaattaataaacttaattcaaggagcagcaatatgatttgtacctacatgtcaaggtttagtgtttatctgacacaagtcttgagcccctaaatgtcagacactgcaacatctttgtattcctcatgtacgcatcatggaatgtccatgatgcttcaatgtacaggaggtactcaatgtgggttaagctttctaaggatagtatttaagctcaagagctaattcagtacatcttcctgccctcagataacacataaaggaagagggaaatatatttaaatcagcaacacattttccaatccttctaactctttgtaaggatagcaaaacattataaataaacctacagaataatgtacaacatctagacttatgctttcagttttaactggcttgttttcatttctaaattatctattaataggtcatgtttatttggcttttaagaacttagagatgttgatttagccaacagatcaggatcaccaaggaagaacagttgaaggaaattccagtcaggtaattctacattaggatgaagaacaaaaagttgaaaacaccaagtgaaaaattatgtgttttgttaggtcatgcactgaaagttatgatgaaatgatgaggatgaagatgatgatgacgaagaaatgaaaatgatcttaaaaacttaagtttacatttaagagacagaattttatatagcctaaagaaaaaatgatgaaatataataaaatagatttaaaaattattctgaagaaaaaaagattccttaagtgttgatggaggagaaatacgcacccccaaaaaggtctatgacacctgaagaatccacctttgctggcgaggcagtggttgcaggagatggtgctgcaaatgca

SEQ ID NO: 88732 - DNA, 545 bp, Homo sapiens
aaaagacaaagaaaagtagtgcaaagtgtaattcccagtcagaattatgctattaaatgtaatcaggaaagccattatgrttcctctttttttcccacgggaggtgggcagttagctctacttaggtcagttctatcaagtttctcataatcttgagatttatgccactaactaataatataattaattagctagtacactaacatagtttcatttctgtgtaggaaaaatttattttcatcttgttttaagttcgcattggttacttcataaaattgttaaaatacgggcataactcagagatattgtggctttgattctagtctactgcaataaagcgaatatagcaataaagcgagtcatacagtttttggtttcctaatgcatcagttgactcttgctttcacaaaagatttatcttatagcgctgctgtttaatagcatttcatccacagtaaaacttgttttaagttgaagtaaatcttctgaaatcctgccactgttttatcaactgtttatgtaatattctaaatcccattttgtca

SEQ ID NO: 88733 - DNA, 705 bp, Homo sapiens
cttggctatttaatatttttatggaagaagtgtttagttctggaaaaggtaaatgcttgtatatatttttgcagcctgggatctccctactccattttttcctttaatttaagtggccacatgtatatgtcttccctgctgtgttaggaaaatgggggctggatatcccaagaatcagaggttatataaaaatactgcaaatagaccgcagacataaatatctaccaaatgctatcttaaattttggtccaaactgaacatatggaaatagatttattgtaagtatttrcttagagctttttcttaaatctgaactaacttgcttttagaagtctttttctttgtaagcattgtaaatgctaataaatcctgttaatttttttttttttttttttttttttttactgcatgttacattgaaataaaaacaaagtaaaatgagcaattgccttattgttctgctcttttgcagggggtgggggttggggaagacagcattccacagcctggtcaggagggaaggacctcacttgtttcatcaaatggagtggtttaaaactgatcaagcagctcataataatgaattcctgctctgtcttttattatcttatgtcagagtgcagcaaaatctcatttcataagacttacaataactctatttaaaattcaggtattgtactcgggaggctgaggtgggaggatccc

SEQ ID NO: 88734 - DNA, 705 bp, Homo sapiens
cttggctatttaatatttttatggaagaagtgtttagttctggaaaaggtaaatgcttgtatatatttttgcagcctgggatctccctactccattttttcctttaatttaagtggccacatgtatatgtcttccctgctgtgttaggaaaatgggggctggatatcccaagaatcagaggttatataaaaatactgcaaatagaccgcagacataaatatctaccaaatgctatcttaaattttggtccaaactgaacatatggaaatagatttattgtaagtatttacttagagctttttcttaaatctgaactaacttgcttttagaagtctttttctttgtaagcattgtaaatgctaataaatcctgttaawttttttttttttttttttttttttttactgcatgttacattgaaataaaaacaaagtaaaatgagcaattgccttattgttctgctcttttgcagggggtgggggttggggaagacagcattccacagcctggtcaggagggaaggacctcacttgtttcatcaaatggagtggtttaaaactgatcaagcagctcataataatgaattcctgctctgtcttttattatcttatgtcagagtgcagcaaaatctcatttcataagacttacaataactctatttaaaattcaggtattgtactcgggaggctgaggtgggaggatccc

SEQ ID NO: 88735 - DNA, 760 bp, Homo sapiens
ccgggtgtggtggctcacgcctgtaatcccagcactttgtgaggccgaggcgggcggatgatgaggtcaagagatccagaccatcctggccaacatggtgaaacctcgtttctactaaaaatacaaaaattagctgggtatggtggtgcacgcctgtagtcccacctactcaggaggctgaggcagaagaatcacttgaacccaggaggcggaggttacagtgagccaagatcctgcaactgcactccagcctagggcaacagagcaagacagtgtctcaaaaaaaaaagtgacttgaaggtgtttctctgccaagtcatccctgccccagggatataaggtttaaagttaargtagcaaggtgtctccacctaactccaactacccaagagtctcaaaaccttccccttcctgctcagtgttcttttatttccttttcaagaaatgtgaactgctatagccagaaacatgttccttcagcagtgtttgcagatggatctcatgaaagttcagaaaagggtggttcacttcaagcgggagacagtggagttcctccactataaggcgaagtttgcaaagtcccactagtttgctctgagaacatgagacccttaacctctgggtcatgtgtttgaggtccattttggtgcaggcatcacctgatgctaaaaaaggatcattgtttagtgtggggttcttaacttgggatgcttacatccccttcccctacctcaagaggtccttgggtagaattcaatgg

SEQ ID NO: 88736 - DNA, 1078 bp, Homo sapiens
ttgtagcactttaaaattatagcttaaataggctckgtctagttagtgttcaatacatagttcctttgattaaatgtaaacattatgtgagcagggaacaacttgtttaccgcttgatccctggcacccaggatggtccttcatatgacaagcattcagtaaatacttattgaatagaagagtgaatgaatgagggacagagctgactcacacttgccaaggccaaacttgaacacttctttttccttgaatatgtgctgcccctttcctgccattattcaggccattcattcccctgtcaaggaagctgtctccacaccaaacaatctacccatcaaaggttaagttaaggttaacttaaggttaagttacccatcaaaccttctccaaaggatgccatcctcttagccaagaatggtctctttaatctctcatggtgctttatttgtacctttagggtcatttcttcatgttacagtccatattggcacatattatctccactggtaatctgtgacctgttgatggcaggatccagttctgatctctttgcttacatactcttcaggtcccgccatattgcctggcaaatagtaggaactccaaaatgttaatagaatgtagattgaataacccactgatgtgaaagtgatttgagaaccaaatactctatatgaatattttatctggtttccttttcacatacagtcttggttctatatgccacttgctgttcctcgaacacagcactctcttttgttgctgtgcctttgcacacattttgctcagttggatacttttcttctctttatgtggctagctctttcatatgtcctaggactctgctcaggcatcacctcctcagaggagccttccctctgtgagtggccctcacctgtgttctgtagtttcctgtgcttactgaaccactgcattgctcattctatattgtatttcccattttcctgtctttctcttcaactcatctatgagaaatttaagcaatgattgaacattgtgcaccactgtaacacagggatctggcataatatttgctatgatggaggtactcaacaca

SEQ ID NO: 88737 - DNA, 1228 bp, Homo sapiens
gcatcttgtactgtgaaactttgctaattcatttactagttttaatattttttgtggattctttagaaatgtttatataaaacttcatgtcaactgcaaatagagataatttttcttcttcctttttgctctggctaccttttatttcattgtcttatctaatttttagactagtacttctagtaaaatattrcatagaaatggtgagaatgaacatcttgtcttgctactgactttgggcaaacacattcagtttttcaccactctgtatgatggtgcatgtattttggttatttgagagagggagaggaagacgaagagggagagcaaaagaatttaagaaattagcttacatgattgcggatattggcaattctgaaatctgcagggtaggcttgcaggctggtgacccacggtagagttcaaatttgagagtactctgctggcagaattttcttttcctctggagaggtccggttttgtcttttttctttttttctattaaggccttcaactgatttggataagatggggtgggcgcagtggctgcaccactggctggatccctgaatcgggtgcctctctcactttccacggccccgaagcgtggccccagctttgcaccctgtgccagcccctgtgctccatgtgcaactgcagcatcatcccgggtgtatctccacttcagggatcctctctgcctgactgtgcttctcccccaccagcgggcaaccctgcccagacccattgtggcagcccccagtacagcgggctgcgggggctgtccaccgccttctggcatcctccctgcagaggctagagtgatggcagggccactccagatggcccacctctgccatcaataatacatacataatctctatgttatagtcccacagtgctgcaagggggctggcccgggctgcacactccacggaaccagcaggagccaggatcaagcagcagccccatcctgaacgtgactgcagccgcacaagtcagggttatagacctgggcctccctgggctcttgggggctgggagcaggcagaagtcttacccctggtgcagctgatttcacttaatacaattatctccagttccatccatgttgttgcaaaagagtggatctcattatttttatggctgcatagtgctccattgtgtatatgtaccacattttcttcatccatttatctgttgatggatacttagattgcttccaaat

SEQ ID NO: 88738 - DNA, 1228 bp, Homo sapiens
gcatcttgtactgtgaaactttgctaattcatttactagttttaatattttttgtggattctttagaaatgtttatataaaacttcatgtcaactgcaaatagagataatttttcttcttcctttttgctctggctaccttttatttcattgtcttatctaatttttagactagtacttctagtaaaatattacatagaaatggtgagaatgaacatcttgtcttgctactgactttgggcaaacacattcagtttttcaccactctgtatgatggtgcatgtattttggktatttgagagagggagaggaagacgaagagggagagcaaaagaatttaagaaattagcttacatgattgcggatattggcaattctgaaatctgcagggtaggcttgcaggctggtgacccacggtagagttcaaatttgagagtactctgctggcagaattttcttttcctctggagaggtccggttttgtcttttttctttttttctattaaggccttcaactgatttggataagatggggtgggcgcagtggctgcaccactggctggatccctgaatcgggtgcctctctcactttccacggccccgaagcgtggccccagctttgcaccctgtgccagcccctgtgctccatgtgcaactgcagcatcatcccgggtgtatctccacttcagggatcctctctgcctgactgtgcttctcccccaccagcgggcaaccctgcccagacccattgtggcagcccccagtacagcgggctgcgggggctgtccaccgccttctggcatcctccctgcagaggctagagtgatggcagggccactccagatggcccacctctgccatcaataatacatacataatctctatgttatagtcccacagtgctgcaagggggctggcccgggctgcacactccacggaaccagcaggagccaggatcaagcagcagccccatcctgaacgtgactgcagccgcacaagtcagggttatagacctgggcctccctgggctcttgggggctgggagcaggcagaagtcttacccctggtgcagctgatttcacttaatacaattatctccagttccatccatgttgttgcaaaagagtggatctcattatttttatggctgcatagtgctccattgtgtatatgtaccacattttcttcatccatttatctgttgatggatacttagattgcttccaaat

SEQ ID NO: 88739 - DNA, 707 bp, Homo sapiens
ttttctttcctttgcaccagcttcccgatacttcttggtgtgcaagaggaagggtacctgtagaragcttctttttgtttctacctggccaaagttagatgggacaaagatgaatggcatgtcccttctctgaagtccgtttgagcagaactacctggtaccccgaaagaaaatcttaggctaccacattctattattgagagcctgagatgttagccatagtggacaaggttccattcacatgctcatatgtttataaactgtgttttgtagaagaaaaagaatcataacaatacaaacacacattcattctctctttttctctctaccattctcaacctgtattggacagcactgcctcttttgcttacttgctgcctgttcaaactgaggtggaatgcagtggttcccatgcttaacaaatcattaaaacaccctagaacactcctaggatagattaatgtagtaagtctggctaggccttgtgttgcctttttttttttttttatatcttttcttttcttctcttcccatgcactattctggaggtttgccaggtttggggagacatggagtaaaagaaagataggcaactcatggatggtgggagagcaggtaagcaggtctgatctcaagggcccacatgaggcatcagtatatattaggcaggtagggatctctggctttggtaattctttatgagagga

SEQ ID NO: 88740 - DNA, 846 bp, Homo sapiens
tttgaccctgacagcccatcaccacctacagcttgcagtgccaaatgtatctccctctgatctctcctgtcctgtggtcctcatgaacattaagaagagatttctaaaaaagagcttgcacatgagcatagtttctggtgagaagaattctgatatgttaacttcctctaaacttttaaataaaatatttctaagaattaaataaagttctagaatgatatgaatctattcctttggttttttgcacgtctgtctgcctgctaatcaagagaagagaatggtcgtaattctcagagactttttcctgtttgtgtcataaatgacttcacatttttttctgttctaagaactattcagcttgatttcttctgttttaattttagcagcacctgagcaaagccatgtggtccaggattgctaccatggtgatggacagagttatcgaggcacgtactccaccactgtcacaggaaggacctgccaagcttggtcatctatgacaccacatcaacataataggaccacagaaaactacccaaatgcgtatgtcattaatcttacagtaagcaaaacaaggtccaagtaaaatttgtcttagaaaaggtgtgcgtcaagctaacttcttatgattaaatttttctcacacatagaatgcatggcaaaatgtctgagaaacattactttgagcaaagagtatgatwgaagagaaatgttaagctggctctctttcctgagagtttgataaaatcaggagaatatctggcggtggtgaggccacaataatggaaaatcagaatgtttagacagagtcagcttcaacaacactcactaaaggtcaatgtgatc

SEQ ID NO: 88741 - DNA, 649 bp, Homo sapiens
aagcgtaaattgatagagtgattctgaagagaaatctgtcattatttagtgagtttgatcatatgtataccagatgatgcagctatcctattttatgacatataactcaaaaaaactatcacaaatccccagagaggcagacatgagtatatatttatcaaatcattagttagtgggctcagcagacattagtgggctcagcagacaatctaaatggctacctgtatccatttgctagggcagcaataacagagggtcataaactgcatggcttcaatgacataagtttattgtctcccagttctgggaggctcgtctccatgacctcccgactctgatcacttcccytgaacctctgctccacattccaccctgccctggcccctgacccctcccgtccccatccacatggtcctgccgtgggtgctcagtctggcgtccatagctaccttcccaggcccatcacttacacaaagcctatgcttcagccaactcgatctcttaatggtccccatcagagggtgcagggccacaccatcccccgccttcctggtgcttgtcaagagctctctcaactccaaacccagctcagttcctgcctcctccctgagcctcctctagctgcctcaaccttaggcactgttctttc

SEQ ID NO: 88742 - DNA, 649 bp, Homo sapiens
aagcgtaaattgatagagtgattctgaagagaaatctgtcattatttagtgagtttgatcatatgtataccagatgatgcagctatcctattttatgacatataactcaaaaaaactatcacaaatccccagagaggcagacatgagtatatatttatcaaatcattagttagtgggctcagcagacattagtgggctcagcagacaatctaaatggctacctgtatccatttgctagggcagcaataacagagggtcataaactgcatggcttcaatgacataagtttattgtctcccagttctgggaggctcgtctccatgacctcccgactctgatcacttcccctgaacctctgctccacattccaccctgccctggcccctgacycctcccgtccccatccacatggtcctgccgtgggtgctcagtctggcgtccatagctaccttcccaggcccatcacttacacaaagcctatgcttcagccaactcgatctcttaatggtccccatcagagggtgcagggccacaccatcccccgccttcctggtgcttgtcaagagctctctcaactccaaacccagctcagttcctgcctcctccctgagcctcctctagctgcctcaaccttaggcactgttctttc

SEQ ID NO: 88743 - DNA, 649 bp, Homo sapiens
aagcgtaaattgatagagtgattctgaagagaaatctgtcattatttagtgagtttgatcatatgtataccagatgatgcagctatcctattttatgacatataactcaaaaaaactatcacaaatccccagagaggcagacatgagtatatatttatcaaatcattagttagtgggctcagcagacattagtgggctcagcagacaatctaaatggctacctgtatccatttgctagggcagcaataacagagggtcataaactgcatggcttcaatgacataagtttattgtctcccagttctgggaggctcgtctccatgacctcccgactctgatcacttcccctgaacctctgctccacattccaccctgccctggcccctgacccctcccgtccccatccacatggtcctgccgtgggtgctcagtctggcgtccatagctaccttcccaggcccatcacttacacaaagcctatgcttcagccaactcratctcttaatggtccccatcagagggtgcagggccacaccatcccccgccttcctggtgcttgtcaagagctctctcaactccaaacccagctcagttcctgcctcctccctgagcctcctctagctgcctcaaccttaggcactgttctttc

SEQ ID NO: 88744 - DNA, 649 bp, Homo sapiens
aagcgtaaattgatagagtgattctgaagagaaatctgtcattatttagtgagtttgatcatatgtataccagatgatgcagctatcctattttatgacatataactcaaaaaaactatcacaaatccccagagaggcagacatgagtatatatttatcaaatcattagttagtgggctcagcagacattagtgggctcagcagacaatctaaatggctacctgtatccatttgctagggcagcaataacagagggtcataaactgcatggcttcaatgacataagtttattgtctcccagttctgggaggctcgtctccatgacctcccgactctgatcacttcccctgaacctctgctccacattccaccctgccctggcccctgacccctcccgtccccatccacatggtcctgccgtgggtgctcagtctggcgtccatagctaccttcccaggcccatcacttacacaaagcctatgcttcagccaactcgatctcttaatggtccccatcagagggtgcaggrccacaccatcccccgccttcctggtgcttgtcaagagctctctcaactccaaacccagctcagttcctgcctcctccctgagcctcctctagctgcctcaaccttaggcactgttctttc

SEQ ID NO: 88745 - DNA, 649 bp, Homo sapiens
aagcgtaaattgatagagtgattctgaagagaaatctgtcattatttagtgagtttgatcatatgtataccagatgatgcagctatcctattttatgacatataactcaaaaaaactatcacaaatccccagagaggcagacatgagtatatatttatcaaatcattagttagtgggctcagcagacattagtgggctcagcagacaatctaaatggctacctgtatccatttgctagggcagcaataacagagggtcataaactgcatggcttcaatgacataagtttattgtctcccagttctgggaggctcgtctccatgacctcccgactctgatcacttcccctgaacctctgctccacattccaccctgccctggcccctgacccctcccgtccccatccacatggtcctgccgtgggtgctcagtctggcgtccatagctaccttcccaggcccatcacttacacaaagcctatgcttcagccaactcgatctcttaatggtccccatcagagggtgcagggccacaccatcccccrccttcctggtgcttgtcaagagctctctcaactccaaacccagctcagttcctgcctcctccctgagcctcctctagctgcctcaaccttaggcactgttctttc

SEQ ID NO: 88746 - DNA, 1456 bp, Homo sapiens
cagggaccacctacatcaccatcagggttacggcagtactgaaaacaagaaggcatgtaagctccagctcacgtggggcaggagagggagaaggtgttccaaggctcacgcatttcatgtctatccttagaagacataaaggagtgtttctttttccttccttcttttttttttttttttttttttctgaggtggagttttgctcttgtcgcccaggctggagtgcagtggcatgatctcagctcactgcaacctccatctcctgggttcaagcgattctcctgcttcagcctcctgagtagctgcaactgcaggtgcacgccaccacacctggctaatttttttttctattttcagtagagatgaggtttcaccattttggccaggctagtctcgaactcctgacctcaggtgatctgcttgtctcagcctcccaaagtgtagggattacaggtgtgagccaccatgctcagcctcttcttcctttctattattattattattattttggcaaagttattttttgaatgctctaaagccgtccttcctgtgcccctgttcaaaaggagctatgaggccacacccctggacagggagtggtgaccctcgggggtctttggagaatgggtctcccttcaggagcctgacccagtggaggccttagagccccagcaccaaaggacagtgggacatcattgatgtgcattgtccctggagggctcagcgctctcctacccgatgaagcctgtttgctgttgattcagaaacatttatttccatgcattgtgcgccctctatggggcaagacacagaaaggcagtgttgtcctccccttcatatgacactgtggtagaataagaaacgtatatttggtctctgccccccagttcctgacacggagctcctaaatcccttgggggttcctgagtgaagggagcatcttttgtttgaatgaagcaactcttggtgggttcttggatagtctcaggatggggctggttgccaaaggaaccaaccatgtgattgcagggttggaactgttcagccccccacgtccaacttccagggagggaayaggagctgaaggtgagctggtctccaatggccaacgatgtattcaactgtgcctctgtaatgaagcctccataaaaacccagcaagactgcacttggagagcttctgggttgctgaacacttggggtaccgggggctggtgcactggagagggcatggaaactctgagccccttctcacatgccttgccccgtgcatctcttctgtctggctgttcaccaggatcctttgtaatatcttttataacaaatgggtaaataaaagtaacgtgttcccctgagttctgtgagccactctagcaaagtaatcaagtagaaaaacagatttttgtccagttgggcagaagtacaggtcaccgcctggaacttgggattggcatctg

SEQ ID NO: 88747 - DNA, 525 bp, Homo sapiens
gatctgctttctagcgtccagaactgagacaataaatttctgttattctaaggcagcaaattttgataccttgtcacagcagtcctagcaaaccaatacagggactataaatgacaataagaaacataaaaataaatattcctcccttgggggattttgagaattgcagaatacagttggcagtctagtataaatgaaaaatcagacaggtctggattgaaatcttacctatatcatggtctgggtgggtttctttgactgagttatccagattctcagagcctcaatatctttatctaaataatggagaaatagtatttaatattttggttgttgttaatgactgaataatatctgtactatttcaattattgttttgaaaatgtaattgctgccattccactatggtttgaatgtgtcctccaaagttcatgcaytggaaactttttttctcaatgcaacagtgttgagaaatgggacctttaagaagtgattaggtcatgagagctctgccctcatgaattg

SEQ ID NO: 88748 - DNA, 516 bp, Homo sapiens
ctggtttcaggtcccattctgccctactcatsctgagcatgttactcacctcattgagcaaaagagtaataataatgcctttctcccaggtttgatgatgtgaggatcattttgatatgagggttatcatgtatgcataaacactttgcaaacaactacaagaattgttcctttataatgttattcttactttcagacaaggaaattgaaatacagaaatagttaataagcataaagccacagtttggagcactgaaagccgatgctccgacttcctgatcaattcttttactttttttttttttttttttgagatggagtctcgctctgttgcccaggctggagtgcagtggtgtgatctctgctcactgcaagctccaccccccaggttcacaccattctcctgcctcagcctcctgagtagctgggactaaaggcgccggccaccacacccggctaatttttttgtatttttagtagagacggggtttcaccgtgttagccaggatggtcttg

SEQ ID NO: 88749 - DNA, 516 bp, Homo sapiens
ctggtttcaggtcccattctgccctactcatgctgagcatgttactcacctcattgagcaaaagagtaataataatgcctttctcccaggtttgatgatgtgaggatcattttgatatgagggttatcatgtatgcataaacactttgcaaacaactacaagaattgttcctttataatgttattcttactttcagacaaggaaattgaaatacrgaaatagttaataagcataaagccacagtttggagcactgaaagccgatgctccgacttcctgatcaattcttttactttttttttttttttttttgagatggagtctcgctctgttgcccaggctggagtgcagtggtgtgatctctgctcactgcaagctccaccccccaggttcacaccattctcctgcctcagcctcctgagtagctgggactaaaggcgccggccaccacacccggctaatttttttgtatttttagtagagacggggtttcaccgtgttagccaggatggtcttg

SEQ ID NO: 88750 - DNA, 1797 bp, Homo sapiens
ccaacaaagctttcctcaaataatcccctcaccacttctccttcacttgtggcatgtcacatcgagggcacaagggcactggggcaataaaaagcctactgaaagcactgtacaagtgtttacgtttgcccacctctgtagattctctaggatcatttccaaaatgccacaatttcctcacaaaaacgctattggcagcctgttatgccacagccaatattcctatctgccacctgtagatctagttctaacctcagtcaagcttcctggcaatttaataaatctctggggagttcagccttttcatttttactatcctactccttcactaccttccttagaacaggtacagtatctagtactaaatttgaagacagaaactccatttaactacaaaagcctaaatcacataactactaaatctgttttgcacaatcaaacccatcacaccccacccaaaatcaccaacacaacattttgaacatgttaaattttattaaaaatatttaacatcgtacaaatattccaatacagttatggtacatgaacactgtaccaaaagcatgatttttattaaactgatgattaaatggaaaaggtcttgcaaatgtccctattttggtatttcttatgttactatatccatatcagcaatttatgtttgcaggagccttcagtccaattatagaaatagtcttagaacatagtacctaacattataatgggattcactaagtacaagtctacctacattatcgaagaggctagagaagtcccttttgcccaaccctcatatgtgagaaatcaagaaaagcaatgttcatgggatcctgacaaatctactatataaagtgagagcccttatttaaatttgagcaatttaagtttttccccagaatgtctcctttgttggttccacraaatgtattttgtttttagtgtttaaagtcaacaaactggcattgcattttccttaacttacataaactcatcagaattacatgaatattcctactgcttaccttaaaacttcctaaggagcatgctatttagtgctaagttttataccctgatcctttctgtcactgacacatgcataaaatgttaccttaacacaaccctgcaatcactacaattcttaaaagtattacataatttcattctagtgttgtacaactagtctatagcaaacttacaagtaagggtttatattcatgacactgactagcacatttaacatctaggaaagtctttctagactgatattctcaaccaataaagaagatacagtgctgtaagaatactgagaaggttcttcaggcatgaaaatccataattacttttaatcagtgtttataccatattacaattattttttatatggtatggtcagaaatgcctagttactaaatttaatttcaatctataccttaccatcatggaatcccctacaaactataagatgagggattttaatctttagcaataatttaaatattgactcttaattctaccaatatctgctaatcctatcagctaccctagctttcacacaaaacacaagttgttcataggtttatgtttctgctatgttcaaggtcttaatatttcagctatgtaatttcctcttgacccaaagtcattgtctcaacatatctctaaattgaggccattattgtcaaactgctaaaactttttaaagtttcattttacagtgttaagattactttggaagatttttaaaaatagtatctttggtgtttaagccctccattctatcaatgtcttcttgttttc

SEQ ID NO: 88751 - DNA, 824 bp, Homo sapiens
acagcctgggactgaccctctgtcctgtgggtctttgcctctgggctctctgctctgcatttcttgaaaccattattatttatcattttyctcacactcttttgcgtatggctcctattgcactcaaaatgtttttgagattcatccatcttgttttgtgtgtcaaaagtttgttcctttagccgttccatggaatgaatgtatcacagtttattgatccattcttgtattgatagatatttgaatgtttccagtttttcctattatgaataaaactgctatgaacattcttgtataaatcattttctggacatatgttttaatttctcttggataaatgcttaggaattagtgagtcatagaataggtagttgtttagttctgtaagaatatgccagacattttttcccaaagtgtttatactattgtacattccaaccattaatgtatgaaggtgagaaagcttttgctacttccaaagaggcttctctatatacatgtaattttttctaactggagacaggctgatgacttcagggacatgagcatgggatacctgtcatcaccaccaccataaagttgggattcaggaaggaggttaatcatataaagaatcctgtgaccagtatgagcttctctcaggccacacagggcactcaagtgaacagggcatgggggccctggggtcatggtaagaaagtgtctcattggtaaaaccttttcctctggggaggtaaataaatgatttgtttcttcttggtagcccttgaagataaggatggtcaaacaaaataatatcatacctggagaaactcagatcttgg

SEQ ID NO: 88752 - DNA, 824 bp, Homo sapiens
acagcctgggactgaccctctgtcctgtgggtctttgcctctgggctctctgctctgcatttcttgaaaccattattatttatcattttcctcacactsttttgcgtatggctcctattgcactcaaaatgtttttgagattcatccatcttgttttgtgtgtcaaaagtttgttcctttagccgttccatggaatgaatgtatcacagtttattgatccattcttgtattgatagatatttgaatgtttccagtttttcctattatgaataaaactgctatgaacattcttgtataaatcattttctggacatatgttttaatttctcttggataaatgcttaggaattagtgagtcatagaataggtagttgtttagttctgtaagaatatgccagacattttttcccaaagtgtttatactattgtacattccaaccattaatgtatgaaggtgagaaagcttttgctacttccaaagaggcttctctatatacatgtaattttttctaactggagacaggctgatgacttcagggacatgagcatgggatacctgtcatcaccaccaccataaagttgggattcaggaaggaggttaatcatataaagaatcctgtgaccagtatgagcttctctcaggccacacagggcactcaagtgaacagggcatgggggccctggggtcatggtaagaaagtgtctcattggtaaaaccttttcctctggggaggtaaataaatgatttgtttcttcttggtagcccttgaagataaggatggtcaaacaaaataatatcatacctggagaaactcagatcttgg

SEQ ID NO: 88753 - DNA, 824 bp, Homo sapiens
acagcctgggactgaccctctgtcctgtgggtctttgcctctgggctctctgctctgcatttcttgaaaccattattatttatcattttcctcacactcttttgcgtatggctcctattgcactcaaaatgtttttgagattcatccatsttgttttgtgtgtcaaaagtttgttcctttagccgttccatggaatgaatgtatcacagtttattgatccattcttgtattgatagatatttgaatgtttccagtttttcctattatgaataaaactgctatgaacattcttgtataaatcattttctggacatatgttttaatttctcttggataaatgcttaggaattagtgagtcatagaataggtagttgtttagttctgtaagaatatgccagacattttttcccaaagtgtttatactattgtacattccaaccattaatgtatgaaggtgagaaagcttttgctacttccaaagaggcttctctatatacatgtaattttttctaactggagacaggctgatgacttcagggacatgagcatgggatacctgtcatcaccaccaccataaagttgggattcaggaaggaggttaatcatataaagaatcctgtgaccagtatgagcttctctcaggccacacagggcactcaagtgaacagggcatgggggccctggggtcatggtaagaaagtgtctcattggtaaaaccttttcctctggggaggtaaataaatgatttgtttcttcttggtagcccttgaagataaggatggtcaaacaaaataatatcatacctggagaaactcagatcttgg

SEQ ID NO: 88754 - DNA, 824 bp, Homo sapiens
acagcctgggactgaccctctgtcctgtgggtctttgcctctgggctctctgctctgcatttcttgaaaccattattatttatcattttcctcacactcttttgcgtatggctcctattgcactcaaaatgtttttgagattcatccatcttgttttgtgtgtcaaaagtttgttcctttagccrttccatggaatgaatgtatcacagtttattgatccattcttgtattgatagatatttgaatgtttccagtttttcctattatgaataaaactgctatgaacattcttgtataaatcattttctggacatatgttttaatttctcttggataaatgcttaggaattagtgagtcatagaataggtagttgtttagttctgtaagaatatgccagacattttttcccaaagtgtttatactattgtacattccaaccattaatgtatgaaggtgagaaagcttttgctacttccaaagaggcttctctatatacatgtaattttttctaactggagacaggctgatgacttcagggacatgagcatgggatacctgtcatcaccaccaccataaagttgggattcaggaaggaggttaatcatataaagaatcctgtgaccagtatgagcttctctcaggccacacagggcactcaagtgaacagggcatgggggccctggggtcatggtaagaaagtgtctcattggtaaaaccttttcctctggggaggtaaataaatgatttgtttcttcttggtagcccttgaagataaggatggtcaaacaaaataatatcatacctggagaaactcagatcttgg

SEQ ID NO: 88755 - DNA, 1342 bp, Homo sapiens
ttcaaaaactgtattctcatggcgactgcatggaaacttgagcacattttatggaaaattattgagcacagtcttttcatgatccctgtatgctgtgtgtcctgagggcactaactcagagtgtcctgttactccctcatcagtgtgtcacctggacaattcactgagctcgttctctctctctctctctctstgtgtgtgtgtgtgtgtgtgtgtgtgtgtgtgtgtgtgtgtctatctgtctttctctttcattcttttccatttggccctgttctgtcccaacatgaaggcaataatttgttacctcattaatggatctatccttttagttttttaaccacttccctatgctacccatgaaacctagttggggctctgttgtgtctgatttcccctggcttattctttactttttcctccttttccaggctcagcagggagctgctggaggtagtagagcctgaagtcttgcaggactcactggatagatgttattcaactccttccagttgtcttgaacagcctgactcctgccagccctatggaagttccttttatgcattggaggaaaaacatgttggcttttctcttgacgtgggaggtgagtacctttctatgaaggtgataaggatccactgagtcttccatataaagatcatattcctgctccaagtggccattactgagctgagagatgtcattgccacagggaggacctataggcacatgtaggttgaatgaaactctagttctacctggaagcccagacaagggatgggtcagtgagcaagactctcttcctagtctcaggccatacctgtggcgccctgatcctattctcatgacattggacctgggcagatgtgacaaattcagagaactatgattttgactcaagggtttgtagatttcctttttcactctaatttcagtgtctaaagtcctcacaaccatgaacaatctgagtatttgatgagacagggctaaatattgcagtttttctcctagaaatcatttgagggtatttgctttaagttgattggaaaaatatggcgtaactgtttgcacaaacttgggacaaatgatattgggataacgatctactagaatagggacattttacccacagtttctgggagaaaaaccgaggaatttctatcatgaccagccttcaggcctcctgaaatatatctctcacagtgtcctattcttatgctgaggagcctgaggtccctgtgtgaggattagacagtggattgttatgtgtgtaggggaatcagcttaatgtgtctgtccatgtctgaatttattgcagaaattgaaaagaaggggaagggga

SEQ ID NO: 88756 - DNA, 1342 bp, Homo sapiens
ttcaaaaactgtattctcatggcgactgcatggaaacttgagcacattttatggaaaattattgagcacagtcttttcatgatccctgtatgctgtgtgtcctgagggcactaactcagagtgtcctgttactccctcatcagtgtgtcacctggacaattcactgagctcgttctctctctctctctctctctgtgtgtgtgtgtgtgtgtgtgtgtgtgtgtgtgtgtgtgtctatctgtctttctctttcattcttttccatttggccctgttctgtcccaacatgaaggcaataatttgttacctcattaatggatctatccttttagttttttaaccacttccctatgctacccatgaaacctagttggggctctgttgtgtctgatttcccctggcttattctttactttttcctccttttccaggctcagcagggagctgctggaggtagtagagcctgaagtcttgcaggactcactggatagatgttattcaactccttccagttgtcttgaacagcctgactcctgccagccctatggaagttccttttatgcattggaggaaaaacatgttggcttttctcttgacgtgggaggtgagtacctttctatgaaggtgataaggatccactgagtcytccatataaagatcatattcctgctccaagtggccattactgagctgagagatgtcattgccacagggaggacctataggcacatgtaggttgaatgaaactctagttctacctggaagcccagacaagggatgggtcagtgagcaagactctcttcctagtctcaggccatacctgtggcgccctgatcctattctcatgacattggacctgggcagatgtgacaaattcagagaactatgattttgactcaagggtttgtagatttcctttttcactctaatttcagtgtctaaagtcctcacaaccatgaacaatctgagtatttgatgagacagggctaaatattgcagtttttctcctagaaatcatttgagggtatttgctttaagttgattggaaaaatatggcgtaactgtttgcacaaacttgggacaaatgatattgggataacgatctactagaatagggacattttacccacagtttctgggagaaaaaccgaggaatttctatcatgaccagccttcaggcctcctgaaatatatctctcacagtgtcctattcttatgctgaggagcctgaggtccctgtgtgaggattagacagtggattgttatgtgtgtaggggaatcagcttaatgtgtctgtccatgtctgaatttattgcagaaattgaaaagaaggggaagggga

SEQ ID NO: 88757 - DNA, 1342 bp, Homo sapiens
ttcaaaaactgtattctcatggcgactgcatggaaacttgagcacattttatggaaaattattgagcacagtcttttcatgatccctgtatgctgtgtgtcctgagggcactaactcagagtgtcctgttactccctcatcagtgtgtcacctggacaattcactgagctcgttctctctctctctctctctctgtgtgtgtgtgtgtgtgtgtgtgtgtgtgtgtgtgtgtgtctatctgtctttctctttcattcttttccatttggccctgttctgtcccaacatgaaggcaataatttgttacctcattaatggatctatccttttagttttttaaccacttccctatgctacccatgaaacctagttggggctctgttgtgtctgatttcccctggcttattctttactttttcctccttttccaggctcagcagggagctgctggaggtagtagagcctgaagtcttgcaggactcactggatagatgttattcaactccttccagttgtcttgaacagcctgactcctgccagccctatggaagttccttttatgcattggaggaaaaacatgttggcttttctcttgacgtgggaggtgagtacctttctatgaaggtgataaggatccactgagtcttccatataaagatcatattcctgctccaagtggccattactgagctgagagatgtcattgccacagggaggacctataggcacatgtaggttgaatgaaactctagttctacctggaagcccagacaagggatgsgtcagtgagcaagactctcttcctagtctcaggccatacctgtggcgccctgatcctattctcatgacattggacctgggcagatgtgacaaattcagagaactatgattttgactcaagggtttgtagatttcctttttcactctaatttcagtgtctaaagtcctcacaaccatgaacaatctgagtatttgatgagacagggctaaatattgcagtttttctcctagaaatcatttgagggtatttgctttaagttgattggaaaaatatggcgtaactgtttgcacaaacttgggacaaatgatattgggataacgatctactagaatagggacattttacccacagtttctgggagaaaaaccgaggaatttctatcatgaccagccttcaggcctcctgaaatatatctctcacagtgtcctattcttatgctgaggagcctgaggtccctgtgtgaggattagacagtggattgttatgtgtgtaggggaatcagcttaatgtgtctgtccatgtctgaatttattgcagaaattgaaaagaaggggaagggga

SEQ ID NO: 88758 - DNA, 1342 bp, Homo sapiens
ttcaaaaactgtattctcatggcgactgcatggaaacttgagcacattttatggaaaattattgagcacagtcttttcatgatccctgtatgctgtgtgtcctgagggcactaactcagagtgtcctgttactccctcatcagtgtgtcacctggacaattcactgagctcgttctctctctctctctctctctgtgtgtgtgtgtgtgtgtgtgtgtgtgtgtgtgtgtgtgtctatctgtctttctctttcattcttttccatttggccctgttctgtcccaacatgaaggcaataatttgttacctcattaatggatctatccttttagttttttaaccacttccctatgctacccatgaaacctagttggggctctgttgtgtctgatttcccctggcttattctttactttttcctccttttccaggctcagcagggagctgctggaggtagtagagcctgaagtcttgcaggactcactggatagatgttattcaactccttccagttgtcttgaacagcctgactcctgccagccctatggaagttccttttatgcattggaggaaaaacatgttggcttttctcttgacgtgggaggtgagtacctttctatgaaggtgataaggatccactgagtcttccatataaagatcatattcctgctccaagtggccattactgagctgagagatgtcattgccacagggaggacctataggcacatgtaggttgaatgaaactctagttctacctggaagcccagacaagggatgggtcagtgagcaagactctcttcctagtctcaggccatacctgtggcgccctgatcctattctcatgacattggacctgggcagatgtgacaaattcagagaactatgattttgactcaagggtttgtagatttcctttttcactctaatttcagtgtctaaagtcctcacaaccatgaacaatctgagtatttgatgagacagggctaaatattgcagtttttctcctagaaatcatttgagggtatttgctttaagttgattggaaaaatatggcgtaactgtttgcasaaacttgggacaaatgatattgggataacgatctactagaatagggacattttacccacagtttctgggagaaaaaccgaggaatttctatcatgaccagccttcaggcctcctgaaatatatctctcacagtgtcctattcttatgctgaggagcctgaggtccctgtgtgaggattagacagtggattgttatgtgtgtaggggaatcagcttaatgtgtctgtccatgtctgaatttattgcagaaattgaaaagaaggggaagggga

SEQ ID NO: 88759 - DNA, 1755 bp, Homo sapiens
  misc_feature (1)...(1755): n = A,T,C or G
tgggaggggcacttggcggtttgaattctgtgcctgcctgagacgctcacctgtggtgtccacctcgctcagagcccttgtgctgcctgggatgaggctgtgtgtgtcgagtgctttcacagttcctgtgccaggaaggtgcttcggcagtttctcctcaaccacttaccctaacaacagcttgtgattgccaaagtaaccagcacatctagaagatggacccaaggggcctggatgggagctcaggtccagtgctctgcaccccaccctccagggtgttaactccccaacctgtgcagtgggcactgtgaggtcccctttcctgcttccctgactggcaggcggaaggctgggctgggctgctgtggctctggtgtggagagtggtggctggggagtgagtgcttggggagttgcccccacagagcctgttagcgcttcagtgtcagaggccctgtgctgggccagrgaccactgtctgctcttttctgagccttatggttccgaggctcagagcccagatggaagaggagggagcaggccccacagcaggcgagagctctccttccagagccccatcctcacccagtgactgccccaagatgcctggtgcacaggagggtatatggaggggtgtttgggctggtggcagaggaggaaggagatggctgtggagtcctcgagtctggggctcatgccttcaannnnnnnnnnnnnnnnnnnnnnnnnnnnnnnnnnnnnnnnnnnnnnnnnnnnnnnnnnnnnnnnnnnnnnnnnnnnnnnnnnnnnnnnnnnnnnnnnnnntcttattatttaactttacattactaggacacgtggtgtcccttttgttccttacattttatttttgtctctgtctcggtggtcgtgtgtgggtgtggatgaagcctcgtatgagctgatgtacgaatgtggagctcggtactatacaaataaaatacagagatggttatgtatatacacgtattatatatatacacgtatgtatatacacgggtatatattatatatattcatgtgtttgaatatatattatatatacgtgtatacacgtatatacatgtatacatgtatacgtgtatacattgtatatatgtgtataatatatatacacgtgtatatatattatatatatatacgtgtgccatgttggtttgctgcacccattaactcgtcatttacattaggtatttctactaatgctatccctcccccagccctcaccccatgacaggccctggtgtgtgatgttccccgtcctgtgtccaagtgttctcattgttcagttcccacccatgagtgagaacatgctcgcaccgccgcttctaaatgttttaaaaacaaagacaccaatgcccttcattggggaaatgaaagacttttaagtaaaacgattttgagtgaaaataatatttgttgttttaaaaagttaatattaaccactctccatcatatgttggaattatctttaagatgtgaaagttaaaattagaaaccttgtaaaggaaaaataggaaatagtttcatgaacttgacacaggaaaatatttcttagactagatactgtagcactcaccacaataagaaatcaagcgaattgcacttcatttttaaaaagcttctccttattatgttgttgtttaacaacttaaacgctatctctagaccaggaataattatttgctatataatacagcaaaaaatatgtatgtataaatggactcattcaaaatat

SEQ ID NO: 88760 - DNA, 1359 bp, Homo sapiens
gggagattttggatgttcagtaaagctcaaaaacaatgcccagaccatgcctggtgaagtgaacagcaccctggggacagcaggtagggaccagcctggttgttctttgcactctgacttcatgcagcctgcttggggcctgcatgttcccttcacctttgtttgtcagtagagatgggagagcaggtaaaggttttcagtcgtgagaaggaccacttcctcacacacttgggctcccacgcaagagcagctgtcacattggtgaattaaatgactccttttaggttacaggagagaggaaagcctctttttctcaccagaacaactcttttgttgtttgcattgtttttcttaaaacttaaaaaatgtagacattgtttgtgctctgtaatgtggcttaccccgaatcactcagcatayaccagtctcgttggctgcctgcctgtccactaccttgtctaaacaacactatgattaaatggtaatgattcgttttgatcacttagtgccatgaaattttgcctcctcctttgcaggttaaattttctattttcattgtgaatacaattaatttgaaaatgtgtacattcaaaaatagtcttttaaaagagaatttgtcacctaaaaagtttgttcaacaagttgacttgaactgtctgtaaatttttgatatttcccattacctaatgcaggaagataatattgtacaatattaatttattgcttggctctattaatacatgttgatgtgtttataacccattactctcaacatatctgtgacttttaaagcatacatggcacctgaagtcatcactcgtgccaaaggagagggccatgggcgtgcggccgacatctggagtctggggtgtgttgtcatagagatggtgactggcaaggtaagcggagcccccacacctggcggagcaacttcagaagggcactgtgcattaacagaacagtagttatggattgattatttattacaaacactgtggacactaaatagcgaacgatattagatacaaaaatctgatccatcaaaagattaagacaaatgacaaaccaggaaacaaatatttgtaagatatctgccacagagaactcttatgagtgaatttaagaagcataaacctctaattaaaacacagggaagcaagcagttacaaaaagcaacattaagttggaaacatgtccacacaaaaacccgcacatgaatgtttacagcagctttattcataattaccaaaacttggaagcaaccaacatgttcttcagtagattattcatacaaaggagtatactgagctttagataaaaagaaacaccctgtcgagccacagaaagacatggaggaac

SEQ ID NO: 88761 - DNA, 692 bp, Homo sapiens
caaatgccagggctttctaactgctcagggctcagggcatgcagcatttcaagtacgttcagcctgtccttccactctcaccatcagttcacagtggctgcagatcttggaattgctccatctcgttctcttcccacaagattctgtccctgtacgctcactccatggaaagggcagtgtcacctcctttcaaaggacatattatttagaacctccaatttaactcagaaagttaccagtgggcacctgagcaatccatccygaccagaagctatcagcaggtgctgcacaacagagatgcttgtgagaaagcagggctttctgttgtttagttaagggaaaatcacctgttgagagtttcaggttgcaatcctgtaactagcgttacaatgccaggagccctacgagggtaaatctaagagaagcaaagataaggtatttgctgtttgtcttagtccattttatgctgctgtaacagaatagttgagactgggcaatttacaaagaacagagatttatttcttatagttctggaggctgggaagtccaaagtcaagagggctgcatctggcaaggtccttcttgctgtgtcatcccataggggaaggcagaaggcagaagggcaagcaagcatgtactcaagtgagagaaataagggaaagcggctgaactcatccacttagcaggaaccc

SEQ ID NO: 88762 - DNA, 1783 bp, Homo sapiens
tgtctgacctcctcaggcaagtggcatgtggaagaaggaccccggcctagagtcaggagacctgggtctttggcctcgttctgccattccctcactgtgagatcctaggcttctctccatgtctttctagacctcagttcctctgtctgcacaaaagggacatgaggattgatctttgatggccttctccgttaaaaattagagatgctggctgggcatggtggttctcgtctgtaattccattcgccacagtgggaggatcgcttgaggccaggagttgaagaccagcctgggcaatatggttagactcctatctctacaaaatatttttaaaattatctgggtgtggtggtgcatgcctgtagtcccagctactcgggggctgaggcgggagaattgcttgagcccaggagtttgaggctgtagtgaactgtgatagtgcctgccactttactccagcccgggcagtagagtgagaccctgtcttaaataaataaattaaaaagatgctttaaatttaagttttaggttttagattatgtcttcactctgtgtggtccacttagaccggaatccagaagaaaaatgtcagggacactccctaggacttctggcaaaggcaggagccagaatgaatgaatttcctgtgcccaggcccccctgctgtccctggctcctagcccttggcccaagcatggctctcagcctagacaaggccttcctaggaggcctaggagccctgcgggaggcagagtgcagataaaggctcggagtccgtccatgtggaaaacctgggtctgcggcgatcgtgaaccacatgggcagaggggccagacctggggttcctatgatgggaacatgatgtgactgtggaggccagtcaaggctcctgccagcggtgagtggaacagataaagaaatcagtcatcagaggagagaagtaccccagaccggagtgggaggtcacatatcggctccctgtgctgccctccagaggggaactggggcagaggggcctcctcattccacgaggctggctgggctcaattcaaggaacccttgtcctcccacctctgttggaatcctcactgcagcccactggatccctgcacgagacacacctggggtgcttagtgagcaggcagattcccagatacccaccccgaaaagccagtctgaaagagaacacccaggggtggggcctggccacagccagcctctccagagagtctcaagtccagtaatatctaataactctgtgtttaggccaatggtgttcaatcctagctgtggactgygatcacctggggaattttttttaaaccctgatacccagatctcacctaagaccaattatgtcagaatctctggggtgtgccctgggcacccatatattcttaaagctccccagtcgtcccagtgtgggtccaaggactgccccagctccagatcaattctaagagcctcaagatgaacatctggggaaaaggagaagtcatgagtctcagataagagaaataacttgcccaaggtcacacaaggtggtgatggcaaagcccgtcctgaaacccaggcctctttcctgaccgtgggccaatttcttcctgatgctgcatctctttttaaaaaccagagcccaggcaggcaatgcccacagtatttcactttaataatattggaaaccggtacagtcagggccaccacagtggtggggcgggagcctcgatggcgattaggggagctgtaagtctttcgctttatccaaatcttgggcagtaattta

SEQ ID NO: 88763 - DNA, 1783 bp, Homo sapiens
tgtctgacctcctcaggcaagtggcatgtggaagaaggaccccggcctagagtcaggagacctgggtctttggcctcgttctgccattccctcactgtgagatcctaggcttctctccatgtctttctagacctcagttcctctgtctgcacaaaagggacatgaggattgatctttgatggccttctccgttaaaaattagagatgctggctgggcatggtggttctcgtctgtaattccattcgccacagtgggaggatcgcttgaggccaggagttgaagaccagcctgggcaatatggttagactcctatctctacaaaatatttttaaaattatctgggtgtggtggtgcatgcctgtagtcccagctactcgggggctgaggcgggagaattgcttgagcccaggagtttgaggctgtagtgaactgtgatagtgcctgccactttactccagcccgggcagtagagtgagaccctgtcttaaataaataaattaaaaagatgctttaaatttaagttttaggttttagattatgtcttcactctgtgtggtccacttagaccggaatccagaagaaaaatgtcagggacactccctaggacttctggcaaaggcaggagccagaatgaatgaatttcctgtgcccaggcccccctgctgtccctggctcctagcccttggcccaagcatggctctcagcctagacaaggccttcctaggaggcctaggagccctgcgggaggcagagtgcagataaaggctcggagtccgtccatgtggaaaacctgggtctgcggcgatcgtgaaccacatgggcagaggggccagacctggggttcctatgatgggaacatgatgtgactgtggaggccagtcaaggctcctgccagcggtgagtggaacagataaagaaatcagtcatcagaggagagaagtaccccagaccggagtgggaggtcacatatcggctccctgtgctgccctccagaggggaactggggcagaggggcctcctcattccacgaggctggctgggctcaattcaaggaacccttgtcctcccacctctgttggaatcctcactgcagcccactggatccctgcacgagacacacctggggtgcttagtgagcaggcagattcccagatacccaccccgaaaagccagtctgaaagagaacacccaggggtggggcctggccacagccagcctctccagagagtctcaagtccagtaatatctaataactctgtgtttaggccaatggtgttcaatcctagctgtggactgtgatcacctggggaattttttttaaaccctgatacccagatctcacctaagaccaattatgtcagaatctctrgggtgtgccctgggcacccatatattcttaaagctccccagtcgtcccagtgtgggtccaaggactgccccagctccagatcaattctaagagcctcaagatgaacatctggggaaaaggagaagtcatgagtctcagataagagaaataacttgcccaaggtcacacaaggtggtgatggcaaagcccgtcctgaaacccaggcctctttcctgaccgtgggccaatttcttcctgatgctgcatctctttttaaaaaccagagcccaggcaggcaatgcccacagtatttcactttaataatattggaaaccggtacagtcagggccaccacagtggtggggcgggagcctcgatggcgattaggggagctgtaagtctttcgctttatccaaatcttgggcagtaattta

SEQ ID NO: 88764 - DNA, 876 bp, Homo sapiens
aggcatacaatccctggatgtctgtccttgaaggaaccttgaccttgttccaggcttcaaagagaaaagatttctgaaggtcagccggtgggctaggggcacagcagcaatgtgctgccatcccgccagacccccttcctctgcaggcctgagcaatctcttgtttactcctctttaatctcctctccctccctgtccccttgcctgtgtctgctccctccaatctgtggtttaagaggagaaagcccgggtttgagtcccagttctgtcaccacagtctcctggtgaggcctcaggctggggttgaaggagtcctgggttttagtctggytaacatggtggctgctatgtgatctggaggattctcagtttccatatctttatgatggaagcagtagttcatttcgctgggagcggggttcagggtagttaatgaatgagaaaacacgtgcatagagtccaagacgcctggccagcccaggataacctaaacaccacctctgtgtgggaagaaagtgagaagtgagagaatcaggcaaacacggccccttcctccaaggcatgtggtccagaaggttcggggggtgggggaagcggtcgacgcttgggacctgtcctcggtactgaagggagcgcgggggctgtggacggtgctagaacacagtgcttgtaagtgcgggacatcgtggaggaggtgtccttagtttggaaggagctggattgttgctggctaccacgggccccatccggtgtgctaccccccccccataatactggaaggggggcgctaagacagagggaagacggcgaggggctatgttccttggtctctaaccttgttctcaaacttgggcgctgtacacacggctggacgcg

SEQ ID NO: 88765 - DNA, 485 bp, Homo sapiens
agagggcagggtctttgtgaagatctctgtagacccctacagcttgcagaggacccctacagcttgcaagaagcctcacatggcagagtcccccagggaattttttacaatgcagatcccccaaacccgctgccagaatggttatttgatgggaccctggaatgtacattttattattattttttaatttctcttgagacaagatcttgctctattgaccaggctcgagtgcagtggcacaatctcagcttactgcaacctctgcctcctgggttcaaatgatcctttyacctcagcctccgagtagctgggagtgacaggcatgtgctaccaccctcagctaatttttaaattttttgtagagatgagagctcattatattgcctaggctggtcttgaactcctgggctcaagccatcctccctcctcggccttccaaagtgctgggattacaggcatgagccaccgcatctagtggaatctgc

SEQ ID NO: 88766 - DNA, 745 bp, Homo sapiens
agctttctacatatggctagccagttttcccagcaccatttattaaatarggaatcctttccccattgcttgtttttgtcaggtttgtcaaagatcagatagttgtagatatgcggcattatttctgagggccctgttctgttccattgctctatatctctgttttggtaccagtaccatgctgttttggttactgtagccttgtagcatagtttgaagtcaggtagtgtgatgcctccagctttgttcttttggcttagcattgacttggcaatgcgggctcttttttggttccatatgaactttaaagtactttttcccaattctgtgaagaaagtcattggtaacttgatggggatggcattgaatctataaattacctgcccatagggaacttgcagtctagtgtgtgagcatgtatgtgctatgtgtgtagtctgtgtcagaaaagcctcagagacggtaacacttaggcagagatctgaaggtgaagacagccagtgaagaccatttagaggaaagagaataataaaaacaaagtcccttgggtaggaaagtacatggatttttctaggaactgacagaaggtcagaacagcaatgatatagagaatgtgggtgaacatggcagaagacaaggtgggagacatcagcaggggccacagcattgagaccatgggaatagtctcgactttgggagatgcaagtatcagaaacccagtgtaaactggttcaaggaaaaaagg

SEQ ID NO: 88767 - DNA, 694 bp, Homo sapiens
agacagtttttgcctgggctctagctggttcatctgtaacataggtcttctgcagttgcttgaacaaggtgccaaggcagggcttctggtcatcagcttctcccacaagtactggctctactcaatctgatgcccaggtcacaccagaggtctcctgtgccctcctcactgaggctgcaaaggccagaattctgtacgcagcttccctctgtggcctgggagaagcaagacctccagcatgtcctacaaacagctcctcactcagagaatccaaaatacagagctaggcaagccgaggacagccctgggccaccgaggggagaagccagggcaaggcactcacgtggatgctcctgatctcctgttgcgtcagcatccccctggtcttcagggctttcctctgaggcttctgcagagatggggagtggagggtcaggtcccagcagaactcatggagtgcatgggcaggggagggctctgggctctattacacractaagatctcagcagtggggaaagcacgtgcgctatggcctggatataatattctgtctagtctgctctttgagaaaaccactttcccatcacagagccctgtgagccagcagggaacaagcagcagaggacagcccagtgttttcgtaaatgggaatggtcgtgcctctttgtagattcttatccctcaaccctacca

SEQ ID NO: 88768 - DNA, 1520 bp, Homo sapiens
caacagcaaccctgcaaggtaatcactgtttcctgttgaaaatgaactccactggtttagggatgtggctcacacggccctgcagatgtggattcaggagattctctctgattcctggctagtgcccagccactctgaatctctgtctcttgctggggtgggagaagaggtggtgatttcagctctgcaagctgcttcaaggttggccttgctctagtgtccccagagccccaggcacaggctctggctgagtggccttcattactactccttagactatatgcacttttaatgtatttctcaatcaggcctctcatcatgctgcatatagtaggtgctcaataattatccaaggaatgagagaatcaaataatagtaggtgcttaataattgtccaaggaatgagaggatcaaataactacatcagctatttgcaacaccaaactgattgaagatcttgtcctctcccttcttcctcaacacagtccctaagataaaacaaaattccagatgcatgcctggcatggaaccaacaacaacaacaaacttcatccaaatgatacagcatgaacctgcagcttccccttgcagagaacaaggtggccacacgcttggtgtggagctggagccgggcaggacctgggcttcagcaggacacaatcctgctggaatctcagctccacaggctgagacatccctggacgccttcgtctcttctcccggtcagagtgacgcacagcccatctttctaaaagcaacaacttgctgggcctgaaatactcagagtctgcgaggagattagcaagactcccctctacctctaagtctctcctagatgtcaaaatgttgacttcgtccctgctaaaatgtggctctgaaaaaaaaaaatcacatcttttcaaattctctgcaatccctgtgtcatttgcagcatatgttcacgcataatgatgttcctaactgaagtgacatttcagagtaatgagccttcagtgacaacgtgtgagagctgtgacaagttttctctaatataaaaaggagtgtagacaaaccaaaatccacagccaagaccttccagctgctggggctccagtggggcctgtgaaccctgtgcgtgtgcagcaggcctgtggccccgtgggccggccctcacggtgagcacgctgggaactcacgcgcaccctcctacctgctggtgcctgtcaagtcccacgtgccggatgatcccacagggttggagagagggagggaggcaagtgcaaggcagggrcccggcaggagtagagccgcagagctgggccgaggctgctagaaccccagccagcagacacctcggccaagcgacttcacttctctgatcttctcttccaaacgggacgataacagccgcctcccaggaataaaccagacaaattgctaaagaaactcctcacggggctggcacacagggggtctgtgtgccataaatggaaacaactgcttttatttttaaatgtatcctacttttagctaaagctcaa

SEQ ID NO: 88769 - DNA, 1281 bp, Homo sapiens
atttttttttgtctctgcctcaaatctatggctgaaagaatatatatgtgacatttgttagtgtctctcattcgttcatttccccgtccatactctaacttactaggcacaattataagcatccaggacaaaatgatgttgctattgatacagagccaccaattcacccatagtctttagatttctgaggtatgcctttgccctaccacatttttccttttgttgccrtgttattaagcactcagacattagaagccacagaatataattaaaaacatgattcctgaccttgagatcccttcaaaatacatgagagtgagagtgtaaaaagataatgtgtatatggggcacaaaagatataaacattttagaaatcctagtaatgtaagcaacaatatcaactagtatttaatacctgcctcgtaaagtatgatgattaaatgagttaatatatgtagaacatttggataatgtctggaagtattaagcattttataagtatttgctattattattatttactaattatacgatagatgctgttgtaagcattttacaaatatgaaccttatataactctcatttaaatcttcataatagcttatgaaattgattgtattatcatcccgttttatatgtgaagcaactgaggctcagagacataagtaacttgacataggtcatctagaattcagggcccctctctctaaacttactgacctttccactgcagacagctgcctcaaatttatctagcagttagaatttcttttattgtgctactctgaagttatctccgaaattattttacttcatatttattggaagtactaagtgcctcttggctatagataaatacagggtaatagtgtcagtgaggcctaagaaaaatggtagaacattttccttttaattttctactcacttaatttttttaacatcgtatggctctagtataggtcacatagagttcacttttagagggcatggttattttaaaatactttactcaagtctcctctaactcaacatacaattaattttagattttgtattgataattttcctctgcaaagataaattaactcttcaaatcaaagctgtagaagctgagtattgaccgtagtgaatagtaagacttccttattctttccagcatcacctaaagagttgtaaattttcaaatctctgcttctgttggtgggaagcacagttatttataagcataaattacaaatcaataactagctattgaagacaaattttaaaaaaacttcattc

SEQ ID NO: 88770 - DNA, 1281 bp, Homo sapiens
atttttttttgtctctgcctcaaatctatggctgaaagaatatatatgtgacatttgttagtgtctctcattcgttcatttccccgtccatactctaacttactaggcacaattataagcatccaggacaaaatgatgttgctattgatacagagccaccaattcacccatagtctttagatttctgaggtatgcctttgccctaccacatttttccttttgttgccgtgttattaagcactcagacattagaagccacagaatataattaaaaacatgattcctgaccttgagatcccttcaaaatacatgagrgtgagagtgtaaaaagataatgtgtatatggggcacaaaagatataaacattttagaaatcctagtaatgtaagcaacaatatcaactagtatttaatacctgcctcgtaaagtatgatgattaaatgagttaatatatgtagaacatttggataatgtctggaagtattaagcattttataagtatttgctattattattatttactaattatacgatagatgctgttgtaagcattttacaaatatgaaccttatataactctcatttaaatcttcataatagcttatgaaattgattgtattatcatcccgttttatatgtgaagcaactgaggctcagagacataagtaacttgacataggtcatctagaattcagggcccctctctctaaacttactgacctttccactgcagacagctgcctcaaatttatctagcagttagaatttcttttattgtgctactctgaagttatctccgaaattattttacttcatatttattggaagtactaagtgcctcttggctatagataaatacagggtaatagtgtcagtgaggcctaagaaaaatggtagaacattttccttttaattttctactcacttaatttttttaacatcgtatggctctagtataggtcacatagagttcacttttagagggcatggttattttaaaatactttactcaagtctcctctaactcaacatacaattaattttagattttgtattgataattttcctctgcaaagataaattaactcttcaaatcaaagctgtagaagctgagtattgaccgtagtgaatagtaagacttccttattctttccagcatcacctaaagagttgtaaattttcaaatctctgcttctgttggtgggaagcacagttatttataagcataaattacaaatcaataactagctattgaagacaaattttaaaaaaacttcattc

SEQ ID NO: 88771 - DNA, 1281 bp, Homo sapiens
atttttttttgtctctgcctcaaatctatggctgaaagaatatatatgtgacatttgttagtgtctctcattcgttcatttccccgtccatactctaacttactaggcacaattataagcatccaggacaaaatgatgttgctattgatacagagccaccaattcacccatagtctttagatttctgaggtatgcctttgccctaccacatttttccttttgttgccgtgttattaagcactcagacattagaagccacagaatataattaaaaacatgattcctgaccttgagatcccttcaaaatacatgagagtgagagtgtaaaaagataatgtgtwtatggggcacaaaagatataaacattttagaaatcctagtaatgtaagcaacaatatcaactagtatttaatacctgcctcgtaaagtatgatgattaaatgagttaatatatgtagaacatttggataatgtctggaagtattaagcattttataagtatttgctattattattatttactaattatacgatagatgctgttgtaagcattttacaaatatgaaccttatataactctcatttaaatcttcataatagcttatgaaattgattgtattatcatcccgttttatatgtgaagcaactgaggctcagagacataagtaacttgacataggtcatctagaattcagggcccctctctctaaacttactgacctttccactgcagacagctgcctcaaatttatctagcagttagaatttcttttattgtgctactctgaagttatctccgaaattattttacttcatatttattggaagtactaagtgcctcttggctatagataaatacagggtaatagtgtcagtgaggcctaagaaaaatggtagaacattttccttttaattttctactcacttaatttttttaacatcgtatggctctagtataggtcacatagagttcacttttagagggcatggttattttaaaatactttactcaagtctcctctaactcaacatacaattaattttagattttgtattgataattttcctctgcaaagataaattaactcttcaaatcaaagctgtagaagctgagtattgaccgtagtgaatagtaagacttccttattctttccagcatcacctaaagagttgtaaattttcaaatctctgcttctgttggtgggaagcacagttatttataagcataaattacaaatcaataactagctattgaagacaaattttaaaaaaacttcattc

SEQ ID NO: 88772 - DNA, 913 bp, Homo sapiens
gcatagcccatgcactgtatggagggaaaaatgtgagaataacaatactaatttttttttacacactcacaagtgcacataagtactaagctcgcatatctattttctaagtatgttttccagtaattcatctaagaaagtcagcaggtgagataaatgtttagatataaataaaactagctcttagaagcccatttagctccctgcaaaaaacatctctaaacacactgagtatcttctctaagtaaggccttcatcaaatcacaactataattgggtggatacaaaaagataggaatctagttggtaattacagaatgattgtggtgcctacatgaagtttttagtctgaactgcccaactccacaaacaaatatgtgaaatatctaacatttctcagagaactagaattaaattgctattattttggaaatgcaaacattattaatctagcaaatcatttctgaaaacctrtgaaacattaaaatatgagtactgcaaaatttgatacttggaaatcttggaaactagagacagatccaaaattactctgatgtttgcaatttctaacatgatataaaaatattaccacctattgtttaattccttctaaaccaagataaagtagatactccgttgtccaaattcctcccatcccaatcttgtgatattacatgtccataaatgttactcacagtgggcagaatttcttgtctctgaatgttatgttgttgttgtttttgttgtttttttatttgttttttgtttgtttgtttgttttgagactgagtcttgctttgtcacctaagctggagtgccatggcacgatctcagtccactgcaaactccacctcttgggttcaagcaattctcctgcctcagcctccctagtagctgggactacagacatgca

SEQ ID NO: 88773 - DNA, 1285 bp, Homo sapiens
catttaaggatcatcaagtattatgttaagctattggaaatgatcagttacataatgaaaagaatggattgcagaaagwacaaatgccaaaacctgagccttggagaatactttaaatccagaaatggaggataataaacagcaaataacccaatggaaaatggttaattggcagtgcatgggagaaaaaagtaattctcaatgtcattggaaagcaaaaaaagagtaaggcgacatttcaaggtgacgattgttagtgttgtcaactattgtaatattttgaaaaacatgtggcaaaaaagtcattgcaatagaatattaataggcgatgaacgtgggagaagctcaggtacttctctggtaactgcagacttcaagctggattaaacactactgtttaaaacttgggtgcaacactgagaagctgtgaatatttggaaattgacttccactaccgacctatagtccatgtgcacgatggcaccaatgaataaactgaataatgaatgctttcagtatttttttttcggaacataactgagatataatcaagaatttcacgaagtgttctgaaaaaaaaaagaaaaagaaaaagaaaaaactccagttccatgggacattactagtgtgagagttacatgaacaaagtattctggaataaaatgactttgggaaactgagttatacaaagttgagaaaatctcttctttaaagaaagtctttatgtgatgttaattattttaattatttttgtatacactgtagatttcagataataagcttttggaacaaagtgattcctaaaattaactgtgactagaactcattttttcaggcactatctctcagactagttttctgttgactggacagtgggaaatgatgatagactactgttgtgagaagcttggccttcccccttgtcccaaggacttcctatcctacagcttcaggttttatctatgcttagaacaatggaaatgctaatttactgttcattgtaggctatcctcttcatctttcttcacactttttatttgcaatcacttggtaaaatattctttagaagagatacctgtagccaacataagactggacagatgctatccttttcttcaaaaataaaacatgacttttgatctttgactatattgagcatttcagtgctttccttgtggaataggtatcattccactatagtacatattttaataataatgtaagaaaattatttttaagactgagatattaacctgatatttaatatttactttctttttatgca

SEQ ID NO: 88774 - DNA, 1024 bp, Homo sapiens
agtttcctaagaagtagtttcagtaataaatatcagcacacagaggtttattagcgagtgttcttgggatccgtacctgtggaaggaaagtgaagaaaatataatcaggtggaaagagaaatctcaaaaaaaaaacaaacactctgatcctaatgggagctccaaagctggtatggtycttcagaattgggacagtccttgaatataagctgccccaggaaggggccatgcccttaggcaaggtgactcttcagtggcgataactcctgaaatagcttgacagttgagtgccgtctagcaataatactccccatagccaaagcaatatttcccgtagtcttgctgggaaattggaaaaacacatcacggtatccactacaatgtttcttttatctcagtgtttaagatatgtcccaatatggccttgaccgcttctctctcagagcacttatcacactctatagttattatagaattactttatctttgtaactaggaggtaatctttgtgtgggccagaattttatcctactcatttttgtcttaatagcatctgggacggtaggaaataggtgttcaacagacaattttgaataaattttttttaatttgctttaataaaatctaactttctccaaatttagaatgatagaccaagtgtttgtaaaatagtgaaactatgtaatgatgctatatctcaaatcaaccatgagtgtttcaaataaaatacagtggaaatttttccttaaacaatgactgatagattccaacccttctcttttgtgtctgtattcatttggggcatgtgataggagcaaatagaaaatatctgattcaaaaactgacggccacttcagtttctttatgaattaaaaactcttgtcttgttataaaaagctatctttccatttttaacctttttaggggaagtcttagtttaatcaggctgtcctgaatgtgcatttgtgtctatcatgtgttccctaatctctgacactagtattattttgtaaagttactaacc

SEQ ID NO: 88775 - DNA, 465 bp, Homo sapiens
aaacatatgaaataatgatcagttgctcattaaatcttacgtatttccgtgagagtgggactaaagataactagctgaaattatttcatttcaagtaagaaatcccatttagtgtggatgttgagcctgggaactaaatacatatgagaggtgatgaaaccccatgatcatttgaacatagccctcttttagagattgcttgagtctgtggggtagcagggagcagtagatgattgagagttatctggggacaattttaacacctttgtcttgtgtaaaggtattataaagttacgrtatttaagtgttcaagaataatgaagtacatgagagaatgttgcgatcttaacttggaatctaacagggtgtttacaacatgaattattaaatacagcattcttgggtagctttatatttcctgactaacacagcttctcagggtaactcatcatgtagcttcagaaa

SEQ ID NO: 88776 - DNA, 707 bp, Homo sapiens
tgccctaattccctctctcatgggsactcagctaattctcaccccaatctcattgtcaccagtctaggtcagcattggagggaggtgtgggcaactacagcccttgctgcttccaagacagacatcaaaatagttgatcaccaacctttcccactccccactctctgacccaatggacctcacagtcctcaaaactactccaagctactgccaatcaatcattttcttatgtgagcaaaacctgtttgacatccttacacctgtaccagccctctcagaaagctctcaattctggtctccttttcttttttctttttttttttttgaatttatgttaaaattaggatgttcccaatcaaaaaatcatttttccttcatctagtaattgggtgagacaaactagccccagaaagcagacaatgggatgaactgccaagtaggacttttaggggaggcaaaatggattaggaaatgctaagttctctgttgaaggaggatacctggattcttcaggctgtcagagttggagggcttccatagactgtcttgttccaactttgtacccattttacaggttaggactctgagacctcagcagttcttgtttggccagtgagctcagggagttagttccaggagtgggggtcggtctctgcacccactggatgacagcttgatactgctcagcactagacagggttgagttg

SEQ ID NO: 88777 - DNA, 694 bp, Homo sapiens
aagccaacctaaatgatttcaaggtccatttgctctgcctcctccatagaaatttccccccaagttttgcagtgatttaaatatctgcagcaggtttttcctcatatggcactctggtgttacagttatttaagatttggttttattttattagactacttttgtcttaatgaatagagttgtatatttctatagcatctgggatagtgcctcttggtcatagatttataatcatttattaaataaagtcatttaataatctgacactgttgggttgctacttgatgtagatctggagttcaaaattattcttccccaaataatgctagtggttggcagttataatgtaaaatctccattaaaatatcataatttttatctttctttaaaaaaacaaacagagtatacattcttgtcagcacaacatagcacttattctaaaactgatcacataattgtaaaacactcctcagcaaatgcaaaacaatggaaataataacagtctctcagaccacagtgcaatcaaattagaactmagtattaagaaactcactcaaaactgcacaactacatggaaactgaacaatctgctcctaaatgactactgggtgaataatgaaattcaggcagaaataaagatgttctttgaaaccaatgagaacaaagacacaatgtacccgaatctctgggacac

SEQ ID NO: 88778 - DNA, 1346 bp, Homo sapiens
accacagcagggcacaagccatgcaagcctggcacactgtgaatccagcccccgacatggaccatgcacgcgcccacagtccctgccacccctcagagacaccacacatggtgcacacacacctcacttcacacattcatggaaacgcatgctccaagacacaacacaccctcatatatgcacctatgcacaatctgtgcccattcccaaatgtgtcactgatggtaggattgcaggcagctgagaaagacagcttgaggttctcatacacgtttgtccattcagcatatttactagccagtgactggtagccaggcatgcaccaggtgtctgcgtgtgaagttgaagaaggaggagtccctggccctcagctcaaggtcacgatgtggtctgactgatgcaataacaggtggatatgcacagtaatgggagagggaaggggaggagatcgaccagcccttagggagaaggtggaccagagaggcttcccagacaaaaagacctgggctggatcccagcaaataagtatgaacgttcttggcaggcaaagtawgtgtattcatctgttttcacactgctgtaaagaacttcctgagactgggtaatttataaaggaaagaagtttaatcgactcacagttcagcatgcctggggaggcctcaggaaacttagaatcatggcagaaggccaaggggaagcaaggcaccttcttcacaaagcatcaggaagaagtgttgagcgaagtgggaagagcccgttataaaaccatcagatctcgtgagaactcactcaccatcacgagaacagcccaggggaaactgtcgccacgattcaactacccccacctggtctctcccttgacatgtgggtattatggggattacaattcgagatgagatttgggtagggacacagagcctaaccataatcagtaagaaaggacattttcagtagagagaacagaagcagcaaaatcctagaggcataaataggtggctcagggcaggcgaaggtacggaatgcatgccatgcctgataccaagtttcctaaattggactcaagtcctctagtcctctccactcccctcctggcaccccaatcaggccaccctcacctcttcttcgcaccagaacaacagcattcttgcagggctccttgctcgacttaagtcttactccttccagacccactcacctccctctacagccacagggaccttcctaccatgcaaatctgatcatatcgccctcttgataagccctgccttggctccctagtgccctaagactaaagactaaagtttccaggtaggtctttcaggttctgtccaactttcatatcaagt

SEQ ID NO: 88779 - DNA, 1346 bp, Homo sapiens
accacagcagggcacaagccatgcaagcctggcacactgtgaatccagcccccgacatggaccatgcacgcgcccacagtccctgccacccctcagagacaccacacatggtgcacacacacctcacttcacacattcatggaaacgcatgctccaagacacaacacaccctcatatatgcacctatgcacaatctgtgcccattcccaaatgtgtcactgatggtaggattgcaggcagctgagaaagacagcttgaggttctcatacacgtttgtccattcagcatatttactagccagtgactggtagccaggcatgcaccaggtgtctgcgtgtgaagttgaagaaggaggagtccctggccctcagctcaaggtcacgatgtggtctgactgatgcaataacaggtggatatgcacagtaatgggagagggaaggggaggagatcgaccagcccttagggagaaggtggaccagagaggcttcccagacaaaaagacctgggctggatcccagcaaataagtatgaacgttcttggcaggcaaagtaagtgtattcrtctgttttcacactgctgtaaagaacttcctgagactgggtaatttataaaggaaagaagtttaatcgactcacagttcagcatgcctggggaggcctcaggaaacttagaatcatggcagaaggccaaggggaagcaaggcaccttcttcacaaagcatcaggaagaagtgttgagcgaagtgggaagagcccgttataaaaccatcagatctcgtgagaactcactcaccatcacgagaacagcccaggggaaactgtcgccacgattcaactacccccacctggtctctcccttgacatgtgggtattatggggattacaattcgagatgagatttgggtagggacacagagcctaaccataatcagtaagaaaggacattttcagtagagagaacagaagcagcaaaatcctagaggcataaataggtggctcagggcaggcgaaggtacggaatgcatgccatgcctgataccaagtttcctaaattggactcaagtcctctagtcctctccactcccctcctggcaccccaatcaggccaccctcacctcttcttcgcaccagaacaacagcattcttgcagggctccttgctcgacttaagtcttactccttccagacccactcacctccctctacagccacagggaccttcctaccatgcaaatctgatcatatcgccctcttgataagccctgccttggctccctagtgccctaagactaaagactaaagtttccaggtaggtctttcaggttctgtccaactttcatatcaagt

SEQ ID NO: 88780 - DNA, 836 bp, Homo sapiens
caaaggtcttttcatccaagatgccttccatgagagatgcttggaaaggagaaataattaagcgctggggtcaggtcttcagtggtttctcagaaattcgggctctgggatgagacagaagccggaatatgaaggagttttaaggttcaaacacatccacaaggcaaccccaaaacaattttcagaggcttttttctctttctttcttttttaaattagattttcatatttcagagattaagaagctcaaaacattttctgtgataatctttcttagtgcctcaggacagccaaactggttttacttttattccctcagacctgagctttttgagcacttaggacaaatgaagccctatttcacaaagaaggaaaaygcacaaaacccaccccctcaaggcctgcactagattgaggccatgaggaaataacaacaacaataatgataacaatagctgtcagggctctgggaaggggtattatagacaaggtctctgaccacaaaagaggctgcacaaatccacataaaacaacctcaaaccagcgagactgtaggccatgagctgaaccggggtgtgaggatattccagaggctgtcagagggccgtgtggcaatccaggagggctttatggaggagggaagtttctcctcccacagcctcagtgacctaaattccccctaacgaagggacaggccactggggcctggcctgggtgtgctggtcccctacagctatttcaggcaccccgtgctccatcaaggcaaagatacactcctaagtgacttttcaaattagattgtttggaattcctagccagtgcaattaatggatccc

SEQ ID NO: 88781 - DNA, 836 bp, Homo sapiens
caaaggtcttttcatccaagatgccttccatgagagatgcttggaaaggagaaataattaagcgctggggtcaggtcttcagtggtttctcagaaattcgggctctgggatgagacagaagccggaatatgaaggagttttaaggttcaaacacatccacaaggcaaccccaaaacaattttcagaggcttttttctctttctttcttttttaaattagattttcatatttcagagattaagaagctcaaaacattttctgtgataatctttcttagtgcctcaggacagccaaactggttttacttttattccctcagacctgagctttttgagcacttaggacaaatgaagccctatttcacaaagaaggaaaacgcacaaaacccaccccctcaaggcctgcactagattgaggccatgaggaaataacaacaacaataatgataacaatagctgtcagggctctgggaaggggtattatagacaaggtctctgaccacaaaagaggctgcacaaatccacataaaacaacctcaaaccagcgagrctgtaggccatgagctgaaccggggtgtgaggatattccagaggctgtcagagggccgtgtggcaatccaggagggctttatggaggagggaagtttctcctcccacagcctcagtgacctaaattccccctaacgaagggacaggccactggggcctggcctgggtgtgctggtcccctacagctatttcaggcaccccgtgctccatcaaggcaaagatacactcctaagtgacttttcaaattagattgtttggaattcctagccagtgcaattaatggatccc

SEQ ID NO: 88782 - DNA, 3172 bp, Homo sapiens
cagtgactttcccagagcagattagaagctgaaaactgtcctgcagtaacactactgccttagagaatgaattgtgccctgagaggcttctgggaatcttgcttgtttcaggacaggccggtcttggtgtcttgaggcagggggaaaaggtgcattgtggagattcaggtcaagatcaacaggtgtggagcgtatttccaacctgagttgttttattgccttcatttttttaacttattttttcttttgttttgttttgtttttagacagggtctcaccctgtcacccaggctggagtccagcagtgcagtcatagctcactgcagcctcagtcttctgggctcaagcaatcctcccacctcagcctcctaagtatctgggactacaggcacatgccaccatgcccagttaattttttaatttgtaaagaagaggccttgctatgttgccagggctggcctcgaactcctgggctcaaacaatcctccctccttggcctcacaaagggctgggataataggtgtgaaccaccacgctcagcctcatttcctttaaattatcctgcccatattgagacaaagcccacctcccagggaaaggaagcctcacagaaggctgtaaggctacacgcatgcagaaagacagaagacaccccctggactccatggcaaggcgggtgtcccgggtgccagcccttcccctcacctcctctccctctacaggaaccttcccagagccatcttcatctccatcccactggtcacatttgtgtatgtctttgccaatgtcgcttatgtcactgcaatgtccccccaggagctgctggcatccaacgccgtcgctgtggtaagaaatgaaagtcccagagtctcataccaggaatgcagacatagacttgcctgctgtagccccactcacttttccctgatccatggccttgtggaagtggaaatcacccccaagttctcagggcagaaaccacatatgtcattggctggggtatctttaagtgcccaggagcaaacaggtggctgggttgtacctagaacagctacaatggcagaaccgagtcattgccacagagaccgcgtggcctgagaagctataagacatttactatctggccctttacagaaaaagtttgccaactcctagtctcgggcacttaaagctctaaatgtgagagtggtatgaagcagacaggcccctcctcagaaagacataatcttgcacaagacatgccttttctctctgccttctcctccagaagcagaagtcaggtgtgctctttggggaaagagaccatgctggtgcaaggggttgggatccttcacatctaagaaggacctgggaggcaccttgctccctcacctggcatcaggctgggccaccacccagcctgccagtctcttcactggccttatctcaaaagactgtaaagaaagaggtcctcccatctcctggggcagcctgttcttatgaccaacagccttctattctgaacaatctctccttggtaatgtgctgtaaacctggctcagggaatatagaaaaggctggtctcctgcattgtatagtccttaaatacatgaagattcatctatagcttcacagccttttctttctcagactaaggaggggctcattcctattattttacccccaactcatctgttttgatgaattgagaaattctcaccctgtgattctggattaatccctattttgcagttggagacagaggctcaaaaatcataaactttgctcaaggtctcacagctcctagctggagggcaaggatttgagcctggatctgcctgacagatctgcctgacaagcctgtgcccttccctgtgctggagaaatcatataatgtatgtaaggcctggatcacaccacctggcttccaatgctggcccctccactcgctgggtgtgtaatcttaggcaagctacttaatcactatgtgactcagttcctcacccataaaacaagattagtaagtgttagttcattattattattaccagtgtgtactacctccttcagttaattagcctaaaacatgcattaaccaccctgtgtaggggtccacccttgagagggtgggggcaattaagaagcttggcgagagagaattagcaagggtggagataggagaaacggtttcccagagtgaagtgggagctgaggggtcggggagtggtracctctcctttgcttatctccttggttcctctcccagacttttggagagaagctcctaggagtcatggcctggatcatgcccatttctgttgccctgtccacatttggaggagttaatgggtctctcttcacctcctctcggtgagtgctgcctgggcccttccccggccaggggccactctgctgtgcactttgctatttgtatatggtgggcttgtctctgtcagcaggggtctgtgtgggcatctggatgttgggcttgcagaggggtgactgctcacatgagggcgtgtgtgtcagtgtggatgctgaggagtgtgtgctgctcacgtggtcacctgcgatgtgtgtggcatacgggtcctaggtgcttcacatgtagtggcctgtctcatttcaaaaggagcagaagacagaggaggccgccagcctgcctgacgccgcccccagtcagtggctgtggttggcagcaaggcagtatcttggctgcagtcctgtacctgtaaacaggctgctgctggctagaaaagaaccccatttggaaagggaccaagagggagacttgtgcctggggcctctgggtctggcctcccatgaatgttctggaactagcctgcaggtgggatggcttcaccctgattgccccaagaatgcagagctcctccctgctcaacagagaggtggctgtagaggcctttttgaggccacccatgagactcaggtggagaatgtgaagtgagagggtggggaaaagtggaaagcaaacatttgtccaaagaaagagccttttatccgtgacccccaccccagagcactctcagaagccagaagtgcgagcgggtccacgagtcccaggtcctgcctccatgcatccagggacccggccctttcttttgctgtcttcagaaggggctgttgaggctagcagatgttgaatgacttccatttgtgtggttcaagggat

SEQ ID NO: 88783 - DNA, 503 bp, Homo sapiens
taaataagagctgtgaacaacaaggctacctggtgattttgttttttatctttttgtatgtgcatgtggtttttctggctttttgttttgttttgtttttgagacagggtcttgctctacctcccaggctggagtgcagtggcgtcatcatagctcactgcagccttgacctcctgagctcaagcaatcctccagcctcagcctcctgagtagctaagactacaggcctgcaccactgcacccggctaattttaaaatttttagtagacggggtctcgctctgttgcacaggctggtctcagactcctgggctcacgtgatcctcycctgtcagcctcccaaagcgctgggattacaggcgtgagccaccgcgcctggcgattttgtttcctctgtactcttcgtagctcacaattacgctaaaagaacctttttcccattgttaattccttccatttccctcccccacccgtcgattccccctatttttaggaaactcgaag

SEQ ID NO: 88784 - DNA, 503 bp, Homo sapiens
taaataagagctgtgaacaacaaggctacctggtgattttgttttttatctttttgtatgtgcatgtggtttttctggctttttgttttgttttgtttttgagacagggtcttgctctacctcccaggctggagtgcagtggcgtcatcatagctcactgcagccttgacctcctgagctcaagcaatcctccagcctcagcctcctgagtagctaagactacaggcctgcaccactgcacccggctaattttaaaatttttagtagacggggtctcgctctgttgcacaggctggtctcagactcctgggctcacgtgatcctcccctgtcagcctcccaaagcgctgggattacaggcgtgagccaccgcgcctggcgattttgtttcctctgtactcttcgtagctcacaattacgctaaaagaacctttttcccrttgttaattccttccatttccctcccccacccgtcgattccccctatttttaggaaactcgaag

SEQ ID NO: 88785 - DNA, 725 bp, Homo sapiens
tggacgcgcttccctcctgcctgtggtttccctttattccggcagcgctgtgagtccacccttcactyataggagccacatccagaaccttctcctggggccacagcgtgggcttccgatacctgtgtgaccccagctctgccccttcagggctgcgtggtgaagccctcaggaccctccgcgtgggttgggcgggtgacgtggatgagggacaacgtggtgaggtccccgtcgtggcgaagagtgaccagtaggtgcccagggcccaaccctcctctgcacccgagagaaaccatctcctctgcagcagcccccacctggacgctctggagtcctccccacctccctccccagtggggcgcacagcattcttgctaccctgaaaggcagacgggaggcacagggtggcagaggggggccaggtctgagattccagatggaagggaccatggggctccaccccaccaccactgtaggcaggggactggcaggtgtacacccttactcccgcggggcccagggacacagccaccctcctttgaggccctggccctcaggaccctgccacagcgaggtctgtgcctccccagtgaccagtggtcaccgggctcggggtcacccagctgcttccacatgtgacaccatcagctccatgccctacccccaagctgggctcataatcttaattcacagctaagaaactcaaccaaagtcacatcacatga

SEQ ID NO: 88786 - DNA, 725 bp, Homo sapiens
tggacgcgcttccctcctgcctgtggtttccctttattccggcagcgctgtgagtccacccttcactcataggagccacatccagaaccttctcctggggccacagcgtgggcttccgatacctgtgtgaccccagctctgccccttcagggctgcgtggtgaagccctcaggaccctccgcgtgggttgggcgggtgacgtggatgagggacaacgtggtgaggtccccgtcgtggcgaagagtgaccagtaggtgcccagggcccaaccctcctctgcacccgagagaaaccatctcctctgcagcagcccccacctggacgctctggagtcctccccacctccctccccagtggggcgcacagcattcttgctaccctgaaaggcagaygggaggcacagggtggcagaggggggccaggtctgagattccagatggaagggaccatggggctccaccccaccaccactgtaggcaggggactggcaggtgtacacccttactcccgcggggcccagggacacagccaccctcctttgaggccctggccctcaggaccctgccacagcgaggtctgtgcctccccagtgaccagtggtcaccgggctcggggtcacccagctgcttccacatgtgacaccatcagctccatgccctacccccaagctgggctcataatcttaattcacagctaagaaactcaaccaaagtcacatcacatga

SEQ ID NO: 88787 - DNA, 687 bp, Homo sapiens
catgatgtctagtgtgcccttccatgctccagggtgccccatttgggcacttagtccaagggccacccgacatacaaaacagtatcttcctgtgaggggccagagaataggccgcacctggctgccctgcacaatttggaaggcactaggagggacctgtcaacctgcactcactcactcaccggcaggcccctttgggaagagctgttgctctttggccccaggaatcttctatttctgcacaygagtgccaggcaattgtggggccccattaacctactccacaaagcgtagggggccttgctctcggcactgggcatgctccctcagcacatacaacaaagaagtcccccctcccactgattctagcaggaggctgttggggggcagtcatgacacaggcatatacagtgtgtcagatgtgtcagagcccggagaggggatgaggagagcgcagtgttacttcctagagcatggccccggagagcctcccactatgctgacatatgggcagccgtctgggagcttgacactggcagaggggaagagcagtccaggcagacaagaagtcagtgcgaagaccccaaagcaagcatcaaggaggctgggggctgctgcagatctgatgaggggatggcaggggcagagcaggcctgagaacactggcctccactctgaatgaaacag

SEQ ID NO: 88788 - DNA, 687 bp, Homo sapiens
catgatgtctagtgtgcccttccatgctccagggtgccccatttgggcacttagtccaagggccacccgacatacaaaacagtatcttcctgtgaggggccagagaataggccgcacctggctgccctgcacaatttggaaggcactaggagggacctgtcaacctgcactcactcactcaccggcaggcccctttgggaagagctgttgctctttggccccaggaatcttctatttctgcacatgagtgccaggcaattgtggggccccattaacctactccacaaagcgtagggggmcttgctctcggcactgggcatgctccctcagcacatacaacaaagaagtcccccctcccactgattctagcaggaggctgttggggggcagtcatgacacaggcatatacagtgtgtcagatgtgtcagagcccggagaggggatgaggagagcgcagtgttacttcctagagcatggccccggagagcctcccactatgctgacatatgggcagccgtctgggagcttgacactggcagaggggaagagcagtccaggcagacaagaagtcagtgcgaagaccccaaagcaagcatcaaggaggctgggggctgctgcagatctgatgaggggatggcaggggcagagcaggcctgagaacactggcctccactctgaatgaaacag

SEQ ID NO: 88789 - DNA, 687 bp, Homo sapiens
catgatgtctagtgtgcccttccatgctccagggtgccccatttgggcacttagtccaagggccacccgacatacaaaacagtatcttcctgtgaggggccagagaataggccgcacctggctgccctgcacaatttggaaggcactaggagggacctgtcaacctgcactcactcactcaccggcaggcccctttgggaagagctgttgctctttggccccaggaatcttctatttctgcacatgagtgccaggcaattgtggggccccattaacctactccacaaagcgtagggggccttgctctcggcactgggcatgctccctcagcacatasaacaaagaagtcccccctcccactgattctagcaggaggctgttggggggcagtcatgacacaggcatatacagtgtgtcagatgtgtcagagcccggagaggggatgaggagagcgcagtgttacttcctagagcatggccccggagagcctcccactatgctgacatatgggcagccgtctgggagcttgacactggcagaggggaagagcagtccaggcagacaagaagtcagtgcgaagaccccaaagcaagcatcaaggaggctgggggctgctgcagatctgatgaggggatggcaggggcagagcaggcctgagaacactggcctccactctgaatgaaacag

SEQ ID NO: 88790 - DNA, 687 bp, Homo sapiens
catgatgtctagtgtgcccttccatgctccagggtgccccatttgggcacttagtccaagggccacccgacatacaaaacagtatcttcctgtgaggggccagagaataggccgcacctggctgccctgcacaatttggaaggcactaggagggacctgtcaacctgcactcactcactcaccggcaggcccctttgggaagagctgttgctctttggccccaggaatcttctatttctgcacatgagtgccaggcaattgtggggccccattaacctactccacaaagcgtagggggccttgctctcggcactgggcatgctccctcagcacatacaacaaagaagtcccccctcccactgattctagcaggaggctgttggggggcagtcatgacacaggcatatacagtgtgtcagatgtgtcagagcccggagaggggatgaggagagcgcagtgttacttcctagagcatggccccggagagcctcccactatgctgacatatgggcagccgtctgggagcttgacactggcagaggggaagagcagtccaggcagacaagaagtcagtgygaagaccccaaagcaagcatcaaggaggctgggggctgctgcagatctgatgaggggatggcaggggcagagcaggcctgagaacactggcctccactctgaatgaaacag

SEQ ID NO: 88791 - DNA, 686 bp, Homo sapiens
accttggaggcactgcttgggatttaggtctttgtgcagaaatcaatggaaaggcattgaagaattttaagcgaggaagtggagcgaccagatttgcatttcagaaagctcactctcattgcctagtggaaaatggatagtaggggacaagatgagtgtgtgtcaccagttaggaggttgttgcagagagagaagcaagagctgatagttttgttgaccagtgtactggcagtgcccagggaactggtgaggactgcaggaagtattgcaggggggtcgagaggggtgggggtggaattggcaggaccgagggccagactggatgtgaaggaaagaggagtggagactggagaggggcttggggagactagtgggtcaggggtgccatttgctgagacgggaggagctgagctcacctgccactgtgtcctttctcctgtgtcaggggctccctgctgccccaccccgccacaccttgttccccagtcctgkcctgtgaaggcctctgcctttggaggtgccgggcttcctctgtggtcctgcagctcccccaatcacctgccacagtgctctccatccacccagctggcagagatctctcctgctccccctgtggctcttcttgtatggaccgcggctggcaaattagcctctttccacccctcctagcatttttataatccacc

SEQ ID NO: 88792 - DNA, 422 bp, Homo sapiens
aaaaaaaaaatgggggagccagcgctacacaactccagattttattgtcgcctgcctggggtgtgattacaggcctccggctgcaccacaagaatagccctgctccaacatgctgcacgcctgactccgcagcctctcctgcgcctcctgctccctcaccaactgctgactcacagccccttgtggtgttattgataaggataataataactgcaagccaggctgagtcccgggctccgggcctgcaccctcccctggatatgccagtatcaactccacctaacacatgaagagagaggagatttgcccagggtcatggagccaacgacatccttccttccttcattcattaccrcattcattctgcatatttttatcgatgacactgtgttttaggcaggaggttggaaacagtcccttgt

SEQ ID NO: 88793 - DNA, 1712 bp, Homo sapiens
ttgttctaactccgaatcctgggacattagtacaggaaggaccctcagaccatccagcccaacccctagttacaggtggaaacttgaagtcaggagatgacaggggccttgtccacagtcataggcccagttagtgacaggatctggaccagagcccacatctgattccagggaggctccttcattagccattgtttacatagaagagcctggtgcatcataggtgccgactgaaagctccttgaacagaactgctaagcaggaagccagcacttctcctttccatcagtttcctaaaggttcagaatattcacattcagaccgttaggcccactggtgattggaaaaccgctcccaaatgtaagccatatcatttgatactgagatttcatatcaggatagagacctgctccattgtgtaatagctacagaatactccagcttatggaaataccagatttattttaccatcttccattgatggatacgtaacttgtccccaaacttgaactattaaaacagtcctgcagtggatgaccttatacatgtgtgaccttactcaggtgggagacgcccactgcaagtgccattgctagatcagagggggtgtgtgttttaatgtgtgtggatatggcctaatttccctcctagacattataacaatcaagtctccccacaaccgctggacataggcagggagggtggctttatcctgattgtgcagatgttacaggaaaagacgttgaagttcccagatgatgcatctcgtgcctagacaatcacagcaaatacgtggctcaggtgtgacccagatctgctgactcctagcagagtgctcactcctctttgccatgctgtcagcctaaatgatgccctggatgagaaaggagggaggtgggagggggccagggagcagcagctggattggatcctcatcctggcactttctccttttataacaagtacttatgaaggaagagccatttcttgccccctttacagataaggactctgaggctcagagaggagacctgtgtggtgagccagtgggggagccaaggtttgatccccaccagcctgactcacagcccctgtctctgtaacactcagctatgcttgtcaaagtgtggagaaatgctccaccctactcattccaaactcttgcagttctatagcaataagcataggctgaggcaggagaatgcttgaacccaggagacggagattacagtgagccgagatcgcaccactgtactccagcctgggtgatagagcaagattctgtcttgaaagaaaaaacaaaacaagtcctatgggagtaggagggactggcccccatcagaaaggtcctgcagatgtctcatgatatgggaacttgttcctaaaggacaggtctcagcacatcactgagtagcatccatggagcagagttgggcctyctgcagcccagcagaccacgtgcccacctactcacggtgctgaggactaaggatgaggagatgaggcatttcctggtgggtgcttggggctcattggagcaagagtttatattatcccctcaggctgtcaggagcccactgacttcagtttatggctatagggtaaccagatctgggtaccctggagggaggcttctccctagaactgcatgaagtcagggatctcaaagggaaaaagggaaggtggtggtcagtgtcagggttcatgaagtt

SEQ ID NO: 88794 - DNA, 2043 bp, Homo sapiens
tgtatctacatagaacatatatggaaaaatacataagaaaatttggcctatctctggggaaggcaagggagaactgagatgaaagggaggattttcactttcggcatccttctatgttgtttacagagctttttaaagtcatgtgcacgtatttcctttttttaattaaaaaatgaacaattttttaaaaataaaacagcagacactccatacctgtcggttttcctttatactgaatccagtgtgttacatgataagcatgaccaatgcagacagatattacagttccttgcttctctgcaaaaccaccaaccacctttcctaaatttgagtagatgaggcacatgctgtgcaggaaaagggcctacaaaacatttgaaaagtgtgtttttgtattctggtataaataattctttaatggctctaaatgtctttctgcctttattgtcaagctggcagtagtacctagcacgctgtcttgcataaacttcaaaaaaagtactctgctggtcaatggctgttctttatcctccagccaaatgcctaagggactgtatgaacctattcacatcagtgaacatcaacrtacagcttccttaccagacagaatcacactgtgtactctaccaccactccacactatgcccatcaccaaacactacccagaaaagcaacgaggcacacagcactagtaaatgccccatttgtcctgttcctcaacaaaacacaagccagcccacttaataatgtccagaagctgttatatattccaagtaggaacagacatggccagagctgcctaatggctcccagatcccagtttaaagacaaccctaggccttcctatatcacattccaggtgatcccatggctttgggagaataaaaacagctcctctctaccagtacctaggcctggctaccatctcaaattcattatgagctgtgtgatcttaggcaaactgcttagcctctctaatcctggatgtcctcatccgcaaaatggtgccagtaatgtcacccatctatatagctcacagagctacagtaaggataaagcttttggcatccaagtagtcctccatgcatgtcaactaatgtcactaccaacatctttagacacaaacccacagcagcctcctgtttggtctccctaattccactctagcttccacccactggtaaaagtgatcttaaaagggggatatggtaaagtcatcctccacccttcttccaacactgaaatgtagagacagctctactgtcattagaatgaagtccagaaggctcgatgcaaacctctccaagtgtcaacgattaacgatgagaactctgcctccacccacacctctcttccccacaatagggtagccttgacagatgatcctaattctcctttgatgacattttcaaacttacaaagttgtctaataaggatcattatgcacttcagtgtgagctccattcaccactatactgctcacatagctatcaactaacaagaaatgttgaggactcatcttttcaagaattacaatctatacaacccataatagtgttaaagctggaagacatgacaaacaagcttcagtgttctatcatattaaacttgtccatatggagctgaacagaaccagtgagattatgcaagagaagccaaaaggtaagtgagtattaaataccagatcctggccgggcgcggtggctcacgcctataatcccagcactttgggaggccgaggcagatggatcgcctgagttcaggagtttaagaccagcctggccaacatagtgaaaccctgtctctactaaaaatacaaaaaattagccggacgtggtggtgcatgcctgtaatcccagctactcagaaggctgaggcaggagaatcatttgaacctgggaggcggaggttgcagtgagccaagatcgcaccattgcactccagcctgggcaacaacagcaaaactcatctaaaaaaaaaaaaattccagatccttcagttgacaggtcagaccagatgattcatccacctaccatctaacac

SEQ ID NO: 88795 - DNA, 2043 bp, Homo sapiens
tgtatctacatagaacatatatggaaaaatacataagaaaatttggcctatctctggggaaggcaagggagaactgagatgaaagggaggattttcactttcggcatccttctatgttgtttacagagctttttaaagtcatgtgcacgtatttcctttttttaattaaaaaatgaacaattttttaaaaataaaacagcagacactccatacctgtcggttttcctttatactgaatccagtgtgttacatgataagcatgaccaatgcagacagatattacagttccttgcttctctgcaaaaccaccaaccacctttcctaaatttgagtagatgaggcacatgctgtgcaggaaaagggcctacaaaacatttgaaaagtgtgtttttgtattctggtataaataattctttaatggctctaaatgtctttctgcctttattgtcaagctggcagtagtacctagcacgctgtcttgcataaacttcaaaaaaagtactctgctggtcaatggctgttctttatcctccagccaaatgcctaagggactgtatgaacctattcacatcagtgaacatcaacatacagcttccttaccagacagaatcacactgtgtactctaccaccactccacactatgcccatcaccaaacactacccagaaaagcaacgaggcacacagcactagtaaatgccccatttgtcctgttcctcaacaaaacacaagccagcccacttaataatgtccagaagctgttatatattccaagtaggaacagacatggccagagctgcctmatggctcccagatcccagtttaaagacaaccctaggccttcctatatcacattccaggtgatcccatggctttgggagaataaaaacagctcctctctaccagtacctaggcctggctaccatctcaaattcattatgagctgtgtgatcttaggcaaactgcttagcctctctaatcctggatgtcctcatccgcaaaatggtgccagtaatgtcacccatctatatagctcacagagctacagtaaggataaagcttttggcatccaagtagtcctccatgcatgtcaactaatgtcactaccaacatctttagacacaaacccacagcagcctcctgtttggtctccctaattccactctagcttccacccactggtaaaagtgatcttaaaagggggatatggtaaagtcatcctccacccttcttccaacactgaaatgtagagacagctctactgtcattagaatgaagtccagaaggctcgatgcaaacctctccaagtgtcaacgattaacgatgagaactctgcctccacccacacctctcttccccacaatagggtagccttgacagatgatcctaattctcctttgatgacattttcaaacttacaaagttgtctaataaggatcattatgcacttcagtgtgagctccattcaccactatactgctcacatagctatcaactaacaagaaatgttgaggactcatcttttcaagaattacaatctatacaacccataatagtgttaaagctggaagacatgacaaacaagcttcagtgttctatcatattaaacttgtccatatggagctgaacagaaccagtgagattatgcaagagaagccaaaaggtaagtgagtattaaataccagatcctggccgggcgcggtggctcacgcctataatcccagcactttgggaggccgaggcagatggatcgcctgagttcaggagtttaagaccagcctggccaacatagtgaaaccctgtctctactaaaaatacaaaaaattagccggacgtggtggtgcatgcctgtaatcccagctactcagaaggctgaggcaggagaatcatttgaacctgggaggcggaggttgcagtgagccaagatcgcaccattgcactccagcctgggcaacaacagcaaaactcatctaaaaaaaaaaaaattccagatccttcagttgacaggtcagaccagatgattcatccacctaccatctaacac

SEQ ID NO: 88796 - DNA, 1005 bp, Homo sapiens
attcccaccatgtcctgcctaaactgaagctttgtgagcaaaataaatattgcagttgctttaggccactaggtttggctatttattatgcaacaatagaaaactgaaataatcaaatgaggtgctctcactcaatcctcataatcactgaatattttagattccacatataagtgagaggttagtattaataatttcatattgccagtgtataagcaggcactgtgctaagacatggaaatgcattagtgaacatggcagacatagttcctgactttatcaagcttatgtggcagactggctgtgttcatttctttataaccattaactataagccagcaggggcactgctgagcctcactacacatagaaggacagaggatcatgcttttctctaggcatgtcttaatcttaacattctccatcagaaaaaaatcaaatcatgtgtttctcttagcttcaaatgtagtgtgtatccgtctgtgacaattggtcatattcttgcattagaatttcacagactgagtcaagtttttctaaggtttgtttttgtttcaggtttaatgggatgtaattgacaaatagaaattgtatatatctaagttgcaaaagttaatgtttatatatataaacatacatacatacacacacacacacacacacayatatatatataaacaactatcaagctagttaacatatccatcaccttatatagttactttttcatgtgtggtgaaaacacttaagatctagccctgtagcaaatttcatatatacaatacagtattgttttctatagccatgatttctatagtcatgatagtctgtacattagatctccagaacttattcctcctaatttaaactttgtaccctttgaccaacatctccccatttctaccatcctctaacctctgtcaactaccattctactctcagcttctatgagtttgaatattttagatttcacatagaagtgagattatgcaggatttgtatttg

SEQ ID NO: 88797 - DNA, 1005 bp, Homo sapiens
attcccaccatgtcctgcctaaactgaagctttgtgagcaaaataaatattgcagttgctttaggccactaggtttggctatttattatgcaacaatagaaaactgaaataatcaaatgaggtgctctcactcaatcctcataatcactgaatattttagattccacatataagtgagaggttagtattaataatttcatattgccagtgtataagcaggcactgtgctaagacatggaaatgcattagtgaacatggcagacatagttcctgactttatcaagcttatgtggcagactggctgtgttcatttctttataaccattaactataagccagcaggggcactgctgagcctcactacacatagaaggacagaggatcatgcttttctctaggcatgtcttaatcttaacattctccatcagaaaaaaatcaaatcatgtgtttctcttagcttcaaatgtagtgtgtatccgtctgtgacaattggtcatattcttgcattagaatttcacagactgagtcaagtttttctaaggtttgtttttgtttcaggtttaatgggatgtaattgacaaatagaaattgtatatatctaagttgcaaaagttaatgtttatatatataaacatacatacatacacacacacacacacacacatatatatatataaacaactatcamgctagttaacatatccatcaccttatatagttactttttcatgtgtggtgaaaacacttaagatctagccctgtagcaaatttcatatatacaatacagtattgttttctatagccatgatttctatagtcatgatagtctgtacattagatctccagaacttattcctcctaatttaaactttgtaccctttgaccaacatctccccatttctaccatcctctaacctctgtcaactaccattctactctcagcttctatgagtttgaatattttagatttcacatagaagtgagattatgcaggatttgtatttg

SEQ ID NO: 88798 - DNA, 527 bp, Homo sapiens
tagggaacattatctcaatttgtgtgcatacaaattcatttggaagaagcagcctgtttgtactgttgtatatgctggtgaatttatacagatagagttccagttggttctcagatacttttgtgtgcagatgaagacatgtggcctcccttttaattagaagctcttcattccaaaatgcaatatttattaaatctcatgttgagataaatattttttatttacacwattttccaggactaattgctgtgtttttagaaaagccttccactaaactctaatgagtagaattaaatgaaccactaagataaaacaaatcatcaattcagctacccatcatgaatcagttgatcgtgaagtacctgatgtaaatgcaagatcattggccttttgcccaagattgctagaggcaagattatccaggtaatcaacccttgctccccgtcagtttttcatgacatttccccaaaagtaaaaggtgagttcacatatggcatcagatttttcttgacaccaataataaaatt

SEQ ID NO: 88799 - DNA, 527 bp, Homo sapiens
tagggaacattatctcaatttgtgtgcatacaaattcatttggaagaagcagcctgtttgtactgttgtatatgctggtgaatttatacagatagagttccagttggttctcagatacttttgtgtgcagatgaagacatgtggcctcccttttaattagaagctcttcattccaaaatgcaatatttattaaatctcatgttgagataaatattttttatttacactattttccaggactaattgctgtgtttttagaaaagccttccactaaactctaatgagtagaattaaatgaaccactaagataaaacaaatcatcaattcagctacccatcatgaatcagttgatcgtgaagtacctgatgtaaatgcaagatcattggccttttgcccaagattgctagaggcaagattatccaggtaatcaacccttgctccccktcagtttttcatgacatttccccaaaagtaaaaggtgagttcacatatggcatcagatttttcttgacaccaataataaaatt

SEQ ID NO: 88800 - DNA, 1566 bp, Homo sapiens
cgaggataaaataatggataataataatagcagctgttattaattgaaagcttatttgagggccaaataccacagaatatgcattacttatttattgattttaatccatgcacccaatcttatgagtaagactattattatccccaactaataaatgaggaattgaggctcagagatactaagcacttgctcaaaaccaccagctagtacatgcttcactgagggtgtgaactcttcatcgttatatttaacctcattcaacttctggcaatcaatcccaaagaaataataataagtcactcatacacacagaggcgcctcatggtttgagaagagaaaatcagaaaataattaaacatccaacaatgaggcattgctaatataaactgcctccatgttggtcaggctggtttcaaatcatgactgcaaagaatagtctgtgaagaccagctgaagacatgtgttcacctcccacttcttcccaaaactcactgatatcccagtaaataactacaagtgagacaatatcataaaatcactgtgaactgataaaacagaagccaggtgaggtggtgctggtagcagaaccagggcaaatggagaaggagagggaggtggaatggtgaggagaaagaagctgtttcccatcatggaagcaccagcatgggtggatacagataccaggagttggaggaagggcaccaatggtgaaggctgtctgcaggaagagtccatgggctggcctcccccagtctactcaacaatcacctctcacctcttcccccaagagcagcaaatgaattttcccaggctgaaacaggaaatataaccactaaggatccttaacaatcttycaagaaggtgcttaaatttccagagtggggattatcaccccaaaatatgttcctctttggcttagcatgaggagcagcacaacttgcctgcttttgttccacaaatgtccaagtgaaatccgccaatcaactcacctgcccgtggacaaacaaaactactcagcaatctgtgccaccacctagttctacattcctaaaatgaataaacaatccaaatcattaatgctggtggaggcaaacaataccaaagaaagaagtaagctgaacccataaaactgactccaggaaaaatagagaatccagacacaaacaagaactttcacagaacccttaattaatatcttccaagatactgaaggagattttatacacatagaacaagaacaggtgactatttttttttttttttgagatggagtcttgttctgtcgcccaggctggagtgcagtggcgccatctcagctcactgcaagctccgcctcccgggttcatgccattctcctgcctcagcctcctgagtagttgggactacaggcgcccgccaccacgcctggctaatttttttgtatttttagtagagacagggtttcaccgttttagccaggatggtcttgatattctgacctcgtgatccacccgccttggcctcccaaagtgccgggattccagtcgtgagccaccgcgcccagccacaggtgactatttttgaaaa

SEQ ID NO: 88801 - DNA, 780 bp, Homo sapiens
tcctgtctcagcctcttaagtagctggcacctggtgcaccccaccacactcaactaattttttttatttgtaaggatgaggtctcactatgctgcccaggctggtcttgaactcctgggcttaagcaatcctcccacctcggcctcccaaagtgctgggattacaggagtgagccactgcacccagctgcaggtagcctcttgaagctggaataggcaaggaaacattcttctctggagtctccagaaggaattcagccctgctgacccaacaaactgtgttgttttaagccactaagtttctggtaattttttatagcagtaataggaaactaatgcaaatagctttttttggtggttgtttgttttagatattgcatgaggyttattgtgaaagctgggaagaattaatttctacaagtctttatgaactgagactggatcaatgtgatgggggtttaaatgaagtcctgggcagtgccttctggaagcaatacatgaagagatgaagaacaaaatccaagatcactgtcctaaaataaactttccttctgcttaggggcataatgactcacatagggtataacataaacatcgcatctgacacttgaactgcttaagtttgttattgcaggcctggatcatatttatataaatctgaatacgctttcaatttggccaggaatttgttaacacttttttttgagatgaggtcttgctgttacccaggctggaatgcagtggcaccatcttggctcactgcaacctccacctcctgggt

SEQ ID NO: 88802 - DNA, 1150 bp, Homo sapiens
caccgcacccggcctgcaagacctcatttttcataggctacccatttcctttatagagtcmtaatttggaatttaagcagctgccactttataatattcactttttctccgtagtcgaggctataaaactagagatcaggcaaaaggccttggtcagctgtggatactaagagtagaaggtcacatctggcccaacttttcttcttacgtgttatggaattctggcgactactcaacagctgacccagaaatgttcttcctagaatatataataaaattgtaaagtagagatttcaaggtttatcagaaatgttaatgggcatgcttggatttagtgaagcacacaaaagaagagtcctttggtctacaatgtacatgaactcagcattgctcctttccctttactatggccaagcatgtccctgagaagatatcattctcggtctcatctgatgttctagggaacctgaaagccacaggaatcacaacagctgcaataaataaagcatctattcaatacagtttcatgccaaatattattcagcattcttttggccttggtttgatagaaaacagcatggtgaacttactacctctcctttactacagtgagccctaagtatgaaagatgtaacaattcaaacctgcatgtaaataaaatcactgtttgcattactttaaaattattaagacagtaacacagacaaccaaaaaatgtagtaaagtctattgtgattgttgaagaggtattagaattaacactaggcttttttattctccatagggaaaatagtagaaaaatatttagaatatgtgtccatgcaaatgtgtgggttggagggggatttttaaaaaataagtgctacatatgtgacaacataaggaagaacattattaaggaatttcacagaatttttatgtaaagtcttatcatacagtattatgatctcagggatattttgtgatatttacagagtcttctgagggttcatttattcaggtcatattttaaggaggaacttataagattcagatctaaaatataattctgtaatatgcccaactgatcccattaaatccaactcgaaaaggagcactataatgatgtgaagaattcccattctttgagttgttacacctcacttgaaat

SEQ ID NO: 88803 - DNA, 1150 bp, Homo sapiens
caccgcacccggcctgcaagacctcatttttcataggctacccatttcctttatagagtcataatttggaatttaagcagctgccactttataatattcactttttctccgtagtcgaggctataaaactagagatcaggcaaaaggccttggtcagctgtggatactaagagtagaaggtcacatctggcccaacttttcttcttacgtgttatggaattctggcgactactcaacagctgacccagaaatgttcttcctagaatatataataaaattgtaaagtagagatttcaaggtttatcagaaatgttaatgggcatgcttggatttagtgaagcacacaaaagaagagtcctttggtctacaatgtacatgaactcagcattgctcctttccctttactatggccaagcatgtccctgagaagatatcattctcggtctcatctgatgttctagggaacctgaaagccacaggaatcacaacagctgcaataaataaagcatctattcaatacagtttcatgccaaatattattcagcattcttttggccttggtttgatagaaaacagcatggtgaacttactacctctcctttactacagtgagccctaagtatgaaagatgtaacaattcaaacctgcatgtaaataaaatcactgtttgcattactttaaaattattaagacagtaacacagacaaccaaaaaatgtagtaaagtctattgtgattgttgaagaggtattagaattaacactaggcttttttattctccatagggaaaatagtagaaaaatatttagaatatgtgtccatgcaaatgtgtgggttggagggggatttttaaaaaataagtgctacatatgtgacaacataaggaagaacattattaaggaatttcacagaatttttatgtaaagtcttatcatacagtwttatgatctcagggatattttgtgatatttacagagtcttctgagggttcatttattcaggtcatattttaaggaggaacttataagattcagatctaaaatataattctgtaatatgcccaactgatcccattaaatccaactcgaaaaggagcactataatgatgtgaagaattcccattctttgagttgttacacctcacttgaaat

SEQ ID NO: 88804 - DNA, 847 bp, Homo sapiens
tgcattcactgtagtctaatttcctaagaggagagagagaaactagattaaaaattaagaatagaattcaagttagctctctgctactttttagctatggaaccttgattgggacatttaacctcaccaagatatgatatctcagtctataaaatgagaatcattatcctagtgtacttcatgtttttttttttgagaaaggaaatgcaatagtaggaaaatatctaaaatacctagaatgcaataaataatatgaaaaatcattaacgaaatatttattttccaactactgtgttgcagacagtagtatgagatgctagcaatgaaaaagatacrtaagacttaatctctatggtattcagtgtagtgagagagagagacatttagatacatccttatagaacaatgggcggggctgggcacagtggctcacacctgtaatcccagcactttgggaggccaaagcaagaggatcatttgagcccaggagttcaagaccagccttggtaacatagtaagacccccccctaccaaacctacaaaaaattttttaagtagctgggcatggtggtttgcatctatggtcccagccacctaggaggttgaggcaggaggattgcttgagcccaggaggttgaggctgcagtgagctttgataatgccactgcactccaacctgggagacagactgaaaccatgtctcaaaaaataaattacttaattaagaaaggggaaaatttaagatacagagtgttatgggaatactgagaagggctacctaatccagcctagctgaaaggggtcaagaaggcttagtggaggagggaacatctgagctgtcttaaag

SEQ ID NO: 88805 - DNA, 847 bp, Homo sapiens
tgcattcactgtagtctaatttcctaagaggagagagagaaactagattaaaaattaagaatagaattcaagttagctctctgctactttttagctatggaaccttgattgggacatttaacctcaccaagatatgatatctcagtctataaaatgagaatcattatcctagtgtacttcatgtttttttttttgagaaaggaaatgcaatagtaggaaaatatctaaaatacctagaatgcaataaataatatgaaaaatcattaacgaaatatttattttccaactactgtgttgcagacagtagtatgagatgctagcaatgaaaaagatacgtaagacttaatctctatggtattcagtgtagtgagagagagagacatttagatacatccttatagaacaatgggcggggctgggcacagtggctcacacctgtaatcccagcactttgggaggccaaagcaagaggawcatttgagcccaggagttcaagaccagccttggtaacatagtaagacccccccctaccaaacctacaaaaaattttttaagtagctgggcatggtggtttgcatctatggtcccagccacctaggaggttgaggcaggaggattgcttgagcccaggaggttgaggctgcagtgagctttgataatgccactgcactccaacctgggagacagactgaaaccatgtctcaaaaaataaattacttaattaagaaaggggaaaatttaagatacagagtgttatgggaatactgagaagggctacctaatccagcctagctgaaaggggtcaagaaggcttagtggaggagggaacatctgagctgtcttaaag

SEQ ID NO: 88806 - DNA, 847 bp, Homo sapiens
tgcattcactgtagtctaatttcctaagaggagagagagaaactagattaaaaattaagaatagaattcaagttagctctctgctactttttagctatggaaccttgattgggacatttaacctcaccaagatatgatatctcagtctataaaatgagaatcattatcctagtgtacttcatgtttttttttttgagaaaggaaatgcaatagtaggaaaatatctaaaatacctagaatgcaataaataatatgaaaaatcattaacgaaatatttattttccaactactgtgttgcagacagtagtatgagatgctagcaatgaaaaagatacgtaagacttaatctctatggtattcagtgtagtgagagagagagacatttagatacatccttatagaacaatgggcggggctgggcacagtggctcacacctgtaatcccagcactttgggaggccaaagcaagaggatmatttgagcccaggagttcaagaccagccttggtaacatagtaagacccccccctaccaaacctacaaaaaattttttaagtagctgggcatggtggtttgcatctatggtcccagccacctaggaggttgaggcaggaggattgcttgagcccaggaggttgaggctgcagtgagctttgataatgccactgcactccaacctgggagacagactgaaaccatgtctcaaaaaataaattacttaattaagaaaggggaaaatttaagatacagagtgttatgggaatactgagaagggctacctaatccagcctagctgaaaggggtcaagaaggcttagtggaggagggaacatctgagctgtcttaaag

SEQ ID NO: 88807 - DNA, 847 bp, Homo sapiens
tgcattcactgtagtctaatttcctaagaggagagagagaaactagattaaaaattaagaatagaattcaagttagctctctgctactttttagctatggaaccttgattgggacatttaacctcaccaagatatgatatctcagtctataaaatgagaatcattatcctagtgtacttcatgtttttttttttgagaaaggaaatgcaatagtaggaaaatatctaaaatacctagaatgcaataaataatatgaaaaatcattaacgaaatatttattttccaactactgtgttgcagacagtagtatgagatgctagcaatgaaaaagatacgtaagacttaatctctatggtattcagtgtagtgagagagagagacatttagatacatccttatagaacaatgggcggggctgggcacagtggctcacacctgtaatcccagcactttgggaggccaaagcaagaggatcatttgagcccaggagttcaagaccagccttggtaacatagtaagacccccccctaccaaacctacaaaaaattttttaagtagctgggcatggtggtttgcatctrtggtcccagccacctaggaggttgaggcaggaggattgcttgagcccaggaggttgaggctgcagtgagctttgataatgccactgcactccaacctgggagacagactgaaaccatgtctcaaaaaataaattacttaattaagaaaggggaaaatttaagatacagagtgttatgggaatactgagaagggctacctaatccagcctagctgaaaggggtcaagaaggcttagtggaggagggaacatctgagctgtcttaaag

SEQ ID NO: 88808 - DNA, 1015 bp, Homo sapiens
ataacaatgtgttttgctgaagtgcgagtttctcaaaaaaaaaaaaaaaaaaggaaagaaaaagaaagaaggcagtcatgtttttttttttttttccacaatgtgaaagccatttgagtatattttcccccaagagcctgtagaactgggcgcttgaactagccacacatctgtggatgctcagctgtaagtgggtctytcttataaatgtgaggggccaaccctaagctttgttgctagtaagagaatgtacaagtaagattatgagaagttcaagtgaagctaattgcatataagcattttttttttttttttggtcaggaagccagaagaactagaacctggatttttaaatataactcaatacttcagtgtgacttgaaattatgtcttttataagaatgagaatactctggccgggcacagtggctcatgcctgtaatctgaacactttgagaggctgaggcaggaggatctcttgaggccaggaccggcctgggcaacaagcaagaccctgtctctacagaaaattaaatttttttaaaaaagaatgataatactctgccataattcattgacttactaaagcgttagtttggaatgacctcattatgagaggaaaagaaaactgcctcccaatagctgggtttaaatgaccatttctgtgtgggatctggaaatgtattctggtgtgtgaatttttcttctccagtgtacaggccaaagtaccagctctcaactgcctcttcttgttcccattaaataagttgtcacaatttaacacgtagacgttttaattgaagatctcatttcatcttaaacttgggctttgagaagatcttatttcataggcccacttcatttacttcaaaccatctttaaattggaattagaaataaagtcccagttagaatataagcagcttatttgattgttcaacattagagaatgcaagattttttttcaactataataacagtatgttggaaattaccacatgttgctattgtaagga

SEQ ID NO: 88809 - DNA, 1015 bp, Homo sapiens
ataacaatgtgttttgctgaagtgcgagtttctcaaaaaaaaaaaaaaaaaaggaaagaaaaagaaagaaggcagtcatgtttttttttttttttccacaatgtgaaagccatttgagtatattttcccccaagagcctgtagaactgggcgcttgaactagccacacatctgtggatgctcagctgtaagtgggtctctcttataaatgtgaggggccaaccctaagctttgttgctagtaagagaatgtacaagtaagattatgagaagttcaagtgaagctaattgcatataagcattttttttttttttttggtcaggaagccagaagaactagaacctggatttttaaatataactcaatacttcagtgtgacttgaaattatgtcttttataagaatgagaatactctggccgggcacagtggctcatgcctgtaatctgaacactttgagaggctgaggcaggaggatctcttgaggccaggaccggcctgggcaacaagcaagaccctgtctctacagaaaattaaatttttttaaaaaagaatgataatactctgccataattsattgacttactaaagcgttagtttggaatgacctcattatgagaggaaaagaaaactgcctcccaatagctgggtttaaatgaccatttctgtgtgggatctggaaatgtattctggtgtgtgaatttttcttctccagtgtacaggccaaagtaccagctctcaactgcctcttcttgttcccattaaataagttgtcacaatttaacacgtagacgttttaattgaagatctcatttcatcttaaacttgggctttgagaagatcttatttcataggcccacttcatttacttcaaaccatctttaaattggaattagaaataaagtcccagttagaatataagcagcttatttgattgttcaacattagagaatgcaagattttttttcaactataataacagtatgttggaaattaccacatgttgctattgtaagga

SEQ ID NO: 88810 - DNA, 555 bp, Homo sapiens
ctgggctcctcttgtcatttatgtttctattttttaaatttatktattaattttttacagacggagtctcacttgttgccctagctggacttgaactcctgggctcacgtgatcctccttcctcagcctgctgagtagctgggactacaggcttgtgccaccacacccacctacattgtatatttcttgatggcactgcctagaatgagtgacaggggaactaactcctgtattgatgagctcacatgcctcaaaccagggctgtgttgaattcaagtaagtctggcaagaggagcaggtgggtgataaaggaggcagacactgtttatacacaattcttgggaacctggcaggaggatcagagcctggcagggaaaaggagtctttgagaaaaatatcacacaaggctgaatagcactttttaatggaaaattcttgttttgactctaattttatgcttagatgcttttaatttgatccacatttaatttgccattcctcggagaaagcattgattatatgaaaaactatctgctctattgctaatgaaacaag

SEQ ID NO: 88811 - DNA, 555 bp, Homo sapiens
ctgggctcctcttgtcatttatgtttctattttttaaatttatttattaattttttacagacggagtctcacttgttgccctagctggacttgaactcctgggctcacgtgatcctccttcctcagcctgctgagtagctgggactacaggcttgtgccaccacacccacctacattgtatatttcttgatggcactgcctagaatgagtgacaggggaactwactcctgtattgatgagctcacatgcctcaaaccagggctgtgttgaattcaagtaagtctggcaagaggagcaggtgggtgataaaggaggcagacactgtttatacacaattcttgggaacctggcaggaggatcagagcctggcagggaaaaggagtctttgagaaaaatatcacacaaggctgaatagcactttttaatggaaaattcttgttttgactctaattttatgcttagatgcttttaatttgatccacatttaatttgccattcctcggagaaagcattgattatatgaaaaactatctgctctattgctaatgaaacaag

SEQ ID NO: 88812 - DNA, 609 bp, Homo sapiens
ggatctcctgacctcgtgatcckcccccctcggcctcccaaagtgctgggattataggcgtgagccaccgcgcccggccgaaatgcatatttttttaatggtaaggattgaggagtagtagaaaaattagcatattttgtagaaactgctgaaaaagtggtatatatgtgagacagagagagaacttatgtcaaggtagaatttatgccaaaatatttcaagagatatatgttgaggaaaaatgtacaattgtgtttatgagagatcagtattgataatagtctttaaaaatcttaggaattatctataatcagatctgtatctgttatctaattctttttgtgacacccatatcacttttatgatacaataaaaactcttattgattagtcttaaccaatctgtaaaatatgactgtgaaaaaaatgtattttttttctactacctagatctatcatgtcctagggctaaaacactccctagcatttccaggcagaacttgaacacaaagcatttattttcatccaggtgtttaaagtacccaaaagaagaaattttggaggtagctacagttccatcatgtgctctttggcattataaacaaacgac

SEQ ID NO: 88813 - DNA, 609 bp, Homo sapiens
ggatctcctgacctcgtgatccgcccccctcggcctcccaaagtgctgggattataggcgtgagccaccgcgcccggccgaaatgcatatttttttaatggtaaggattgaggagtagtagaaaaattagcatattttgtagaaactgctgaaaaartggtatatatgtgagacagagagagaacttatgtcaaggtagaatttatgccaaaatatttcaagagatatatgttgaggaaaaatgtacaattgtgtttatgagagatcagtattgataatagtctttaaaaatcttaggaattatctataatcagatctgtatctgttatctaattctttttgtgacacccatatcacttttatgatacaataaaaactcttattgattagtcttaaccaatctgtaaaatatgactgtgaaaaaaatgtattttttttctactacctagatctatcatgtcctagggctaaaacactccctagcatttccaggcagaacttgaacacaaagcatttattttcatccaggtgtttaaagtacccaaaagaagaaattttggaggtagctacagttccatcatgtgctctttggcattataaacaaacgac

SEQ ID NO: 88814 - DNA, 531 bp, Homo sapiens
ttacaccaaaaagctagaagttatccaaacccaggttcatccacaggagtatgttttttattgaaaactctttattcataagtttttggaataaagtccaagaacctctggactagagaaccatgaaacatttttattttagagatagtgtttccatcactaatgtatctttatcagtgaagagttgttatccttaattgatatcctcctgtctatcccaccaaaaatgaaaccttaatattccaaatatgtcttaattcaagataatgaccattgttgagagtgctgtctagggcccttgtttttagttttgttcttgaggcaattcccaggtcccattcttgaaagagcctcacaggcctggactgatgtgtacagcttgaattgtcacctgctgcatatctgaagcagctgtatccaccacaacctatgttatcctagtaccatatcttgtaattgaaacagatcccacaggtctcttagctcagyctctctttaaaaagcttagagactttgctgctcctactagct

SEQ ID NO: 88815 - DNA, 1165 bp, Homo sapiens
aatttgtttctattctgtcacgttaaaaacagtcttgcaatgaacaccatggatttgtctttagttacacatatgcgagagtttctcaagaaagaccacatgcctgtagtccaagctactcaggagactaaggtgggtgttgaggctgggaggttgagactactgcttgggcgacacaatgagactctgtcaaaaaaaaaaaaaaagaagaaagagagaaagaaagaaaaaaagaagaaagagagagaaagaaaaagaaagaaaaaagagggagggagggaagtaggaaaggagggagggaggagagagagagaaagaaagagagaaagaaagagaargaaggaaacagagaaagaaagagaaagaaggaaacagagaaagaaagagaaagaaggaaagaaagagaaagaaggaaagaaagagaaagagaaagggaaagaaagaaagagagggaaggagggagggaggaaggagagagaagaaagaaaaaaagagaaaagggagaaagaaggaaggaaagaaaaagaaacagagaaagagaaagaaggaaaggaaaggaagggaagaaaggaagaaagaaacaaagagaaagaaaggaaagaaagaaaagaaagagagagagatcggaagaaaagaaaggaagaaaagtaagaaagacataggtattggtggttgtcagatctagggtatgtatgtttttaattatgttgatttgcctttccatcaggatgtatagaggttctgttttccccacatcttctcaacagtttgtgtgacaggctattgtgaatggtttcctactgtcatctaattgatcatttcacaaatactagtgaggcttaacacatttttatgtgattatttgtcattttctattgtgcttctgtgaatttcctgatgtccctttttcaattgggttgtccttttaaatttgtaggaattttattttatgtggaatattaacagattgcaagttatatgggcaaaaaacataattttcagtttataacaggtcttttcatttttattataatggtctttgtcgtaaaaaaagttattttaattttaatgcaggattggattttgtgtgcatgtgtttatatcctgtagctattttagaaaactcttgccaatatcaggaatgaaaataagaattcattttttt

SEQ ID NO: 88816 - DNA, 573 bp, Homo sapiens
tgcggcgctccaggtaacccaatttcaactcttccaaacatgagtgctaactgctatttccaccrgggcggtacatcagtgccacttgtggccctccactggtggttgatatcaaggatagagggactcagggcgtcacagaagagggagcggaaacctgcctactggattctcaccaaatgacttcctgcgtcttttctccctgacacaattatgcagacatttctgcattgttataaggcttttctttttgtccaaagacaattaaaatgcttctttcataaaattagatgtttttccaaagggttgagaaagaactagagagcccggctttgtaccgttctcctcttcaaaacgcggcgttgctgtcatttcactcttgatcccaaatcagctttctgaaaatacagtcaaatcatgctgggctgcctaaatatatttgcagtgaagtagtgaataatttgaagtgactagtattccacaaatgttttctttatatgaaattttctgttaaattaaatagaatctctttatatcaagaaaatcaaataacccctacctctaaattgagtt

SEQ ID NO: 88817 - DNA, 573 bp, Homo sapiens
tgcggcgctccaggtaacccaatttcaactcttccaaacatgagtgctaactgctatttccaccagggcggtacatcagtgccacttgtggccctccactggtggttgatatcaaggatagagggactcagrgcgtcacagaagagggagcggaaacctgcctactggattctcaccaaatgacttcctgcgtcttttctccctgacacaattatgcagacatttctgcattgttataaggcttttctttttgtccaaagacaattaaaatgcttctttcataaaattagatgtttttccaaagggttgagaaagaactagagagcccggctttgtaccgttctcctcttcaaaacgcggcgttgctgtcatttcactcttgatcccaaatcagctttctgaaaatacagtcaaatcatgctgggctgcctaaatatatttgcagtgaagtagtgaataatttgaagtgactagtattccacaaatgttttctttatatgaaattttctgttaaattaaatagaatctctttatatcaagaaaatcaaataacccctacctctaaattgagtt

SEQ ID NO: 88818 - DNA, 573 bp, Homo sapiens
tgcggcgctccaggtaacccaatttcaactcttccaaacatgagtgctaactgctatttccaccagggcggtacatcagtgccacttgtggccctccactggtggttgatatcaaggatagagggactcagggcgtcacagaagagggagcggaaacctgcctactggattctcaccaaatgacttcctgcgtcttttctccctgacacaattatgcagacatttctgcattgttataaggcttttctttttgtccaaagacaattaaaatgcttctttcataaaattagatrtttttccaaagggttgagaaagaactagagagcccggctttgtaccgttctcctcttcaaaacgcggcgttgctgtcatttcactcttgatcccaaatcagctttctgaaaatacagtcaaatcatgctgggctgcctaaatatatttgcagtgaagtagtgaataatttgaagtgactagtattccacaaatgttttctttatatgaaattttctgttaaattaaatagaatctctttatatcaagaaaatcaaataacccctacctctaaattgagtt

SEQ ID NO: 88819 - DNA, 573 bp, Homo sapiens
tgcggcgctccaggtaacccaatttcaactcttccaaacatgagtgctaactgctatttccaccagggcggtacatcagtgccacttgtggccctccactggtggttgatatcaaggatagagggactcagggcgtcacagaagagggagcggaaacctgcctactggattctcaccaaatgacttcctgcgtcttttctccctgacacaattatgcagacatttctgcattgttataaggcttttctttttgtccaaagacaattaaaatgcttctttcataaaattagatgtttttccaaagggttgagaaagaactagagagcccggctttgtaccgttctcctcttcaaaacgcggygttgctgtcatttcactcttgatcccaaatcagctttctgaaaatacagtcaaatcatgctgggctgcctaaatatatttgcagtgaagtagtgaataatttgaagtgactagtattccacaaatgttttctttatatgaaattttctgttaaattaaatagaatctctttatatcaagaaaatcaaataacccctacctctaaattgagtt

SEQ ID NO: 88820 - DNA, 1157 bp, Homo sapiens
acatgttgtggattttcttaagaactgatacttcatgttaaagccctagtaaaataaatgtttgagttccctgagagtactcctgccacagggtttgggccttgattcaaacacccgcagtgcctgggagacctcccccgccccgcccgccccgcatttatgcaggggtctgccctgttctcacatgaacttctagcaccaatcttccctccagcggctcctagctctgctttctggggacacaagaacataggagtctccaagtcatgcttatattcttccaaacataaactcaaaccccaatgtcccccattcttcttggcactgctgttgagctccccgggtttgaaggctctgagctcagcgctcaaagcccctggtctgactccaggccctttcctctcagaacatttccccttgattctattgatcacatctggacactcagcacagaatgggatgacaggcaactcagcagtaacgggacacggcagtaatgggagagatggcagatgacgtttctttaccatcaccatggaagcctcatgccatgtgcactgggtgtgcttttggaggtgggagggtcagacagcacktcttgggccctgggttcatcccagctcactgggactcttagacattagggatccctgggaggcagcgatgtcattgagcccattttaagggcttaccacactcacagctctgtgtcttcttgacaagtccaccctctctaagccccaatttttgttttactctctaaagtgtgggacatttctttatttcacaggaaacagcaggcagtgagatggagtgagaactggaataaggcaaggaatattgctgagatggttctcaaatcaatggagagagatgtccgtggatgaatcacaaagggagggaatgggtgcaaaggcctcactgagatccaatgacagcagaagctgccaggatctgacgtaaaccagtttggttgaagtgttgggggaggctatatgaccacattttgtttctattggcacaattccatacatggaaaatgtcatgagactcaaaaatgggttcagcagaagctcaaaaatatgctacaaaattcaggaagaagctaaaatattatcagattattttataaaggacacaactagtcaggaaccttt

SEQ ID NO: 88821 - DNA, 1113 bp, Homo sapiens
gactgatgaactcttttaactgcattaggccttggggagctttgcccatctycccactgtagattcagcctcctggttacatgctctcactgcaaacctctcaaccttgctcctcttcctcccagaactgagcatagtggtaactttgtatatgtgaaattgatctcccaacagtaaactgtgagacagtcagagctggaaactcatccctcttgtctattgctggctccctagtgcctgctatagggagcaagtgatcagtaactacttgatcccagccatacatgggaatcacctggggtgggggacaaaccatagtaccaagccccattctggaccaactatatcagacttgctgtgggtgaggcgcacgcgcacacacacacacacacacacacacacaggtgattcttacaccagctctgagaagcactgaggttgggaagtgagaggtggagagcttgctagcatgaatattgatgtcacagcgtgaatcttcactgttccttgttcctttccccaaggccaaatagaagagtcccagatgttctaactagctttatttccccaagtgtcagcatttggccagcatgcctgaagatctagaaactgcagcttctctgccacatacagccaatgcttcaccacccgccttgtgcagggagagcaagcctcagctttgcctgtacactgtgctgtgcacaccagatccccagcataggacagtaacagcacaggcactgcaggggacttcagggaggcctgaatggccctggacccccagcccagacttctgtgcagaagagttaagagttattgagtgactgcaacctaaaggatatttcttctttaggtcatttaactacactaccagcttcttgaagccaggggctgcgtctcgtggaccttattgtctgctcagcaataacacagggcctggtgctttctgacgaatccacacacatgcactgagtggagctgcgctcacggatgagcacagctgcatctttcacggaggctgctttcctgtcagcttgcatttccctggatctctgtgtactgtggagtacagggccttgggctgagcccaaagcattctgagcaaagcatgca

SEQ ID NO: 88822 - DNA, 1122 bp, Homo sapiens
tggatcatttccctgtcccccggccccagcttgctccctgattgcatgtcatttgactcaggctgagccttgcagaagtcatagcggggtggagatgactcacactatgtggttttccaactgttgggagcagccaggcagggtccttttgtcatgagcaaggccatcgccaaatacacattggccagggttcgatgaaaatgtgaaagtctcagccccatcactggactatgacagaagcctgaccaagtatccttatcgaaatgaaaacctttcatagaggtggttctccacctgtcaggagtcactgatcctaacaggggcatgagagctgaaaggaaactttcacagtcatttaatatgacatctttgtttttccctttcttagcatttgtcccgggtcacctggctgggggtcagggggtacataggccaggatcccagctatgactttaggaatgcctgaagctggggggtgctcgggcagcarggaggtgctgagggtgacatgagggtgtacagcatggcagggcagcagaatcatcccagaaagagaggatagccaaagacatcgaggcacaggcgaggttgaggagcttcgacagtggccctgaaaggtgtatggagaccacgtttcaggactttggccacagtggaatcccccgactgtttttggggactgtggtcagggtgacccggctgtggcacatagtgcccaaaaacagtttctccacatccctgcagggcctatcagccaaaattttagcaggcctcaagcccagaaatcactggaattcaaggctcttaaaaataatacttggctaggatacatgaccacatgacattatttctagttaaatcaaaagctattgaggaccatgtctattttcatttcatttatacaggggaggacacctcccagcatctgggacagagggaagtacacgtctttacaaccttggataaaagtcatgtaactcatggcgcttcaccttttcccatggctgccagggggctcagataggaactacatgcttgagtcagcaaccttcattaaagtagagtttatcttatgactttgtctttcttctccttcagggcatgttatgtacttttaatctt

SEQ ID NO: 88823 - DNA, 1122 bp, Homo sapiens
tggatcatttccctgtcccccggccccagcttgctccctgattgcatgtcatttgactcaggctgagccttgcagaagtcatagcggggtggagatgactcacactatgtggttttccaactgttgggagcagccaggcagggtccttttgtcatgagcaaggccatcgccaaatacacattggccagggttcgatgaaaatgtgaaagtctcagccccatcactggactatgacagaagcctgaccaagtatccttatcgaaatgaaaacctttcatagaggtggttctccacctgtcaggagtcactgatcctaacaggggcatgagagctgaaaggaaactttcacagtcatttaatatgacatctttgtttttccctttcttagcatttgtcccgggtcacctggctgggggtcagggggtacataggccaggatcccagctatgactttaggaatgcctgaagctggggggtgctcgggcagcagggaggtgctgagggtgacatgagggtgtacagcatggcagggcagcagaatcatcccagaaagagaggatagccaaagacatcgaggcacaggcgaggttgaggagcttcgacagtggccctgaaaggtgtatggagaccacgtttcargactttggccacagtggaatcccccgactgtttttggggactgtggtcagggtgacccggctgtggcacatagtgcccaaaaacagtttctccacatccctgcagggcctatcagccaaaattttagcaggcctcaagcccagaaatcactggaattcaaggctcttaaaaataatacttggctaggatacatgaccacatgacattatttctagttaaatcaaaagctattgaggaccatgtctattttcatttcatttatacaggggaggacacctcccagcatctgggacagagggaagtacacgtctttacaaccttggataaaagtcatgtaactcatggcgcttcaccttttcccatggctgccagggggctcagataggaactacatgcttgagtcagcaaccttcattaaagtagagtttatcttatgactttgtctttcttctccttcagggcatgttatgtacttttaatctt

SEQ ID NO: 88824 - DNA, 516 bp, Homo sapiens
ttcatttagcaaatatttcttgagacttgctatgtatcaaacattaaagtagggaacatgcaaaacaaaagcctactcttatcaagtttaaattcctgggaaagaaatagatcataagtaaataaacctataattaagcaatcaaatatcagatagtgatgtgtgctgtgaaaacaagagagtaagtaggtgactgcttttaatgggaagatcctatgagaaggtgacattctaagaggtgtctaaattttccttgagcatcatacaccatggaaagacagaagatagtgcagtgagcactacaggtctatygagttccattcctttctattgtataaatctttgtgctggaaacataatattcatgtgcctacctatggctccactggtaaaaattaaaatgaatttggcaatcacgctcctcagaagaggctgataatgttacggaaaataagagctacatatatttggtggggacatagctgggagaaaacagtagcacaaacacataaggca

SEQ ID NO: 88825 - DNA, 570 bp, Homo sapiens
ttcaagtttactgtgaagctatgattttattgaggtgctctgtggccacccagactttttattacagcacattggagaaaatcctgagccaaagatggcttctactcackaaatccttcttataggcaggcaagaaaaacgcagacaagattaagaaacaatgctgtcaacttctgtcttttcaacaaaagttatctgtagaaagctataagttaacagaatacagttaacttaaaacacatggtgtatttaattatgagctccagtatatcctgtttgacaacctgaaaacagaagatcctaacacgagcaatgaaaattacaataatgtaaaaaaaaaaaaaaaaccctaggttttttttatacagactaagaaaataaacacctgtttcttttatactgtaattcaataaaaatgagcccactatgtttttaaaaagtgatacaaatattcttttgttaaggtgtagaaattacattaccatgaacatgcagttgaatgtgctgttgtgtttctccagctgcgttggtagccacacatgtgtatctgccagcatcttccaacagggt

SEQ ID NO: 88826 - DNA, 731 bp, Homo sapiens
ctggcttcatctgctcatgggtggtgctgacattgaagctctgtgagcctctcagcaccgtgccccctacccccaagatgcagggcactgtcaggctgagagtggccaggaccgcaggaccacacggtgtgtggctgggggatctgacaagaggcaggctcaggctgtgaccagctggggtcggggagctrtgagatgtcaccctgggatgtcaccctgggatggcctcatcctggaagagccaagcaaaggatgctgcaggcagcttgcgctgggagaagggggcccatgacctcattgccttgtgctcccacttgcctgccttggagttggccacctttcctgtgtttgctttctgggcaagctttttttgagtacttcagtatagtgacaatgataccatatattgatcatttactgtgtggcaggtacagtatcaagtccctgtgatactaaactcattaagctttgcagcagcactaggacatggacttatgggctctgctcaggagtgagcggccccttacgtgtcctgatgaaaccacatcagtcatttctgaagatcacagggaagtccagctgagcacctttaattctgggactcagtgcacagctgctcttcctgctgaatattcactctgaggaactgtaagtgctgctgaagcaggagcctctgaaggagggagagggggcactgtcacccatggtcctcccctctgctcaggtgctgg

SEQ ID NO: 88827 - DNA, 1295 bp, Homo sapiens
catggcatgattccatttacatgagataaagcagccgggcacaaagacgtgcacatggcatgattccatttacatgaaactctattagcatcgtgcctgtccctggtgagaaaacagcccagggcccaggagaaggtgctgggctgctgcgatccgggtgatgtttacacaggtgcacacaattatcaaaatttaaccaactatgtgccttaaaatgtctgagttttattgcatgcaatttagaccttgataaaatcgatttttaaaaatcatgtcttaggagaggaattagtagcgtggaaaacactctgcagtatgttttctcagcttttctttcatgcatatttrcatatacacaaataccaaatattaatcacgtctaagtcgaagagtgactttttgtgtatgcttttctgtgttttctcgatattattaaatcaacatgacttacttttgtaagcaggaaaaacatttttttaaagtatctgtggcatgcctatgttttgccaggcactttgcagggtgtgctgaggacacgctttataaacacagtactgacctgcccaacgagttcaccaccagcctgggacatcccaagtggggttggtggaaggaaggggaggatcctcccacaaaggtagagcctgggcagtagtcccctcaccccccaacacacacacacacacacacacactcttcccattcccaactctaaaggaataaatgcagggtttgtctaagtgtgttttgcgacagtcaggggaaataacccagatatcaactcagtgtttccagttcaacgagcatgacccacttcaagttcctgttttcgtcctgccctacttcccaccaggctggcggcccagggcacttgctgtcgcggcttcctcaggtgcagacctcacccaggcccaggaagctgcagcgatccaaattgctagtccttgtctgtgctcttgtacagtcagtcactgtcccagcatgatgacccactgacgaaagtgcacgtgcctgggttcaaagccagctccctctgtacatcactgcctctgggcccagtcaattcccactcctactgtccacatctgaaataggggtgatgctacggagaaaacaaaggagtcggaataactaagcggccaccccagcagggcacacacagtggccttggctttgtctttagcccattggtcacctggagctccagggctgctcctgcctcatctcacaggtcctcctagggccagtttttgcacaattctccacctctcatcattcctcaacctaatcaatcc

SEQ ID NO: 88828 - DNA, 1295 bp, Homo sapiens
catggcatgattccatttacatgagataaagcagccgggcacaaagacgtgcacatggcatgattccatttacatgaaactctattagcatcgtgcctgtccctggtgagaaaacagcccagggcccaggagaaggtgctgggctgctgcgatccgggtgatgtttacacaggtgcacacaattatcaaaatttaaccaactatgtgccttaaaatgtctgagttttattgcatgcaatttagaccttgataaaatcgatttttaaaaatcatgtcttaggagaggaattagtagcgtggaaaacactctgcagtatgttttctcagcttttctttcatgcatatttacatatacacaaataccaaatattaatcacgtctaagtcgaagagtgactttttgtgtatgcttttctgtgttttctcgatattattaaatcaacatgacttacttttgtaagcaggaaaaacatttttttwaagtatctgtggcatgcctatgttttgccaggcactttgcagggtgtgctgaggacacgctttataaacacagtactgacctgcccaacgagttcaccaccagcctgggacatcccaagtggggttggtggaaggaaggggaggatcctcccacaaaggtagagcctgggcagtagtcccctcaccccccaacacacacacacacacacacacactcttcccattcccaactctaaaggaataaatgcagggtttgtctaagtgtgttttgcgacagtcaggggaaataacccagatatcaactcagtgtttccagttcaacgagcatgacccacttcaagttcctgttttcgtcctgccctacttcccaccaggctggcggcccagggcacttgctgtcgcggcttcctcaggtgcagacctcacccaggcccaggaagctgcagcgatccaaattgctagtccttgtctgtgctcttgtacagtcagtcactgtcccagcatgatgacccactgacgaaagtgcacgtgcctgggttcaaagccagctccctctgtacatcactgcctctgggcccagtcaattcccactcctactgtccacatctgaaataggggtgatgctacggagaaaacaaaggagtcggaataactaagcggccaccccagcagggcacacacagtggccttggctttgtctttagcccattggtcacctggagctccagggctgctcctgcctcatctcacaggtcctcctagggccagtttttgcacaattctccacctctcatcattcctcaacctaatcaatcc

SEQ ID NO: 88829 - DNA, 985 bp, Homo sapiens
ttttccctgaataattaactcaccagaccttcccttgtttgattacaataaaatcaaacaacactcctcaactcttgggaagtcagtgaattaatttgctgtccataattattattagaatatcctatgtttcatctgattattttcaatgacctacaggtaacattactgatttgaagaatcctctatttgatagaaataaattgcaatcaagacattctcagagggaaggaacaatgaggtgtttactaataatttttttactcaaagcaaatgagtaatcatgttataaacctcttaatatgatcctgtcctaataacaggaaaccattaatgtcaactgtaataaatgttgagrtcattgttttaacctgacgttaaaatgatagtgagacattttccttgccatggctaagaaaagagcaattattgaaaggaatgagtttgatttaaatcctctgaagaaaataataaacaggtaaacagctaaaaattatgaggctcatttatttcccaggtgagccaaagcaattagatagctccttccttcagcttcctatagggtataacaaatcttcctaatgattacttgcttggaaaagcaagcacattttttccttcacattctatttgagaaactcagtttgttttctgattttttggtgaacacttcagtcccattaaacaaagttattcctaactgtgaatacagaagactaccagctacatttaattttacttacagacagacattgttcagttaggaaccataaagaaaacaagtgatgaataaggctgcagccaaaacagacactaaataccaggaatactgacagcaaatacccaggaaggctgacagtcatgagcaatgtcctttgtagtccttggacaaattgattaggaagtaaagtctttgtttctgttttattttcccttgtgttaattccctgtgtgtgtgtgtgtgtgtgtgtgtgtgtgtgtttta

SEQ ID NO: 88830 - DNA, 616 bp, Homo sapiens
caggggtgatggccgcacacatgagcatctatgagggcacccaagagactaaagggagtgagaggtaacaaggacataaaacagagttcccaggacaccagccttggagggacaatccacataagagaaccctgcaaaracaaaggaaaagaacactgaacaaaaacaattaaagtagaaattaataagaacaaggccaagaatgcttctaaaagaaatgagagggaggattttctaaattttaaaataaatataacccaaaatgtaaaatactgtgggaaacaataacagttgtccaagaccacatattgcactatgaaatactgggaagtgaaaaaagaagtaaaaaaataaataaataaaatgtgctaagtttctcaactaaaataggactgagtcaaaagctattgtttctttttgaccttgataattagagaaatattggatcaagtacattattttgcaaaatttagtagaaataaaaaacaggatgattcctcccaaattactgcaggagattaaagaaatcaaagcagagttcatctagctaatgacaggaaataggggaaatggtaggaaagcataaaatccagaaaacataaaataagatcataga

SEQ ID NO: 88831 - DNA, 837 bp, Homo sapiens
ttccaacagctattagactttgttttcttttgagataggttctcactctgtcactcaggcagtggtttggttgggtgaggggtaggatggaagtagcatgatcatagctcactgcagtcttgaacctctaggtcaaggtgttggacttcttaaatgattgttcaggtatccaagagtgtatatttccagaaataggaagtgacagctgctggtctcttgcagcttgggcctcgaacctagagtacatcacttctgctgcatcctgttggttacagccaccatcaarcctgcccagacttcaggagaaggaacatacattaggagtaagaacttggttggttctcagtctaatgcctacgaaaaaaggtaccagcaacacagaagttccttgaaggatgctaaaacttttctcttgataaccatgactgaagattaatgctttagggataggcagggatgctgaatgaggccagcttgccagtctctatatgacctcaagtttagaaagtgacagtgacagaagcataattttggatacccatacatgttaagggaaactaagatccacaagccgatgaagatgtggtctgggcttcatctttgctgcctgccagagtagctcagggcaaaaaccttaaaatgatgccagcctcttttgccaattgccccccatagatggtcccttgcagcctgggaaacagggaaaccaagagtcacggatgtcatttacaccagaagagtcaagcccttggaagagcagctgccttccttcctttgctataccaggagctcctgggagttacaggaagctccagttaccactgcctccatcagacg

SEQ ID NO: 88832 - DNA, 1133 bp, Homo sapiens
acacctattttcactttttgggtatacacgtgggtgtggaattgctaggtcttgtggtaattctatgtttaacttactgaggaagtccaaactgttttccacagtggctgcaccattttacactccattagcaatgtatgagggttccagtttctccacatactggccaacacttactttctgttttttttttttttaattaaattttatagccaccctagtgtatcttattgtggttttgatttgcattttgctgatggctaatgacaggcatctttacctgtgatttttgaccattcgtatatcttctttgaagaaatggctgttcaagtgctttgcccactgtttaattgggttgtctttttgttgttgaaagcagtcttttgattatgaaattaatttatgtattcttctctagggagcttatttggaaatatatacttggtaatataaaaatttatttcggaatataaaataaaggactggacttcattactttttaagtaaacttttattggatgcttccttttaatgtatttttttttgtagaaatgaaattgttttaattttatagcttagcctgatgcctgattccatgcttgcactgactctctgtctgcactaacaaattatcagatttattcctttccaaaatatcattgattttttttcagatcatagaatattcctctcccaacttttttgttgacagctttactgaggtgtaatttacrtgccataaaatacacccattctaactgtacgtagttcagtgatttttagtcaacttaacagcattgtaccacagttaacacaatgcaatattatagcatttctatcattctgaaaagttttcctcagaccttttggaagtcattttctgttcgcgccccttggtgaacactgatgctttctgttactcttgatttgccttttctgagtatttcacataaatggaatcataatgtatagtcttttgtgactagcttctctcactgaacgtgtttttgtggttcatctgtgttgtcgcatgtatctgtagttctattttttattactgagtagtatttcattctgtggataataccacattgtgtttattcattcactagttgatggggatttggatcatt

SEQ ID NO: 88833 - DNA, 1133 bp, Homo sapiens
acacctattttcactttttgggtatacacgtgggtgtggaattgctaggtcttgtggtaattctatgtttaacttactgaggaagtccaaactgttttccacagtggctgcaccattttacactccattagcaatgtatgagggttccagtttctccacatactggccaacacttactttctgttttttttttttttaattaaattttatagccaccctagtgtatcttattgtggttttgatttgcattttgctgatggctaatgacaggcatctttacctgtgatttttgaccattcgtatatcttctttgaagaaatggctgttcaagtgctttgcccactgtttaattgggttgtctttttgttgttgaaagcagtcttttgattatgaaattaatttatgtattcttctctagggagcttatttggaaatatatacttggtaatataaaaatttatttcggaatataaaataaaggactggacttcattactttttaagtaaacttttattggatgcttccttttaatgtatttttttttgtagaaatgaaattgttttaattttatagcttagcctgatgcctgattccatgcttgcactgactctctgtctgcactaacaaattatcagatttattcctttccaaaatatcattgattttttttcagatcatagaatattcctctcccaacttttttgttgacagctttactgaggtgtaatttacatgccataaaatacacccattctaactgtacgtagttcagtgatttttagtcaacttaacagcattgtaccacagttaacacaatgcaatattatagcatttctatcattctgaaaagttttcctcagaccttttggaagtcattttctgttcgcgccccttggtgaacactgatgctttctgttactcttgatttgccttttctgagtatttcacataaatggaatcataatgtatagtcttttgtgactagcttctctcactgaacgtgtttttrtggttcatctgtgttgtcgcatgtatctgtagttctattttttattactgagtagtatttcattctgtggataataccacattgtgtttattcattcactagttgatggggatttggatcatt

SEQ ID NO: 88834 - DNA, 676 bp, Homo sapiens
tcgcctcgcctccataacttttgttagtggagaatgttcacatgtgctacaggtcacgtcagtyacaaccccattccgtagtgacaaccacacatgggtctttacgtcatgtttttcacttttctataccatacagtgcttataaatattctatcacatgctggattttaagctctagagagacaaaaagatttagcttctctgagttgggatgttaagaaaataatatttagatttagcgcccttggtacgtctcaaagactctgtggaaagtatttaatctactatccccattttacacatgagaaaactaacacagagaaaagcaaaataacttacacaagtggtggggccaaaaatcaaaccctgatctgttgggcccagagctcagggtcaagtagagcacatgagtgatggcaaggacagtctgtgactctgcctgtgaagtggggaatggagctaagcaggttttgtgtgaatgatcacataaacctcccacttctctatggagactggtaacacacagattctttggcattaccacggccactttccactcctttcagtttctatgttggccagctgagtgatgggaaaggctttgaagtcatactgaataggcagtgaagatatagctgtctgcaagattatatctatacggtttcttaactacata

SEQ ID NO: 88835 - DNA, 481 bp, Homo sapiens
aggaccatggatcaacaagagaagtgaggtctccctgggaccacataacgtggtgaaggcaccggcctttggttttcaaactctgctcctaagtggagctccagggtctggggaggaatgccgagttaggagggaggcgggaaccggagacccaggcccactcgtccgccccagcgacgctggcacttgcacatatgaggcggcttgcatggctgtgcttgaagaaagggttctgcagctacagcctatctgcaaagccccacgcgaagtttgggcaatgggctgtgtgaacccagaaaatgggagacaggtctcagttaatttacaaagtttattttgccaagggtgaggacgcgcccgtgacacagcctcaggaagtcctgacgacatgtgcccaaggtggtcggggcacagctwggttttatacatttagggagacaggatacatccatcgatacatgtaagaagcacatcggttcgg

SEQ ID NO: 88836 - DNA, 655 bp, Homo sapiens
tcccatctcagcctctcaagcagctgggtccacaggtatgtggcaccacctcccctggtttgttatttgacttttgtctttgcttaaggagttttgccatagagaattttctttttattacatgaggtaattaatctttttcataatatcccccktcccccatgctttcttctagtactatttaaattaaaaacttttaaatctttttaaatctatccaggctttattttggtataagagccaaggtcgtgattgattggtgtcagttagcatccatggaggagacagatgtcaccctcaacttgggaaatttgaggagagatgaataaagggactaagatgtggttggcatgtagagaaaccactaaggctaatgctgggtgggacccctcaggcctcggaggacacagggaggctgcaagggaggtggtcctgcaggagcagagacctgggtgtggggagactcgagtgcaggaccctacagggagggctggggaagcaaacacccactcccagttggctccctgcaggccagtcccacccagcagcccggagtcaggcagccgcaggtggccctgcaggtcacagaggtggaaagtggggtgggccagatgctggacaggtgcagcacaggacgctgggatgagctttgcca

SEQ ID NO: 88837 - DNA, 705 bp, Homo sapiens
gcctcccgagtagctgggactacaggcacctgccatcatgcctggctaatttttttttgtatttttaggagagacagtgtttcaccatgttagccaggatggttttgatctcctgacctcgtgatcggcccgcctcggcctcccaaaatgctgggattacaggcatgagccaccgtgcccagccaagttatgatgcttcttgacataaaatctttaagcattaaaacaatattaaatcataaaatcagtataagaaagtctaaaacattgcagattttcctgaggtcaacttaaacacttaaaaaaaaaagccaaattcttaaaacaattgtttttggtgtcctgctttgatggttccctaaacacttgctctgactattagaaattctgtacctgggtagctggggcccccgtggagagggagcagctcgcccagtgagagaggcttggccattgtcctgcagggactctgctgttgggggagcgggcagggcatgtgcagtgtggggtgtggcattcagagggagtggcctccacagccctgtggcyggggtagggagcccaggggggccatccatgtttctcttgaggtacctggcagaaggcgggtggggggggtgcggggggtggtccttgacagcagagcagagagagatggtggtcagaggcccaggcgggctccgattaggcccaggccagggtccg

SEQ ID NO: 88838 - DNA, 672 bp, Homo sapiens
gatcctcaggtgagtgagatgagccacagaactgaagaggctgcctcccaaatgcctgcagagggcttctcagtctcccgcaggctgtatgtgcatgtgtgtgagtgcatgtgtgtsagtgtacgtgcatgtgagtgtacgtgcatgtgagtgtgcacatgccccgggccccccaggagcagaactgcggggcagttttggagccacacaggacagagtctcatgtctaccacattcgccagtgcctcagccaaagcgcaaactcctgcacagttgcctctgcctccgacatggggctctgcctccttggagtcgtctgatgtgaccacttgaggccccttggggattcatttgtggagatgctggtcctgtctggaaagagcagactgcaccagccaaggaccacggacgtccaggaagcaccatgagccactaatccttggccgtcctgcctgtccctccccgaccccagggatagaccccaagtcaaggaagagggtgggtgcaggctttgctccccagagtgctttgtggcccctgaggttctgagatcacagtaggtgtgtgtgaacatgtgggagcgtgtgtgtgcatgttcacacgcctgtttgtgtttgcatatgtgcgggtatgtttacatgtgcgtgcaagtccatgtgtatgtgaacacgt

SEQ ID NO: 88839 - DNA, 1682 bp, Homo sapiens
gtgacactctgccgccctcagcccatggtgaatactcactgaacgctagagagattgtggctagggtggaggaggcctcccgttaggcccttttgattctatccagcccacatttctggctatcgaactttggggtgtgaggacgggctttgcaaagcttcgttggcattgtggacaataagtgtacagattctgactgaagccttggtcaaggaagccatcaacggtggtaccaatgttaagcttattattattattattatttttagtgacagagtgtcactctgttgctcaggctggagtgcagtggtttcaatcataactcactataacctcaaactcctggtctcaagtgatcctcccacctcagcctcccgagtacctaggaatacagatgtgccatcatacctgcctattttttttgcgtttttttttttttcttttttttstagagagggtctcactaggttgcccaagccggtttcttactcctggcttcaacagacctgccttggcctccaaaagtgcttggattatagacataagccaccatacctgacccaatgttaagtttaaagttagttttttccctcctggcctcactcttgcaacttttctatctgccactggggtcaggatccatcctggggctcccacccttcctggagaaggagaaaacacccacgtcctggtagtgttcagttcttccaggcccatcagagctggccgtggttgcagggctggcctggtggtcctctgtgctgggctctgttcttagtccacacttaagttctcgtagcacccagcaccttggaggctgtcattgtcagctccttcttaattccactgattgtacactttccagactgaagtcattgcttggtccagacaggaacaaagaaagccatggctgcttgccaggatctcctcttctctgagctgccaggttcagaagctcctctgtgcctgtgtggtcaccagcatctaccaccagtcttcctgcccctgtgccttctatgccagtttcttcgtgccatcttttgtgcatgtaaaatcctgaagtattccaagagcattagtggcagtgaactgaatgcttgcagtagctttttcgtggctgttgctgacccttccaacagttccttgagggtccacctcaacacagctttaagaagagggcagctgagggctgagtccctggctgaatgaagaagggtcaggcctggccctgaggccactcctcagaaatgcacctgatacaactagcgtctcctgtagattcctcagcttcctccttgctggggagttctaggttatgctgccttggagtgtcttgctattgtcctgggctatgctactctttggccctgcctgatactcactccagttgcagctgagctgtttgaaacctgctctcctaagttctggggaaaatcttaggccctcctctatctgatgctgtcagcaggacaggccattgattatttgagggtcctattgcttcctccctgcaggccattcttcaccggcctgctctgggagcccttgaccctgggaggtggaactctgcccagctttagtggtggaatatgcaggggtagtgtcttcctgagtctccttcctcaccagacgctgtgaggcccctgcctgggctgcagattggggttggggagggtggcacg

SEQ ID NO: 88840 - DNA, 814 bp, Homo sapiens
gcctgttgttcaaatatacgctactggcagtttctcaaaatgtcaatcacttcatctctgctttaatttactacatatattgctcagagtgctgaattaatgatgtgaacttgaagtttcaggtcttcaagtaatccctgggtgatgcatcgggattaggcctttgtagtagaaattatggacatgcgtgctgagctttttgtgtcttgctattttttcagccttgtatgaagggccaaaagatgtgaagccttattaaacccagtttatgggaatctgttgttttggactgagctcctgcaactaggcccataccagaccaaaccagaatggagtcactcttgctrggtgccatgtaataaccaaactgaatgaccagttttccaaaaaacaggagatttcacagcaaccaatcagaaagggctcagtctacctaaagcctggaggataaggaaattctgtctactttaaccttataaggaaagtaactttgaaatgaccaatctgcttttcgttctttatttcttgatccttatttctgctttctttagcaatttctgtctataaagtcaacacctgctgctcggctcatgggagtttctcctgttttgtagacaggatgctgctcaattctgaatcgctaacaaaagccagttctatctttaaacctcagttagtgaaaattttgttttttgacaagctataagaagcacatagccacatgacttatgattatacatttttagattatttcttaactattaagattctcaaaaatgtttaggaaaataaatgacctctaggtttaggttta

SEQ ID NO: 88841 - DNA, 551 bp, Homo sapiens
tggtgctaagctaggaatttctaggcttgtctctccttctttctcagtttgaatatgatacagtatccgttatttaaccttaattctgataaaatagtattttcaataatcagaaattctgaggatcttgttgtatttataaataacagaaataaactataaagaagtcctctttgacttttctcaattccatttttctttcacacagacaatcattattcggtgtacaactttttatttgtcatagttttatatacatatgtatctgcaaataacaggcaatattgtttaaaaatgttgcataaatatattatgggcattctaaaatttgtttttattttattattttgctaagcattgtttaaaaatgtattcatgtagatatagaaaccactaattacaaaatgattactctaaggatactttcagtttaattgagaatggctttatgcctataaaattcmgttctgtttttgaaaagtagcttttaggaacatatgtaccagttatacaagaatatatcttcatagtcctggtacagctagtctttc

SEQ ID NO: 88842 - DNA, 551 bp, Homo sapiens
gatgacagcatcacctgtgggttcagaatcagagacctccagcttctgtccccattttggggtaatgtatgtgccacctttcttggattttatttaatcagtgagtctcctccccaggagattggggactcaactatctctaaacattttctcatcttttcttcacctagggttcctgggctcctgttgggcctcactggaagctcctagggttaaaccaaccttgggcattaatttcagtgtctgttctccacagtcacaaaaatatggacctctagttacacttcataaaatagcagagatcctacctagtccactgacagatgtcagcatagcatcctcttctagaaatttactagcttatgttttctgggtacccccaaattctatagcaagatctaattctcagtgcagatcttaacaccgtatctgagtattttgtgtctatatgagtttgcctattcataagagtccagcgaatggtattaaacatccccttttgtctcctgcaattgcccttagatccttcctgaggatatgccwgtctagtt

SEQ ID NO: 88843 - DNA, 523 bp, Homo sapiens
tggatgggtgattttgtgcatgctctcagacaaacayacatacacacacacacacacacaaatacacatgcacatgtgtagacacacatgcaagcatacatatattcatgcattcatatatgtactcatagacaaaaacataaatacatatgcacagagacatacagacatacatttacacacaaacacacatgaacaaccaatgcagacacacacaaacacatgcacactcagacacaaaaatatttccacacccacacaaacacatttatatacagacttacacactttttgtacacttatacacacagtcacagacttattcttacccaaaatatgcacatatacatacacacatttacacacagacatacacactcacatacaaatgcatgttcaccacatcaaggatacatataagtgtgtgtatatgagtgggtttcccaatgaaacaaatataaaccaaataaaatttcaacttctctttatgaaaacaaaacaaacagcttgaaatctctgggat

SEQ ID NO: 88844 - DNA, 1235 bp, Homo sapiens
gaacaagttctaaaaggatacactccaaaacagaacagttgagggggaggagagtggtcctggtagaattttatgttgtttgaattttgccaatcagaatgtattcgtggttttttttttccttttttttctttttgagagggagtctcactgtgtcgcccaggctggagtgcagtggcgtgatcttggctcaccacaacctccacctcccagattcaagcgattctcctgcctcagcctcccaggtagctgggactagaggcatgcgccaccacgcctggctaatctttgtgtttttagtagagacgaggttttgccacgttggccaggctggtctcggactcctgacctcaggtgatccacccgccttggcctcccgaagtgttgggattacaggcatgagccagtacacctggcctgtattcctgtatttttatgtaactaagaccatatcaagattgataagtaaatgaaaagtcagactattccccgtgcccacaccaggcaagtaaaccacctgttttgtttcctcagggatttttgccaagcctgaccatgttaagatgacatatccaaagactcagcttcagcattcactgcctttattattgatttgtgacaatctccgtgaccctgggaacctggggacaattctgagatctgcagctggggcaggctgcagcaaagtgttactcaccaaaggtaaggacatcaaaggccaggcatagtggctcacactcgtaatccagccctttgggaggccgaggcaggagggtcacttgagcccaggagttcaggaccatcctgggcaacatagtgagacctcatctctacaaaaaaaactacaattagytgggtgtggtggggtgtgcctgtactcagtcccagcaacttgggaggctgaggtgggaggattgcttgagcctgggatgtcaaagctcatcacatgtcaagtgagctcatcactgcactccagcctgggcgacagagtgagactccctctcaaaaaaataataaaccaggtggattagttggtctggtctttttttttttttttttttttattaaagagatggggtctcactatgttgcccaggctggtgttgaactggctctgactcaagcagtcctcctgcctcagtctcccaaagtgctggaattataggcatgaacaactatgcccagccaagtcaatcactgttaggtgagctatggctctgggcaggcagacatgc

SEQ ID NO: 88845 - DNA, 1406 bp, Homo sapiens
ctctgatgagatcggcccactgcagccagcgcgaaggcaygaacccagcattttgtaaagactcaagggcctggttgtgacccaggaggtgtggatcacactttgcagccacggccactctccccagccgctcaggcgggaagcagcctggggacggctccctgctgacctgaggctgccgagcatggacgggaagaggaagcagcaggggagggaatggttttccatggcgaatggctacctttccttgccacatttgtctgtgggctctctcagaagcacaggcagccctgaccctggggtcctttcaggcaaccctggggccaggatcactcctgtgccagaagtcccagctgagccagccctgggccaagcctctcctccgcactcacctccccggctacgaagaacagaaggggtgcctcctcctctttggctttgtacttggcaatgattttctcagctatcggctgaatcagctgcttggccgcctcggactctccgtcatcctcagaatctgtgattgggtcgggggtagaaaaagacggggagaaaaagcactggcttgtcaaacagagcggcacccgccgagggggcctgagctgcagaaacgcccgcctgagcggcccctgaacggaaatgaagttccccttggatgcaggtcttgctccccgcatgcatgggtgtgtgtgcacatgcgtcccagcagcaaagctcacagtgctctcctgcaccgggctccccaggaggaacctgcctcactgagcagctctgctctcccaggtagacagtcttcccattgaattcctcacaaacccgcctgggaggctgagcttcccctaagccaggacctgaggcgcctgctagtgtttctctcagccacagaatgagaagccatgacctccgacctccgacttcccagtgaaaatggcagaagaactggtggtgagcgggagggggtgaggactgtggtctggtcagcggctttttttttttttttttttttttttgagacagagtctcgctctgttgcccaggctggagtgcagtggtgccatctgggctcactacaacttctgcctccccggttcaagcgattctcgtgcctcagcctcccgagtagctgggattacaggcgtgagccaccacacccaggctcgtacagtgattttgagttgttggaggggagccacaagtccaaggcagagggccaggttttgcaaaaggaaccagggtcatcccatcagactgcagggagcctggcatggatgcgcctgtgtccccctggcccggctgggcagttacccacggagctcagactgggtgagatgggagacggggaggtgcaagcgaggacaaaggagccaaggcagccaccgggctggagcagctcttcagagcacaga

SEQ ID NO: 88846 - DNA, 1406 bp, Homo sapiens
ctctgatgagatcggcccactgcagccagcgcgaaggcatgaacccagcattttgtaaagactcaagggcctggttgtgacccaggaggtgtggatcacactttgcagccacggccactctccccagccgctcaggcgggaagcagcctggggacggctccctgctgacctgaggctgccgagcatggacgggaagaggaagcagcaggggagggaatggttttccatggcgaatggctacctttccttgccacatttgtctgtgggctctctcagaagcacaggcagccctgaccctggggtcctttcaggcaaccctggggccaggatcastcctgtgccagaagtcccagctgagccagccctgggccaagcctctcctccgcactcacctccccggctacgaagaacagaaggggtgcctcctcctctttggctttgtacttggcaatgattttctcagctatcggctgaatcagctgcttggccgcctcggactctccgtcatcctcagaatctgtgattgggtcgggggtagaaaaagacggggagaaaaagcactggcttgtcaaacagagcggcacccgccgagggggcctgagctgcagaaacgcccgcctgagcggcccctgaacggaaatgaagttccccttggatgcaggtcttgctccccgcatgcatgggtgtgtgtgcacatgcgtcccagcagcaaagctcacagtgctctcctgcaccgggctccccaggaggaacctgcctcactgagcagctctgctctcccaggtagacagtcttcccattgaattcctcacaaacccgcctgggaggctgagcttcccctaagccaggacctgaggcgcctgctagtgtttctctcagccacagaatgagaagccatgacctccgacctccgacttcccagtgaaaatggcagaagaactggtggtgagcgggagggggtgaggactgtggtctggtcagcggctttttttttttttttttttttttttgagacagagtctcgctctgttgcccaggctggagtgcagtggtgccatctgggctcactacaacttctgcctccccggttcaagcgattctcgtgcctcagcctcccgagtagctgggattacaggcgtgagccaccacacccaggctcgtacagtgattttgagttgttggaggggagccacaagtccaaggcagagggccaggttttgcaaaaggaaccagggtcatcccatcagactgcagggagcctggcatggatgcgcctgtgtccccctggcccggctgggcagttacccacggagctcagactgggtgagatgggagacggggaggtgcaagcgaggacaaaggagccaaggcagccaccgggctggagcagctcttcagagcacaga

SEQ ID NO: 88847 - DNA, 614 bp, Homo sapiens
gggatccacctccacggaagagagctccaggtcttgaatctgcctgcatcctgctgcaacagcagctctgatgttttctttgccttcctgccagttttcctgttcgtcgattctggctgcctttttgccgaggccaactagcaccacgctggggaagtcctgatgcagaccataaaagkttcgagtcttgcctgccttcagaggtggtccagatatgttcaaagtctctctcagctttccagctatcaatttatcaagattctctcctgcacttgtgaactgtggcacatcatcttctttttctttggaatagattcctaaaacaaggcccttcgtcatgtctgcagcggagagaccccggctcccgaaacatctcacggccagacgtcagacgatgactcgccccacccaatgtttgtattttagtagagagagggtttctctatgttggtcaggctggtctcaaacctcgacctcagttgatctgtctgcctcggtctcccaaagtgctgagattacaggcgtgagccactgcgcccagcctatttttattttttatatattttttgagatggaatcttgctctgttgcccaagctggagtgcagtggcgtg

SEQ ID NO: 88848 - DNA, 774 bp, Homo sapiens
cacacaaccaaataggatgtggctaagtatgagatgccagaaagtttgactctttgcaaggtgactctaccaggctccattcatatgatgcttcctcccatttttctttaggtttggcaaatttacaataactttgatgagacttgggagtgagaagcctaagtctgactcagcaggtcttttcctaaatcctgagttctcttaaataagagtctaacttccaaaagcctttattcacactcaccagtacaagttctgattatcttatcaatgcttgagcctaagggagatcagtgatggtcacttgcctttacccccacttccatttgcttatacctgaagtcctgtccagtcatatccagcagaattttaaaaaataaaagatggccaataaactagaccaaaggacaaaaagataatcggtgaaacctcacctcaaagatggcagaggacaggagtttaagaaaacaaagggacagttgaatggacactaaggagaaaragaggttcccaaagaagggatataaacacttcctgagaaatccagagatgttcaacccctagaaataagaagaaagacacattgggaataggtgtttaagatgtagatgaggcaagatcaataaaatagaggcacatatgtgccacgaagggacactccatgtgaattataataggcaacttatggctcacctcaagaacagttatgtccattgttctgaactttgacatatgcacccacattattgaacttacaaagcttaaggagtggaa

SEQ ID NO: 88849 - DNA, 774 bp, Homo sapiens
cacacaaccaaataggatgtggctaagtatgagatgccagaaagtttgactctttgcaaggtgactctaccaggctccattcatatgatgcttcctcccatttttctttaggtttggcaaatttacaataactttgatgagacttgggagtgagaagcctaagtctgactcagcaggtcttttcctaaatcctgagttctcttaaataagagtctaacttccaaaagcctttattcacactcaccagtacaagttctgattatcttatcaatgcttgagcctaagggagatcagtgatggtcacttgcctttacccccacttccatttgcttatacctgaagtcctgtccagtcatatccagcagaattttaaaaaataaaagatggccaataaactagaccaaaggacaaaaagataatcggtgaaacctcacctcaaagatggcagaggacaggagtttaagaaaacaaagggacagttgaatggacactaaggagaaagagaggttcccaaagaagggatataaacacttcctgagaaatcyagagatgttcaacccctagaaataagaagaaagacacattgggaataggtgtttaagatgtagatgaggcaagatcaataaaatagaggcacatatgtgccacgaagggacactccatgtgaattataataggcaacttatggctcacctcaagaacagttatgtccattgttctgaactttgacatatgcacccacattattgaacttacaaagcttaaggagtggaa

SEQ ID NO: 88850 - DNA, 774 bp, Homo sapiens
cacacaaccaaataggatgtggctaagtatgagatgccagaaagtttgactctttgcaaggtgactctaccaggctccattcatatgatgcttcctcccatttttctttaggtttggcaaatttacaataactttgatgagacttgggagtgagaagcctaagtctgactcagcaggtcttttcctaaatcctgagttctcttaaataagagtctaacttccaaaagcctttattcacactcaccagtacaagttctgattatcttatcaatgcttgagcctaagggagatcagtgatggtcacttgcctttacccccacttccatttgcttatacctgaagtcctgtccagtcatatccagcagaattttaaaaaataaaagatggccaataaactagaccaaaggacaaaaagataatcggtgaaacctcacctcaaagatggcagaggacaggagtttaagaaaacaaagggacagttgaatggacactaaggagaaagagaggttcccaaagaagggatataaacacttcctgagaaatccagagatgttcaacccctagaaataagaagaaagacacattgggaataggtgtttaagatgtagatgaggcaagatcaataaaatagaggcacatatgtgccacgaagggacactcyatgtgaattataataggcaacttatggctcacctcaagaacagttatgtccattgttctgaactttgacatatgcacccacattattgaacttacaaagcttaaggagtggaa

SEQ ID NO: 88851 - DNA, 635 bp, Homo sapiens
gaagactctgtagaaggacatttggattacaaatcatttttgacgttcatcaagtactcaaatatatgttttaattgtgcctgatgcacattgcttcttttataatgcactaatcttactctaagcaaagtatgtagcaattttgagataaggaagaaagtttctgagctttcatgaggtggctgtcaagatcatgaccacctgtggggtgctgggtacattacccttgagaagatgctctgaaatgacattgtttcttcttttcatttatcgcaaagggtttcattctttatttatttattttttttagttggagtatcactctgttgcccaggctgaagtgcagtggtatgatcatagctcactgcagcctcaaactcctggcctcaattgatcctcccacctcagcctcctgagttgctgggaatacaagctcatgccaccatgccggggtaatttttttttttctggtggcggagrgacagggtcttgctatgttgcccaggctggtctcaaactgctggtctttagttacccttcacccttaccatcacaaagtattgagattgcagatgtgggccacagcacctgaccaagggcttcattcttaatgtctaccttctgtcctggattct

SEQ ID NO: 88852 - DNA, 628 bp, Homo sapiens
aggcagctctgtaggctcacctggggcagatccagacggtccatccctcagaggttgtaggtggaaacctgggtggtatcaggagaggaaacacaggacaagagcttggagtttaacagaaatatgtctgcacaggctgggcgtggtggctcacacctgtcatcccagcactttgggaggctgaggcaggaggatcacttgaggtccgaagttccagactagcctggccaacatggagaaaccacatctctgctaaaaatacaaaaattagctgggcatggtggtggacgcctgtaatcccagckactcaggaggctgaggcaggagaatcacttgaacttgggaggcagatgttgtagtgagccaagattgcaccactgcacttctgcctgggcaacagagcaagactgtgtctcaaaaaaaaaaaaaaaagggagaagaaaagaaaagaaacagaaaagaaacatgtcagcacagatatttgagaacctcaggaacaccatagatctgctgtttgtcccactgacctggtcaccacacagggtaaataaatcagggcagttttgctgtaagatctgcttcttcagctggaaaacaaaagaattcacccccctgggagtgatcgtag

SEQ ID NO: 88853 - DNA, 795 bp, Homo sapiens
aagaagcctgcagtgaacacaaaacaaaaaagcaagtgaactcatatctttctcgttcgtctgtttcgtgtggaagtgaatccaggaaagattcaacttcctttctcagcataaactagattgtaagccctgtaagatcacttatctctggtatattatctaccaaccacattcagggattagcatgtggcragagacaaaaatgttccttgaataaatgaatgaaacaattcttaataaaaccatacaaattaataatgctactggatctagaggaaatacattcaatattgccttcatcaaatgtattcagcactacccaggcatcaagcactgttttaggagctgaggctacagcagtaaacaagagacaattcccgaactccgggagtttaggatgattagtcaggctgctgaatgatttgcagaatgaatctgagatgaagagagtcaagaggcaggaggaccagtgaagaagcagccgacagtgagtttaggtgagaggtcaggactggatctgagcatcagtaggacagttgaggccctgatagtggttgttttaaagaagggctccttatagttcctcctgctcctttgagaaccaggcacgtcacattgatggcaaggatcactgacattcagaaagaccagctaaagagaggacaatgaacatggaaaaacaagtccctccactctagctgggccccttcagctccaaccaaccccacagggccattcactcagcattttgggggaaacaaagtgagaaaagagtgttacagctgcctcatcaat

SEQ ID NO: 88854 - DNA, 679 bp, Homo sapiens
tcctgccttggcttcccaaactgctgggattacasgtgtgagccactgcacccagcccctttctcttatttcaaacctgtctggcctactctttagaatccaagccacaggaaagtcagtgtaattatttgaaagatatttgtcatcttctgcatccagaaggtatattccagatttgttccctttttattcactagccacagtttggaagcactttggtttgatatgaaaacttaatctacccacaaatgacaaagatgggccacaacagaatgtaataaaaatgaacatgctataggtctcaaaaggaaattctcaaattgagtctcagaaaacctgaagagtagcgttactaaaaaatttactttctccctaggtaactacttcaaagactaagctaagacaaagctcaccaatagattcacactataattagtataaacatcagtttccaatactaatagaaaatctcacagaggtagtttgcatttaaatataacaaaatacaaaaaatattaaaatgaattacattttctaatttgcaattacactcattcacagacaatatgttatagtggagaaatccctggattttaaaccagacaacacaggttcaaggcttggctaggcaaccctgggtgagtcacttagcccctttgagcctcaactgtttctgaaa

SEQ ID NO: 88855 - DNA, 679 bp, Homo sapiens
tcctgccttggcttcccaaactgctgggattacacgtgtgagccactgcacccagcccctttctcttatttcaaacctgtctggcctactctttagaatccaagccacaggaaagtcagtgtaattatttgaaagatatttgtcatcttctgcatccagawggtatattccagatttgttccctttttattcactagccacagtttggaagcactttggtttgatatgaaaacttaatctacccacaaatgacaaagatgggccacaacagaatgtaataaaaatgaacatgctataggtctcaaaaggaaattctcaaattgagtctcagaaaacctgaagagtagcgttactaaaaaatttactttctccctaggtaactacttcaaagactaagctaagacaaagctcaccaatagattcacactataattagtataaacatcagtttccaatactaatagaaaatctcacagaggtagtttgcatttaaatataacaaaatacaaaaaatattaaaatgaattacattttctaatttgcaattacactcattcacagacaatatgttatagtggagaaatccctggattttaaaccagacaacacaggttcaaggcttggctaggcaaccctgggtgagtcacttagcccctttgagcctcaactgtttctgaaa

SEQ ID NO: 88856 - DNA, 529 bp, Homo sapiens
ccactagatgccagtagcgtctcctcctcacattgtaacaaccaaatatatctccagacattgctggatgttccccagggggcaaaataatccccaattgagaaccactgatttagcagaaatgagaaatctgaatcygaaactggccatcctcaaaaagctcaggattggtggccttaggtgcccctgaaattggggtagagaattgggtgttaagacagttaagaggaatctgcatattccctggggactccctctcactctgagaagctgagtggacttctctgttccccagtagaagactagaagttattctctggagagggtaaaacagaagggctctgttgggacaggtgaaggtttcttaaataggatacccaaagcactgcacaaaaaaacatagatacactggacttaattaaaattagacatttttgttcatcaccattgagagtgaaaagccacgctatagcctgggaggagatatttgcaatatgtacatccaataaaatatgtttacccagaacac

SEQ ID NO: 88857 - DNA, 616 bp, Homo sapiens
tgagatcacaccactgcactccagcctgggtgacagagcaagactctgtctcaaagaaaaaaaaatgtccacaaacaagagtgttcatagtagcttcattcataatagccaacacctggaaagcccaggcaccactggacaggaaaatggataagcaaactgtagggattygcataattgagtagtacacagcaaagaagacccagtcactgcctcacacaatgggagcagggaagccacgcacataaagcacacagcggttgcacttagtgacccccaggagcatgctggactcagcactgagttagcggtcaggacagtggtcaccaccaggagggcagtgacttggaggggacacaaagagggctttgagagggctccatttgtaaaaattcatcacactgtatacttgtgatctgtgcccctttttgtgtacatggtttagattttagtaaaaagtttatcttttaaaaaagtgtggtgtggttgagtaacctggtccagggcctaaagtcatcagaatgaacattgtagggtgagggctttagagatgattgaggtaaacaaggcaaatgccatccttcttccccatcttagcaggcagaggttcagggcc

SEQ ID NO: 88858 - DNA, 616 bp, Homo sapiens
tgagatcacaccactgcactccagcctgggtgacagagcaagactctgtctcaaagaaaaaaaaatgtccacaaacaagagtgttcatagtagcttcattcataatagccaacacctggaaagcccaggcaccactggacaggaaaatggataagcaaactgtagggattcgcrtaattgagtagtacacagcaaagaagacccagtcactgcctcacacaatgggagcagggaagccacgcacataaagcacacagcggttgcacttagtgacccccaggagcatgctggactcagcactgagttagcggtcaggacagtggtcaccaccaggagggcagtgacttggaggggacacaaagagggctttgagagggctccatttgtaaaaattcatcacactgtatacttgtgatctgtgcccctttttgtgtacatggtttagattttagtaaaaagtttatcttttaaaaaagtgtggtgtggttgagtaacctggtccagggcctaaagtcatcagaatgaacattgtagggtgagggctttagagatgattgaggtaaacaaggcaaatgccatccttcttccccatcttagcaggcagaggttcagggcc

SEQ ID NO: 88859 - DNA, 721 bp, Homo sapiens
tcacaccttgcaccttgtatgtgtaagtaaaattaatggcataggaaagaaaccaaaagaagtgaacaataagagactaaagaaactctacaggccgggcatggtggctcatgcaagtaatcctaacactttgggaggccaaggtgggtggatcacctgaggttgggagttcaagaccagcctggccaacatggtgaaaccccgtctctccttaaaatataaaaaataccaaaaaaaacaaaaattatctgggtgtggtagcgcacacctgtaatcccagttattcaggaggctgaggcacgagaatcttttgaacccgggaggcagagcttgcagtgagccgagatcacgccactgcactccagcytgggcaacagagtgagactctgtctcaaaaaaaaaaaaaaaaaaaaggaaaggaaggcagagaagcaggctaaggcttaatttttctgcccagtgggttttgaaatatggttggcttccttcaggaagctttttcccgacgttggtgatgataataaaacctgatgctttctatgtgctgggcccacttataaacactaacacatattaacaatcgaatcctaaactaatcctgtgttaacagcctcccactttacatatgaggaaacctggggtgacttgcacacggcttggcagctgggacgtggatagggaatgtacacccaggcagtctggctcccgggctcctgctaga

SEQ ID NO: 88860 - DNA, 706 bp, Homo sapiens
ggatccaacatttatagcttacttcccacagatgtrataaggaggaaagagttgtttatgtttaataagtctctcaatcagccttttcatctgcttacctacagaatgacttggtggttcgccaagggattagtttatcccactgctctcattggcttacatgccaattcaaaagtcaatactacattagttcataaaagaaaaactgcaaagaaaggatatgaaaaacatcatttaatcccaataatcagctgtgtggattaaacggtaatgtctattgacttggtaaagttaaaatgcttgaaaatatctagtgttgagagtggagaattgggaatttgcatgcgagaactgtgggaagatctttctggaaggcattcttggcagtcagtgtcagtctaaatgtcatactctttagctattagtttatcccaaggaagtaattagacatgtggctgtgtgtacagtactgcagtgtttatattagcaaaagcaaagcccagctatctaagcaaatgtcaaataacatatgatacatacatacagtggaatactatgcagtcatggaaattatcccaattacattgttaattgaaaaggtaggttacagaatagaatgtgtaatcattttgctgtattggcctctatttaattttgctatattagtgtgtgtgtttatatgtatatttctaaatatctaggaaaa

SEQ ID NO: 88861 - DNA, 1085 bp, Homo sapiens
tccagcagctgtgacctggggccctttccacacgtctcactgccctgggttgaactgtgtccctttcaaaattcctttcttggaatcctaacctccagtacctcagaatgtgaccttctttgcagaggtaatcaaagtaaaataagggccgggcatgatggctcgcacctgaaatgccagcactttgggaggccgaggcagacagatcatgtgaggtcaggagttcgagactggcctggccaacatggtgaaaccccatctctactaaaaatacaaaaaattagctgggcgtggtggtgcacacctgyaatcccagctactcgggaggccgagcctggagaaccgcttgaacctgggaggcagaggttgcagtgagccgagatcatgccattgcactctagcctgggcaacagagtgagactttgtcaaaaaaaaaaaaatccaacaaaaaaaaaagtaaaatgaggtgattagggtaggccctcatagaacatgaccagtgtcctcattaaaaaaaataagaagaagaagaaagaaatttgggcacagaaacacacatagaggaaagatggaaggagaagatggcccatctacaagccaagaagacaggcctggaacacagcattccctcacagttctcagaaggaaccaaccccactgccaccttgatctcagactcctggcctccagaactgcaggacaatacgtttctgctgtcaaagcgcccagtccagggtactgggttacaacggcccttgcagatgagcaccctcaccaacagacatgtttcatttggccctctctcttttgtgtttgtttttgttaaatgagccaacattcaagactcaaattattttacataagaatctctttcattgaaactctagacactggccaaccctacatggcaggagctgagtggaggccaccccctcccaagccctccagagcccccggtgctggccgctgtctccctggcaccaagaccggatgtcagccattatttgtctcaggagggtttagttccagataccaggaacaacattagccatgttaggcagaaagggattgaatacaggggacta

SEQ ID NO: 88862 - DNA, 766 bp, Homo sapiens
cctctgcaaggcagtgcagtaaggaggggaagggttttctgccacgtctgtggtctcttcattcttctcttcctgcygtcattctcgacctgggccctgctgtccttctctcatctggtatccattagagttcttgattacaagcaacagaaatggattctgcttcacttcaaccagagagaagttgtcaggaagatatcgggggctcacaatcaatgggcagctggaggatcagtcttgaaagctccggggctgggttgcaggaacatagtgaggatcttttactagaagagcctggtgagggaacctccaggataaatgggctccaggggatcttggtccttgcttcaccttcccaagattcaaatcctgggaaagagacacccacagaggcacccctaaggcagagggagactctaatgcctgcagcaggcgggcacctagaacttcactccaccaacacagaacctgatggattggaagtaattcccccaaatacactggggagatttgggaagaggaaaaaaaatgttgggctacaaaatataatagtaatatctagcagcacccttttatatatgtgcataatccttgagtttgtacatgttcggagactggccacaactgttgcatgataaattagtctttgtccaagtgaaaacaagtttcctgattaaaacaaagcctagccattgccagaagctgcttgaactaactcagctcctaaattgcatttacatccaagagcttggggttctttctggct

SEQ ID NO: 88863 - DNA, 1169 bp, Homo sapiens
aggaccctggaacctaactgagttcctatggctgcaagcctggagagaatacgattcgagaggtgaataatccacaggcaaataactacaagctatttcttttctttaatgtctagaatccctcaagttgctggaaatgcaattaggttcctagataggagaggacaaattatgttctttggttccgttcaaaatttggaacattatttatgttccagggttgctatttcaccaacagaagtgatcataagagaaaaaggcccacccctacattcctgcacttttccattctttagatgggtcctgacaggtgactgtctctgaagtgggtgcctgctgagagctcagaagagctgccagcacaggaagtaccttgagcttgacagaagtgtgcacattgggccccagggggcatgtggcctccatgataaaagggcgacagcaagaaaccggcacagtactcagccccgaatgactcagatgttatgaagtattgatcacatacattgcttctggcttttaggcctatgaatatttaaataagcacattaatattgcatatgaaactgaggcttaaataacctttgtttcttattgaaaggaagggctggcattttcaatgtgctcttgaatgctggctggatcatgatgagcactttagcaccagatcagactgaatactgagaatggggactttttaaaaatcactttgatagaccgtcagtcaaatgactatcacttaatgcaactcatgtactagaggaaactatttatttttacagaaacatactttgctttaaaaatagggcagaaatgaaaccttgcttaacaaaatgaaactacttgtatggacctaaacttacagctatagctgaaagcaaagaaaatatctggtcattctattatttttaattattcaattgactagtatttgtttcattgaacttagtcagcattcaagaaagccgtattgttcccactgtgcaaaatgctatactaggggcctgaattatgaagtgtgaaaaatccagtccctgaccttggggggttcacatgtaagtatataattacattataatatgcttagtgctarcctggaaataaaacaccacccatataggaatgcaatagctagaaaaagcaagtcagccctaaaaaattagagaaag

SEQ ID NO: 88864 - DNA, 1571 bp, Homo sapiens
gatcccactgggtgtctgtggggtgaaggctggtgtttgagtcaaggcagggattgggatgggggcattctccttctctctctccacagacactctgccccaggcactttccctttctgttcctctgattccccaaatcctgtcaccttcccgcagatttccatatagccacttcctgcaggtctcagcccattgtcaccttgggattcctggtctgggatggggttaggttgcagtaggtgaggttgaggcatgcaagggtgtgactttattgaagtctttcttttaaaatgtgatattttgcttcttgtggatttttgtggactaattttgatttttaaaaaatattgtttcaaaatgttatttaccttgatgattgagcttttgggcacctccttactttttttttcttttctttttttattttttttgagatggagtttctttcttgttgcccaggctgaggtgcagtggcacgatcttggctcactgcaacctctgcctcccgggttcaagcgattctcttgcttcagcctcctgagtagctgggattactggcaccctgccacctcacctggctaatttttctatttttagtagagatgagatttgaccatgttggccaggctggtcttgaactcctgacctcaggtgatctgccctcctcagcctcccaaagtgctgggattacaggtgtgagccaccacatccggctccctcttacattttgtaccctgcctgcctcatcccagctcctgccctgctcctagtccagggttctttggcaagagccctgggctgagagtcaggggacctgggttctggtccagcttgtgtcactagactagctgtgtggttggacacaatctccctgcatcctgagcctcagctgtaccatctattcagggaaaaggttatatctaactctattccagaatgatctaagacatctgctagaactctgaccggtggtgcattgtgtctatctcctgggggctttggagccatttgagccttgctgaccctggccattatggggtgtcactcactgtttatttcttggctctacactcgaggtgttcctctgtgcaaacacaaaatcttygcagcagctgtatgcaatgagcctcagtgccttcatgcctttttcctgtcctggaggaaatttctgttttggaaatgtggttctgtaccttattctttgatgtcccgcttttttgttttttggtttcattccccagatcattggataaacattgtttaaggaccttctatatgccaagcactgagcaagcacttgggatgcaaaagacacgttttcagccctggaggagctcaccttccactgcaggagactgcccatgagcagatccggggaccgggagaagcctgcagcagtggaggacttccagggaggatgaggacacttcgagggaactgtgcactgtcttttctcctgggaggaagcctgcatcctctgtgctgtctccagatgccatcagccccgagcagtgtatagcaccttcctaatagaatcctcctcaagagagtgctgcagtgttacattttgg

SEQ ID NO: 88865 - DNA, 616 bp, Homo sapiens
tgccgaggaaacatcccgctccttctgggctcttgcagacctcacggtgagtgctcagtcatccattcatttcttctttctctgactaagcaaacatctattgagcacctactgtgtgccagacactgcgctagacactggatataaacactagagagtctttgttgggcctgccattccgggatggagaccaaaaataaacaaaacaaacaaatgtataactgcacattgcagagattgctctaaagggaactgggagctttagcctgaccgtgagcacagaaaaccatggggtggttttaagcagagggttggtgtgaccaaacttgtttttctggctgctgtatggaggatggattggctcaggggtgagggtagaggcagggaggccagagaggaggctaagggaagaatccaggtgagacgggaagaggactggctcagygtggaggtggcctgaggaagaggatggacatcttccagagaagcagcttgctgccgatcagatggggtggtgggggggtcattgccacttgctctagcccttatgacagacattccgcagcattttttactgtggcttgtttcatgactgtatacattgcctctggagtaa

SEQ ID NO: 88866 - DNA, 616 bp, Homo sapiens
tgccgaggaaacatcccgctccttctgggctcttgcagacctcacggtgagtgctcagtcatccattcatttcttctttctctgactaagcaaacatctattgagcacctactgtgtgccagacactgcgctagacactggatataaacactagagagtctttgttgggcctgccattccgggatggagaccaaaaataaacaaaacaaacaaatgtataactgcacattgcagagattgctctaaagggaactgggagctttagcctgaccgtgagcacagaaaaccatggggtggttttaagcagagggttggtgtgaccaaacttgtttttctggctgctgtatggaggatggattggctcaggggtgagggtagaggcagggaggccagagaggaggctaagggaagaatccaggtgagacgggaagaggactggctcagcgtggaggtggcctgaggaagaggatggacatcttccagagaagcagcttgctgccsatcagatggggtggtgggggggtcattgccacttgctctagcccttatgacagacattccgcagcattttttactgtggcttgtttcatgactgtatacattgcctctggagtaa

SEQ ID NO: 88867 - DNA, 616 bp, Homo sapiens
tgccgaggaaacatcccgctccttctgggctcttgcagacctcacggtgagtgctcagtcatccattcatttcttctttctctgactaagcaaacatctattgagcacctactgtgtgccagacactgcgctagacactggatataaacactagagagtctttgttgggcctgccattccgggatggagaccaaaaataaacaaaacaaacaaatgtataactgcacattgcagagattgctctaaagggaactgggagctttagcctgaccgtgagcacagaaaaccatggggtggttttaagcagagggttggtgtgaccaaacttgtttttctggctgctgtatggaggatggattggctcaggggtgagggtagaggcagggaggccagagaggaggctaagggaagaatccaggtgagacgggaagaggactggctcagcgtggaggtggcctgaggaagaggatggacatcttccagagaagcagcttgctgccgatcagatggggtggtgggggggtcattgccacttgctctagcccttatgacagacattcygcagcattttttactgtggcttgtttcatgactgtatacattgcctctggagtaa

SEQ ID NO: 88868 - DNA, 1363 bp, Homo sapiens
tccttctaagggatctaatgaatagatcctaaccctcacagcacacctatggggaaatttaactctttcttcccatttcctcctcatctggcggctgtgggaactgaagcacagccaggttaagtcacttgcctgaggccaaacagctaagaagctgcagagacagaatttgaacccaggcagcctgactcccgagtcccagtgtgtaaccactacaccacactacctctcagatccacaaaggaatttatgttkcaggaaacagtcaccagtgacatcccttcagccatgcccacaccccagccatgaccaccacactcattgctggctccatgccaaactgattttctttttccctctttgttttcattgttctatctgtttttctgattttttaaaggagaaaaaattaatcctgaatgaaaccaactttcattgcaaatgaaactgaattgtccacaactgaaagcatataattagagaatgctaatctcctggcgattcttctccccaccccaccccaaaccaaaaatacatgaacatttgcaaaaaagaattcatctttacctaaaactataattaaacggctgctggcggttaccttggtgacattaacaaaaaaaaaaaaatccttcactacagctccccactctggataatacaaacttggcagccaaataagtcaacaggttgcccaggaaactgtttccttgacaaccatgaagatggaaggggacgaaagagttagggaaatgtcagggtaacaatgctatattaaagaagaaagagcccctttggcatgctgagaagcttcccaacttgtactgagcagcagagcagagaacacaaatgactctgaacatgacgaaggcagctggaagaatggcaaaccccaattctcccttcagtggctcacccaccaggtggagttccagtggtgggcatggagcagctgtgcattgagcacctactacatgccagcatcgtccatgtcccctggctctagtcttggatggttctctccactttggaaacttggccaggtgggcctggatgctggggatgagaaataaatggcaggactgttttttgaaatgttagtgtctggggttctccctgtgtgttcactttctcatcctctgttttagccaggctaactctgtgctttctggcctggtctggaggggagagagtgtttgcaggattgggaaagctgaaactttgttttcaaaggacacatagctcatgggtgggattggtcacacgtcctgaaatgccaggagagcagacatgagcgtccctgaggaatacaagaagggagagggaggggtgaccccagagcatacaaggattcctcaagctg

SEQ ID NO: 88869 - DNA, 673 bp, Homo sapiens
tgttttcctgaaggatgtaagacatgctgcacatacagatccagcagaggtagtttcagggaaggcaggactaattatctgtcttttcatcctagtctgctcctagttctgaaacacaagttttgcatagacaaaagtacatatatctatatgcatatatacgtatgtatatacacacacacattctgcaacacggtggaaactgtcttctgagttagctaaaataatacttgggtcctctttcaacaggatctataatgtttaatactcaatagagcaggaagtagaaggggacaagcctgggrctggcctggtggtggcatgtttaattgtaggttgctcaattaagaaaatcattacaaaccatggaagagaaaagaacaccaagaatatacagataattctacaatgccttagcttctctggcttaatcaaagactgcaatagttgggggtgaagatctagcctcagtctagaagagccatacaagatgagtacttactaaatattacaacttgaactaggttgatttgcattaacctatatcagatataacaggtctatatctgagaatgccaggcaagaagtctaagtgaaaagtacacgtgtgtgggagtcagggtagggggacagagttcttataaatactctacctacccttcctgttggtaaa

SEQ ID NO: 88870 - DNA, 565 bp, Homo sapiens
atgagggaatatcttgacttttccaygtgtagaagacaatgaagcaatgtcaacatgaggaattctgagaagaaaaggttatgacaatgatttaatagcctgtaagttgttttatatatgtgaaagcaatagatttgcagaaaaattacaaaatatgccacgctggatccttaaaaagttgctcaaagatgtagaccagatgactaagagatgaatcaaaattaaaatctcaagaatagggtcatgtggaatttgggagaaatccaaatggaattatcattatcctaataccacatagctacagaaatccacagcctgttctagtggactggacaaaactggccacactcatgagcattcaacaatgtggagaagttatgcctctttccaaaatgctatctgaaggaagtttataaacaaataatttccatatagttattgtttattgaaaataactctcttgtaggactttaaaaatgtccgagaggaaacctttctctcaagccgaagtctaattggatcacagttagataaaaacaaaacaaaacaccattcttaaaaaagc

SEQ ID NO: 88871 - DNA, 744 bp, Homo sapiens
acaaatcttttgacacacctcccttcagaaggtggagcctaattctcctctttagtgtaactagaacttagtagtgacttgctttaaatagagtacgatgcaagtgatagtggatgacttttaagactaagtcatgaaaaacattatagcttcctccttgattaattctttctgagggtagtcagctgccaggtcatgaggacacataagcagtcctatgaagagatctacatagaaaggaactgaggtctcattcatgtgatygagccatcttccagccccagcctagtgtcagatgagtgcagccccagatgacatcttacctgtaacctcatgaaagcatttaggacagaaccatgtagctaagccactcctgaattcctgactcagagagactatgcaagatcataaacgcttattgttgtttcaagctgttagggtaattttttatgcagtaataaatgagaaacacacacatggcaaatatatactcagtattttcctctgtatgctgtcaaaagttttactttccttttaatttttttcctttttccttctaatttacactttaaataatctgaaattacctggataaaactttttcttccccaaatgatgaactagttaggaattttagacacacacacacacacacacacacacacacacacacacacacattttttctcccacatccctccgtaagcccccaagaattagataatacattttaaaaaaataata

SEQ ID NO: 88872 - DNA, 744 bp, Homo sapiens
acaaatcttttgacacacctcccttcagaaggtggagcctaattctcctctttagtgtaactagaacttagtagtgacttgctttaaatagagtacgatgcaagtgatagtggatgacttttaagactaagtcatgaaaaacattatagcttcctccttgattaattctttctgagggtagtcagctgccaggtcatgaggacacataagcagtcctatgaagagatctacatagaaaggaactgaggtctcattcatgtgatcgagccatcttccagccccagcctagtgtcagatgagtgcagccccagatgacatcttacctgtaacctcatgaaagcatttaggacagaaccatgtagctaagccactcctgaattcctgactcagagagactatgcaagatcataaacgcttattgttgtttcaagctgttagggtaattttttatgcagtaataaatgagaaacacacacatggcaaatatatactcagtattttcctctgtatgctgtcaaaagttttactttccttttaatttttttcctttttccttctaatttacactttaaataatctgaaattacctggataaaactttttcttccccaaatgatgaactagttaggaattttagacacacacacacacacacacacacacacacacacacacacacatttyttctcccacatccctccgtaagcccccaagaattagataatacattttaaaaaaataata

SEQ ID NO: 88873 - DNA, 592 bp, Homo sapiens
atgctgtcactgctgtccttccatcaccaccccatgatgcagggtactgtgctgggcacaccagggaagaacacagacaaaagtctctgccccacggagacagcccacacacaggaaaccaggcaagtgagtcacacagcacatcaggaggtggtcatgctatggggggagatatcaacatggagcagggggcaggagcaagaggaagaggtgcrgcaggggcaacattgagcccggtgggtggcgtgggcctcctttgagatgggacttggagcacgaactccaaggaggtggccattatcagacttgcatttcagagcaattgcccagctgctcgtggagaaggtgttgagatggatggggttgggggactgtccccagtgagatgcagatcaaggggtggtactgaccacattgtcaggacagaggcagccatcgggaggactgtgagactgtgtagtatatatgtggccctgtccctgtttcccagcatacaactcctaaagcccttgactctctggagtggtgagagtgtcttctgtgtgctcatgagctggctgggggctggggtctcctagacagcttcaggatg

SEQ ID NO: 88874 - DNA, 592 bp, Homo sapiens
atgctgtcactgctgtccttccatcaccaccccatgatgcagggtactgtgctgggcacaccagggaagaacacagacaaaagtctctgccccacggagacagcccacacacaggaaaccaggcaagtgagtcacacagcacatcaggaggtggtcatgctatggggggagatatcaacatggagcagggggcaggagcaagaggaagaggtgcagcaggggcaacattgagcccggtgggtggcgtgggcctcctttgagatgggacttggagcacgaactccaaggaggtggccattatcagacttgcatttcagagcaattgcccagctgctcgtggagaaggtgttgagatggatggkgttgggggactgtccccagtgagatgcagatcaaggggtggtactgaccacattgtcaggacagaggcagccatcgggaggactgtgagactgtgtagtatatatgtggccctgtccctgtttcccagcatacaactcctaaagcccttgactctctggagtggtgagagtgtcttctgtgtgctcatgagctggctgggggctggggtctcctagacagcttcaggatg

SEQ ID NO: 88875 - DNA, 647 bp, Homo sapiens
agtaatgcccagaagagatggggcgtcaggagtcacccgactggcctgaaaatctgatggcacctccagcgccacggcgagctctggggccagggccacctgctgcagggaccacgggttgagtggcaacatccaggccccagccacttgcatctcagccactggaaaggtaggggcctctggggggctaccctgttcacagatctttctaggggagaccccagagacggcctccctggagccacattgcgagtggccagagccgcatcccgcatcacgccctctgaggggccagcagacagctccaggcggagctcaaagtgtcctcggactccagcaggaagtgctggactggatgtcggtgggggcctttgagatcccgattctgcaacctcagcycccggggctctccaggcccacagtcctgctgactgaaatgttggcaatggtggccactgcgcctccgctcaagagtttgcaggaagttccatgcgggagatcaagtgagagtggccaggggcctctagcagtgaccagcagacaaagcctggtctccaggcatcaccaggccactgggccaggagcctgagctgtgggctctgtggtgggtggatgctggttttcttcactggtacgggagaaaatgg

SEQ ID NO: 88876 - DNA, 647 bp, Homo sapiens
agtaatgcccagaagagatggggcgtcaggagtcacccgactggcctgaaaatctgatggcacctccagcgccacggcgagctctggggccagggccacctgctgcagggaccacgggttgagtggcaacatccaggccccagccacttgcatctcagccactggaaaggtaggggcctctggggggctaccctgttcacagatctttctaggggagaccccagagacggcctccctggagccacattgcgagtggccagagccgcatcccgcatcacgccctctgaggggccagcagacagctccaggcggagctcaaagtgtcctcggactccagcaggaagtgctggactggatgtcggtgggggcctttgagatcccgattctgcaacctcagctcccggggctctccaggcccacagtcctgctgactgaaatgtyggcaatggtggccactgcgcctccgctcaagagtttgcaggaagttccatgcgggagatcaagtgagagtggccaggggcctctagcagtgaccagcagacaaagcctggtctccaggcatcaccaggccactgggccaggagcctgagctgtgggctctgtggtgggtggatgctggttttcttcactggtacgggagaaaatgg

SEQ ID NO: 88877 - DNA, 647 bp, Homo sapiens
agtaatgcccagaagagatggggcgtcaggagtcacccgactggcctgaaaatctgatggcacctccagcgccacggcgagctctggggccagggccacctgctgcagggaccacgggttgagtggcaacatccaggccccagccacttgcatctcagccactggaaaggtaggggcctctggggggctaccctgttcacagatctttctaggggagaccccagagacggcctccctggagccacattgcgagtggccagagccgcatcccgcatcacgccctctgaggggccagcagacagctccaggcggagctcaaagtgtcctcggactccagcaggaagtgctggactggatgtcggtgggggcctttgagatcccgattctgcaacctcagctcccggggctctccaggcccacagtcctgctgactgaaatgttggcaatggtggccactgcgcctccgctcaagagtttgcaggaagttccatgcgggagatcaagtgagagtggccaggggcctctagcartgaccagcagacaaagcctggtctccaggcatcaccaggccactgggccaggagcctgagctgtgggctctgtggtgggtggatgctggttttcttcactggtacgggagaaaatgg

SEQ ID NO: 88878 - DNA, 588 bp, Homo sapiens
tcacggggcagcagtgatgccccacggagtgtcctggagggtggggcrgggtgagcgcccatgcaggcagggcaaggccatgcaaggcaggctccccatctccggctcatcaaacatctgctgccgcgggcccgcccagagaaaagtgggatcaaggcctacaggggctcctgcctcgcgctctgctggggtccccagggaggtgaagcctttgctggtccactgcggccctaaaggctgcagttgagacacccgggctgccagctccagacttacaggggcatctccaccctttacatgcctaaaccaccccccgacccctccttctcccacactgggaccctcccagggcactagaccccacccggccccaaggtccccaggggccataagacccccctcccaccccaccccaggaggaacactgcccgtagctcactgaggcaacgtccagcctctaagcccagaagctgcctgtgctggaaaatcacctcccatttccgggtgaggcctgggccgggagagtgctctctccccaccctctgcaccccgccccagcttcttcccctgcctgccatgtgcctcggc

SEQ ID NO: 88879 - DNA, 423 bp, Homo sapiens
aactttaaataagaatctaagaaatgacaaaatgggctagaaagaattactatgccatcaaggaaaggttaagtaaagaagcacatgagatggccattaagaaatctttttttttttaacaaggtgatagagagggagaaaagaacatcctttattcctaactagcctataatgatctaaccctcttgaatttttttgaacattaacgtgatatgtagaactttaaaatggttccccaaagatgtcctgctccaatccctaaaatttgtgaatataataagatatcactcccaagattatgttatatcatatagtacagttaaccttaaagtaatgacatgatctggtggaattaatctaatcaaacgagcgcttaaragaagagaactttctggccgggtgcggtggctcacacctataatc

SEQ ID NO: 88880 - DNA, 1079 bp, Homo sapiens
tgcaggattcgtatgttatgaaagaattatagtggtttttaggaactccagactcccaagatagccttctttgttggctgttgtaatttaggaatattttccttctttttttctctattatcataaattattggattaaataatactttgtatattaattgcttatttctcacagaagttgctgtagataaagatacttgatattttttggtctggctatgttagaattttctgtgatagtttttttttatgtttatatgatgttaactaattggaatagttataaattcagctataagagatgctgtaaatctagactagtaagttccaggctccttggattgaaatgttttatttatttaccaaatattagttaatgcaactatatggttccttacctagaaccttaatttctaggtgtgaataataaaatttatacataagaaacaagttgtggccgggcgcggtggctcacacctgtaaccccagcactttgggaggccaagacaggcagatcacctgaggtcaggagtttgagaccagcctgaccaacatggagaaaccctgtctctagcaaaaatacaaaattagccgggtgtggtggtgcatacataattccaattccagctactcgggaggctgaggcaggagaattgcttgaacctgggaggcggaggttgtggtgagctgagatcaccactgcactccagcctgggcaacaagagggaaactctgtctccaaaaaaagaaaaaaaaaaaaaaaaaacgaaagaaacaagactaaaactacgtaaactcaagtacagtatttctgctaaaaattctaaatagcactacattaaaaaaaatcagaatgaaaacaatttaccatttatttgaggatttttcaactaagaccttaaaatgtaaatgctctggagcataaaaaatcaggattgggtattattaactaattgaatagtatttttttagcttttattagamtagatcttgtagttgctgccttaaaatttaactgcctaaagggaaaaattatatttgtggaactttatcttttgtaacctaatgtagtgccatat

SEQ ID NO: 88881 - DNA, 775 bp, Homo sapiens
gcatgcaaataaaccatgacatcgggagaagtgtagtttttcagtacgccagtgtgtcggtgatttccatttagtagtcgtttctctcacccatatggcttgactacagcatttatacagattagtaactgtctactaggctcagatataaactatagtcaccaaagttctcatctggagcctttgtttaggttgtacctttcaaccacagccatctccgctctacatttatcagagtgatcgaagaggaatgagctctctccgttggccaaaagctcgtggtacttcagagggagacaggtggaggaggcgattgagaaaatattttagggcaatggagtgatttgttagttggccactayacaagagtctgtgtggcattctccagccatgtattgaaggctataatcttttaaataaatagtgccagttcacatttacttggcgcaaaatttgcagttgtagatcttttcaagggtaaggagaaaaaaaaatgctttgggagggcataactatacctaccacccaaacagactttgtgctacctggagttccagtgtaaggagggatcaggaagaatgagtgccattgaggacaaatctaggagcagtggattgacagggattccttgcaacgttaatttggaaagtgtgtaattcaaataaaactgatgtctgaattaaaagggatgcttttgtgtgtgcatgagtaaatgttatgagctatagaagattaaagaggcatgacaactaaaggcaatacttaatcctaggct

SEQ ID NO: 88882 - DNA, 740 bp, Homo sapiens
tgaatggtggggctgaaagagctgtaacacaaacaaggctgaaacacaccccttgctcaccacactgtgggtgacaaggagagaagagagaaggagagaagagttgcggcccttcagggagcccagacctaggatctcccccagccagggctgtgacaccctctttggggctctgcggttcctggtgtcttcaagcttctgagcaccactggattccccagtgccagctatggaagctgcttatggtacacctgggctggcacctggagctgtctgccccacccaccaccagcatgcctggctgtgcacagtggccggaccccatgcttgctcactcatataccccttaccgctccactcgctcttggcaggtatgagatccaggccagtagagcgagctgagtgcagcctgccaggctaagtgggcagtacaagcccagcaggcctgaggaaaacttgggcaaaggtgccattggccctgtggctttcagctggacaagcaacacctcaagaatcccgtgacattactatagtggccatttgacagatgaggaaaccatggctcagaaaagttaagtaccttgcccgaagttacctatttggatagagaaggaggtatattaacctcaactgaaagcctrgcttggctaaggtccctctgaatggcttgctgttattagaattagcgggaacgggggcctagtactagctgatggagaagaggctcatactaaactgag

SEQ ID NO: 88883 - DNA, 1114 bp, Homo sapiens
tattttattttaaatttggggtacatgtgcaggtttgttacatcagtgtattcagtgatgttgaggtttgggatacaattgatcctgtcacccaggtagtaaacataatacctagtaggtagtttttcaactctttcccccatcctctctccccacactagttgccyccagtgtctatttttctcattttatgtctgtgtgtacccaatatttagctcacacttataagtgaaaatatacaattatccttttttaaagatattcttgtaggttataatatatggatttagattctaaactggtaggtatactctttcagctttatctgttttcaaaacaaatcaactgagctttttacctttttaattatttttggttttactatttttatttgtatattttctggttctttgctaaaatttaaaatttgtttttagtttccttgagcatattgaacataattatattaaagtttctctctcataattctgttacttggatgccctctgtgactgtttctattaattgttatttcacttaatgttttgtcatgtcatcttctgttttcatatgactgattagaattgattggaagaggctagggacactagcaaaccagactaatataattaaaaggatcaaaaaagagtcaaagataagctttagtcacataaatatctaatcaaatttctattcactcttctcctacagttgagctcttttgcatcccaatccaaatcaatgtgaaatttttagagaagtatgggtcagctttccagcttcttcacagcctcttaagactcagcaatttctcttaggggaaaaaataggctccaaaacttgtttcacttttctgattttttttctgctttcacatcttggcactgtagtttctcactgccttgttatatcctcccccagttattttaagtgatagtttttaaattctgtctaagatttttaggtgttcacagttagaatgatttgcccaaattgcctagacagccaaaatcaatagaatgaatacaatacacagtggcttcttttgcacttagttttttaaattttttcaaacatttatatgcaatacattgtataatttcaatgtaaagtt

SEQ ID NO: 88884 - DNA, 592 bp, Homo sapiens
tcttgctgattttctatctgctgttattactgataactaagaagtggttgttaaaatttctaagtataattgtggatgtgtctagttttcctttaattttgtttgcttttatttcatggattctgatgttctcttgttaggtgaaagtgtatttaggactgatatgcctccttgatgagtaaataattttatttttatataacatacctcatcccaaggttgttgyttttaattagtgtttgcatgacataccacttttcatccttttaataactgtagtttatgtgggtttcttgcaggcagcacattgttagtcttgttttgttttttaatcctcacaatctttgtcttttaaatggtgtgcttaggtcatttacattttaggtaattacttatatgtttgtacttaggcctattatttcatcatttgttttatttttgcatattctgtatctccatctttagattatttgtattatttttatactggctttgcaactctatttatttgcatattttctttagcagttgctccaggcttcaaatatacatatatttatttatacatgtataaatgcacaaaaggggactt

SEQ ID NO: 88885 - DNA, 592 bp, Homo sapiens
tcttgctgattttctatctgctgttattactgataactaagaagtggttgttaaaatttctaagtataattgtggatgtgtctagttttcctttaattttgtttgcttttatttcatggattctgatgttctcttgttaggtgaaagtgtatttaggactgatatgcctccttgatgagtaaataattttatttttatataacatacctcatcccaaggttgttgtttttaattagtgtttgcatgacataccacttttcatccttttaataactgtagtttatgtgggtttcttgcaggcagcacatygttagtcttgttttgttttttaatcctcacaatctttgtcttttaaatggtgtgcttaggtcatttacattttaggtaattacttatatgtttgtacttaggcctattatttcatcatttgttttatttttgcatattctgtatctccatctttagattatttgtattatttttatactggctttgcaactctatttatttgcatattttctttagcagttgctccaggcttcaaatatacatatatttatttatacatgtataaatgcacaaaaggggactt

SEQ ID NO: 88886 - DNA, 577 bp, Homo sapiens
cttagctggctgaggcaggaaaattgcttgaacccaggaggtggaggttgcagtgagcagagatcacaccactgtgctccagcctggatgacagaaggagactctgtctcaaaaaaaaaaaaaaaaaaaaaaaaaaaaagaaaagaaactcacaggagtgcactactgtatacatgtttgtttctattyttgtccttctagacattaaaaagtcagaattttccttctctagtttcttgggactttgctctggatgtacaaattaggcaactctttaggaagctaatggtccatctggtctccatttagaaagttgatgtggagtgtttctttttttgccagtcaagtttctagaactacccatcttaaaaatctttctttactggtcatttttcatagtggccacccaatttgtttctctaaatgagattcccatatttgtgctttatatctgcctatcctcattcaacaattttatagttcaaactcatctttttatttacccatatccctggaactacacaaactgacttctgccagcatactttcatatgagtcacctcctagttgctcacta

SEQ ID NO: 88887 - DNA, 896 bp, Homo sapiens
ttcccaaaggaaggaccaaaatgggtaaacagagcagctgtctaccaagtaaccgaagataattccagtaatagaaatcaacttcttaaaagttttaattagtattctcagagagcttcacagggatattgaagccataaaacaagaacaagccgctatttaaaaaagaagaagaagaagacggcagtaggagtaagcagtaaaaaagaaattgttggcctggcaccgtggctcacacctgtaaaatcccagcactttgggaagccaaggtggtggatcacctgaggtcaggaattcaagatccgcctggccaacatggcaaaaccccgtctctactaaaaaaatacaaaaattagccagacatggcggtgcatgcctgtaatcccagctttttgggaggctgaggcaggtgaatcgcttgaacccaggaggtgaaggttgcagtgagccaagatcgtgccactgcactccagcctgggcaacagagcaagactctgtctcaaaacacaaaaaattgttcttaaaatttttaagtgtggcttccaaaatgtaaaatataatgaaaaggaccaaaatagtggaattgatatggtratgaccaaaatagagacttgagagacatacggaatatttttttaaagatgatgtttcagataacaggttctgttttatcttaacataagaacataatcttttgaatagggagtaggccagcacattgaatccatacaaaaatattatgttcctagcacactatttggctccacagtgagcaatattcgcgtactggtagtaataatataactgctatttatcgtttaatccacatttaaaggaatccttagataaggcatagacaactgaaagaggatgacggattagaatgtaaatgtttt

SEQ ID NO: 88888 - DNA, 759 bp, Homo sapiens
taattccttccctaatgagtcacacaggaagtgctttctcccttgcaggaaacatgcatgagatgtctctatccagggaagtccactggaggctgaggcttttggggagggctggtcaagtaggcacattcctgctgcatgaacagccatgatgcctgaatctcagaaccccagcatagataccaggtagacattataaagtttgggaaatgatcgtgacaaattggtacagcatggcctatcgcttctggggtacaaaccaatgtcatcaattgtagcatcccaagggtcacattcacaggggttggccaaaggtcaaccatggttcaggactctcctggaggtatgcaaggattaaataaccaggcctgctgtgtcaacaactttcgcagagaaggtcaaattatggttttatttttcagaataagtgttgctagctactgtattaccaaaaaccccaaaattccactggagtagcccaacacgggattggttttttactcaaattccactgcagatgttcccatcctggcagctctcatgkctcttccaagcagaaactcagggtttgtggcacagtccatccagtggttctaccatcttgaagtccttctcccatagctacacagaaagcagagaaggcaagggcatggaatattgtgtagatcactttctgatgaggcctggaagtggtgtctgtcccaactgttcccatcccactgtccacataagttacatgtacccacttggatgcaagaa

SEQ ID NO: 88889 - DNA, 608 bp, Homo sapiens
atctacccaaaggaaaagaaattattatataaaaaaggcacctgcacttgtatttttatcacaacactattaatagtagcaaagatatggaatcaacctaagtgtccattaataaagaataggataaagaaagtgtgagatatacatacatacatatgtatattatctctctctctatccatctataatgaaacaacactcagccattaaaaagatatacctaatcctaaatgacgagttaatgggtgcagcacaccaacatggcacatgtatacctawgtaacaaaacctgcacgttgtgcacatgtaccctaaaacttaaagtataataataataaaataaaataaaataaaatcatgtattttatagcaatatggtggaaatcaaaggccataatctaaagtaactcagaaaaataaagtcaaatactgcatgttttcatttatagataggggctaaaccatgagtacatatggacatacataatggaataatggacattggagattacaaaaggtgggaggttggcaggggttgagggttgaaaaatagcccattaggtacaatgttcatcatgtgggtgcttggttcattaaaagcccgactt

SEQ ID NO: 88890 - DNA, 1479 bp, Homo sapiens
ggatccccgtccccggaccatcgcaggaaccaggcgcccctcccatgtggccctagcccgggggcaggcctgctgaggcccgcagccagtgtcaggccagccagtatggcctggctccctccaaggcaggaagggggccactggggtcagygccgtgttcggggtcacacaatggggagagtgtccaccctccacccaattctcagggttcaccctcagatcgggctacccctgctctgggcaccggtttctgtaggaacaagggtggccagcaaacttccccaagcacccagctccccgtgcccagaggagacccaggaggccctaggtgagagccagtgttgcctcaaaggaaggcacacagctccggcctgacctccggccacttcccatagcctccaaaaagccatccagagggagaaggaaactgacagccactgaggggcccgggagcccaagggacgccgaggaccacagtccctcccccaacagcagcccctgggaggagacctagccagcctgcaccagggtccacagcgagcccggggcagccctccacctgcccaccagggcctggagagggcacaccatccaaccagcaggcagccctgcacagaaccctgggagaagacctagccagcctcagctgaacccacagtgagcccagggcagctctctgcctgctcaccacagcctggagagggcacaccacccaaccagcaggcaaccccgaagagccggtgacgggcacatcctggcccacttcaagaggggctggaggaccgagaggggtctcaggctggcgattcaccccgtctccacccacctgggaaatgctctgcggcccctcccacagcccagcacctgctccctgaggggtgtggggactggaggcgggatcactcaggctccagcccagccctacccctgctgtgcactgcagccgttcccaggcagtgcccacgctctgggaggcaacggaccactcggacccccacccctgcccgccaagctccaagcacaatcttggacgccccctcgtgggctgacagcaaacagatgtctggcagtgagggtggagggagacagtgggcggcagcaccctcgaagaccgggtcccctgagtgacggagaataaacacttgaagaaccgtgcatgtgtctggcagggccccaggacaccactgactgtgccagggactggaggtcacccccttgcgggagggcagaataaaaccagctcctctgcagagtctgcagcgggaagggaccagggcaccctcggggaagtgcctggccacagcggcggccgtgtgcacctgcccctcctcactagtccctggcctggcagccacagggcagctcgccaggactccaccgggagcactcaaggctgtctgctcctcgggggaggatgagtatcagtccctcccagcttcgtgggaggagcttaagaaatagattcttgggcccaacccc

SEQ ID NO: 88891 - DNA, 1479 bp, Homo sapiens
ggatccccgtccccggaccatcgcaggaaccaggcgcccctcccatgtggccctagcccgggggcaggcctgctgaggcccgcagccagtgtcaggccagccagtatggcctggctccctccaaggcaggaagggggccactggggtcagtgccgtgttcggggtcacacaatggggagagtgtccaccctccacccarttctcagggttcaccctcagatcgggctacccctgctctgggcaccggtttctgtaggaacaagggtggccagcaaacttccccaagcacccagctccccgtgcccagaggagacccaggaggccctaggtgagagccagtgttgcctcaaaggaaggcacacagctccggcctgacctccggccacttcccatagcctccaaaaagccatccagagggagaaggaaactgacagccactgaggggcccgggagcccaagggacgccgaggaccacagtccctcccccaacagcagcccctgggaggagacctagccagcctgcaccagggtccacagcgagcccggggcagccctccacctgcccaccagggcctggagagggcacaccatccaaccagcaggcagccctgcacagaaccctgggagaagacctagccagcctcagctgaacccacagtgagcccagggcagctctctgcctgctcaccacagcctggagagggcacaccacccaaccagcaggcaaccccgaagagccggtgacgggcacatcctggcccacttcaagaggggctggaggaccgagaggggtctcaggctggcgattcaccccgtctccacccacctgggaaatgctctgcggcccctcccacagcccagcacctgctccctgaggggtgtggggactggaggcgggatcactcaggctccagcccagccctacccctgctgtgcactgcagccgttcccaggcagtgcccacgctctgggaggcaacggaccactcggacccccacccctgcccgccaagctccaagcacaatcttggacgccccctcgtgggctgacagcaaacagatgtctggcagtgagggtggagggagacagtgggcggcagcaccctcgaagaccgggtcccctgagtgacggagaataaacacttgaagaaccgtgcatgtgtctggcagggccccaggacaccactgactgtgccagggactggaggtcacccccttgcgggagggcagaataaaaccagctcctctgcagagtctgcagcgggaagggaccagggcaccctcggggaagtgcctggccacagcggcggccgtgtgcacctgcccctcctcactagtccctggcctggcagccacagggcagctcgccaggactccaccgggagcactcaaggctgtctgctcctcgggggaggatgagtatcagtccctcccagcttcgtgggaggagcttaagaaatagattcttgggcccaacccc

SEQ ID NO: 88892 - DNA, 834 bp, Homo sapiens
ttcctgccttttcccacttctggtggctccacgcactcccgggcttgtggctccagtttctgcctccgcctccgtgccgcactgttcctgcgtgtctgtgtctccatgtggtgatttcctcacagggacaccagtcattggattaggacttaacctgtgacatcttaacttgatgacatctgctaagaccctcagggggcgacrcagttcaactaagaccctctttccatccgaggtcccattcacaggtactggggttaggacttcaccctgtcttctgggggcgatacccttcaacctacaacagcccttggtgagtgtccacaacgctaatgaggtgagagtggcatcccctcaagcgaacaactttccccaaattgcagccagatgtggcccagcaaagagccagggtgcagccatcagcaagcagagccccccagttctggagggtgtgtgccgagatgcttctggggaaaggcctgggcctggggctgggctgcagctgtgggacaagctgctgtctgggccaggagccactcagcgtcgccaagctgctgtccaagttaaaccaattcagcatctggcaccttgtttacaagcgtgatttgggggtttcttgctctccagctggcaagcagctggcagtggtcagctgaggccagagcctgggggcacatctcccatggcagcccagagggcaatggacaccccccactccgcccagccctgtgaccccatatggatgctttcgctgggtgaggctgcagcccccgcagggagtgctggacttgggcgcttttgctttacctgggacttgatgagatggggcacccg

SEQ ID NO: 88893 - DNA, 834 bp, Homo sapiens
ttcctgccttttcccacttctggtggctccacgcactcccgggcttgtggctccagtttctgcctccgcctccgtgccgcactgttcctgcgtgtctgtgtctccatgtggtgatttcctcacagggacaccagtcattggattaggacttaacctgtgacatcttaacttgatgacatctgctaagaccctcagggggcgacacagttcaactaagaccctctttccatcygaggtcccattcacaggtactggggttaggacttcaccctgtcttctgggggcgatacccttcaacctacaacagcccttggtgagtgtccacaacgctaatgaggtgagagtggcatcccctcaagcgaacaactttccccaaattgcagccagatgtggcccagcaaagagccagggtgcagccatcagcaagcagagccccccagttctggagggtgtgtgccgagatgcttctggggaaaggcctgggcctggggctgggctgcagctgtgggacaagctgctgtctgggccaggagccactcagcgtcgccaagctgctgtccaagttaaaccaattcagcatctggcaccttgtttacaagcgtgatttgggggtttcttgctctccagctggcaagcagctggcagtggtcagctgaggccagagcctgggggcacatctcccatggcagcccagagggcaatggacaccccccactccgcccagccctgtgaccccatatggatgctttcgctgggtgaggctgcagcccccgcagggagtgctggacttgggcgcttttgctttacctgggacttgatgagatggggcacccg

SEQ ID NO: 88894 - DNA, 858 bp, Homo sapiens
aaggtggtacatctgcacatgcgtgatcctctccatgtctgccggacacaccgacacctctctgtggggcccggggcgagcaggggtccatctcatgggttcccagcccatcctccagaggcaccaagcaatggacgctggcctgggtcccatctgcacttgccagtgcccgtcccgtcagcagcagcgccctgctgcggtgatgcgtggagttgcaacagccctggttctggaagggaagcacctccctcgttctcccttgacaccagctcccgtggaggcagaggggaagggaaggccaaagcggcgtcctccccacttggccgccctgccctgcacccatgtgcaggcacctccttcagcattgtcagagtcttgtggactcaaaccaaaaaacgtgacctgcaacggggccaggttcacaaaatgagcccctgagagacagtggagagcggccaccattccaactgacacagtgggagcggcgccactgggtgccagagcccggccgtccacgtgggctcaggtccccactctgtctcttaccagccatgtcatcttgggcaagttgctaaacagctccttgcctcaatttacccacccatgaactgagcrtcagaatgctgcctccttcctagaactgtgcagatctagtttactaataagatgcttacaaaaaaagaaaagagaaggaaattacagagaaagatctgtagaagaacctgctgggaacagattttaaagcatagtggagagaaacccatcattcctgcagcgaccagaaaatcacggaggagccaggccagccggcagcagcgtcagcctccctgctgcagctcctctgcgtcctgggccaga

SEQ ID NO: 88895 - DNA, 1008 bp, Homo sapiens
caggtcgtgtcttatgcgaagttcctgtatcccaccaacgccctggtcacacacaagagtgacagccayggcctgctgcccacacctcggcccagtgtcccccggactctgccagggtcaagacataaacctgcccccaccaagtcggcaccagccagcacagaactaggtagcccacgtgccttaaccacggcctggaacagggtgacccgcgtgccttaaccacggcccagggactgcagcagcatcagcaagcccctttcaatctgtagccctccgtgcagatggagcctggggaacagggtcaggagaggaacagctccacactgaatcgctatccctgggcttggcctgagccaggcagtggggaggagctgcatccacccacagatgactccagggagggcccctcctctcaggacatccttttcttgccctaagccctgggcccttcaggagagaaccatggcctagagcccctcccctgctcggccttgccccgccatggcgctggcctgccaggccttggggctagatgggtactgctcaagactcctggtgggtcaggggttgcctctcttacagggagtgacgtgggggacaccctggagtacaaccccaacctcctggatgacccgcagtggccctgcggcaagcacaaacgtgtcctcatctttgcgtcgtacatggtgagtgccctctcccagggcctgggtgcaggcagctgcacacctgtcctggctcggggcgtgtggggcaggctgtgggcaaagctgccccaggggcgtgacgtgcccccatcccggatcgcagcagcacagacagtggcggtgtgcagggcaggccagggagcagtgctggccactccagctggggtccacccttgcccttccgccctcggcacctggcaacctggctctccccacaccaagcaggcatgggctctggagttctctctcttgagccattttgttctcagagattcggggcctctcaagccacaccgta

SEQ ID NO: 88896 - DNA, 674 bp, Homo sapiens
tccctcctggatgtgcggaagaagtgtgagaactgcgacggtctgtagggtttccagctgaccctctcgctgggcgggggcacaagctcgggtatgggcacgctgctcatcagcaagatgcatgaggagtatcccaactgcatcatgaacaccttcagcgtagtgccctcgcccaaggtgtcactgtggtggagccctacaaccccatgctgtccatccaccagctggtggagaatacagatgagacctactgcatcaacaaggaggcgctctaggacatctgcgtcagcaccctcaggctggccacgcccacctacggggacctcagccacctgacattggccaccatgagcaggatcactacctccttgtgcttcccgggccagctcaatgcggacctgcacaagctggtggtgaacatgggtgcccttcccctgcctgcacttcttcatgccaggcatgaagcccgggcagccagcattaccgggccctgaccgtgcccgagctcacccctcagatgtttgatgccaagaacatgatggctgcccgcgaccggcaccacggctgctacctggcagtggccaccgtgttccrgggctgcctgtccatgaaggaggtggacgagcagatgctgtccatccagagcaagaacagcagctacttcgtggagtgga

SEQ ID NO: 88897 - DNA, 1035 bp, Homo sapiens
ttagtcaatagcattcagtgactgaatggatttcgggatggagaaaggaatacaaaaataagcgacttcagggatttcagatataggagcctggaagcagtggtgcttaatagaaaggggaaagagtcatgaagagctggtttatgtgggagtagataatgagttccatttggtatatttaattttgagactgatggggggacacttaattggagacgttctgtaggtgtaattatattaagaaggggaaaaattcaattagagctccacyaaattatatcagctgtgtccaaaccatattgattgcctgtgtgtatagctggtgtgcagtgtagcagagctgaatgctactaagctcccttccgttctacgttttttgatttgaagaagaatatggagggtgacatgctggaaagaggacatgaccagcagctttctctctctctctctctctcactgttcctctggtttctcctttgtttcctctactgcaaatggataatactgtgccatgttcaactaattggccatagttactgaggatatcaaaacccatcaagcacagatacttttcttttatattattattatattttaagttctgggatacatgtgcagaacgtgcaggtttgttacataggtatgcacgtgctatggtggactgctgcacccatcaacccgtcatctacattaggtatttctcctaatgctatccctccctttgccccccaccccctgacaggcccaggtgtgtgatgttcccttccctgtgtccatgtgttcttgttgttcaactcccacttataagacagaacatgtggtatttggttttctgttcctgttttagtttgctgagaatgatggtttccagcttcatccatgtccctgcaaaggacataaactcataattttttatggctgcacagtattccatggtgtatatgtgccacattttctttatccagtctatctttgatgggcatttcaacttacaatgaagttacatgctgatatacccatcatagtttggaaatt

SEQ ID NO: 88898 - DNA, 2128 bp, Homo sapiens
tgcatccaaaggctaccgtggttactcctatgatgacattccagactttgatgactagcacccaccccatagctgaggaggagtcacagtggaactgtcccagctttaagatatctagcagaaactatagctgaggactaaggaattctgcagcttgcagatgtttaagaaaataatggccagattttttgggtccttcccaaagatgttaagtgaacctacagttagctaattaggacaagctctatttttcatccctgggccctgacaagtttttccacaggaatatgtatcatggaagaatagaggttattctgtaatggaaaagtgttgcctgccaccaccctctgtagagctgagcatttcttttaaatagtcttcattgccaatttgttcttgtagcaaatggaacaatgtggtatggctaatttcttattattaagtaatttattttaaaaatatctgagtatattatcctgtacacttatccctaccttcatgttccagtggaagaccttagtaaaatcaaagatcagtgagttcatctgtaatattttttttacttgctttcttactgacagcaaccaggaatttttttatcctgcagagcaagttttcaaaatgtaaatacttcctctgtttaacagtccttggaccattctgatccagttcaccagtaggttggacagcatataatttgcatcattttgtcccttgtaaatcaagatgttctgcagattattcctttaacggccggacttttggctgtttcctaatgaaacatgtagtggttattatttagagtttatagccgtattgctagcaccttgtagtatgtcatcattctgctcatgattccaaggatcagcctggatgcctagaggactagatcaccttagtttgattctattttttagcttgcaaaaagtgacttatattccaaagaaattaaaatgttgaaatccaaatcctagaaataaaatgagttaacttcaaacatttcagaaaacattttaatgattttatgatatctttaatcccagtacctagatctaccttagtttctaggtagctggcattgtgggtcacactcaactttccctaactctgaggttatggacttgggcaactggaagcctggacatgccatcagctgagttgcaaggctgtgggaagagcaagttttaratgtctactcaatatccaagtggagctgttgaggaggcagttgcgatgcatgtgtgtgtctagagtttaagagtgggtcttggatggaaatagaaatttgggagtcagcatttggacagtatcttaaaagctagagggctgtttgagatcaccagtagagtgagtatagttggaggaaaaaaaaaaaactcaggaagtgagggacaaagagagggtgacctgaagcagcctccaagattagggacttttggtaatgggaatgttgactggggagtccagtaatctagagtgcctgagccttgacagtgaatatgtgaggtgatacataaagctttatcttggagagtggttgccgagcaaagctcagatcagaaggttttggccaaccaaatgatttggtttttttatttattattgattgattgatttatttatttatttatttatttatttatttatttatttattttgagacagagtcttgctctactgcccaggctggagtgcagtggcacagtcatttctcactgcagccttgaattcctgggctcaagtgatcttcccacctttgcctcccaaagtgttgggattataggcatgagctactgagcctggcctatttggtccttttttaaaaagttgatgctgctggtcaaaaaaataaacagaagggtataaagtgaaaagtaaacatttgggcatggagtggagagtgtacattcactccagcttacctctcaagattttccaaataaatttcttaatatacccttcctgaaatgctctaagcacataaatatatatctggtttttaaaacttgggctcccattgtatggttctataatttcccccccccaattctattttgtatatctttccatatccatggagatcagtcatattcttgttaatgcacattataagtgtagtttttcatac

SEQ ID NO: 88899 - DNA, 1824 bp, Homo sapiens
atcgtatcagaccagcaataaaagaagttcagtatctcagtgtgtggagattacgactttgcaatctaggaaaacaaaggaggcaggcacaaagtctcgaaagtcacatagggtgttggcagagtaagctcacgtttatataccaagtcccaggtcaccaaaacttgaaacttgagagtactttgggaacaaaagtatctcttcattaaaacaaataaacattaaccaaaaaagtagaccacagaactttgaatgcagctctgtcttgatgtacttaggttctccaaatgtcttaactatttacagtgtcagctttaatctaaccttggtttttatctccagactttgacttaactttgcatatcaagtcaccttgaatttgacctttatgtttatccatgaattattttgggggcatctactacggacatagctttggtaggtatcaaaaaggaatcgtccaccatgcccatcctccagaagtttgcaatatacttatgtagaaatagatccatatttgaaataactgaacaaatataataagtaatattaataaatgagtacagtcagcccatcatatccttgggttccacatctgtagattcaaccaactgcagatcaaagatatttgggagaaaaaaaacaacaaaaatagcaataccagctgggtgcggtggctcacacctgtaatcccagcacttttggaggccgaggtgggtggatcacctgaggtcaggagttcaagaccagtctgaccaacgtggtgaaaccccatctctactaaaaatacaaaaattagccaggtgtagtgatgcatacctgtaatcccagctacttggaaggccaaggcaggagaatcacttgaaccsgggaggcagaggttgccgtgagcccattgcactccagcctgggcaacaagggcgaagctccatctcaaaaaaacaaaaaacagtaaaacagtaacaaaataacaacaacaacaaaaatccttacaaagaataaaaaaattagctgggctctgtgacccatacctgtagtcccagctacttgggaggctgaagtgggaggttcgcttgagtccacgagttcaaggcggcagtgagccatgatctcgccactgcacttcagcctgggtgacagcgagaccctgcctaaaaaaaaattcaacaaggcttatcatgaaaatcagtagttcttggcaacccctctttcctttctctccaagagacaaccaccttcagttcttccagatgaatattttagtattaactttcatttccatgtgaaatatttttattaccatttcacaattgttcagtattaggccttatcaattgactatatctagtggtgcagattgggctgctctttggtcatccttcatcgcagacacgtgctttcagtccctccatttgtccatataattgtgtcattttggttggatcaatattaatattgatattgctaaggatacacaaacgctattcatagctgaaccagaacacttagtatgacttcttttccttctgacacaacttttagtttctcattggagttaataatcatgtttatttgcatgattttctatgtatctgtctctagttaagcccaaactgaccccatttgtatatatcccctagtctcccatccgtttcatctgaaagaactctctccataaaggaggctgctgccctgtcctcttcctgcccattgtccctctgaggggaggaagtgactgtagtgccttctggcttcctgcgtgacttctgattcttggttcctcctttgtcgtcatttttctctctcgatgcttgtagaattgtc

SEQ ID NO: 88900 - DNA, 1824 bp, Homo sapiens
atcgtatcagaccagcaataaaagaagttcagtatctcagtgtgtggagattacgactttgcaatctaggaaaacaaaggaggcaggcacaaagtctcgaaagtcacatagggtgttggcagagtaagctcacgtttatataccaagtcccaggtcaccaaaacttgaaacttgagagtactttgggaacaaaagtatctcttcattaaaacaaataaacattaaccaaaaaagtagaccacagaactttgaatgcagctctgtcttgatgtacttaggttctccaaatgtcttaactatttacagtgtcagctttaatctaaccttggtttttatctccagactttgacttaactttgcatatcaagtcaccttgaatttgacctttatgtttatccatgaattattttgggggcatctactacggacatagctttggtaggtatcaaaaaggaatcgtccaccatgcccatcctccagaagtttgcaatatacttatgtagaaatagatccatatttgaaataactgaacaaatataataagtaatattaataaatgagtacagtcagcccatcatatccttgggttccacatctgtagattcaaccaactgcagatcaaagatatttgggagaaaaaaaacaacaaaaatagcaataccagctgggtgcggtggctcacacctgtaatcccagcacttttggaggccgaggtgggtggatcacctgaggtcaggagttcaagaccagtctgaccaacgtggtgaaaccccatctctactaaaaatacaaaaattagccaggtgtagtgatgcatacctgtaatcccagctacttggaaggccaaggcaggagaatcacttgaaccggggaggcagaggttgccgtgagcccattgcactccagcctgggcaacaagggcgaagctccatctcaaaaaaacaaaaaacagtaaaacagtaacaaaataacaacaacaacaaaaatccttacaaagaataaaaaaattagctgggctctgtgacccatacctgtagtcccagctacttgggaggctgaagtgggaggttcgcttgagtccacgagttcaaggcggcagtgagccatgatctcgccactgcacttcagcctgggtgacrgcgagaccctgcctaaaaaaaaattcaacaaggcttatcatgaaaatcagtagttcttggcaacccctctttcctttctctccaagagacaaccaccttcagttcttccagatgaatattttagtattaactttcatttccatgtgaaatatttttattaccatttcacaattgttcagtattaggccttatcaattgactatatctagtggtgcagattgggctgctctttggtcatccttcatcgcagacacgtgctttcagtccctccatttgtccatataattgtgtcattttggttggatcaatattaatattgatattgctaaggatacacaaacgctattcatagctgaaccagaacacttagtatgacttcttttccttctgacacaacttttagtttctcattggagttaataatcatgtttatttgcatgattttctatgtatctgtctctagttaagcccaaactgaccccatttgtatatatcccctagtctcccatccgtttcatctgaaagaactctctccataaaggaggctgctgccctgtcctcttcctgcccattgtccctctgaggggaggaagtgactgtagtgccttctggcttcctgcgtgacttctgattcttggttcctcctttgtcgtcatttttctctctcgatgcttgtagaattgtc

SEQ ID NO: 88901 - DNA, 1824 bp, Homo sapiens
atcgtatcagaccagcaataaaagaagttcagtatctcagtgtgtggagattacgactttgcaatctaggaaaacaaaggaggcaggcacaaagtctcgaaagtcacatagggtgttggcagagtaagctcacgtttatataccaagtcccaggtcaccaaaacttgaaacttgagagtactttgggaacaaaagtatctcttcattaaaacaaataaacattaaccaaaaaagtagaccacagaactttgaatgcagctctgtcttgatgtacttaggttctccaaatgtcttaactatttacagtgtcagctttaatctaaccttggtttttatctccagactttgacttaactttgcatatcaagtcaccttgaatttgacctttatgtttatccatgaattattttgggggcatctactacggacatagctttggtaggtatcaaaaaggaatcgtccaccatgcccatcctccagaagtttgcaatatacttatgtagaaatagatccatatttgaaataactgaacaaatataataagtaatattaataaatgagtacagtcagcccatcatatccttgggttccacatctgtagattcaaccaactgcagatcaaagatatttgggagaaaaaaaacaacaaaaatagcaataccagctgggtgcggtggctcacacctgtaatcccagcacttttggaggccgaggtgggtggatcacctgaggtcaggagttcaagaccagtctgaccaacgtggtgaaaccccatctctactaaaaatacaaaaattagccaggtgtagtgatgcatacctgtaatcccagctacttggaaggccaaggcaggagaatcacttgaaccggggaggcagaggttgccgtgagcccattgcactccagcctgggcaacaagggcgaagctccatctcaaaaaaacaaaaaacagtaaaacagtaacaaaataacaacaacaacaaaaatccttacaaagaataaaaaaattagctgggctctgtgacccatacctgtagtcccagctacttgggaggctgaagtgggaggttcgcttgagtccacgagttcaaggcggcagtgagccatgatctcgccactgcacttcagcctgggtgacagcgagaccctgcctaaaaaaaaattcaacaaggcttatcatgaaaatcagtagttcttggcaacccctctttcctttctctccaagagacaaccaccttcagttcttccagatgaatattttagtattaactttcatytccatgtgaaatatttttattaccatttcacaattgttcagtattaggccttatcaattgactatatctagtggtgcagattgggctgctctttggtcatccttcatcgcagacacgtgctttcagtccctccatttgtccatataattgtgtcattttggttggatcaatattaatattgatattgctaaggatacacaaacgctattcatagctgaaccagaacacttagtatgacttcttttccttctgacacaacttttagtttctcattggagttaataatcatgtttatttgcatgattttctatgtatctgtctctagttaagcccaaactgaccccatttgtatatatcccctagtctcccatccgtttcatctgaaagaactctctccataaaggaggctgctgccctgtcctcttcctgcccattgtccctctgaggggaggaagtgactgtagtgccttctggcttcctgcgtgacttctgattcttggttcctcctttgtcgtcatttttctctctcgatgcttgtagaattgtc

SEQ ID NO: 88902 - DNA, 1417 bp, Homo sapiens
ggagccccatgtaaagaacaggctagaaaaggagagaggagagaaagggagcacaggggaagggggagaagaaggcaagggggaaggaagcaaggtcactggtcattctcttgctttccacttgaactatcgcactttaccttacccatgcatttctgagatgctaattaaaagatgtttcccagaggggctgagtgccagattaggaacagcacgttcaaccagattaagttggttgatctgcaaagaggccaccgcttctcctcaggggaacagttctgagtttgggccgaatcctctctgcagcttttygctagtctcttctctcagaaggcaaatgctgtttccgccctgggagaggagaagctggctttactttggaaccagcccccgagactgtggataaagctgagatgcaggggttcctgaggaagaggaggaggatcccgacttccttccacttttaggcctgcaaaagtcaaacacatgtttatattacatgtccccatctctgtccctgacacatcagatgtcattaacatttcatttcaggccattcttcaatggcctgaaaacgacaagttcaactgtaaaaccactacactggcacagcctgaacctttggggatggtgaaaatggcctcagaacagaggtgtggaacctgagagaaggagactctgatgcttagcaattgttcttctttaaaaccaaagcttgactgtactgtccttccctgattgataaaaaaatattaagtttgcaggtagaatttcttccattttggttttccacccaattgttttcctacaacttttaatccaggatgtaataagacagaattactagttttgcaccacatgggtgaggtaaacttagcatggaggcccagagactgggttgtggatctggattgacctatttttgaattcttgctttggcccttacttgctgggtttccttagagatggctactttctcaaattctctaagtttcagttttcttgtctataaaatgggactgattataatatttgccttctaagtttttacaggaaatcattaagagaatgtttgtaaagcacttagaactaccggacacctcatgagaacagaagaactgactgctatttcactagaacacattcaccttatagtaagggactggggacattaggtattctggtattcggtatacccagcatagtgtctcaaccataaatatttgtagaataaataagtaaacataggagtaatatggcaatattttctagtgtgttctgcaaagtattccatgataaacaagcattcttgctttggtttgtccttgttcaaacatgttctgtttaaacacacgtcatcaaagccactcacctggccttggatttcttatttgcagtgctttcaaatgatgatgca

SEQ ID NO: 88903 - DNA, 721 bp, Homo sapiens
gtgcatattctacacacagtcgattccaatatgacaaacaccttgtctttgctctttcctctttccatcatatacttactgctttcatatgggaaggatagagctgagaaataaatattgaaactgataccatcagtgttggatattctgtttgccccttgagagtcactcttcactttctccagcctactctcctgaggctgggcattaattgcaacattggtgagcttccttgccctctggctttagaatgggttcaggcagtgggagcttctagaggagactggagggaggagaactgtgaggtcagttgcttaagagactcccgggtctcttcttgccaacatgctgttggttgactctgtccccctcctagaagccacagtcgaccaggaagatctcttctgtcgttctaatactattcttggtttctgtagctctgtcctcttactccttcaggcctaggacacgtcatattccctgcatggtttccctaatccctgcccacacctggtaaataacctcttattaaactcccttgttgccccgtttgagtgttccatctgtttcctgctgggaccctgaccgaggtaacatctttgaggcatttactctctagacagaatcagatgaaatgaaacagctagagatgttatgaaggtataagataatgaggcataaatcgtactcaagccctaaggayactcagcatgtaggatcc

SEQ ID NO: 88904 - DNA, 731 bp, Homo sapiens
tctcctggtcttcaacaagtggcttctatcttcaaggtcacctcctgggccaggatagctgctggagcttcaggcatttcatcctcatcccaaatagcagcagaaagggagagaggaagagaacttgccctctttttaagtaactttcctgragacacaaccaaacttccacttatatctcattggctagaacttgttcacatggccacatctgaagccaaggaggccaggaaacgggcagtggtcctgtcacaaaggccaaggggagactggacgttggggtaggcaactagctgctctgccacacggagtgtgcccctggctcattccaataacagctaggtattatcattattaatattagctctgcagacctcggcaaagacaagaaaactgcctaggccttgtctgttggtgtaccatttattcagtaaacatgcatggcatctatatgtcagctctcttctagggctgggaatatagaagagatgtgggaagaggcagtatcttgtgatgaagagagtggggtctgaaatacagagcctgggttagagccccatgttggccactttctgtgtgatcctgagaaatggatgtaacttctgtgggctttgttgtctttgtctctaagatgaggaagatgataagaatgccatcacaggattattctcagggtgaaatgcattagtacaaataaagggctttgaatacttcgagggagaaggctctga

SEQ ID NO: 88905 - DNA, 911 bp, Homo sapiens
ttgcacatacagcacatctcagtttggaccaggtacatttcgagtgctcagtagccacatgtgactaatggctgccatattagacagcacaggggtagacggcatgttgggtgagcaagcccattcttgccacgccccttttgctgctgctagtattctctstaattatttccttttcattctcccaactgattttagaaaatgccatcctgtcttagcctgctgaagagaaagaagaaagggggttgtgggttgtatttgggctaaagtaataattagggagacaggagcatcctggggccaggcaaagtaagagcagtggaattgaaactttcagagccccaggggactggtgaaggatggatgggaggaaagggacagcaagaggtaggccaattgctgttgtgaggaagagtaaaattcttaagtcaaaatcaaaataaaggctgggtgtggtggctcatgcctgtaatcctagcactttgggaggcacaggtgggaggatcacttgagcccaggagtttgaatccagcctgggcaaaaaagtgagatccccatctctacaaaaaagtaaaaattagccgggcattgtagcacacacttgtagtctcagctactcaggaggctaaggctagaggattgcttgagcctaggaggttgaggctgcagtgagccatgatcaagccactgcactctagcctggacaacagagtgagaccttgtctcagaaaagaaaaaacaacaacaacaaaaagaaaactgtgttgttctctgattacagaagtgaaacttttataaaatatgaggaaaacaaaagcactgaataaatctctttctaatgttagtgatagtcactgttaatagcatattaattgtatattttattttattaattttgtttatacttgtat

SEQ ID NO: 88906 - DNA, 1454 bp, Homo sapiens
aggctgcagtgagccaagattatgccattgcactccagcgggggcaacaaagcaagacttcatctcaaaaaaaataaaaagtaaaaagccctatataattccacatttgagaggcaaaacataatttataccttttaagaaatatttctttccagtcgttttattatttatggcattttggttggtttgttttaatatggtgtgttcacaatgtattttatgcagaatttgacctttttatgtgtgtatgccttgtttttcctgttatgtttatttatttatactgctcgttattcaaaaataatttgaggccctattgtcagaggcatttgaaccagaatgactccatcttgaatcggggctgggtaaaataaggttgagccctattgagccgcattcccaggaagttaggcattctaaatcacggaatgagataggaggttggcacaagatacaggtgacaaagaccttgctgatacaacaagttgcagtaaaaaagccagccaaaacccactgaaaccaagatggccacaaaagtgacctccagtcattcttattctccgttctatgctaattataatgcattagcatgctaaaagacacgcccacctgcaccatgatagtttacaaatgctatggcaacatcaggaagttatcctatatggtctaaaaagggggaggagccctcagttctgggaattgcccacccctttcctggaaaattcatgaataatccaccctttgttttgcatatgatccataaataactataagcagtcgagcagcccacgctgctgccctgcgtatggagtagccattgtttattccttcactttcttaataaacttgccttcactttactctatggactggccccgaattctctcttgcacgaggtccaagaaccctctcttggggtctggatcaagactgctttctggtaacactatgagatatagaagtacatacagtatttctttctgttgcctgcagcatgcaatcctgtgctttgttcctaccaagtgtttatggattgaacagggaattgagtctggggaagcttgttttccagtggagggcaggtggatgtgtgattttgtctgacttttggaagtagccaggacctcccactgttaccatggtgtatctttggaactgagttctgtctctggtcatttatttgttyccatctgtctttgtctctcctttctggaggggaacatgtccgaaggcctggtctacagtgatctccctctaaacgagaacagactcattccatcctgcagatgtgtattactcaaagtgctgtttgcacgcaaagaatgctaagtcctagcccagcaactggaacgtatcaactccttctctcccatcccctagaggcatggcccaaattgctgtaacccttcacccttccaagctctagtaccctctggcttggaggttgcaaaaag

SEQ ID NO: 88907 - DNA, 727 bp, Homo sapiens
aggcctgttgcttggcaacagccagcatcacacaccgtgggcagcaagggctctggtggtgacccacgcctccagcccagcccagatctgcctgggtgctggagagggccggcgagtgtccttggaggcttggaagaaaagcttccgtctgcaggagcacttgcatgtggtcctgccgacctccagctttctagaagggccrgcgactgtgtagttattattatctttaatcctgatgagaactccgcaaataaggtcatcctgccctctttataggtcagggaaccgagacagcctggtgaatgtcttgccaggatcaggtgttgattctgcagcacagcccctccactgtggctggaagaggggtggagggtctgtagctcctaggtagggttcagaatgggttcagtgggaattggaaggtaagcagaaggtgattagaaacagcgtttgtgggcctgataccccctgagtcctcctcatatgaggactgcaagtccaggggtccagggtgtgaccgcaatggtggtggtggtcccaggggtgacgttttcaaggccccgagctccttgcagtgggatgagcctgcatggcacatgggccctggcttggggaggcaggccctttggtgaaccggctcaggatcatgggccgggaagcactaagcctctggatactgactatctcttcagacaccaccacatccaacaccacgacaacccggctt

SEQ ID NO: 88908 - DNA, 2331 bp, Homo sapiens
agcagaatgttctgttcctgagccctgcagggccctggtaagcctggaggttaggatggaaccagctgtttccagaacctccctccaaaaaagaggaggatggagaagggactggccctggaagtcctgaactggtcaggtcagggagccaaaccgtagaggtttcaggcagaaatgagcctttcaaatgccagactgcccctgatacagctgttcctcttagaagtcttggttcaggccragaaccaggagctgccctgcttccgcctctcgcccccactgtcaacagtgccacctcccaaatgtgctgcgtccacacacttcctcagcccccatggtcacaccgcaactctggcctggactggtgcagtagcctcctcactgtcactggcccaattctaacacattcccactcagcagccagagatcttttgaaagtgtaaatcaaacatcacatcgcatcacttggctgttcaaacatctgaggacttcttgtccttagaattaaattcgaagacaagaaacaaaaacagcctgggcacggtggctcacacctgtaatcccagcacgttgggaggccgaggcaggtggatcactggagatcaggagtttgagaccagcgtggccaacatgatgaaaccccgtctctactaaaaatacaaaaaattagccgggcgtgatggtgtgctcctgtaatcccagctactcgggaggcagaggcaggagaatcgcttgaacctgggagatggaggttgcagcaagccgagattgcaccactgcactccagcctgggtgacagagtgagagtctgaaagagagagagagagagaagagaaagaaggaaggaaggaaggagagagagagagaaagagaaaagaaagaaaggaaggaagaaagaaagaaagagaaaaagaaagaaagaaagaaagaaaaagaaaaagaaagaaaggagaaaggagaaaggaaagaaagaaattaaaaagaaagaaaagagaattaaattcgaactcttcaaactcaaactcctacaagacagcactgcatctcaccttgccctccctgctccctctgcctggaaccatctcccacatttatctgtgcttggctggtttcctcttgtccttctggtctcagtatggaggttgcctccttggagaggtgctctgaccacgtggttcaaatcagtcccgacccccaccttagatctttattatctggtgacatcactttatttatttatttatttatttatttatttatttatttatttatttacttgcttttttctttgctcccctctactgagctctggtctcttgagctggtcccaagtatcagagtcagggcttggcacagagtagacacacaataagccgagtgagagtctaatgaacacacacacacctcccttggagcgctctcactcgtgtccactcaatcatatgctgagaccctctgccacacttgcaaacacagacacacacttctccacccctggacacgtcctgcgcgggagctccgagatgcgtgagcgcctgtaaccagggatgctgccgccccctcctggaaagattgggaaagtacagccagagtctttctgggaaaccactccaatgctaacctcaggctaatcctaactccccttccttgcagacagctgtccctgcccaggcagggtcttcagatcatttctgatatttggcctagggcctgggctgtatgttcttaccaggtgcggaggaaggaaggaaggaagggagggaggggaggggaggggaggggaggaaactgacgcaggtaagagcattcacctctttccctctccaaggctcagtttcaggatcattgtcacaggtctgacacgaatcatgtgcaataattttttgtacattcataggtttggaacacggtataaagggccttgaatgccagaatgaagccttgggttttatcctgcagtcgttgggagccactaagagtttctgagcaagagagggacaggatccgaactgtgctttggaaagatgaaccagccggtgtgcattcatgcattcactcattcgttcattcattcattcatctgaccaaaatgtgctttaaacatcttttgcatgccgggccctgggaatgcagcagtgaccagaggtgctgttggacttcatggagctcatggcctcgagtgacatgtgtgggagtggacatttggacacagaggaggcatcaccccagtcctaggcaaggtgagccctggggcaacataaggctcacataggcgccttagcttctgccctgtatgtagacagagcagggtgggagtcaactaagccactg

SEQ ID NO: 88909 - DNA, 2331 bp, Homo sapiens
agcagaatgttctgttcctgagccctgcagggccctggtaagcctggaggttaggatggaaccagctgtttccagaacctccctccaaaaaagaggaggatggagaagggactggccctggaagtcctgaactggtcaggtcagggagccaaaccgtagaggtttcaggcagaaatgagcctttcaaatgccagactgcccctgatacagctgttcctcttagaagtcttggttcaggccaagaaccaggagctgccctgcttccgcctctcgcccccactgtcaacagtgccacctcccaaatgtgctgcgtccacacacttcctcagcccccatggtcacaccgcaactctggcctggactggtgcagtagcctcctcactgtcactggcccaattctaacacattcccactcagcagccagagatcttttgaaagtgtaaatcaaacatcacatcgcatcacttggctgttcaaacatctgaggacttcttgtccttagaattaaattcgaagacaagaaacaaaaacagcctgggcacggtggctcacacctgtaatcccagcacgttgggaggccgaggcaggtggatcactggagatcaggagtttgagaccagcgtggccaacatgatgaaaccccgtctctactaaaaatacaaaaaattagccgggcgtgatggtgtgctcctgtaatcccagctactcgggaggcagaggcaggagaatcgcttgaacctgggagatggaggttgcagcaagccgagattgcaccactgcactccagcctgggtgacagagtgagagtctgaaagagagagagagagagaagagaaagaaggaaggaaggaaggagagagagagagaaagagaaaagaaagaaaggaaggaagaaagaaagaaagagaaaaagaaagaaagaaagaaagaaaaagaaaaagaaagaaaggagaaaggagaaaggaaagaaagaaattaaaaagaaagaaaagagaattaaattcgaactcttcaaactcaaactcctacaagacagcactgcatctcaccttgccctccctgctccctctgcctggaaccatctcccacatttatctgtgcttggctggtttcctcttgtccttctggtctcagtatggaggttgcctycttggagaggtgctctgaccacgtggttcaaatcagtcccgacccccaccttagatctttattatctggtgacatcactttatttatttatttatttatttatttatttatttatttatttatttacttgcttttttctttgctcccctctactgagctctggtctcttgagctggtcccaagtatcagagtcagggcttggcacagagtagacacacaataagccgagtgagagtctaatgaacacacacacacctcccttggagcgctctcactcgtgtccactcaatcatatgctgagaccctctgccacacttgcaaacacagacacacacttctccacccctggacacgtcctgcgcgggagctccgagatgcgtgagcgcctgtaaccagggatgctgccgccccctcctggaaagattgggaaagtacagccagagtctttctgggaaaccactccaatgctaacctcaggctaatcctaactccccttccttgcagacagctgtccctgcccaggcagggtcttcagatcatttctgatatttggcctagggcctgggctgtatgttcttaccaggtgcggaggaaggaaggaaggaagggagggaggggaggggaggggaggggaggaaactgacgcaggtaagagcattcacctctttccctctccaaggctcagtttcaggatcattgtcacaggtctgacacgaatcatgtgcaataattttttgtacattcataggtttggaacacggtataaagggccttgaatgccagaatgaagccttgggttttatcctgcagtcgttgggagccactaagagtttctgagcaagagagggacaggatccgaactgtgctttggaaagatgaaccagccggtgtgcattcatgcattcactcattcgttcattcattcattcatctgaccaaaatgtgctttaaacatcttttgcatgccgggccctgggaatgcagcagtgaccagaggtgctgttggacttcatggagctcatggcctcgagtgacatgtgtgggagtggacatttggacacagaggaggcatcaccccagtcctaggcaaggtgagccctggggcaacataaggctcacataggcgccttagcttctgccctgtatgtagacagagcagggtgggagtcaactaagccactg

SEQ ID NO: 88910 - DNA, 2331 bp, Homo sapiens
agcagaatgttctgttcctgagccctgcagggccctggtaagcctggaggttaggatggaaccagctgtttccagaacctccctccaaaaaagaggaggatggagaagggactggccctggaagtcctgaactggtcaggtcagggagccaaaccgtagaggtttcaggcagaaatgagcctttcaaatgccagactgcccctgatacagctgttcctcttagaagtcttggttcaggccaagaaccaggagctgccctgcttccgcctctcgcccccactgtcaacagtgccacctcccaaatgtgctgcgtccacacacttcctcagcccccatggtcacaccgcaactctggcctggactggtgcagtagcctcctcactgtcactggcccaattctaacacattcccactcagcagccagagatcttttgaaagtgtaaatcaaacatcacatcgcatcacttggctgttcaaacatctgaggacttcttgtccttagaattaaattcgaagacaagaaacaaaaacagcctgggcacggtggctcacacctgtaatcccagcacgttgggaggccgaggcaggtggatcactggagatcaggagtttgagaccagcgtggccaacatgatgaaaccccgtctctactaaaaatacaaaaaattagccgggcgtgatggtgtgctcctgtaatcccagctactcgggaggcagaggcaggagaatcgcttgaacctgggagatggaggttgcagcaagccgagattgcaccactgcactccagcctgggtgacagagtgagagtctgaaagagagagagagagagaagagaaagaaggaaggaaggaaggagagagagagagaaagagaaaagaaagaaaggaaggaagaaagaaagaaagagaaaaagaaagaaagaaagaaagaaaaagaaaaagaaagaaaggagaaaggagaaaggaaagaaagaaattaaaaagaaagaaaagagaattaaattcgaactcttcaaactcaaactcctacaagacagcactgcatctcaccttgccctccctgctccctctgcctggaaccatctcccacatttatctgtgcttggctggtttcctcttgtccttctggtctcagtatggaggttgcctccttggagaggtgctctgaccacgtggttcaaatcagtcccgacccccaccttagatctttattatctggtgacatcactttatttatttatttatttatttatttatttatttatttatttatttacttgcttttttctttgctcccctctactgagctctggtctcttgagctggtcccaagtatcagagtcagggcttggcacagagtagacacacaataagccgagtgagagtctaatgaacacacacacacctcccttggagcgctctcactcgtgtccactcaatcatatgctgagaccctctgccacacttgcaaacacagacacacacttctccacccctggacacgtcctgcgcgggagctccgagatgcgtgagcgcctgtaaccagggatgctgccgccccctcctggaaagattgggaaagtacagccagagtctttctgggaaaccactccaatgctaacctcaggctaatcctaactccccttccttgcagacagytgtccctgcccaggcagggtcttcagatcatttctgatatttggcctagggcctgggctgtatgttcttaccaggtgcggaggaaggaaggaaggaagggagggaggggaggggaggggaggggaggaaactgacgcaggtaagagcattcacctctttccctctccaaggctcagtttcaggatcattgtcacaggtctgacacgaatcatgtgcaataattttttgtacattcataggtttggaacacggtataaagggccttgaatgccagaatgaagccttgggttttatcctgcagtcgttgggagccactaagagtttctgagcaagagagggacaggatccgaactgtgctttggaaagatgaaccagccggtgtgcattcatgcattcactcattcgttcattcattcattcatctgaccaaaatgtgctttaaacatcttttgcatgccgggccctgggaatgcagcagtgaccagaggtgctgttggacttcatggagctcatggcctcgagtgacatgtgtgggagtggacatttggacacagaggaggcatcaccccagtcctaggcaaggtgagccctggggcaacataaggctcacataggcgccttagcttctgccctgtatgtagacagagcagggtgggagtcaactaagccactg

SEQ ID NO: 88911 - DNA, 2331 bp, Homo sapiens
agcagaatgttctgttcctgagccctgcagggccctggtaagcctggaggttaggatggaaccagctgtttccagaacctccctccaaaaaagaggaggatggagaagggactggccctggaagtcctgaactggtcaggtcagggagccaaaccgtagaggtttcaggcagaaatgagcctttcaaatgccagactgcccctgatacagctgttcctcttagaagtcttggttcaggccaagaaccaggagctgccctgcttccgcctctcgcccccactgtcaacagtgccacctcccaaatgtgctgcgtccacacacttcctcagcccccatggtcacaccgcaactctggcctggactggtgcagtagcctcctcactgtcactggcccaattctaacacattcccactcagcagccagagatcttttgaaagtgtaaatcaaacatcacatcgcatcacttggctgttcaaacatctgaggacttcttgtccttagaattaaattcgaagacaagaaacaaaaacagcctgggcacggtggctcacacctgtaatcccagcacgttgggaggccgaggcaggtggatcactggagatcaggagtttgagaccagcgtggccaacatgatgaaaccccgtctctactaaaaatacaaaaaattagccgggcgtgatggtgtgctcctgtaatcccagctactcgggaggcagaggcaggagaatcgcttgaacctgggagatggaggttgcagcaagccgagattgcaccactgcactccagcctgggtgacagagtgagagtctgaaagagagagagagagagaagagaaagaaggaaggaaggaaggagagagagagagaaagagaaaagaaagaaaggaaggaagaaagaaagaaagagaaaaagaaagaaagaaagaaagaaaaagaaaaagaaagaaaggagaaaggagaaaggaaagaaagaaattaaaaagaaagaaaagagaattaaattcgaactcttcaaactcaaactcctacaagacagcactgcatctcaccttgccctccctgctccctctgcctggaaccatctcccacatttatctgtgcttggctggtttcctcttgtccttctggtctcagtatggaggttgcctccttggagaggtgctctgaccacgtggttcaaatcagtcccgacccccaccttagatctttattatctggtgacatcactttatttatttatttatttatttatttatttatttatttatttatttacttgcttttttctttgctcccctctactgagctctggtctcttgagctggtcccaagtatcagagtcagggcttggcacagagtagacacacaataagccgagtgagagtctaatgaacacacacacacctcccttggagcgctctcactcgtgtccactcaatcatatgctgagaccctctgccacacttgcaaacacagacacacacttctccacccctggacacgtcctgcgcgggagctccgagatgcgtgagcgcctgtaaccagggatgctgccgccccctcctggaaagattgggaaagtacagccagagtctttctgggaaaccactccaatgctaacctcaggctaatcctaactccccttccttgcagacagctgtccctgcccaggcagggtcttcagatcatttctgatatttggcctagggcctgggctgtatgttcttaccaggtgcggaggaaggaaggaaggaagggagggaggggaggggaggggaggggaggaaactgacgcaggtaagagcattcacctctttccctctccaaggctcagwttcaggatcattgtcacaggtctgacacgaatcatgtgcaataattttttgtacattcataggtttggaacacggtataaagggccttgaatgccagaatgaagccttgggttttatcctgcagtcgttgggagccactaagagtttctgagcaagagagggacaggatccgaactgtgctttggaaagatgaaccagccggtgtgcattcatgcattcactcattcgttcattcattcattcatctgaccaaaatgtgctttaaacatcttttgcatgccgggccctgggaatgcagcagtgaccagaggtgctgttggacttcatggagctcatggcctcgagtgacatgtgtgggagtggacatttggacacagaggaggcatcaccccagtcctaggcaaggtgagccctggggcaacataaggctcacataggcgccttagcttctgccctgtatgtagacagagcagggtgggagtcaactaagccactg

SEQ ID NO: 88912 - DNA, 2331 bp, Homo sapiens
agcagaatgttctgttcctgagccctgcagggccctggtaagcctggaggttaggatggaaccagctgtttccagaacctccctccaaaaaagaggaggatggagaagggactggccctggaagtcctgaactggtcaggtcagggagccaaaccgtagaggtttcaggcagaaatgagcctttcaaatgccagactgcccctgatacagctgttcctcttagaagtcttggttcaggccaagaaccaggagctgccctgcttccgcctctcgcccccactgtcaacagtgccacctcccaaatgtgctgcgtccacacacttcctcagcccccatggtcacaccgcaactctggcctggactggtgcagtagcctcctcactgtcactggcccaattctaacacattcccactcagcagccagagatcttttgaaagtgtaaatcaaacatcacatcgcatcacttggctgttcaaacatctgaggacttcttgtccttagaattaaattcgaagacaagaaacaaaaacagcctgggcacggtggctcacacctgtaatcccagcacgttgggaggccgaggcaggtggatcactggagatcaggagtttgagaccagcgtggccaacatgatgaaaccccgtctctactaaaaatacaaaaaattagccgggcgtgatggtgtgctcctgtaatcccagctactcgggaggcagaggcaggagaatcgcttgaacctgggagatggaggttgcagcaagccgagattgcaccactgcactccagcctgggtgacagagtgagagtctgaaagagagagagagagagaagagaaagaaggaaggaaggaaggagagagagagagaaagagaaaagaaagaaaggaaggaagaaagaaagaaagagaaaaagaaagaaagaaagaaagaaaaagaaaaagaaagaaaggagaaaggagaaaggaaagaaagaaattaaaaagaaagaaaagagaattaaattcgaactcttcaaactcaaactcctacaagacagcactgcatctcaccttgccctccctgctccctctgcctggaaccatctcccacatttatctgtgcttggctggtttcctcttgtccttctggtctcagtatggaggttgcctccttggagaggtgctctgaccacgtggttcaaatcagtcccgacccccaccttagatctttattatctggtgacatcactttatttatttatttatttatttatttatttatttatttatttatttacttgcttttttctttgctcccctctactgagctctggtctcttgagctggtcccaagtatcagagtcagggcttggcacagagtagacacacaataagccgagtgagagtctaatgaacacacacacacctcccttggagcgctctcactcgtgtccactcaatcatatgctgagaccctctgccacacttgcaaacacagacacacacttctccacccctggacacgtcctgcgcgggagctccgagatgcgtgagcgcctgtaaccagggatgctgccgccccctcctggaaagattgggaaagtacagccagagtctttctgggaaaccactccaatgctaacctcaggctaatcctaactccccttccttgcagacagctgtccctgcccaggcagggtcttcagatcatttctgatatttggcctagggcctgggctgtatgttcttaccaggtgcggaggaaggaaggaaggaagggagggaggggaggggaggggaggggaggaaactgacgcaggtaagagcattcacctctttccctctccaaggctcagtttcaggatcrttgtcacaggtctgacacgaatcatgtgcaataattttttgtacattcataggtttggaacacggtataaagggccttgaatgccagaatgaagccttgggttttatcctgcagtcgttgggagccactaagagtttctgagcaagagagggacaggatccgaactgtgctttggaaagatgaaccagccggtgtgcattcatgcattcactcattcgttcattcattcattcatctgaccaaaatgtgctttaaacatcttttgcatgccgggccctgggaatgcagcagtgaccagaggtgctgttggacttcatggagctcatggcctcgagtgacatgtgtgggagtggacatttggacacagaggaggcatcaccccagtcctaggcaaggtgagccctggggcaacataaggctcacataggcgccttagcttctgccctgtatgtagacagagcagggtgggagtcaactaagccactg

SEQ ID NO: 88913 - DNA, 733 bp, Homo sapiens
ccatagactggctgaccaagtctttcaatttcaactgactgtaagtcccttgaaggcaagacttgtgcctgatttatctctgtaattccggaatgctgaaagcaatgaagacctcagtggatgtctgttcatttattcatcagatattcattgagtacctagattgtaccagacattcatgggaggacggtgtaagggaaagactctggaatctggtgctctattgccatgtttctaatataaccagcacttattagctgtgtgaccttgggcaaggtctgagctacccctttgatgatcactgacaatgatacttctggcatgrggctgagtgaggactaaaagactgtggaaagtatactcaacacatacctcctggctttaatattgcctggattgctctgttctgttctgtgcctctacctttctttctagggctatcccaccaaagatgaatcagtttctctacaacctcaaagagaatctgcaaaaagttctcccacacatggtagaaagtcaggtaagtttagaaaaaactttgcatcttgagcatccttgagtccgagggttagggcatatatccactggcaatttagcaaaggatttcaaacattggattttagagcttgaaaaatctcaatttaaaatttcagtttggccatgagttttgccagcctatccttgagcaagagactttgcctccctgagcctcagtgttcccacctgtagcatg

SEQ ID NO: 88914 - DNA, 733 bp, Homo sapiens
ccatagactggctgaccaagtctttcaatttcaactgactgtaagtcccttgaaggcaagacttgtgcctgatttatctctgtaattccggaatgctgaaagcaatgaagacctcagtggatgtctgttcatttattcatcagatattcattgagtacctagattgtaccagacattcatgggaggacggtgtaagggaaagactctggaatctggtgctctattgccatgtttctaatataaccagcacttattagctgtgtgaccttgggcaaggtctgagctacccctttgatgatcactgacaatgatacttctggcatggggctgagtgaggactaaaagactgtggaaagtatactcaacacatacctcctggctttaatattgcctggattgctctgttctgttctgtgcctctacctttctttctagggctatcccaccaaagatgaatcagtttctctacaacctcaaagagaatctgcaaaaagttctcccacacatggtagaaagtcaggtaagtttagaaaaaactttgcatcttgagcatccttgagtccgagggttarggcatatatccactggcaatttagcaaaggatttcaaacattggattttagagcttgaaaaatctcaatttaaaatttcagtttggccatgagttttgccagcctatccttgagcaagagactttgcctccctgagcctcagtgttcccacctgtagcatg

SEQ ID NO: 88915 - DNA, 563 bp, Homo sapiens
gcagttccttgtgaatgcaaattggtcacaaggggattgagtaaaagcactaaccaagttaataacagcacgctaatctccagtaagggttcccactgcctcagtgacagtgatgacatctgacacctcatgggcccagggcaaaccccaacattcagcctgcattccrtctaccatcagccaccataccctggaggcttttcaatcagccagactgagctgttacattgacagggtagtttgtaacattcctacagaagcgcatcccaaattcacagagtaatatcctcttctccacttggtatgcagtactgtatttgtggaataacctactgaggcttggagaatttaagtggcaggtagagtggacacacctcactgttacggctcaaattctcagctgtgagggggaatatcccctcaggcagtggtgatgttctgtgctacaagcagccaaaatatcaatgcccgtaatgcactcgacacaaggaaccatggtcaccagcactcaaaatggctcaaagagcctcactcgcaagcacataagtaccacaagcaggtaa

SEQ ID NO: 88916 - DNA, 563 bp, Homo sapiens
gcagttccttgtgaatgcaaattggtcacaaggggattgagtaaaagcactaaccaagttaataacagcacgctaatctccagtaagggttcccactgcctcagtgacagtgatgacatctgacacctcatgggcccagggcaaaccccaacattcagcctgcattccgtctaccatcagccaccataccctggaggcttttcaatcagccagactgagctgttacattgacagggtagtttgtaacattcctacagaagcgcatcccaaattcacagagtaatatcctcttctccacttggtatgcagtactgtatttgtggaataacctactgaggcttggagaatttaagtggcaggtagagtggacacacctcactgttayggctcaaattctcagctgtgagggggaatatcccctcaggcagtggtgatgttctgtgctacaagcagccaaaatatcaatgcccgtaatgcactcgacacaaggaaccatggtcaccagcactcaaaatggctcaaagagcctcactcgcaagcacataagtaccacaagcaggtaa

SEQ ID NO: 88917 - DNA, 1621 bp, Homo sapiens
tcccaggactggctccttcccttcaaagtagtaagttcccttctggcccaaggtgtgtctagaaacatggtccaggagctagggcctgaaacgccagcctcacgactctgcctggtgccctatcctattgtggctgagctggtatccaagatgcaagacaaagtcttctttacttttcagaaggcagttttttaacaactgacaaaatggcctttggttattcttagcrtttgctgacaattcttggcaatatctgcctaaacagcttcttagagatggctgttaacaggaagttaggtgtgagattaatttttttctttttctgctatttctttatgtcttattgtaacaaacttggggagaaaaataaaatgcggcagaaaaaaaaaatctctaatctggatgggcacggtggcttacgcctgtaatcccagcactttgggaggccaaggcacgtgaatcacctgaggtcaggagtttgagaccagtctggccaatatggtgaaaccccctctctactaaaaatacaaaaaattagccaggcatggtcgtgggcacctgtaatcccagctacatgggaggctgaggcaggagaattgcttgaacccaggaggcgatggttgcagtgagccaagatcgcaccattgccctccagcctgagcgacagagcgagactccgtctcaaataaacaaacaaaaaaaatcactaatcttgcagcttggagacaatgactattaacagttttgtttgcttctttccagaccttttccagcactattttgaatgtcaataaatattccatacatagatgcaccatgatacatttttaaccattctactgttagatacttgggttgttttcaattttcacgcttataaataactttgtgattaatatcttgaggaataaacctttgttcatatctctgtttacttactaattctcagaagggtaatttatagcttttgataagtattgccaaattatcctccaaagagatgacggtggtgataaaacatgaccaatgttactgagtgcttaaaatattctaggccccttgttaagggcttttatgaattgtctcatatgatcttcaccagaaccttagaaacgaggtactgctattctgctcattttacggaacaggaaaaaaaaaaaaactcagagaggttaaagtcaattgtgcttggggatgtggatgtgcacatatctccagaaggaggcatgaaaaacatcggttgggtaagcatagacacagaatacacaaagaaagacagaatggaaggaggggagaaagggaggaagggaggaagggaggagggagggaaagaaggagggaaggaagggaaaaggaaggaaggaaggaaggaaaacattggtgaggtgtgtgatctcaacagggttactgggtagcgaggggacattggtgggggccaggctcttcactgtacgtttttccatcttttgaattttaaaccacagcaatgtattccgtattcaaaaataaactaaaacatttacttaactcacttcctatatacattcaaaaacaaatcaagacgggatgtggtggctcacacctataattccaggactttgggaggccaaggtgggaggat

SEQ ID NO: 88918 - DNA, 2450 bp, Homo sapiens
aaccttccccactagttcccagggtccattatttcattcttatgcctttgcatcctcattgcttagctcccatttatgagtgagaacatacaatatttggtttcccactcctgagttacttcactcagaataatggcccccagctccatccaagttgctgcaaaggccattattaccttctgttttatggctgagtagtatccatggtgtatatattggtgtgcatatactacattttctttatccacttattgattgatggacacttaggttggttccttatgtttgcaattgtgaattgtgctgctataaacatgcatgtgcaggtgtctttttcacagaatgacttcttttcctgtgggtagatacccagtagtgggattgctggatcaaatggtggatctacatttagttctttaaggaatctcctcactgttttccatcgtggttgtactagtttgcattcccaccagcagattgccattcccctactgctcatgatattgggtgtcccgttgcttgatttttgtagatcttctgtagctcttctccagtaaagcatctgttcagatgtcctcctgagacactgaccttcttattctctagcactcttccttactccacctgcaattaaaatccctggtgatctggactcccttaccctagagtttagccaagcccctatgcaggatttctataactttaccgttcatgttttctatggctgggcactggagatgacacgtagatcccaatggtaaaatccagttcagtaaaaaggatcccttgaatgtatctggaagtttctccagtgccagggtgagtgctgcaactggaaggacaccccgggaccactaggagaggacaaggtcaccgatgagaccgataagactgccagcagcaaacattcccaaactgggggcaaaggtttcatgggcaggctcactccctgaccacatgcccagtgctggtcatgcagttgggactgagattgtcatagcgatgggaagactaccctgggcgatcattatgaaaagccttctgtgggaggaggctgtggtttttgttttcttaacctgcatatgcatgcgccaaattgctttggctttaggaaagctcactgcctgtgtgatgggggtaggggaagcaatttttaaaaaatactaaaactgattacatctgtttattccttttcagaaagtggatgaattaatttcagctgtggattttttcaatttaggaaaaattgtaaatggaccttttagctatgaaaggtaaaggcccattgacattttccatgggagaggttaagacagagtgaaattgctctgcctaaaaagtaatgcaaaagttcaggtaccagtggcctcctgaaagaaatgggcaggcatcctggggctccagcagagaagactggaggcagggcttgctggagagactgaagaccagtcccccagcaaggcagtggaggggtctggaggaagggggcagggccagggaagcatcccggggcggaggcagatgtccaagagacggggctgacagcgacgcctggtgctccacgccccaggctgcagtcacccagtgttacccacaaaccaccattccatggcctgtgctcccacttgcacaaaagtcacaggttccagggatcaggatgtggacatctttgggagccattattctgccccctacacctaataacacgaatgtcttagaaaatggcaaatacacaatgtgcctaactgacagcggggttcctggggaaggatggtaatattttgtcaaaaggctcattccagaccaataatcctacagcccacggagaaaacgatgcatttccctggatccagccagatcccgagcccatgagactgcagtctctttataggactcccagggcccggcgccctcaaggcctcgtggggcaatggcgggattgtgctgagcagaagagtccccagagatagggcagccgctgcaggacagaagatgagagggggacccaggagcgagcagagatggagaccagacgtgactgctggccagccaggaattctcagcattctcagaattctgaggatttaggaattctcagaaatgctggccagccccacacctgtgtgacacaggcctgagctacagtttcccgggcaytaaagaaagggaagctgtagagggcaggcagacaagcccatcaccatggacatgggcaccataatgaccaaatcgcctaagagccttgaactagccccggctttgcctctccacaccttggggtccctctgggatatgctagctttgtccaaattggctgtattttgttagtggagcagcactcttcatacttacacacacacacccagccaattccaggaagagcctcctgctgaccagcagcagggcctttgcgccaatcactaaatactttcctgaaaggcgtttccagg

SEQ ID NO: 88919 - DNA, 2450 bp, Homo sapiens
aaccttccccactagttcccagggtccattatttcattcttatgcctttgcatcctcattgcttagctcccatttatgagtgagaacatacaatatttggtttcccactcctgagttacttcactcagaataatggcccccagctccatccaagttgctgcaaaggccattattaccttctgttttatggctgagtagtatccatggtgtatatattggtgtgcatatactacattttctttatccacttattgattgatggacacttaggttggttccttatgtttgcaattgtgaattgtgctgctataaacatgcatgtgcaggtgtctttttcacagaatgacttcttttcctgtgggtagatacccagtagtgggattgctggatcaaatggtggatctacatttagttctttaaggaatctcctcactgttttccatcgtggttgtactagtttgcattcccaccagcagattgccattcccctactgctcatgatattgggtgtcccgttgcttgatttttgtagatcttctgtagctcttctccagtaaagcatctgttcagatgtcctcctgagacactgaccttcttattctctagcactcttccttactccacctgcaattaaaatccctggtgatctggactcccttaccctagagtttagccaagcccctatgcaggatttctataactttaccgttcatgttttctatggctgggcactggagatgacacgtagatcccaatggtaaaatccagttcagtaaaaaggatcccttgaatgtatctggaagtttctccagtgccagggtgagtgctgcaactggaaggacaccccgggaccactaggagaggacaaggtcaccgatgagaccgataagactgccagcagcaaacattcccaaactgggggcaaaggtttcatgggcaggctcactccctgaccacatgcccagtgctggtcatgcagttgggactgagattgtcatagcgatgggaagactaccctgggcgatcattatgaaaagccttctgtgggaggaggctgtggtttttgttttcttaacctgcatatgcatgcgccaaattgctttggctttaggaaagctcactgcctgtgtgatgggggtaggggaagcaatttttaaaaaatactaaaactgattacatctgtttattccttttcagaaagtggatgaattaatttcagctgtggattttttcaatttaggaaaaattgtaaatggaccttttagctatgaaaggtaaaggcccattgacattttccatgggagaggttaagacagagtgaaattgctctgcctaaaaagtaatgcaaaagttcaggtaccagtggcctcctgaaagaaatgggcaggcatcctggggctccagcagagaagactggaggcagggcttgctggagagactgaagaccagtcccccagcaaggcagtggaggggtctggaggaagggggcagggccagggaagcatcccggggcggaggcagatgtccaagagacggggctgacagcgacgcctggtgctccacgccccaggctgcagtcacccagtgttacccacaaaccaccattccatggcctgtgctcccacttgcacaaaagtcacaggttccagggatcaggatgtggacatctttgggagccattattctgccccctacacctaataacacgaatgtcttagaaaatggcaaatacacaatgtgcctaactgacagcggggttcctggggaaggatggtaatattttgtcaaaaggctcattccagaccaataatcctacagcccacggagaaaacgatgcatttccctggatccagccagatcccgagcccatgagactgcagtctctttataggactcccagggcccggcgccctcaaggcctcgtggggcaatggcgggattgtgctgagcagaagagtccccagagatagggcagccgctgcaggacagaagatgagagggggacccaggagcgagcagagatggagaccagacgtgactgctggccagccaggaattctcagcattctcagaattctgaggatttaggaattctcagaaatgctggccagccccacacctgtgtgacacaggcctgagctacagtttcccgggcactaaagaaagggaagctgtagagggcaggcagacaagcccatcaccatggacatgggcaccataatgaccaaatcgcctaagagccttgaacyagccccggctttgcctctccacaccttggggtccctctgggatatgctagctttgtccaaattggctgtattttgttagtggagcagcactcttcatacttacacacacacacccagccaattccaggaagagcctcctgctgaccagcagcagggcctttgcgccaatcactaaatactttcctgaaaggcgtttccagg

SEQ ID NO: 88920 - DNA, 683 bp, Homo sapiens
ttttttaacagttgtgttggtaaaaagacaaacacaatccaggcaggattgtattcctttgcttcttctttgttttttttttttttttttttgagacaggatcttgatctgttgcccaggctggagtacaacgttgtgatcatggttcactgcagcttcatcctcctgggctcaagcagtcctttgacctcagcctcctgagtagctgggactacaggtatgcaccaccacacctagctatttattttttattattttttgaggagatgggatcttgctatgttgtccaggctggtctcaaactcctgagcttaagcaatcctcctgccttggcctcccaaagtattgggcataagccaactctcccagcccttttgctttttctgattttaaaggaaattaaaatggcccctgaaatccagtggggtctggacactgagcctaatagaaaatgtgctcaaaccacagaggccgccccccaagcctcctgcctccaccatgaagccccacactgctggttctctgttcaaagcctgtgtggtcctttgggaggacaagtccttgtctcaagcatgttattcctctgctctaagtaagcctgaccgtggcttccatggtgctcagaattgaatcccggtgcctgacctgrcccaggccatgctggctctcatgttccggtagct

SEQ ID NO: 88921 - DNA, 639 bp, Homo sapiens
ccagctggacaactgtaggtgagtgactcaacttctctctgcctccatttccccatctgtgaaatgagtatggtaatagctactttatagagagctgcaggaagggttcagtgagttagtacctgtgaagtgccttcagcagcatggagcacacacgacgctccagttcagtgttggcatgtctatgggttgtcctaattcaacaccgtcaggattcaaaggaatagcaatgaacttagggtcatctgtatttcaatagccatgaacttcaggtcattcacttgaggtgacctgggctttagcctcaatccttctagcagcgagttgggtgcacttacaaaagcaacrtgcctggggctcatttctcacctatcagatgaggcttaggctggatccctgcttccaaattacagttcttcaaggccacatttaatatatgtatttattacttacttaacagttttctttaaatcatcattttttaacttggatatatctaacctcatcctacgctataatatcaacaaaattaagggtttgatttgttaattaatttttttttcttaatacacattgaaagcattgtttgaataccaggaaaaaatttaactgtttgttcacaggctctctcaaactgtc

SEQ ID NO: 88922 - DNA, 1231 bp, Homo sapiens
tgcatgctcaccaccaaaacggggcaagaacacggggaccagcccacgtgtaagcaactgttagattcaggaacagcccgccagagtcttccacagccgcctgctgcatttagcttggatctcagggatggcaatgggttctgggggagttcagggccacaggatgtggtgggaacgtagaggacacagagcaaaggttaccttccagccagtgggaagcagcttagatcctaggagtgtgtaaaattgaccaagaagtaggatgggttggggatgggaacatgggagggggagaggtcagagcacctgttctagtcccatctgccttcatgttcaggagggccagctgctggtttgtgcgtggcatcatagggatttctagaagtgcccagcagcccccagatattatggactgaggcctatccttcaggccacagtgaattccacaggctggccagcaccaggtagatagagtcctgccctgacactgcacgtggatacaagaagagaaaatgcctccttccttctgaggtcacaaacggagacagcagcagccagggatttcctgtggaaaggccccagatgaattcccatgcccactcatggagaaacatccrgcatggcacaggtggaattgactgcctggtgtcagaaaggcccaacaggagctgacctctggccccgagggcctctgtaattctggctgagcggagcacacaccctcgcctctggcttctccagctccagaagctgatggctgttccaggcctggccacttggagcagaacagcccctttggttcaaagatgggccctcctgggacttctactggaagtaaatcccagaaagaagattacccatccttccatgatgtctgacgctctaaattaagccagcctgttgcccagggggttatctttgtcaccccaagaagagaactggggtgtagatgatgccaccctctaggaaatagagcttagagacagagtgacatctctgagcccctgggtacagctgtgacagaagcttttcagttgagacttttcagtcttgtgagcctacaaactcctgtgactctcctagtcactgctgtcactcatcaccagaagagtcctgtctggttcaatcaccgaggacaatgacatcttcgggcctcgctgtcccataggtttgtgttaaatggtgtcaccatggtgacctgccaggtctctgcctaggagaagcaagaaca

SEQ ID NO: 88923 - DNA, 1231 bp, Homo sapiens
tgcatgctcaccaccaaaacggggcaagaacacggggaccagcccacgtgtaagcaactgttagattcaggaacagcccgccagagtcttccacagccgcctgctgcatttagcttggatctcagggatggcaatgggttctgggggagttcagggccacaggatgtggtgggaacgtagaggacacagagcaaaggttaccttccagccagtgggaagcagcttagatcctaggagtgtgtaaaattgaccaagaagtaggatgggttggggatgggaacatgggagggggagaggtcagagcacctgttctagtcccatctgccttcatgttcaggagggccagctgctggtttgtgcgtggcatcatagggatttctagaagtgcccagcagcccccagatattatggactgaggcctatccttcaggccacagtgaattccacaggctggccagcaccaggtagatagagtcctgccctgacactgcacgtggatacaagaagagaaaatgcctccttccttctgaggtcacaaacggagacagcagcagccagggatttcctgtggaaaggccccagatgaattcccatgcccactcatggagaaacatccakcatggcacaggtggaattgactgcctggtgtcagaaaggcccaacaggagctgacctctggccccgagggcctctgtaattctggctgagcggagcacacaccctcgcctctggcttctccagctccagaagctgatggctgttccaggcctggccacttggagcagaacagcccctttggttcaaagatgggccctcctgggacttctactggaagtaaatcccagaaagaagattacccatccttccatgatgtctgacgctctaaattaagccagcctgttgcccagggggttatctttgtcaccccaagaagagaactggggtgtagatgatgccaccctctaggaaatagagcttagagacagagtgacatctctgagcccctgggtacagctgtgacagaagcttttcagttgagacttttcagtcttgtgagcctacaaactcctgtgactctcctagtcactgctgtcactcatcaccagaagagtcctgtctggttcaatcaccgaggacaatgacatcttcgggcctcgctgtcccataggtttgtgttaaatggtgtcaccatggtgacctgccaggtctctgcctaggagaagcaagaaca

SEQ ID NO: 88924 - DNA, 2370 bp, Homo sapiens
acctgttcctcaatttcccataagagctgggcatattgccaggggacacagcggtggccagacctcaaggacttaagagcaggggaaacaaacaattttaacttgatcgcaacagcgtgtgatgacatttatcaggggaaacgtcagtgctgtaagaacacatacaagagtcctgagggacctcccttaggaagaaactccagctgacagctaaagttcagagatgcgtgggagtcacatggacgtctgcatctcaggaaggtcgtactggctgcctggcagaattcccgtcagaggggaaaagggggtgcgagtacacaggagaggcaggttgggaggtgtctcagtgacctggacacctcggggaggggaggaataatgcctttcaagggatacttgggagacaggcttggcaagaattggagattgagcgaataatgaggacaggatgagaattattaggcttggaaacatttgaagacttgcacaaagaaatacaaaactaccaatttcatttccaataatgctaaagcttaatttctgccatcttcaattcccaactggtcttccaatcccaacatgtatcacaacccaatcccaaatcctggaatgactcccccactgactcccaaagtcctctttccttaagacgcccttcaagatcctccatatactgcccctactcttgctgtcggtctgactgtccatccatccatccatccattcttccatccatccatccatccatccatctgactctggcagaaacagatcaatcatttaaaccaaagcacaattccaacagcaacaagagctgagaatgaaggtcatctgtgccacagcagtggggtatagaagaggcaggtctgacatggctagaaaggctgttaccatagctttgcttctcattccctggacccagggcaactcagctccattccccaacaagcctgtgccttcgctcctctgtggtttgccctgatgacaggccttcctggagctgccttctgttctcactaggtaatagctctgtgttcttcaatctggaaacccgctaggactctgaaattatacagcatccctattaccatagggacattgaaatccagacctgaatcctgtcctcatggagcagacaatctagatgagaaagaaagacatgaatctgagatgcatgcaaacatagtgactgtgacaagagctaccaaggggaggggtgtggagccctgaggacaagaacaggactcgaggaagtcaggagggtcagggagagcttcctggaggaaagtcagagatgtgtgtccttgaaatggcattcccctgaaacttggtttccttgtctataaaatggggggacatcatagaaaatacctctctgcattgctgtaatagcaagtggaataataaatatcaactgcttgacccagagtaagtgttcaaaagatacttgttcttattgtttattactcacctgcctctatgtcaagcatatttggagctgaatccttcaaaggtgtgtttcctctaaggtttcacatgccttagcggtaaatgcaatcagagatctggtccacaacagaggctgtaataggtggggaccaggttcctgagttctggaagaagagcccaagcaattgtcctgtctgtaggtgagcaaacatcggggagcatgggtgccaactggcacctgccacctggcacctggcttcctcaagctcttctaacacaggctctcacttaccaaagtaaaattaaacatatccaatttacggagggagaagggctcaattttaactatgttttcttgtcttcggctggagttgtgacgtttcacatagtgacagccagaactcacgagaacgtctgtggccgttgtttcttctgaattctgtccaacttgttggcgtcattggatgccagcttccccagaacagtgggaggagttggcatgcccatctcatcagcgcaggacaaagaggagcctgccattcccagtgctcccggagaagcttgcttttcccaaggtggtctccatcagctctcaaatgttttaggagcttgtggccagagaggtgctggcctgactattgggcaaggcttgtggaaaggacatgagggacagaaactgagcaaaaataacaaaggccattcctgtggcctgtgggaagtgctcagaagaaactctctcccaagaccctgccacaccckgctgtgcctacttggagcgagcgcattcctccatgctgttagtcacaactcagactgaccctggcaagaattaatgtccttcacacccattaacgtcacagattagcagggacactttgtaatccatccacagctcacctcttccttgtgttcatgcaccca

SEQ ID NO: 88925 - DNA, 858 bp, Homo sapiens
tctatatatttttagtccactgagttacatttcagagttttttggtatagaaaatattatacattttaagttaaggtaggaacagcttaattgacctcctggaaaaagtgtattgagaactcaaatatgatgttccytttttttttctttttttgagacgaagtctcactcttgtcccccaggctgaaatgcaatggcacgatctcagctcactgcaacctccgcctaccgggttcaagcgattttcctgcctcagcctcccaagtagctgggattacaggtgcccaccaccatacccagctaatttttgtatttttagtagagacggggtttcaccatgttggccaggctagtctcaaactcttgacctcaggtgatctgcccgccttggcctcccaaagtgctgggattataggtgtgagccaccgcgcctggcctatgatgctctttaaaaccatatttctaggtgaggcaggatttattttgcagattcacccaagtacattttcttatatgcaaacaaattttaactttgatgcaactatccagagcatcaggtctcctttgtgtttccataggcccttagctatgggtgtgttcccatacaccctaaaccagggcacagcaggaagctcagtgctcaactgatggccactctgacttgggtggtcgtgggtggtgctggggccacagagttttcctgaagtccccagatgatattaatgttagtgcagcctgagaaccattcacctcctatgtcctaggccagggagatcccaacactcatggccgtttcataggacatcttacacagggcagcttgctacacctgccgggcccacacgggcacgcacgcac

SEQ ID NO: 88926 - DNA, 858 bp, Homo sapiens
tctatatatttttagtccactgagttacatttcagagttttttggtatagaaaatattatacattttaagttaaggtaggaacagcttaattgacctcctggaaaaagtgtattgagaactcaaatatgatgttccttttttttttctttttttgagacgaagtctcactcttgtcccccaggctgaartgcaatggcacgatctcagctcactgcaacctccgcctaccgggttcaagcgattttcctgcctcagcctcccaagtagctgggattacaggtgcccaccaccatacccagctaatttttgtatttttagtagagacggggtttcaccatgttggccaggctagtctcaaactcttgacctcaggtgatctgcccgccttggcctcccaaagtgctgggattataggtgtgagccaccgcgcctggcctatgatgctctttaaaaccatatttctaggtgaggcaggatttattttgcagattcacccaagtacattttcttatatgcaaacaaattttaactttgatgcaactatccagagcatcaggtctcctttgtgtttccataggcccttagctatgggtgtgttcccatacaccctaaaccagggcacagcaggaagctcagtgctcaactgatggccactctgacttgggtggtcgtgggtggtgctggggccacagagttttcctgaagtccccagatgatattaatgttagtgcagcctgagaaccattcacctcctatgtcctaggccagggagatcccaacactcatggccgtttcataggacatcttacacagggcagcttgctacacctgccgggcccacacgggcacgcacgcac

SEQ ID NO: 88927 - DNA, 1189 bp, Homo sapiens
atggtagctaaaagtagccacaatagagaggctgactatattgcacagaagttgtccctttgtttaagcccccaactcatacctctgtgctgaccaagctggtcttctgttacgagaacattttatgctcaattctgagtgtgtattcactttgactgctctctgttttagcaggtccttgttctctctccacttacaaaattctttcctattcctcatgagtccacctcctacccccagctcttacagggaacctcccattattgccttgcctgttgatagtccctttctctgaactgccgcccagtctggcatttgatcagattttgaatgatgtagatatgagcctttcatagacccactgaactggaagaggcattagaaagcatctagtccaaccctctaattttatagataaagaaactgtactccacagagtgcgggcatcctgccaaagatcactcagagagtgagtaggatcctggcttcttgacttctcatctacaactcttcccacttcaccactcagatattgtgttggtgccaatgtctcatactttttgcccctctctcctcttggttgtaaaatcctgtttctaatattttgatcttgtcccttttattagagagtacagttaaaaaaaaagaaaagaaayggtttcttgattatttccacataaatgtgtgtcacactcaccttaatataggagttaattcctggtcttcctcaatttgctggtagttagggaaaatgtagagaatagggtgtcaaactccactgtttccaaaattgtgaatttttcattttccctcctcacatattttacaaatatatgcctacttttacaagctgtatacattgctgataaagtatgcatgaggaatatacctataattctcatgcaatatgcataaatgccctaaggtttcattaagcatttgcatgtttaaaataatcgccacctcaatttgagggatattctaataaaaactgaccttaacttaaaaaaaagtaaatgtcataaaagacaaaaccaaaacaaaataaattttaaaaaccatgtttcagattaaaggattatcaaaggagataataaatgcagtgatgctggattgggaactagagcagagaaaataaaatatctgtgagagacattatttgaacaactggcaaaatttgattatgaac

SEQ ID NO: 88928 - DNA, 559 bp, Homo sapiens
ttaggatatcacaccaagaaagattattccaaataggtctacaggtaatcagttattctcaaagccagttgtctacaactgaatttcccaaatctgtcctaggaggtttggtcaatgcccaagttaatcagataccttcatgttcatcggaggctaagagttgcctgttaatataatgcctgagtaaacaggtggtgttaactatcatagtgatactttccccctccttcataaaactttaaaagtcaggccatttagtattacatttatacaacatgtaaggacagactggaacaaatggaatcttgtctagttsagaaatattaagttgttctctataccacctttccacaagcaagtaaatcaattcaaagcattccatccaagaaactggaagtctcttgatgtgcgtagctgtgatagcaagattataaatgggaaaaatgaggtatatatttgagaacagttcccttctaacccctagaattcctaagattatcactcagtggtcaagatggtcatagaaatatggttctcatggggaaaccagatggcggga

SEQ ID NO: 88929 - DNA, 585 bp, Homo sapiens
gagcctgaggcaggtgaatcgcttgaacctgggaggcagaggttgcagtgagtcgagattcatgccactgcactccagcctgggagacagaccaagactcaaaaaaaaaaaatatatatatatatatacacatatatatatatatatayacatatatatatatatatatatatatatatatacatatatatatatatatatatatatatatatatatatatatatgaagtttgaggtggattgaccaacaggttccttgcttttctggacagagtgtttcttgggagtaagggacacactagaaaggctacattgatccagcaactcatcttagtggatttaataattcgggagcatgaggtgtctcacctcacatggttccaccttggactgacctccccagtctctttccatctttctttctttgcccaggtttcttcctctttatttttaccttattatagtgggactgttttataagccacctcaaataaactttatttttggcagaggatcacgagggtaaactaatcatttttttaaatctgtaggctacaaagaatttgggtttatgaggtctgcctg

SEQ ID NO: 88930 - DNA, 585 bp, Homo sapiens
gagcctgaggcaggtgaatcgcttgaacctgggaggcagaggttgcagtgagtcgagattcatgccactgcactccagcctgggagacagaccaagactcaaaaaaaaaaaatatatatatatatatacacatatatatatatatatatacatatatatatatatatatatatayatatatacatatatatatatatatatatatatatatatatatatatatatgaagtttgaggtggattgaccaacaggttccttgcttttctggacagagtgtttcttgggagtaagggacacactagaaaggctacattgatccagcaactcatcttagtggatttaataattcgggagcatgaggtgtctcacctcacatggttccaccttggactgacctccccagtctctttccatctttctttctttgcccaggtttcttcctctttatttttaccttattatagtgggactgttttataagccacctcaaataaactttatttttggcagaggatcacgagggtaaactaatcatttttttaaatctgtaggctacaaagaatttgggtttatgaggtctgcctg

SEQ ID NO: 88931 - DNA, 769 bp, Homo sapiens
gatccaagcttggtytccttgttattttccaagcatctctctgctgctcatggaaggacacccccaaaactaactgctggacagattttccaagccttatcagttcatccaaatggttaactctaagtttctttcctgtccgaaaaataaaactgtaaacagtgatacagagccatgggttgttattcaggatttgcaaactttatttccccaaaccggctttgctacataggctctgctcctaagctattgcccacagcaaacaagaagggatctggaggccgggcatggtggctcacacttgtaatgccagcgccttggtaggctgaggcacaagtttgagacaagcctggccaacatggtgaaaccccatctctactaaaaatacaaaaaaaaaaaaaaaattagctgggcgtggtggtggatgtctgtagtcccaggtattcgggaggctgaggcaggagaattgcttgaacccgggaggcggaggttgcagtgagctgaaatcgtgccactgcactccagcctgggtgacagagcaagactctgtctcaaaaaaaaaaaaaaaagggacctggaatgcttcgtgggggtgtcgcaaggtctcggagcctatggaatctggttctggagctgggcagggcttccactgggctctgcagtcctgggccgggagctggctcatttgtttatgggacatttgcttcctgggagtctacagtgtggtggtccctgccctgggtgctggacacagcagcaaacaaggcag

SEQ ID NO: 88932 - DNA, 851 bp, Homo sapiens
tcacacatgttggcacaagtgttgctggggtgaattaagcgtgtcctgtgtgattccactgggggaaaactcttggaagcttgtgcctggtctcccctagatttcaccccgggtacctcttccccttgctgatctcactttgcatctgttcaatgtagtaagtcacagctgtgaatatgactgtattctgagtcctgtgaattttcctagtgactcattggacctggaggtggtcttggggaccactgacatagtctctgatcccagaatcttakatcttctgtctgcatccatgaaatggtgacaggttaacttgttaatttcaaagatgaaacctcaggcccatcacagtgcttgaaagagcaatcccgttacctctcaggacccatgggagagtgagtgtggggtgggtaggaattccagatctaaattaacttgggtgttccatgccctgcttatcatggagctttcaggagcagcacctgatctaagccagtccaagccgaatgaagtccttttcttctcctctggccaagaatcaagaagagtgtaacctgggaaaaccaccttgcaatcatgggggttaacccagagcaagtgggaccgagaaactggtcctggatcacactgttggagcccctgaaaccagccagccttgcggctagtttgcctctggatgattttaagacatatgagttaataaatttcctttactgcttaagacagattgggtatgattttctatcccttgtaagagaagtcctaactgatgcagatcatggctgttcaaagaataggccccctggagggcctctgtccagttgtagagaaccaagcctcacaaagatggg

SEQ ID NO: 88933 - DNA, 851 bp, Homo sapiens
tcacacatgttggcacaagtgttgctggggtgaattaagcgtgtcctgtgtgattccactgggggaaaactcttggaagcttgtgcctggtctcccctagatttcaccccgggtacctcttccccttgctgatctcactttgcatctgttcaatgtagtaagtcacagctgtgaatatgactgtattctgagtcctgtgaattttcctagtgactcattggacctggaggtggtcttggggaccactgacatagtctctgatcccagaatcttagatcttctgtctgcatccatgaaatggtgacaggttaacttgttaatttcaaagatgaaacctcaggcccatcacagtgcttgaaagagcaatcccgttacctctcaggacccatgggagagtgagtgtggggtgggtaggaattccagatctaaattaacttgggtgttccatgccctgcttatcatggagctttcaggagcagcacctgatctaagccagtccaagccgaatraagtccttttcttctcctctggccaagaatcaagaagagtgtaacctgggaaaaccaccttgcaatcatgggggttaacccagagcaagtgggaccgagaaactggtcctggatcacactgttggagcccctgaaaccagccagccttgcggctagtttgcctctggatgattttaagacatatgagttaataaatttcctttactgcttaagacagattgggtatgattttctatcccttgtaagagaagtcctaactgatgcagatcatggctgttcaaagaataggccccctggagggcctctgtccagttgtagagaaccaagcctcacaaagatggg

SEQ ID NO: 88934 - DNA, 727 bp, Homo sapiens
gatatgacaagatcacaattgctttgctttggagtggtgaaaagagatcttaggttggcagttatctctcaatcaaggcttgaaatgttgagtgttaagaggaagttatgggggcaaagggctgaaagaaaaagggctattctgttatcagcatcttaacttgcttttggaccagagtctggcttttaggagctgtgctgaattgcaacgcagtcagtgttctggaaacgccccaaagtcaaccaaggattgaagggaatcacaagcagtgcttcttttttattttttttttgagatggagtctcactctgttgcccaggctggagtacagtggctcgatctcggctcactgcaagctccgcctcccgggttcaygccattctcctgcctcagcctcttgagtagctgggactgcaggcacccgccaccacacccggctaattttttttgtatttttagtggagacagggtttcaccctgttagccaggatggtcttgatctcctgacctcatgatccacctgcctcagcctcccaaagtgctgggattacaggcgtgagccaccacgcccgcccaagcagtgcttcttacttgccgggttctttctccacatccccactggaagtctggggactgccactgagctcttgagtctgatgcacgataatgagtttttcttcccaacacctgagctgatgctgtagccaaaaaccaggtcccctcaaga

SEQ ID NO: 88935 - DNA, 727 bp, Homo sapiens
gatatgacaagatcacaattgctttgctttggagtggtgaaaagagatcttaggttggcagttatctctcaatcaaggcttgaaatgttgagtgttaagaggaagttatgggggcaaagggctgaaagaaaaagggctattctgttatcagcatcttaacttgcttttggaccagagtctggcttttaggagctgtgctgaattgcaacgcagtcagtgttctggaaacgccccaaagtcaaccaaggattgaagggaatcacaagcagtgcttcttttttattttttttttgagatggagtctcactctgttgcccaggctggagtacagtggctcgatctcggctcactgcaagctccgcctcccgggttcatgccattctcctgcctcagcctcttgagtagctgggactgcaggcacccgccaccacacccggctaattttttttgtatttttagtrgagacagggtttcaccctgttagccaggatggtcttgatctcctgacctcatgatccacctgcctcagcctcccaaagtgctgggattacaggcgtgagccaccacgcccgcccaagcagtgcttcttacttgccgggttctttctccacatccccactggaagtctggggactgccactgagctcttgagtctgatgcacgataatgagtttttcttcccaacacctgagctgatgctgtagccaaaaaccaggtcccctcaaga

SEQ ID NO: 88936 - DNA, 727 bp, Homo sapiens
gatatgacaagatcacaattgctttgctttggagtggtgaaaagagatcttaggttggcagttatctctcaatcaaggcttgaaatgttgagtgttaagaggaagttatgggggcaaagggctgaaagaaaaagggctattctgttatcagcatcttaacttgcttttggaccagagtctggcttttaggagctgtgctgaattgcaacgcagtcagtgttctggaaacgccccaaagtcaaccaaggattgaagggaatcacaagcagtgcttcttttttattttttttttgagatggagtctcactctgttgcccaggctggagtacagtggctcgatctcggctcactgcaagctccgcctcccgggttcatgccattctcctgcctcagcctcttgagtagctgggactgcaggcacccgccaccacacccggctaattttttttgtatttttagtggagacagggtttcaccctgttagccaggatggtcttgatctcctgacctcrtgatccacctgcctcagcctcccaaagtgctgggattacaggcgtgagccaccacgcccgcccaagcagtgcttcttacttgccgggttctttctccacatccccactggaagtctggggactgccactgagctcttgagtctgatgcacgataatgagtttttcttcccaacacctgagctgatgctgtagccaaaaaccaggtcccctcaaga

SEQ ID NO: 88937 - DNA, 727 bp, Homo sapiens
gatatgacaagatcacaattgctttgctttggagtggtgaaaagagatcttaggttggcagttatctctcaatcaaggcttgaaatgttgagtgttaagaggaagttatgggggcaaagggctgaaagaaaaagggctattctgttatcagcatcttaacttgcttttggaccagagtctggcttttaggagctgtgctgaattgcaacgcagtcagtgttctggaaacgccccaaagtcaaccaaggattgaagggaatcacaagcagtgcttcttttttattttttttttgagatggagtctcactctgttgcccaggctggagtacagtggctcgatctcggctcactgcaagctccgcctcccgggttcatgccattctcctgcctcagcctcttgagtagctgggactgcaggcacccgccaccacacccggctaattttttttgtatttttagtggagacagggtttcaccctgttagccaggatggtcttgatctcctgacctcatgatccacctgcctcagcctcccaaagtgctgggattacaggcgtgagccaccacgcccgcccaagcagtgcttcttacttgccgggttctttctccacatccccactgraagtctggggactgccactgagctcttgagtctgatgcacgataatgagtttttcttcccaacacctgagctgatgctgtagccaaaaaccaggtcccctcaaga

SEQ ID NO: 88938 - DNA, 690 bp, Homo sapiens
ggatccttagcaaagtcctccctggccagctaagctcagtgggcagtacgagttttccccttgtttagagacaaagggtttgcttttggcattttgatgttgcaatgcttggatacgctcttcccaggagtagatcttgctcttggatgatagtggtaatttttttttttttttttcctgagatggagtttcacccttattgcccaggctagagtgcaatggcacaatctcggctcactgcagcctctgcctcctgggttcaagcgattctcctgcctcagtctcccaagtagctgggattacaggcrtgcatcaccatgcccagctaatttttgtatttttagtagagacagggtttcaccatgttcgtcaggctggtcttgaactcctgacctcaggtgatctgcctttcttggcctcccaaagtgttgggattacagacgtgagccactgcatccagctgataatggtaattgttgacttaactttttcagatctcagtataccatgggtttctcttccatattagtagtcctcatttgcttttctgaaatctacaggtcaccaccctgggagtcttgatgatgcttggagccatcaaaacctcacccctcccaggtttgccaatacagactgctgtcatgcacaaggtccatattgatacaaggcagatcataccttgaaggtctc

SEQ ID NO: 88939 - DNA, 1448 bp, Homo sapiens
gggaagaggcgaagagatgcstgcgacttggaccgcgcgcctcccggacgggccccgccagcctccgccccagctcccgctctcacctgccacggagtcggcgttctccctcctgccgctcccgccgcgaatcaggcgcgggctggcgccgcggcggaagccggagggatgcgcggcaggcaggggcggttcagcctctgcccctccgaggccggcatccctcgccacgcggcgggcggtcctcccagcccgactcgggtgggcagcggtcagagcggccgcttctcagcatcaggaaggaggagactgctcttggccgggaggcgccagcccaatatagggcagcgccatgtcttcgtacggaaaggcgggagggtctttcccctgcttgccgaaggggttcagtaagcggtgactcgcagctgggcggcgccgtgtttcctcagggagaggtggaaaacatggccgatgaccgctcagggggctccgtggccagtggctcccagccaagagtcgcccgccgcacgcagtgaggcgccatgttttcgtacggaaacgcgagaggcatggccgagtgcccgccgatgagtctcagctggcggtggctcgaagctggggatggcccgcccctaaggcgccatgtttccatacggaaaggcggaacgcgccgccgcatcccagccgctggtgcgggtgacgcgaggagaaagggaggcggagaaggcgcgggtcagtcaaaagaaggaataagaagccattgcatctgaaaccttccccgcccgttctttgaaatttaattttgccatcctgtttgtagctacacaaagtttattccccttctctcatttcctcagctttaaaaaaaagttagtccgggcgcagcggctcacgcctgtaatcccagcactttgagaggccgaggcgggcggatcacgaggtcaagagatcgagaccatcctggccaacatggtgaaacctcgtctttactaaaaatacgaaaattagctgggtgtggtggcgcgcgcctgtagtcccagctactcgggaggctgaggcaggagaatcgcttgaatctgggaggcggaggttgcagtgaggcgagatcgcgccactgcactgcggcctggagacagaccgagactctgtctcaaaaacaaacaaacaaaaaaaactacaaaaaagcagatggggtgacattggtgctttcaaacactgcttctaaatagatcacatgtgggtagttattgctaacgtattgaaggccgagtgcaataccagaccctcaaaccatttactaacttgcacattaaagtctttgctttaaaaaaaaaaaaaaaagacaaaaacagaagttctctggtgaagattcactttttggaggaaaaaacaccaaaaacccttacgatactcaactaaatggaactgttaagatctacaaagaatggctg

SEQ ID NO: 88940 - DNA, 1299 bp, Homo sapiens
ggtgatgccagacaagttttaaaagctctctgggggaagcaggctagaaccacctcccttaccttccttaaaagattaatatggctgggtgcaatggctcacgcctgtaatcctagctctttgggaggtcgaggcgggcggatcacctgaggtcaggggttcaagaccagcctggccaacatggcaaaaccccgtctctactaaaaatacaaaaattagctgggcatggtggcaggcgcttgtaatcccagctactggagaggctgaggcaggagaatcccttgaacccaggaggcagaggtggcagtgagcggagatcgcacccctgcactccagcctgggagacagagcgagactacatctcaaaaaaaaaaaaaaaaaaaaaaaggttaatataaccaattttcacttggttaggagcaagtgaatgaatatactcaagtttcacctggagaggatactgcaacaataccaaaatcactgatttaatttgggatatttcacttgtaattttttaatgttttgtactgtttcaatattcaaaaaatacatatagacacattccattttgatctttggctgcarggactggaaattcaaattacgttaaggtaaagggagttcactgcaaggacataggacttggagggagaaaggtggcagccactctagaggtcggctactgctcctgtacacacaggatccctcttgtcacatctctgcttgctgtagtccattccactctttatgctacaggctggtttctgtactttcttaattgacgctcctcataatttaaatttacctatatagaatttgattggccaaactgatttttgaacaaagttagtctcattagcctccagggaagctgcccttggatcaggtgctcaaccttggtctactctgctaggatgatggcaagacttacggtcaactaggcattaggtgtctatgtgggaatgggtccccaagaaggcatcatgggtgaatgaatgagagcacacagcaaaagataatcaacagttctagtgactgaggagggttgcccaaggctttcaaggtagcactggacctgtagtttaaaaccttgacaatggttgcagtaaacatgatcgatttttctttttatcctccttataaggcctaaggtaaattgattttactagtatattttccctgaaattatcattctattagaatgttgcttctcctagaagcatgaatgtaactaagcagttctgccttcccctgaaggttgtcaaataaatatgctattcaattatgtgcaaaataaag

SEQ ID NO: 88941 - DNA, 511 bp, Homo sapiens
cctagctatttgggacgctgaggcaggagaatcgcttgaacctgggaggcagaggttgcrgtgagccgagatcatgccattgcactccagcatgaacaacaagagcgaaaccctgtctcaaaaaaaaattattttgcctcactaataatgacaccccactactttgggaaagaagttcatggttgaaggatggcttgttttcctgtaacttcaacctctttctctctattgccttcttccctttagtctatgaccatagaccatatttaaattgatttcagtcttaaaattattgcctccattctattttcttccctccatcagtcaatgtctttcttcccttaaaaacataaaaataagatatttgcctcaaccttgtttccctcccaccccatctccatcctcaccccattcttccttttcttatctaagcttctccaaggagtgttccacacctgctctccctgttcttcaccttttatttcttcctcggaatactgccatccatctt

SEQ ID NO: 88942 - DNA, 933 bp, Homo sapiens
ctatcaatcttatttattcttcaaaatacaaacctctggttttgtcaatcttctgtctagtttctggtgtctcaattttattctgttcagctctaaattggttatttcttttcttccgctagctttggagttgatttgctcttgttttgctagttcctctaaatgtgatgttaggggggcatgtgaccaggcactagtgtgtgtgcaccatcttctgcctcctgyccccctaaaaaataaaaattaaaaattaaatgtgatgctaggttgttaactggagatctttttatctttttgacctgcatgtgtagtactataaactttccttttaaggtggctttaactgtgtcccaggtactctgatatgttgtacctttgttttctttagtttcaaggaattcttggtttctgccttaatttcattcattgtttacacagaagttattcagaagcacattgtttaatttccacttaattttatggttttgagtaaacttcttagtattgatttttatttttgttgtgctatggtctcagagtgtagttgttatgatatggctttcttaaatttgctgagaattgttttatggccaattgtgtagtcaattctagagtatgcgccacatgcagaagagaagaaactatttggccaagtgtttaatccaggtcccaaatatctttgttagtgttctgccttgatgatctgcctaatacttggcacttttgtctaacacagtgacatgctgaagtctctcactattattgtgtggttatctaagactctttgtaggtctctaagaacttgttttatgaatctgggtgctcctgtgttgggtgcatatatatgtattttcatatatatatatatgtttttttaaatgttgtgagtacatagtaggcatatgtattgatgggatacatgagttattttgg

SEQ ID NO: 88943 - DNA, 933 bp, Homo sapiens
ctatcaatcttatttattcttcaaaatacaaacctctggttttgtcaatcttctgtctagtttctggtgtctcaattttattctgttcagctctaaattggttatttcttttcttccgctagctttggagttgatttgctcttgttttgctagttcctctaaatgtgatgttaggggggcatgtgaccaggcactagtgtgtgtgcaccatcttctgcctcctgtccccctaaaaaataaaaattaaaaattaaatgtgatgctaggttgttaactggagatctttttatctttttgacctgcatgtgtagtactrtaaactttccttttaaggtggctttaactgtgtcccaggtactctgatatgttgtacctttgttttctttagtttcaaggaattcttggtttctgccttaatttcattcattgtttacacagaagttattcagaagcacattgtttaatttccacttaattttatggttttgagtaaacttcttagtattgatttttatttttgttgtgctatggtctcagagtgtagttgttatgatatggctttcttaaatttgctgagaattgttttatggccaattgtgtagtcaattctagagtatgcgccacatgcagaagagaagaaactatttggccaagtgtttaatccaggtcccaaatatctttgttagtgttctgccttgatgatctgcctaatacttggcacttttgtctaacacagtgacatgctgaagtctctcactattattgtgtggttatctaagactctttgtaggtctctaagaacttgttttatgaatctgggtgctcctgtgttgggtgcatatatatgtattttcatatatatatatatgtttttttaaatgttgtgagtacatagtaggcatatgtattgatgggatacatgagttattttgg

SEQ ID NO: 88944 - DNA, 933 bp, Homo sapiens
ctatcaatcttatttattcttcaaaatacaaacctctggttttgtcaatcttctgtctagtttctggtgtctcaattttattctgttcagctctaaattggttatttcttttcttccgctagctttggagttgatttgctcttgttttgctagttcctctaaatgtgatgttaggggggcatgtgaccaggcactagtgtgtgtgcaccatcttctgcctcctgtccccctaaaaaataaaaattaaaaattaaatgtgatgctaggttgttaactggagatctttttatctttttgacctgcatgtgtagtactataaactttccttttaaggtggctttaactgtgtcccaggtactctgatatgttgtacctttgttttctttagtttcaaggaattcttggtttctgccttaatttcattcattgtttacacagaagttattcagaagcacattgtttaatttccacttaattttatggttttgagtaaacttcttagtattgatttttatttttgttgtgctatggtctcagagtgtagttgttatgatatggctttcttaaatttgctgagaattgttttatggccaattgtgtagtcaattctagagtatgcgccacatgcagaagagaagaaactatttggccaagtgtttaatccaggtcccaaatatctttgttagtgttctgccttgatgatctgcctaatacttggcacttttgtctaacacagtgacatgctgaagtctctcactattattgtgtggttatctaagactctttgtaggtctctaagaacttgttttatgaatctgggtgctcctgtgttgggtgcatatatatgtattttcatatatatatatatgtttttttaaatgttgtgagtacatagtaggcatatgtattkatgggatacatgagttattttgg

SEQ ID NO: 88945 - DNA, 1067 bp, Homo sapiens
atatattaacactgtttactacaattagtaaacttagaacttttgacttaaaagcacaataatatcaactatattttaaatttgaatcatgagccctatttgttagatatcttgatttggccagtatttaaattacccaaacatgtactaatagatgattcttaaataccgtattgtgggtcaggtttatttaattatttctgtaactatgctcatcattcccagggttaaaaggtgtttatggatttccaaacaagtgggtgtttccagcttgttccaatttagttgatcaagattaattattaaccagagaaatttggggctgaggtgcaaaagaaatcaaattcctgggcttcagcaatcctcctgcctcagcctcccaaagtgctaggattacaggtgtgagccatcgtgcctcaatcccaattcttaaagatagcaatatgacaccctgttgggttctgcatatctctcatggctttgtgcaactctttagttgtaatattaaagtcatgctatgaaagacaaatatgggaaaagatgtcttacactgcagctcctgaccttactcaaaccggactccctctttgaatactcctgatgttccctcccttgctctgctttttctgtagcacctaccaccttcaaacatgatataacatcayttgtttattaaattttctccccactaactaaactatgagctctatgagggcagggagttttgctgtcttgcccaatgatacatccttgcacctagaacagtgcttgacagttattaggcactcaacaaagatatgttgaatcactgatcatgagagaaatgcaaatcaaaaccacaatgagataccatctcacgccagtcagaatggcaattattaaaaagtcaagaagcaacagatgctggggaggctgtggagaaataagaacgattttacactgttggtgggaatgtaaatttgttcaaccattgtggaagaccatgtggtgattcctcagatatctagaagcagaaataccgtttgactcagcaatcccattactgggtatatacccaaaggaatata

SEQ ID NO: 88946 - DNA, 1067 bp, Homo sapiens
atatattaacactgtttactacaattagtaaacttagaacttttgacttaaaagcacaataatatcaactatattttaaatttgaatcatgagccctatttgttagatatcttgatttggccagtatttaaattacccaaacatgtactaatagatgattcttaaataccgtattgtgggtcaggtttatttaattatttctgtaactatgctcatcattcccagggttaaaaggtgtttatggatttccaaacaagtgggtgtttccagcttgttccaatttagttgatcaagattaattattaaccagagaaatttggggctgaggtgcaaaagaaatcaaattcctgggcttcagcaatcctcctgcctcagcctcccaaagtgctaggattacaggtgtgagccatcgtgcctcaatcccaattcttaaagatagcaatatgacaccctgttgggttctgcatatctctcatggctttgtgcaactctttagttgtaatattaaagtcatgctatgaaagacaaatatgggaaaagatgtcttacactgcagctcctgaccttactcaaaccggactccctctttgaatactcctgatgttccctcccttgctctgctttttctgtagcacctaccaccttcaaacatgatataacatcatttgyttattaaattttctccccactaactaaactatgagctctatgagggcagggagttttgctgtcttgcccaatgatacatccttgcacctagaacagtgcttgacagttattaggcactcaacaaagatatgttgaatcactgatcatgagagaaatgcaaatcaaaaccacaatgagataccatctcacgccagtcagaatggcaattattaaaaagtcaagaagcaacagatgctggggaggctgtggagaaataagaacgattttacactgttggtgggaatgtaaatttgttcaaccattgtggaagaccatgtggtgattcctcagatatctagaagcagaaataccgtttgactcagcaatcccattactgggtatatacccaaaggaatata

SEQ ID NO: 88947 - DNA, 1067 bp, Homo sapiens
atatattaacactgtttactacaattagtaaacttagaacttttgacttaaaagcacaataatatcaactatattttaaatttgaatcatgagccctatttgttagatatcttgatttggccagtatttaaattacccaaacatgtactaatagatgattcttaaataccgtattgtgggtcaggtttatttaattatttctgtaactatgctcatcattcccagggttaaaaggtgtttatggatttccaaacaagtgggtgtttccagcttgttccaatttagttgatcaagattaattattaaccagagaaatttggggctgaggtgcaaaagaaatcaaattcctgggcttcagcaatcctcctgcctcagcctcccaaagtgctaggattacaggtgtgagccatcgtgcctcaatcccaattcttaaagatagcaatatgacaccctgttgggttctgcatatctctcatggctttgtgcaactctttagttgtaatattaaagtcatgctatgaaagacaaatatgggaaaagatgtcttacactgcagctcctgaccttactcaaaccggactccctctttgaatactcctgatgttccctcccttgctctgctttttctgtagcacctaccaccttcaaacatgatataacatcatttgtttattaaattttctccccactaactaaactatgagctctatgagggcagggagttttgctgtcttgcccaatgatacatccttgcacctagaacagtgcttgacagttattaggcactcaacaaagatatgttgaatcactgatcatgagagaaatgcaaatcaaaaccacaatgagataccatctcacgccagtcagaatggcaattattaaaaagtcaagaagcaacagatgctggggaggctgtggagaaatargaacgattttacactgttggtgggaatgtaaatttgttcaaccattgtggaagaccatgtggtgattcctcagatatctagaagcagaaataccgtttgactcagcaatcccattactgggtatatacccaaaggaatata

SEQ ID NO: 88948 - DNA, 740 bp, Homo sapiens
taatttttttaaatgtacataatacacatatctttaaatagttaattcttgggttttcaaaatttgtgatcatgtctcttaccttaaaagactttctaaaatcaccctttggaagaaaagattataatttacgtgggttgagacaaagggagtatatcagatggtgtttgtttgagcataccagtaactacatttcctccaatggtgattcatttttttctaaggcaatttatttttacttctttgcaatyaaaattttcacttcatgagaacaataaaaatgtataccaaggaaagtaaattattatctttataattcactcatgaatgcagtattgcatttgggtcagaattttgatagggaggagtaaatttacagacttccatttggtctttctaccactttagcccttacttagccaatgagtcaggaaaccagtttttagattatatttccattgctgagtccatctatttcaacttcaatagaaaactaataccaatatatactgaaaatatttatccaagacatttccaaaagtccatggagctaatcacataagatgactatgaacttataaaagagtaataaccatcctgtgtgtctattaactggatccagtataggacagactcagactgaagctccatttatcactaagctaacttccatatgaaatgtagtactattttgttccctcaaattagcattgattcagagctagtgtccttaatgtctg

SEQ ID NO: 88949 - DNA, 2424 bp, Homo sapiens
cttttatagcagtaataaaccctgttctcaagtgcacagttcaatgaaatgatctacattatgaagtccttaaaatactccctcagattttttacttattcattacttagttcactatataatcttgcatgttgtaggctcccaacaattatttattaaattgctgaattcaaataatagactgtaaaataataaaaggcagaaatcacacctttttaacctaattttatatagaccttagatatcttgcagattttaagtagccaaaaaatgtctgctgatgtgatgcctgtaatcatgatagtaatagttatttcaatcttttcaaatagaaaatgtatttctgtgagacaggagaacataagttataagtgaatagattccggaatctgacagacttgggttcagaattggattctgcccctcagtagctatgtgacactgagaccactgttggtaacagtttcagggtctcagtttttgtttccccaaacaaaaaaactgatcgactgatgctatctgcctcataaagttgttttaaagattaaataggccgggtgcagtggctcacgcctgtaatgccagtgccagcactttgggggacagatgcgggaggatcacttgacctcaggagtttgagaccagcctaggtaacatggtgagaccttgtctctacaaaaaataaaaataagacttggcacagtggctcacgcctgtaatcccagcactttgagaggccaaggcgggcagatcacttgaggccaggagttcgagaccagcctggccaacatggcaaaaccctgtctctactaaaaacacaaaaaattagctgggcatggtaacctgggaggcagaggttgcagtgagccaagatcacaccaccatactccagcctgggtatagagtgagcctgtctcaaaatatatacataaataaataataaataaataaataaaaacataaaaaattagcccagtgtggtggcgcatgcttgtagtcccagctacgtgggaggctgaggcaggaggatcacttgagtctggaagatcaagactgcagtgagccatgatcatgccactgaactttagcctgggcaacagagtgacaccctgtctcaaaaaaaaaaaaaaaaaaagattaaataaggtcatacatatagtgtgatagagtgattagcacatacacctagtacacagtaatgcatgctgtttgtgtatggcttgctttaatttataagaccaaagtgtcatatattcagcttgtcagcttatgtaatcttacagcagtttgctagccctctaaaatataaggacctttttccttcataaaataggcttatttggaacagtctaaactactgagggtcccatagtagcaattatattctcctagtataagaatgaagttgggtttccagacaccacaggcataccactggcatattcctgacttggttatggccacatggcttatatcttttctcacatccaaaacctagaggactgacatcctgttgtcaatttgtacatgttccctgacctaaaataaccatgactaggaaccctggttaaagcaaggtattctgggaccctctcagggcaaacggcttcagatggcagagtagcagagacaacaggtcctttaagtcaggttgagttaaaagcacttggagagacaggcatagrgcctgctgagaatgaccaaccttctgcagggaagagttgtcaaagacttggaaaaggtcaaaaggtactgagtatcctttcagtggagggctgggcttagtgcagcactccctctgggaattatcagattttaaaggggtgtgtacctttgattgtcctcctagtgatttggctattttacaatgctgttggggtaaatattaccttatgcaaaactgatagtaatgcaaatattttttgtccacagcaatacaaatgaatatggtttggtagagatacaattgatttctaccctttagaatagatgactccaacatttatacttatagaattgccttacaaaatattaaccaactttgcatctattagcaaattcatttcaccattcctgattttgtatgtatgtataccatatttgctcttcgaactctcctttcaaccagttttaatatctttctggtttttctcattatataatgaattaattcaatatttggcatatgtttatatttgtagagagttgttattttagattgtcgtaaattatagtttagaacattgtaatgtggcgcttcctgtgaagaatgcactttctcaggaagggaaattgatgagttagaaaggagcttttagttttgcccagaatgatttatttttctaaaaaagaaagagaagtaaaacaagtatgtcaaaatgtttaactgctattaactattacatttaggtagtatgtagatgc

SEQ ID NO: 88950 - DNA, 2424 bp, Homo sapiens
cttttatagcagtaataaaccctgttctcaagtgcacagttcaatgaaatgatctacattatgaagtccttaaaatactccctcagattttttacttattcattacttagttcactatataatcttgcatgttgtaggctcccaacaattatttattaaattgctgaattcaaataatagactgtaaaataataaaaggcagaaatcacacctttttaacctaattttatatagaccttagatatcttgcagattttaagtagccaaaaaatgtctgctgatgtgatgcctgtaatcatgatagtaatagttatttcaatcttttcaaatagaaaatgtatttctgtgagacaggagaacataagttataagtgaatagattccggaatctgacagacttgggttcagaattggattctgcccctcagtagctatgtgacactgagaccactgttggtaacagtttcagggtctcagtttttgtttccccaaacaaaaaaactgatcgactgatgctatctgcctcataaagttgttttaaagattaaataggccgggtgcagtggctcacgcctgtaatgccagtgccagcactttgggggacagatgcgggaggatcacttgacctcaggagtttgagaccagcctaggtaacatggtgagaccttgtctctacaaaaaataaaaataagacttggcacagtggctcacgcctgtaatcccagcactttgagaggccaaggcgggcagatcacttgaggccaggagttcgagaccagcctggccaacatggcaaaaccctgtctctactaaaaacacaaaaaattagctgggcatggtaacctgggaggcagaggttgcagtgagccaagatcacaccaccatactccagcctgggtatagagtgagcctgtctcaaaatatatacataaataaataataaataaataaataaaaacataaaaaattagcccagtgtggtggcgcatgcttgtagtcccagctacgtgggaggctgaggcaggaggatcacttgagtctggaagatcaagactgcagtgagccatgatcatgccactgaactttagcctgggcaacagagtgacaccctgtctcaaaaaaaaaaaaaaaaaaagattaaataaggtcatacatatagtgtgatagagtgattagcacatacacctagtacacagtaatgcatgctgtttgtgtatggcttgctttaatttataagaccaaagtgtcatatattcagcttgtcagcttatgtaatcttacagcagtttgctagccctctaaaatataaggacctttttccttcataaaataggcttatttggaacagtctaaactactgagggtcccatagtagcaattatattctcctagtataagaatgaagttgggtttccagacaccacaggcataccactggcatattcctgacttggttatggccacatggcttatatcttttctcacatccaaaacctagaggactgacatcctgttgtcaatttgtacatgttccctgacctaaaataaccatgactaggaaccctggttaaagcaaggtattctgggaccctctcagggcaaacggcttcagatggcagagtagcagagacaacaggtcctttaagtcaggttgagttaaaagcacttggagagacaggcatagggcctgctgagaatgaccaaccttctgcagggaagagttgtcaaagacttggaaaaggtcaaaaggtactgagtatcctttcagtggagggctgggcttagtgcagcactccctctgggaattatcagattttaaaggggtgtgtacctttgattgtcctcctagtgatttggctattttacaatgctgttggggtaaatattaccttatgcaaaactgatagtaatgcaaatattttttgtccacagcaatacaaatgaatatggtttggtagagatacaattgatttctaccctttagaatagatgactccaacatttatacttatagaattgccttacaaaatattaaccaactttgcatctattagcaaattcatttcaccattcctgattttgtatgtatgtataccatatttgctcttcgaactctcctttcaaccagttttaatatctttctggtttttctcattatataatgaattaattcaatatttggcatatgtttatatttgtagagagttgttattttagattgtcgtaaattatagtttagaacattgtaatgtggcgcttccygtgaagaatgcactttctcaggaagggaaattgatgagttagaaaggagcttttagttttgcccagaatgatttatttttctaaaaaagaaagagaagtaaaacaagtatgtcaaaatgtttaactgctattaactattacatttaggtagtatgtagatgc

SEQ ID NO: 88951 - DNA, 633 bp, Homo sapiens
cccctacttccctggtccaaggggagtttcggtacctcttcctggcaaagctctctctacttgagaccttatagctgcggacctgcttgtctgtgtcctccaagggacctgactgttttaacagaaatacccggcagaggaggcatttgatggtaaggagacagcttctaattcacattgctaaaatgagagacaaacaaacaaacagaagacaacctgtggaaaaggcttctgaataataaaaagagtcttccaactggcactcagcccaagagtccacagatcatcaccacagyaacagacagtatttggaggcaatgaggagcacaaaatgcagatctggcaaaggcattagcaaaattattcatttcaaggagactatataagctcctgaatttgtagcattcgcttctatatgtatattagccatcagaaacagaaagagctaatgagctgaagtgctggtgagaacagtcagggtaccacatacagctagctctacttggaacagacggctgatggcctaaggaacctgtagccacgtcagctccaaagcagggaccggttcagtcatcagtgcagccaatgttcatgaaatccctactaagtgccaagggatactaagtgctaagg

SEQ ID NO: 88952 - DNA, 633 bp, Homo sapiens
cccctacttccctggtccaaggggagtttcggtacctcttcctggcaaagctctctctacttgagaccttatagctgcggacctgcttgtctgtgtcctccaagggacctgactgttttaacagaaatacccggcagaggaggcatttgatggtaaggagacagcttctaattcacattgctaaaatgagagacaaacaaacaaacagaagacaacctgtggaaaaggcttctgaataataaaaagagtcttccaactggcactcagcccaagagtccacagatcatcaccacagcaacagacagtatttggaggcaatgaggagcacaaaatgcagatctggcaaaggcattagcaaaattattcatttcaaggagactatataagctcctgaatttgtagcattcgcttctatatgtatattagccatcagaaacagaaagagctaatgagctgaagtgctggtgagaacagtcagggtaccacatacagctagctctacttggaacagacggctgayggcctaaggaacctgtagccacgtcagctccaaagcagggaccggttcagtcatcagtgcagccaatgttcatgaaatccctactaagtgccaagggatactaagtgctaagg

SEQ ID NO: 88953 - DNA, 1327 bp, Homo sapiens
cagtcattacagcagcagatcaccagcctccaccaagagctcgggagacagcagtcgctgtgggctgatattcacagaaaactccagagtcatatggatgccttgaggaagcagaaccgggagctccgagaagagctgagaggcctgcagcggcagcagtgggaagccgggaagaaacccgcagcgtccccacacgcggggcgagaatcacacactctggtaccaaaggcgcatttgtgtttttgtatcatttgcgtcgtgtaaaaatagcgtccccgtaaagatgtgggctttgtcgctgggtgacgtggtatctctcacgttccaggtggtgggagggcttgctatctttccatcagctccatttcccacaagtaaagattaaagaactggatacatcaggcatctcacctgacgctccagcagacagaagcacagccgcctccaggctgcgcgtctcacgtctagaattctaagacatcccatgatgtctcaggacaacagcagcaaacccttactgtggactttacatgggctaggtagggagctttaccatcttactgtctacgacgaccctatgaaatggatcctataactaactccawcatggccacgggttggagaatgcggagctgggatttgaacccagggtgactccagagtcagctcagtggcccggtgtccttctgttcatcttctaggacagctgtgtagaatgcgatagagacctgttgaaacgggaaaagttcccttgtccccctcccagggtgtgcgaaggggatgtggctcgcttgctcattgtcccacagctcaaacctctaggggagcgtagagacgggcagctgtgcagctccaaccccacggcagtgtctaggggtgaatgtttacagctgaagccccagtgggcgtgtgttacagggcgttctttcagtttagctctctgtaggcagcttgtgtttagcagctcagttagaccctctgcacatcactaggacggagggctttctgtatcctgggttcctgcctcggtgtacctgaaaaatcagatcacatgtgggcttggaggatgggtgcaaggttttttattgggtgatggtagctctcagcagacaggggagccagaaccgagatggagtgggaaggtggttttcacctggagttgggcagcccagccgccgggctctcctctgactgccctgatcaatctccctgtcattctgacagtcaatggcttgctgatgtctgccagtgtgttcctctcgatgccagccacttgtgtctctgcccactagggtctcggggtcttcacaggcacaagatgggagtg

SEQ ID NO: 88954 - DNA, 1327 bp, Homo sapiens
cagtcattacagcagcagatcaccagcctccaccaagagctcgggagacagcagtcgctgtgggctgatattcacagaaaactccagagtcatatggatgccttgaggaagcagaaccgggagctccgagaagagctgagaggcctgcagcggcagcagtgggaagccgggaagaaacccgcagcgtccccacacgcggggcgagaatcacacactctggtaccaaaggcgcatttgtgtttttgtatcatttgcgtcgtgtaaaaatagcgtccccgtaaagatgtgggctttgtcgctgggtgacgtggtatctctcacgttccaggtggtgggagggcttgctatctttccatcagctccatttcccacaagtaaagattaaagaactggatacatcaggcatctcacctgacgctccagcagacagaagcacagccgcctccaggctgcgcgtctcacgtctagaattctaagacatcccatgatgtctcaggacaacagcagcaaacccttactgtggactttacatgggctaggtagggagctttaccatcttactgtctacgacgaccctatgaaatggatcctataactaactccatcatggccacgggttggagaatgcggagctgggatttgaacccagggtgactccagagtcagctcagtggcccggtgtccttctgttcatcttytaggacagctgtgtagaatgcgatagagacctgttgaaacgggaaaagttcccttgtccccctcccagggtgtgcgaaggggatgtggctcgcttgctcattgtcccacagctcaaacctctaggggagcgtagagacgggcagctgtgcagctccaaccccacggcagtgtctaggggtgaatgtttacagctgaagccccagtgggcgtgtgttacagggcgttctttcagtttagctctctgtaggcagcttgtgtttagcagctcagttagaccctctgcacatcactaggacggagggctttctgtatcctgggttcctgcctcggtgtacctgaaaaatcagatcacatgtgggcttggaggatgggtgcaaggttttttattgggtgatggtagctctcagcagacaggggagccagaaccgagatggagtgggaaggtggttttcacctggagttgggcagcccagccgccgggctctcctctgactgccctgatcaatctccctgtcattctgacagtcaatggcttgctgatgtctgccagtgtgttcctctcgatgccagccacttgtgtctctgcccactagggtctcggggtcttcacaggcacaagatgggagtg

SEQ ID NO: 88955 - DNA, 1327 bp, Homo sapiens
cagtcattacagcagcagatcaccagcctccaccaagagctcgggagacagcagtcgctgtgggctgatattcacagaaaactccagagtcatatggatgccttgaggaagcagaaccgggagctccgagaagagctgagaggcctgcagcggcagcagtgggaagccgggaagaaacccgcagcgtccccacacgcggggcgagaatcacacactctggtaccaaaggcgcatttgtgtttttgtatcatttgcgtcgtgtaaaaatagcgtccccgtaaagatgtgggctttgtcgctgggtgacgtggtatctctcacgttccaggtggtgggagggcttgctatctttccatcagctccatttcccacaagtaaagattaaagaactggatacatcaggcatctcacctgacgctccagcagacagaagcacagccgcctccaggctgcgcgtctcacgtctagaattctaagacatcccatgatgtctcaggacaacagcagcaaacccttactgtggactttacatgggctaggtagggagctttaccatcttactgtctacgacgaccctatgaaatggatcctataactaactccatcatggccacgggttggagaatgcggagctgggatttgaacccagggtgactccagagtcagctcagtggcccggtgtccttctgttcatcttctaggacagctgtgtagaatgcratagagacctgttgaaacgggaaaagttcccttgtccccctcccagggtgtgcgaaggggatgtggctcgcttgctcattgtcccacagctcaaacctctaggggagcgtagagacgggcagctgtgcagctccaaccccacggcagtgtctaggggtgaatgtttacagctgaagccccagtgggcgtgtgttacagggcgttctttcagtttagctctctgtaggcagcttgtgtttagcagctcagttagaccctctgcacatcactaggacggagggctttctgtatcctgggttcctgcctcggtgtacctgaaaaatcagatcacatgtgggcttggaggatgggtgcaaggttttttattgggtgatggtagctctcagcagacaggggagccagaaccgagatggagtgggaaggtggttttcacctggagttgggcagcccagccgccgggctctcctctgactgccctgatcaatctccctgtcattctgacagtcaatggcttgctgatgtctgccagtgtgttcctctcgatgccagccacttgtgtctctgcccactagggtctcggggtcttcacaggcacaagatgggagtg

SEQ ID NO: 88956 - DNA, 1327 bp, Homo sapiens
cagtcattacagcagcagatcaccagcctccaccaagagctcgggagacagcagtcgctgtgggctgatattcacagaaaactccagagtcatatggatgccttgaggaagcagaaccgggagctccgagaagagctgagaggcctgcagcggcagcagtgggaagccgggaagaaacccgcagcgtccccacacgcggggcgagaatcacacactctggtaccaaaggcgcatttgtgtttttgtatcatttgcgtcgtgtaaaaatagcgtccccgtaaagatgtgggctttgtcgctgggtgacgtggtatctctcacgttccaggtggtgggagggcttgctatctttccatcagctccatttcccacaagtaaagattaaagaactggatacatcaggcatctcacctgacgctccagcagacagaagcacagccgcctccaggctgcgcgtctcacgtctagaattctaagacatcccatgatgtctcaggacaacagcagcaaacccttactgtggactttacatgggctaggtagggagctttaccatcttactgtctacgacgaccctatgaaatggatcctataactaactccatcatggccacgggttggagaatgcggagctgggatttgaacccagggtgactccagagtcagctcagtggcccggtgtccttctgttcatcttctaggacagctgtgtagaatgcgatagagacctgttgaaacgggaaaagttcccttgtccccctcccagggtgtgcgaaggggatgtggctcgcttgctcattgtcccacagctcaaacctctaggggagcgtagagacgggcagctgtgcagctccaaccccacggcagtgtctaggggtgaatgtttacagctgaagccccagtgggcgtgtgtyacagggcgttctttcagtttagctctctgtaggcagcttgtgtttagcagctcagttagaccctctgcacatcactaggacggagggctttctgtatcctgggttcctgcctcggtgtacctgaaaaatcagatcacatgtgggcttggaggatgggtgcaaggttttttattgggtgatggtagctctcagcagacaggggagccagaaccgagatggagtgggaaggtggttttcacctggagttgggcagcccagccgccgggctctcctctgactgccctgatcaatctccctgtcattctgacagtcaatggcttgctgatgtctgccagtgtgttcctctcgatgccagccacttgtgtctctgcccactagggtctcggggtcttcacaggcacaagatgggagtg

SEQ ID NO: 88957 - DNA, 1327 bp, Homo sapiens
cagtcattacagcagcagatcaccagcctccaccaagagctcgggagacagcagtcgctgtgggctgatattcacagaaaactccagagtcatatggatgccttgaggaagcagaaccgggagctccgagaagagctgagaggcctgcagcggcagcagtgggaagccgggaagaaacccgcagcgtccccacacgcggggcgagaatcacacactctggtaccaaaggcgcatttgtgtttttgtatcatttgcgtcgtgtaaaaatagcgtccccgtaaagatgtgggctttgtcgctgggtgacgtggtatctctcacgttccaggtggtgggagggcttgctatctttccatcagctccatttcccacaagtaaagattaaagaactggatacatcaggcatctcacctgacgctccagcagacagaagcacagccgcctccaggctgcgcgtctcacgtctagaattctaagacatcccatgatgtctcaggacaacagcagcaaacccttactgtggactttacatgggctaggtagggagctttaccatcttactgtctacgacgaccctatgaaatggatcctataactaactccatcatggccacgggttggagaatgcggagctgggatttgaacccagggtgactccagagtcagctcagtggcccggtgtccttctgttcatcttctaggacagctgtgtagaatgcgatagagacctgttgaaacgggaaaagttcccttgtccccctcccagggtgtgcgaaggggatgtggctcgcttgctcattgtcccacagctcaaacctctaggggagcgtagagacgggcagctgtgcagctccaaccccacggcagtgtctaggggtgaatgtttacagctgaagccccagtgggcgtgtgttacagggcgttctttcagtttagctctctgtaggcagcttgtgtttagcagctcagwtagaccctctgcacatcactaggacggagggctttctgtatcctgggttcctgcctcggtgtacctgaaaaatcagatcacatgtgggcttggaggatgggtgcaaggttttttattgggtgatggtagctctcagcagacaggggagccagaaccgagatggagtgggaaggtggttttcacctggagttgggcagcccagccgccgggctctcctctgactgccctgatcaatctccctgtcattctgacagtcaatggcttgctgatgtctgccagtgtgttcctctcgatgccagccacttgtgtctctgcccactagggtctcggggtcttcacaggcacaagatgggagtg

SEQ ID NO: 88958 - DNA, 650 bp, Homo sapiens
aacagtaaccccaagagccaatgaagtctcgtccagtcttcacactccctacagcttccattgttctcttatttcgaggttagagcttggggaatttccaaactttttttttgattctgtgcattgtactggtcaccatggggctatttataggaagaggatctatgctcacaagagcatacctgatttgaagaaaggacgggatatgtgaattccacacttcaaatttgcgtaggtgtatctgtgtgtagtcgcagttttagggastgagcgtctaaaaggctgaggcatgagcaccctcggaacgcgggcacggctgtgtgggtgagccactctggatctggtattaagggttcgttcatagcaaccctctccccttctcactccctcctcctcctcagaggggagagcggggaataattaaacattccagacctaacacacctcctcccacctgcaggatcacgctgttccaggtcagtctgctgataacaggggaagttgggaatttgcatttcgaatcttagacaagttgtagagacaacactagaaggagcatcacattttcctcctccgttgccacattccccgttgaagacacatgagcctgaaggaagatatgttgggtattgatcattctgtagcctttg

SEQ ID NO: 88959 - DNA, 650 bp, Homo sapiens
aacagtaaccccaagagccaatgaagtctcgtccagtcttcacactccctacagcttccattgttctcttatttcgaggttagagcttggggaatttccaaactttttttttgattctgtgcattgtactggtcaccatggggctatttataggaagaggatctatgctcacaagagcatacctgatttgaagaaaggacgggatatgtgaattccacacttcaaatttgcgtaggtgtatctgtgtgtagtcgcagttttagggactgagcrtctaaaaggctgaggcatgagcaccctcggaacgcgggcacggctgtgtgggtgagccactctggatctggtattaagggttcgttcatagcaaccctctccccttctcactccctcctcctcctcagaggggagagcggggaataattaaacattccagacctaacacacctcctcccacctgcaggatcacgctgttccaggtcagtctgctgataacaggggaagttgggaatttgcatttcgaatcttagacaagttgtagagacaacactagaaggagcatcacattttcctcctccgttgccacattccccgttgaagacacatgagcctgaaggaagatatgttgggtattgatcattctgtagcctttg

SEQ ID NO: 88960 - DNA, 650 bp, Homo sapiens
aacagtaaccccaagagccaatgaagtctcgtccagtcttcacactccctacagcttccattgttctcttatttcgaggttagagcttggggaatttccaaactttttttttgattctgtgcattgtactggtcaccatggggctatttataggaagaggatctatgctcacaagagcatacctgatttgaagaaaggacgggatatgtgaattccacacttcaaatttgcgtaggtgtatctgtgtgtagtcgcagttttagggactgagcgtctaaaaggctgaggcatgagcaccctcggaacgcgggcacggctgtgtgggtgagccactctggatctggtattaagggttcgttcatagcaaccctctccccttctcactccctcctcctcctcagaggggagagcggggaataattaaacattccagacctaacacacctcctcccacctgcaggatcacgctgttccaggtcagtctgctgataacaggggaagttgggaatttgcatttcgaatcttagacaagttgtagagacaacactagaaggagcatcacattttcctcctccgttgccacattccccgttgaagacacatgagcctgaaggaagatatgttgggtattgwtcattctgtagcctttg

SEQ ID NO: 88961 - DNA, 856 bp, Homo sapiens
caagtactttatttcactgttgactattctacaatgtcagccataccgtccctgaattcctcaagagcgtggctgtaaaatggggaatgagagcgtggatgcctcatgtgtccttctgtaggaagcgggggtagaatcctctagattctgtggcagctggtgtgatgtgttgctcaacattttaaaataatatgatggttattaatgcaaccacatttattttcagccaatgagtttaaagacagaaagaattaactcggggaaaacaccaccacaggaagatagagagaaaagtcctcccgggagacgtcaagacagaagtccagcacccactggaaggccgactcccggtgcagaaagacgggaggtgtctgaagacggaaaggtgacctcggaaacctgggtcactctacactggcagcatggaaaattcagattcagatgaagttccacttaggtctcataagagtactcaatttgttattcgaaatagacctagtaatttattaacctaattatgtttctatagataaaactttgaatttctgcagacatgtctttaatgctataaaagcaaataaattgaattgggttttaaaaagcaaacaacttgaattgggttttaaaaatcaattacttgcccgagctccgtaattggtatatttctgcagagtctttaaaagaattgatctaccttgtagtgctgagctcagggctgttgggtgagccctggggtcttgctggaaattgtggatggctgaagatggcttcgtgctcccagcctttgggctcgaggcattgccggctgcagggaccttrtgacaagggaggcctctgactgtctttgccccagatt

SEQ ID NO: 88962 - DNA, 513 bp, Homo sapiens
aaattttggaattgacttgtcaatttctcaaaaaaaaaaccctaccataattttgatttagtttatgttgtatctacagatcgatttggggagaaattatatcttgaaattgaatctttgataaatttgaacatgaaatgtcattgaaaattgaacatgataaatttctccattaatttaggtcttatttaatttttgccaacaatgttttgtagtttttagcatataaatctcacataaattttgttagagctatccataagtattttacattttatgatacaattgtatatataattattgatactattatatatgatatatgtgtgtatatatatatatatatrtatatatatatatatatatagttttaacatccaaatggtaattccaattggtgtattttattttacatattgtatatttcacctcccatgccctccacccctgccatgctctgcagcttagaaagagtgtgtatcatttctcactgtatttgttctcctcctgcca

SEQ ID NO: 88963 - DNA, 513 bp, Homo sapiens
aaattttggaattgacttgtcaatttctcaaaaaaaaaaccctaccataattttgatttagtttatgttgtatctacagatcgatttggggagaaattatatcttgaaattgaatctttgataaatttgaacatgaaatgtcattgaaaattgaacatgataaatttctccattaatttaggtcttatttaatttttgccaacaatgttttgtagtttttagcatataaatctcacataaattttgttagagctatccataagtattttacattttatgatacaattgtatatataattattgatactattatatatgatatatgtgtgtatatatatatatatatatrtatatatatatatatatagttttaacatccaaatggtaattccaattggtgtattttattttacatattgtatatttcacctcccatgccctccacccctgccatgctctgcagcttagaaagagtgtgtatcatttctcactgtatttgttctcctcctgcca

SEQ ID NO: 88964 - DNA, 513 bp, Homo sapiens
aaattttggaattgacttgtcaatttctcaaaaaaaaaaccctaccataattttgatttagtttatgttgtatctacagatcgatttggggagaaattatatcttgaaattgaatctttgataaatttgaacatgaaatgtcattgaaaattgaacatgataaatttctccattaatttaggtcttatttaatttttgccaacaatgttttgtagtttttagcatataaatctcacataaattttgttagagctatccataagtattttacattttatgatacaattgtatatataattattgatactattatatatgatatatgtgtgtatatatatatatatatatatrtatatatatatatatagttttaacatccaaatggtaattccaattggtgtattttattttacatattgtatatttcacctcccatgccctccacccctgccatgctctgcagcttagaaagagtgtgtatcatttctcactgtatttgttctcctcctgcca

SEQ ID NO: 88965 - DNA, 612 bp, Homo sapiens
tttctggatacgtgagatcttactgtatgtaaatctcaacatttargtacttaagtattaccttgcaaactgtacgtgatttgcttctcaggacagacagactggattttaaatgaggccagaaaaacacaatattttcaaatccttttaagacttgtggtgatgtgtgcaaattacaggcattctggagatatgtgtacagagaatgtggtctcaatgaacgcagtgtacatgctatagtctgctaggacattagtttgctggggctgccctaacaaaatactacagactgagtggcttaaacaacacatttatttctcacatttttagaggctggttaaggtgttggcagggttggtttctcctgaggcctcaaatggcttttcctctgtgagctgacgcttcttataaggacactagtcagattggattacagcccaccgaaaaggcccttttaacttaatcaccggtttaaaatcccagtctctaaatatcacaactttctgagatactgagggttgggactttgacatatgaattttaaggggacaccatccagcccctaacatctatttccctgaaggtggggcatattttcctattaaagttaac

SEQ ID NO: 88966 - DNA, 651 bp, Homo sapiens
accaccatagaaaggacacagctctcccaggtaccagcatacagaagagagaggaaatgcacagcagcagcaaggacttggaactctcatgtccttggaatgaatctctcagagctttcattctttcactctgcccaccttgcattcattcatctggctacataaagtactaaatggttgagcaaaagcaagtgtaacaatgtgctggtactacccagccacctgatcatacataatttctggtttctgacagtgccctaggcatgagggaagggagatgttgctgttcatagaaaggacggttcctgcattgtttactaaaaacccaacttcttttagttcttctgtcaaagacatgattttctttgtttgtttttcagagaaacttcaagaagaattgcgtaagtttagcctttccttaactmcatgtacaatttgagttctgctcagcaacatctcatgacattcgtctctgtctgtcccttgcaggatggagaagaacattcttacatgctggtgagtgcctctgatgttccctcagatctcagctttctccacactagccagctaacaggactccttagaggagatgagcaaggggcccagggcaaggtggggacagcagggaacgggggtcagttcatcaacagt

SEQ ID NO: 88967 - DNA, 651 bp, Homo sapiens
accaccatagaaaggacacagctctcccaggtaccagcatacagaagagagaggaaatgcacagcagcagcaaggacttggaactctcatgtccttggaatgaatctctcagagctttcattctttcactctgcccaccttgcattcattcatctggctacataaagtactaaatggttgagcaaaagcaagtgtaacaatgtgctggtactacccagccacctgatcatacataatttctggtttctgacagtgccctaggcatgagggaagggagatgttgctgttcatagaaaggacggttcctgcattgtttactaaaaacccaacttcttttagttcttctgtcaaagacatgattttctttgtttgtttttcagagaaacttcaagaagaattgcgtaagtttagcctttccttaactacatgtacaatttgagttctgctcagcaacatctcatgacattcgtctctgtctgtcccttgcaggatggagaagaacattcttacatgctggtgagtgcctctgatgttccctcagatctcagctttctccacactagccagctaacaggactccttagaggaratgagcaaggggcccagggcaaggtggggacagcagggaacgggggtcagttcatcaacagt

SEQ ID NO: 88968 - DNA, 651 bp, Homo sapiens
accaccatagaaaggacacagctctcccaggtaccagcatacagaagagagaggaaatgcacagcagcagcaaggacttggaactctcatgtccttggaatgaatctctcagagctttcattctttcactctgcccaccttgcattcattcatctggctacataaagtactaaatggttgagcaaaagcaagtgtaacaatgtgctggtactacccagccacctgatcatacataatttctggtttctgacagtgccctaggcatgagggaagggagatgttgctgttcatagaaaggacggttcctgcattgtttactaaaaacccaacttcttttagttcttctgtcaaagacatgattttctttgtttgtttttcagagaaacttcaagaagaattgcgtaagtttagcctttccttaactacatgtacaatttgagttctgctcagcaacatctcatgacattcgtctctgtctgtcccttgcaggatggagaagaacattcttacatgctggtgagtgcctctgatgttccctcagatctcagctttctccacactagccagctaacaggactccttagaggagatragcaaggggcccagggcaaggtggggacagcagggaacgggggtcagttcatcaacagt

SEQ ID NO: 88969 - DNA, 2282 bp, Homo sapiens
ggagtaagtctgtctcaaaaaaaaaaaaaaaaaaaaaaaaggaaaagaaaaaaatttgtaatacgtcctcagtctgctgtgataaaaatgtaatacataaatgatcgaagtgtataatagatttgccaatgcacctggcagaggccaacactcagaactgaaaatagtgagagaaattcgaagtacccagctctgtctacgatagaacaatctgaggactagggaaccaccgagtagatgggttttcatgggtggtgagagaatcttgagcttgaaggaaagaccacccccattatgatacgggagtgtgttgttagctgcttatgtgtcagcaagatattcatggaaagataggagtaaaggccaaagggtaaggtgggagaggaaaccacataaaactggagaatgcgggcatcgatcccgctacctctcgcatgctaagcgagcgctctaccatttgagctaattccccgtgtgggaaaacgtctcttatatcctttaccctctttgatatctggaagtaattcaggactctcgctatttcaattgactttcgtcactagccaataggaaaaaaatgaagaactgtgtacaatggtgactaaagagcctcagcatgacttccgcccctcagcgccatctataacctgttttaccatgtcggatcccgtctggagaagcccaccgagtgcaggtgaaccagggaggcgaagtccatagaaacagctgtcttgggggtccgggaagagtttaacactggaatcacatctgcggaaaccgggaactggaagcaaattgaggatgcggccagaagggaaaatcaagtttttcaagcaatgaggttcggccttggcctaaccaatagtttctaccactctccgcacccctaaaatttccatctattcatctggttccagaaacagattatccagcgtctttgtagatctacgaatatcccttaaagtcgggtgcggtggttcacgcctgtaatcccagcattttgggaggccgaggcgggtggatcacttgagatgaggagttcgaaaccagcctgccaatatggtgaaacccctgtctccactaaaaatacaaaaaattagccgggcgtggtggcgcacacctgtaatcccagctgctcgggaggctgaagcaggagaatcgcttgaacccaggaggcagaggtcgcaatgagctgagttcgcgccactgcactccagcctgggcgaccgagtaagactccctctcaaaaaggaaaaaaaaaaaaaaaaaaacaaatccgctttttgtctggctttgtcgctgccggaggaccttgtggccacaagggggcgtgcgtcccatttgatttctttattctggtttctgtagtcctgatttcgatccaggggtgtacaaattatttttctaaggtaaatattagcaagagaagcgaatatacttatggctgcagacttagaggcagagtctttgcacaaagacaaatgctttagttgccactttttcttctgggcctattgagtaccagctactgtgccaggtgctaggtgctaggtactgttcagcagaagctagttgggaaaaggaggatccgttgggcattactagagtcccatcactctcaaaaaagccataygaaagccgtcacccaacatctgcaccttcaactgcttcttttccagaaattccatcattagaaacttcctctttttattttctagtctctatgaaattggggcaagatactaaaaattgaaagtggagaagacaaaatatcttatttaagaaagtaactttgctgcgcagggcatagtaggtcttttaaagaccttaagacaacctttaatacttgcttttctcttttgctttttcattgcaatcagggctgacaaaaagtggataactctgttggaagaaaacctcccaatttcctgcccccaccattttagacaagagagttaaaaactcagatattagccaggcgtagtggctcactcctgtaatgccagcactttgggaggctgaggcggctggatcacttgaggtcaggagttcaagaccagcttgaccaacatggcaaaaccctgtctctactaaaaatacaaaaatcagccgtgggcggtggcgggtgactgtaatcttggctacttcggaggctgagacaggagaatcgcttgaacctgggaggcaggggttgcagtgagcagagattgcaccactgctctccagcctgggtgacacagcgagactctctcaacaaacaaacaaaaaaccaactcagatgt

SEQ ID NO: 88970 - DNA, 2282 bp, Homo sapiens
ggagtaagtctgtctcaaaaaaaaaaaaaaaaaaaaaaaaggaaaagaaaaaaatttgtaatacgtcctcagtctgctgtgataaaaatgtaatacataaatgatcgaagtgtataatagatttgccaatgcacctggcagaggccaacactcagaactgaaaatagtgagagaaattcgaagtacccagctctgtctacgatagaacaatctgaggactagggaaccaccgagtagatgggttttcatgggtggtgagagaatcttgagcttgaaggaaagaccacccccattatgatacgggagtgtgttgttagctgcttatgtgtcagcaagatattcatggaaagataggagtaaaggccaaagggtaaggtgggagaggaaaccacataaaactggagaatgcgggcatcgatcccgctacctctcgcatgctaagcgagcgctctaccatttgagctaattccccgtgtgggaaaacgtctcttatatcctttaccctctttgatatctggaagtaattcaggactctcgctatttcaattgactttcgtcactagccaataggaaaaaaatgaagaactgtgtacaatggtgactaaagagcctcagcatgacttccgcccctcagcgccatctataacctgttttaccatgtcggatcccgtctggagaagcccaccgagtgcaggtgaaccagggaggcgaagtccatagaaacagctgtcttgggggtccgggaagagtttaacactggaatcacatctgcggaaaccgggaactggaagcaaattgaggatgcggccagaagggaaaatcaagtttttcaagcaatgaggttcggccttggcctaaccaatagtttctaccactctccgcacccctaaaatttccatctattcatctggttccagaaacagattatccagcgtctttgtagatctacgaatatcccttaaagtcgggtgcggtggttcacgcctgtaatcccagcattttgggaggccgaggcgggtggatcacttgagatgaggagttcgaaaccagcctgccaatatggtgaaacccctgtctccactaaaaatacaaaaaattagccgggcgtggtggcgcacacctgtaatcccagctgctcgggaggctgaagcaggagaatcgcttgaacccaggaggcagaggtcgcaatgagctgagttcgcgccactgcactccagcctgggcgaccgagtaagactccctctcaaaaaggaaaaaaaaaaaaaaaaaaacaaatccgctttttgtctggctttgtcgctgccggaggaccttgtggccacaagggggcgtgcgtcccatttgatttctttattctggtttctgtagtcctgatttcgatccaggggtgtacaaattatttttctaaggtaaatattagcaagagaagcgaatatacttatggctgcagacttagaggcagagtctttgcacaaagacaaatgctttagttgccactttttcttctgggcctattgagtaccagctactgtgccaggtgctaggtgctaggtactgttcagcagaagctagttgggaaaaggaggatccgttgggcattactagagtcccatcactctcaaaaaagccatacgaaagccgtcacccaacatctgcaccttcaactgcttcttttccagaaattccatcattagaaacttcctctttttattttctagtctctatgaaattggggcaagatactaaaaattgaaagtggagaagacaaaatatcttatttaagaaagtaactttgctgcgcagggcatagtaggtcttttaaagaccttaagacaacctttaatacttgcttttctcttttgctttttcrttgcaatcagggctgacaaaaagtggataactctgttggaagaaaacctcccaatttcctgcccccaccattttagacaagagagttaaaaactcagatattagccaggcgtagtggctcactcctgtaatgccagcactttgggaggctgaggcggctggatcacttgaggtcaggagttcaagaccagcttgaccaacatggcaaaaccctgtctctactaaaaatacaaaaatcagccgtgggcggtggcgggtgactgtaatcttggctacttcggaggctgagacaggagaatcgcttgaacctgggaggcaggggttgcagtgagcagagattgcaccactgctctccagcctgggtgacacagcgagactctctcaacaaacaaacaaaaaaccaactcagatgt

SEQ ID NO: 88971 - DNA, 2282 bp, Homo sapiens
ggagtaagtctgtctcaaaaaaaaaaaaaaaaaaaaaaaaggaaaagaaaaaaatttgtaatacgtcctcagtctgctgtgataaaaatgtaatacataaatgatcgaagtgtataatagatttgccaatgcacctggcagaggccaacactcagaactgaaaatagtgagagaaattcgaagtacccagctctgtctacgatagaacaatctgaggactagggaaccaccgagtagatgggttttcatgggtggtgagagaatcttgagcttgaaggaaagaccacccccattatgatacgggagtgtgttgttagctgcttatgtgtcagcaagatattcatggaaagataggagtaaaggccaaagggtaaggtgggagaggaaaccacataaaactggagaatgcgggcatcgatcccgctacctctcgcatgctaagcgagcgctctaccatttgagctaattccccgtgtgggaaaacgtctcttatatcctttaccctctttgatatctggaagtaattcaggactctcgctatttcaattgactttcgtcactagccaataggaaaaaaatgaagaactgtgtacaatggtgactaaagagcctcagcatgacttccgcccctcagcgccatctataacctgttttaccatgtcggatcccgtctggagaagcccaccgagtgcaggtgaaccagggaggcgaagtccatagaaacagctgtcttgggggtccgggaagagtttaacactggaatcacatctgcggaaaccgggaactggaagcaaattgaggatgcggccagaagggaaaatcaagtttttcaagcaatgaggttcggccttggcctaaccaatagtttctaccactctccgcacccctaaaatttccatctattcatctggttccagaaacagattatccagcgtctttgtagatctacgaatatcccttaaagtcgggtgcggtggttcacgcctgtaatcccagcattttgggaggccgaggcgggtggatcacttgagatgaggagttcgaaaccagcctgccaatatggtgaaacccctgtctccactaaaaatacaaaaaattagccgggcgtggtggcgcacacctgtaatcccagctgctcgggaggctgaagcaggagaatcgcttgaacccaggaggcagaggtcgcaatgagctgagttcgcgccactgcactccagcctgggcgaccgagtaagactccctctcaaaaaggaaaaaaaaaaaaaaaaaaacaaatccgctttttgtctggctttgtcgctgccggaggaccttgtggccacaagggggcgtgcgtcccatttgatttctttattctggtttctgtagtcctgatttcgatccaggggtgtacaaattatttttctaaggtaaatattagcaagagaagcgaatatacttatggctgcagacttagaggcagagtctttgcacaaagacaaatgctttagttgccactttttcttctgggcctattgagtaccagctactgtgccaggtgctaggtgctaggtactgttcagcagaagctagttgggaaaaggaggatccgttgggcattactagagtcccatcactctcaaaaaagccatacgaaagccgtcacccaacatctgcaccttcaactgcttcttttccagaaattccatcattagaaacttcctctttttattttctagtctctatgaaattggggcaagatactaaaaattgaaagtggagaagacaaaatatcttatttaagaaagtaactttgctgcgcagggcatagtaggtcttttaaagaccttaagacaacctttaatacttgcttttctcttttgctttttcattgcaatcagggctgacaaaaagtggataactctgttggaagaaaacctcccaatttcctgcccccaccattttagacaagagagttaaaaactcagatattagccaggcgyagtggctcactcctgtaatgccagcactttgggaggctgaggcggctggatcacttgaggtcaggagttcaagaccagcttgaccaacatggcaaaaccctgtctctactaaaaatacaaaaatcagccgtgggcggtggcgggtgactgtaatcttggctacttcggaggctgagacaggagaatcgcttgaacctgggaggcaggggttgcagtgagcagagattgcaccactgctctccagcctgggtgacacagcgagactctctcaacaaacaaacaaaaaaccaactcagatgt

SEQ ID NO: 88972 - DNA, 844 bp, Homo sapiens
tagagatgggttttcaccatgttggccagactggttttgaacttctgacctcaagttatccacccaccttggcctcctaaagtgctaggccacagcacctggcctctactctttataaattaccctgtctcaggtattttgatacacagcacaaatggattcattatacagagtacgtccagtgtctgaaaaaactgctttaaagccgattgtagttttaaaaatgagtatcaatgtaattaaaactgagtctccttaatgcaacaagacttgaaaacccagaaactttcaggacacattattttaggaattctagaagatgaagggctaggggtcctttcgatagctcagttggtagagcggaggactgtaggttcattaaactaaggcatccttaggtcgctggttcgaatccggctcgaaggacgaaagttttgaactacgggctaataattccagaaataacggaactttacgaaaatcaggatctagacaggaagatgtattagactgctgtttaatccyttctttaatcccctttgtgatacaggaagtaggactctgttaatcacattgcagttccaccacttgaccctatgggtaagccttgccaaaagggtggttagagactccaaggctgaaggtgggaaagtgaacttgttttctttctggggccttcctgtttctctaggtgtcaccccagtaatcctaacagagacaacaattttgtagcagccccgtcttgaaatttcacttcttattggcatccctgtagcttttccgcctggtgtctaaggcacagataggacacacaataatgtcaggagagactgtccacatcctg

SEQ ID NO: 88973 - DNA, 1254 bp, Homo sapiens
agatggcatcccactgtcttgcacaggctggtcttgagctcctgatgtcaagcgatctgcttgcctcagcctaccaaagtgctaggattacaggtgtgagccaccatgctgggcttcacaaatacttttaatttttgttaatttttatttttttactttttttaaatgtatttgcttatctttgccatttcatttgcttgactacacaaacacttttaaatgccttggaccagcagggcacaccacttcaactcacatccccattggtgaggactcagtcacatgatttccgcctaactgcaagagaggctggtaaatgcaatgaacattaattgtctcttccacagtgagcatgggtagcttgggagcacagatttgatgttaatatgtggtttaaaatgtaaatggttgcattttgagagaggaaatctggtagtgggcaaggagaaatactataatatcatttgtaatctactagtatatttcattttcttcagccaattaaaaacgattgtggatttttattccctctgattggcatttcttttggtcctgttcaatgcattcctcccagtgggttagtggcttaacagcagctctcattgtttttcctctacttattaacagggaaagttctttgatttccttgatgctggtttcagccagccatcctggcatgcaatctggacaaatgtgtcattagtttcctttaactgattctggacattgactaattatgttttcaaagtagatatactttgcctcgagattctggaatgagaaactaagagcattttactcagcaactgaaacgaatattcaaaggttaataacagcagcaggaacaagaacaagaacgtatatttcttagttcttgaaggcatgaggtcagggcacaccttccctggtgttcaagtaactgcttatcgtgttatatactgaataaagtggtttgagtgctttcctaactgatatctatctcagcctcaaactrtggtttcacaggttgctttgtctttttatcaacagtctgaaaacttttttctatattaatggaactgatttccaatggagattaaacatatttcctcatctaggcaaaatcttgatcaaattacgatgtgatcatcatccctttaccttctgtataattttactgattgcgtaaagaagcacttagagccttttagatattccctgaaattgagagaatctgatttgcacgggaaactttgcctaagttaatgatttggg

SEQ ID NO: 88974 - DNA, 694 bp, Homo sapiens
ctataatctcagtgctttgggagactaaggcaggaatatcacttgagggcagaaatctgagatgagcatggttaacacagcatgatcctgtctctacaaaatattttaaaaagtagctgggcgtgatggtgtgcacctacagtcctagttacttgggaggctgaggcaggaggatcacttgagcccagaagttcgaggctgcaatgagctataattgcactactgcactccagcctgggcaatagagtaagactccatctcaaagaaaaacaaagatatttaaaaatacttaatcctgattatttactgctagtatatagaaatacttttttttgatggggttgtttgtttttttcttgtaaatttgttggagttcattgtagattctggatattagccctttgtcagataagtaggttgcgaaaattttctcccatwttgtaggttgcctgttcactctgatggtagtttcttttgctgtgcagaagctctttagtttaattagatcccatttgtcacttttggcttttgttgccattgcttttggtgttttagacatgaagtccttgcccatgcctatgtcctgattggtaatgcctaggttttcttctagggtttttatggttttaggtctaacgtttaagtctttaatccatcttgaattaatttttgtataaggtgtaaggaagggatc

SEQ ID NO: 88975 - DNA, 694 bp, Homo sapiens
ctataatctcagtgctttgggagactaaggcaggaatatcacttgagggcagaaatctgagatgagcatggttaacacagcatgatcctgtctctacaaaatattttaaaaagtagctgggcgtgatggtgtgcacctacagtcctagttacttgggaggctgaggcaggaggatcacttgagcccagaagttcgaggctgcaatgagctataattgcactactgcactccagcctgggcaatagagtaagactccatctcaaagaaaaacaaagatatttaaaaatacttaatcctgattatttactgctagtatatagaaatacttttttttgatggggttgtttgtttttttcttgtaaatttgttggagttcattgtagattctggatattagccctttgtcagataagtaggttgcgaaaattttctcccattytgtaggttgcctgttcactctgatggtagtttcttttgctgtgcagaagctctttagtttaattagatcccatttgtcacttttggcttttgttgccattgcttttggtgttttagacatgaagtccttgcccatgcctatgtcctgattggtaatgcctaggttttcttctagggtttttatggttttaggtctaacgtttaagtctttaatccatcttgaattaatttttgtataaggtgtaaggaagggatc

SEQ ID NO: 88976 - DNA, 694 bp, Homo sapiens
ctataatctcagtgctttgggagactaaggcaggaatatcacttgagggcagaaatctgagatgagcatggttaacacagcatgatcctgtctctacaaaatattttaaaaagtagctgggcgtgatggtgtgcacctacagtcctagttacttgggaggctgaggcaggaggatcacttgagcccagaagttcgaggctgcaatgagctataattgcactactgcactccagcctgggcaatagagtaagactccatctcaaagaaaaacaaagatatttaaaaatacttaatcctgattatttactgctagtatatagaaatacttttttttgatggggttgtttgtttttttcttgtaaatttgttggagttcattgtagattctggatattagccctttgtcagataagtaggttgcgaaaattttctcccattttgtaggttgcctgttcactctgatggtagtttcttttgctgtgcagaagctctttagtttaattagatcccatttgtcamttttggcttttgttgccattgcttttggtgttttagacatgaagtccttgcccatgcctatgtcctgattggtaatgcctaggttttcttctagggtttttatggttttaggtctaacgtttaagtctttaatccatcttgaattaatttttgtataaggtgtaaggaagggatc

SEQ ID NO: 88977 - DNA, 694 bp, Homo sapiens
ctataatctcagtgctttgggagactaaggcaggaatatcacttgagggcagaaatctgagatgagcatggttaacacagcatgatcctgtctctacaaaatattttaaaaagtagctgggcgtgatggtgtgcacctacagtcctagttacttgggaggctgaggcaggaggatcacttgagcccagaagttcgaggctgcaatgagctataattgcactactgcactccagcctgggcaatagagtaagactccatctcaaagaaaaacaaagatatttaaaaatacttaatcctgattatttactgctagtatatagaaatacttttttttgatggggttgtttgtttttttcttgtaaatttgttggagttcattgtagattctggatattagccctttgtcagataagtaggttgcgaaaattttctcccattttgtaggttgcctgttcactctgatggtagtttcttttgctgtgcagaagctctttagtttaattagatcccatttgtcacttttggcttttgttgccattgcttttggtgttttagacatgaagtccttgcccatgcctatgtcctgattggtaatgcctaggttttcttctagggtttttatggttttaggtctaacrtttaagtctttaatccatcttgaattaatttttgtataaggtgtaaggaagggatc

SEQ ID NO: 88978 - DNA, 580 bp, Homo sapiens
aaatgtagagacattgaaatgtacacattacatatgaaagacaatagtttttgcaaatgtcactggattgaggacatttgaggatgaakgaaagaggaactgatttttttttttttttttcgagatggagtcttgctctgtctcccaggctggagtgcagcagcgcgatcttggctcactgcaacctccacctcctgggttcaagtgattctcctgcctcagcctctctagtagctgggattacaggtgcacgccaccatgtccagctaatttttgtatttttagtagagatggggtttcgccatgttggccaggctgttctggaatgcctgacctcaggtgatccacccaccttggcctcccaaagcactgggattacaggcatgaaccactgtgcccggacaggaatcaatttttgtttagcagaatttctcagaaaagttgcagtctggctattctgtctgagaagcagaggtcatcagtacttttaaaagagaaacactgaactgtgcgatttttccttttcattgtttttaatgacctctcatgagacaatttgtggagaaataagatatatgtc

SEQ ID NO: 88979 - DNA, 570 bp, Homo sapiens
agtccttcgatctgaaggaaggatctgggcagtacacataacagcatccactacagtggacaaacctgaatggggcaccatagtttctctctctctctttttttggggggggagacagagcgagactctgtctcccaggatggagtgcagtggcatgaactcggctcactgcaacctccgcctcccargttcaagcaattctcctgcctcagcctcccaagtagctgggattacgggcgcatgccaccatgcccagataatctttgtatttttgtagagatgagatttcaccatgttggccaggctggtctcaaactcctgacctcaggtgatctgcccacctcggcctcccaaattgctgggattacaggtgtgacccaccatgcccggccccatagtctcttttaaattaaacatcaccattgtggccagaggtttaagtggaaataggtatgagggaggatgtgcctggaaaatatgtcccagaagaaaccaacattaaaagtccattaatttgcccaaaggatgaagtcaggatttgaactccaacctgactttcctgatttctcc

SEQ ID NO: 88980 - DNA, 647 bp, Homo sapiens
tttattgagaatattaggttacatagtaaagaaatgttgtgtttggtctcttacaacacaaaagccctagtagtcaaataccagagagaaaggtttttatacacagttgaaaaaagggcacagagaatattggtttgaaaagttgtatgtaaacagctccttcttcatcatattgcccagtgatgattattacttcaaaggttggtctggataatattgcttgaaatcagttgtgttcaccttagcacatgatcagaacagcctgtgattattacgttaattctgaaacccaaacccctctgtttaagtgtgaagaaactgagacacagaggagttgtgaggcatgtctgcttttattattatggatataatttgattctgtgcaaagcctagagacttccaacccccatcatcttttatagctccttttagagaagattgyaaattcttaaacccctaacataggacatacaccaataaatttaacacaattggtttcatgggttaaatttccctcaattgggatactaagttgtacaactaacttgaactaaatcaagatctgcaatcttttatgaatgctccatgtgtcctattctttaatttttttatgaatgctccatgtgtcctattctttaatttttttt

SEQ ID NO: 88981 - DNA, 623 bp, Homo sapiens
ggaggaagacagaatcaacaggaccacagagaagataatctggtgacttgatgatattgaaaagttttggctccaacagtgtgcccactttgggactttttagtcgtacgaagtcagaaaaagctcctggtttgtttaagtcatttggaattaagttttctgatttttataacaagagagcattaatatatctatgtagttaattrggagcttacataaaagatgatattttgaaattgtacactctgatgagtaagattaaaattcacatttatagactatctattacagatcttggatttggcatgcatgtattaaaagcaagttatgttctaggtgttggtgacatcaagaggaaaataaaacatcatatcactcctttgagagataaagcagaaaagcctggagtactacagcaagaagaaactacttattcttactatgccatctgatagggactctgatatggttttgttctgtgctcccacccaaatctcatctagaattgtaatcccattgtgttgagggaggaacctgtaattcccatgtgtcgaggaagggaagtgattggattatgacgcagtttcccccttgctgtttacatgatagtgggtgaattatca

SEQ ID NO: 88982 - DNA, 1213 bp, Homo sapiens
tccctggagacaggacagagatcatgagttttatgggtgccatggtctctaggtgctcagtacttgagacggatgatgatggtgttcggtagaagtgtgtggtctgagaggggagccaaacaaattttacagccattaggttctattcttgactctgccatgctctgggagcagcatgtgactacagtaaacttcttctgaacttggcctagttctctgtaaaactgactgtatcatttgacatctgcctcctctgaggagagtttacaaggattaataagataatgctgccacaggcccgacgtttggatgaaagctgctaatttttaacaaagcttcagtgggcaggtccataactaaagtctgacctttcatctttgtcaaagtgctcctgaaatgggtgacattagtgctacaagtaaaggaacattttgttggagamgtaaaaatgatcaagaggaaggaaatcaggcctttgaaggaaggtgcaaagagcagggacagttgtcttacactagagaagggtgaaggtgatgaatattctcctcattgacaagaaagaatcttgcataggagtggaagtggatctttttcctgttcactgaggacagaagacacaggaaggaattcatcagaatggttgataagacatgaaaatcttagagaagggatatttggaaagcagatgttgtacatttttctaataggggagaatcaagcagacttgtttctaacttggtgaaaattgtgtaccattaggaggtcaaatttcgttagaatcttctttactcttttaaagacagaatatggtttctgaatataatttctaaatggggaacattctgggtttttttcatgggtcttttcctgctgagatatgaattcattttctttcctatgctctccatagaacatttcttactcgattcctcttcaaccttttcttttttaatctggagcattgaaagaactcttgttctatttccacatattgaagacttcattgtaaggtaaagcgagtagttcctcatggaagggactcgaggagcccttaaatgcattgggcaaggtgaggagcattcgcaggctacctcctgcagaagaaaagcaacttcctaaggggcctgaacaaaagtctgctttgattccttctttctccttcctcccctcttcccttcctcttttcttttctttcaactaatttttattgagt

SEQ ID NO: 88983 - DNA, 1213 bp, Homo sapiens
tccctggagacaggacagagatcatgagttttatgggtgccatggtctctaggtgctcagtacttgagacggatgatgatggtgttcggtagaagtgtgtggtctgagaggggagccaaacaaattttacagccattaggttctattcttgactctgccatgctctgggagcagcatgtgactacagtaaacttcttctgaacttggcctagttctctgtaaaactgactgtatcatttgacatctgcctcctctgaggagagtttacaaggattaataagataatgctgccacaggcccgacgtttggatgaaagctgctaatttttaacaaagcttcagtgggcaggtccataactaaagtctgacctttcatctttgtcaaagtgctcctgaaatgggtgacattagtgctacaagtaaaggaacattttgttggagaagtaaaaatgatcaagaggaaggaaatcaggcctttgaagraaggtgcaaagagcagggacagttgtcttacactagagaagggtgaaggtgatgaatattctcctcattgacaagaaagaatcttgcataggagtggaagtggatctttttcctgttcactgaggacagaagacacaggaaggaattcatcagaatggttgataagacatgaaaatcttagagaagggatatttggaaagcagatgttgtacatttttctaataggggagaatcaagcagacttgtttctaacttggtgaaaattgtgtaccattaggaggtcaaatttcgttagaatcttctttactcttttaaagacagaatatggtttctgaatataatttctaaatggggaacattctgggtttttttcatgggtcttttcctgctgagatatgaattcattttctttcctatgctctccatagaacatttcttactcgattcctcttcaaccttttcttttttaatctggagcattgaaagaactcttgttctatttccacatattgaagacttcattgtaaggtaaagcgagtagttcctcatggaagggactcgaggagcccttaaatgcattgggcaaggtgaggagcattcgcaggctacctcctgcagaagaaaagcaacttcctaaggggcctgaacaaaagtctgctttgattccttctttctccttcctcccctcttcccttcctcttttcttttctttcaactaatttttattgagt

SEQ ID NO: 88984 - DNA, 1110 bp, Homo sapiens
ctttggagtcagcagaactgagttttagtcttgctttgccacttattaacctgcaaaaccttgagtaaaatggggatattcatggcacctaccacatggggctgctgtggggaatacattaccaatatatctggagtgtttaatatgatttctagaatctatattaagaacaatagattttagatgttatgaatattattattgctatattagtaaatcccattttctgtatatatatattcttaaatatgcattcttatatattactatctcatctaaaattataagaagcttaattatgatgaaaaataactccagttatgattctaaatttggtgtctatggataggtttatgtcagaaagtgaggtggggtgggaagaaagcctgaaccctactacatttataggttgaattttaaaagtgctattgtgcattttgtcagtagaaagartgacactgctgtcatcaatttctccaagggatctgaggaaaaaacacattttgaaatcatcatcatatagtaaaaacatggctttttaaaactacttattgcaaaggcgtgcatattttttgactggtaaccttagagttattacatttcagaaatgctaaagttatttcgttgggaaaagctactatcaagacacagaatatcaagttattgcaatatggcccagtttttaaaaagttagaaataccattagatatgctctgtcttaacttttttaatactagccctaatgctcagaggagctatgtaaaaatatgtgaaaattcaaaaaatcaatagaaaaattataacttaaaataattttcttgcttaagaaaagctaaaatgtaacacacattggtaagattttcttaaagtcaaaacaaaatgtgttattaaacgcatacacagatttctgtgaaaagacagttttacagttctgagtaccattgccagtagattgtttggttttgtgacaacaaagcttacatttattgatgtacttatcacatactgtataaatatttcatatcttaatttagtcctgataatattgagagactgatattactaccccattttacagataagtaaatcaaagctcaaaaagtttatgta

SEQ ID NO: 88985 - DNA, 846 bp, Homo sapiens
tgctgattggcccatgggtgagccacttaattggtccaaaggtatcaaggaaaatctcactccaggttagggacttcacctggaactggtagcccagcccctaggcttcaggctgtccttggcttgaagatrgagtttcactggggacttgccccttcccacctaggaacctatctacctccagctgccatcagtaattttctattatttattccaaatcttcatcaataagtcattatatcttacaagggcccatgagttttaaaaatacatttgtaaatacaattaaataagattgtttatagagacagggactgcacaataaaattttgccaccaagacactacttaccttaggggtaaccccaactcaacccttcactgtatttccttgaaggaagccagagaattgatgacttacatttaaatttttcattttaactgttttctttctatacatttaaagtcatttctattgcatttcactaaccctatcttctatacctcttttgctcctttgttttcttctccccatgcctcaatccttttcacatccaaagcaaaggtaggggtttgtggagagtggtgaagagggagaggaaaagagggaggaagaggaggaaagtcaaagaacatcaaaatggttattactagggtaagaggaaaggaacatgtacaaactttatttcttgtcttcccacgttatactttgttcttacatgcaaggcaatgctggaagtgtagctcacttagacctagcggtgtctctgccttggtggtgcccagaattgaggcccctatctggtatatggttcaagaacattagcatcaaggctgttagaagaaa

SEQ ID NO: 88986 - DNA, 846 bp, Homo sapiens
tgctgattggcccatgggtgagccacttaattggtccaaaggtatcaaggaaaatctcactccaggttagggacttcacctggaactggtagcccagcccctaggcttcaggctgtccttggcttgaagatggagtttcactggggacttgccccttcccacctaggaacctatctacctccagctgccatcagtaattttctattatttattccaaatcttcatcaataagtcattatatcttayaagggcccatgagttttaaaaatacatttgtaaatacaattaaataagattgtttatagagacagggactgcacaataaaattttgccaccaagacactacttaccttaggggtaaccccaactcaacccttcactgtatttccttgaaggaagccagagaattgatgacttacatttaaatttttcattttaactgttttctttctatacatttaaagtcatttctattgcatttcactaaccctatcttctatacctcttttgctcctttgttttcttctccccatgcctcaatccttttcacatccaaagcaaaggtaggggtttgtggagagtggtgaagagggagaggaaaagagggaggaagaggaggaaagtcaaagaacatcaaaatggttattactagggtaagaggaaaggaacatgtacaaactttatttcttgtcttcccacgttatactttgttcttacatgcaaggcaatgctggaagtgtagctcacttagacctagcggtgtctctgccttggtggtgcccagaattgaggcccctatctggtatatggttcaagaacattagcatcaaggctgttagaagaaa

SEQ ID NO: 88987 - DNA, 838 bp, Homo sapiens
tactctttatggttgtcacaataaccttgcaagttgggtatctttcccaatttacagatgtggaaattgagactgcagactcaagagtggtgctatcaggtgagacttgaactacaatgaatcagtgtttttcagccttcagactgaagggtttcagagcttggatagcggagaatgatctctgcggatctcaagcccctttcttgtgctgtggtatctcaggataccacaaagccaatagtgggtgattttatttgcatcctaggtagccctgaggccacaggacagtcccattcaattaaggtgataaaaggactttacaaacagaactattgctgcagtttggttatgctccacttcccrcacatggctcttgtgttttattcagagtctggccaaatggtaactccttacatatctccccatcatctcaagggcctagttaccaaagaagagggaagcatctgcttgtggcatcctggcctgtgctgcagtcattcaccatcgcctgacctgctctattttttctttacagcacgtattacccagactttcactggcctgttaatttgtgtattggctgggtcctccactaaaatctaagctccagttagccccaattccaagaacaatgcctggcacataatgggcacttaatatttattgaatgaattaatcaaatactcattcatctgaacttttacaatactcacgatatccatttcatatacttcgcattcctagttatattttcatacacatgatctggttttcagtgtgttttgaaagagccttaacattcttaactcccagttaattctcagggtcaactggatcc

SEQ ID NO: 88988 - DNA, 771 bp, Homo sapiens
ataaaggtaagtcacctaacagaccaccaacaaattgagtggagatgagagaactgaaaaagcttgagaagcaatctctgctcagcccgrgttgtggggtagtggaagtaatcatgtaatagaatctactgcaggcagtccacttggggtctgctctttcccagctcctctggatcacactctacattcccaagtccatttgggtcttgttttgtgctttctgtttggttcacatgatctccgtggcagtaccacagtatctgatagggcaaatccatcctggttgctcttctagatgtggacttcacatcttaaatagtactcttcgattttggttgattaagtagagggaacctatagattcatggtccaaattataacagcacaatttatagagccatctggcttggctagtaggcagttaatattagaaattgattgattctggaagcctttcatgtaaacatgtttaaagctaaatctatgatcatgcattcatccaacaagtttttcacgaagagccaaggtttttccattgagtttgggtctgctgattagagttttgtgggttttcttgcatccttaaaacctttagaagataccttactcttcaactctgcagttacaagggtatattggcaggtgtatcggcaattctagttctaaattttcatctcattatgctcttacagaataatttccataaggttttacctggcacaagaatcggcattccattgggaggccatccctgcaccccaccccatgcta

SEQ ID NO: 88989 - DNA, 977 bp, Homo sapiens
ctgtagtttgggctggtgtttcagaaataggattcaggtttgactaagtaagactgtaatcttctaatacctattcatataaaacaagcctcttcttgttaatttccctgtttttaggttcrtcctatatttcagatggaaaagaatatttgttttatttgaatgtctgtggagaaactgaaatacagttctgtaataaaaaacaagctgcagtttgccaagtgaaaaagagcgatacctctcaagtcaaagcagcaggaagataccacaatcagaccctccggtacgtcaacaacctctgtgcgattttcctttttctttgtatttcttgagatagggttgcactctggcgcccaggctagactgcagtggtgcaatctcggtgcattgcagccttgacttccctgcctcaagtaattctcccacctcagcctcccgagtagctgggactacaggcaggcaccaccatgcctagctggtttctgtagtttttgtagacatggagttttgccatgttgcccacgctgatcttgaagtccttgcctcggtgatcctcccacattggcctcccaaagtgcgtggattagaggcgtgtgccttgggactggcctgcataattttcaagtgcgttgtgtgtattcttgtgaaacataactccctctccttttcttcctctttccattttccgtaaggtacgggagaatcagttactccagcattccttcctagtagacttcggcaagttgccgtttgtcactaaacaatcaaatgtttttcctggctttagagtaagaatgcttctgttagaactgttcactttataaacttgctgtttgtacggaacctactgtaggaaaagtatttaatgagtttacagttgatagggttttttattttaaaattcgtttttaaggagttttgatttttctctggcagtttgagaatctgaagcaccatcaacataacagaaaatttta

SEQ ID NO: 88990 - DNA, 717 bp, Homo sapiens
agtgaaaaaaagtaaagaacattttatggtgaatttgagatatacagagaattacatttaacattcactgatgtttcatctgtcagtagaaagaaggccgaaagaaaggtgatcccaaactgggtaatgtcgagtaagaggaatgtaaaatggcaaaaccaggaagcaaaaattaggaagcaagagctgctctaaaggaaaaggaaaagtactcttcactaacacagaagagcgcaggagctgcagggcacgtttaatcaaccacccagatatttatggcctttatgcagatgaactcttactgtgcgagacacaaaaaggctacaaggaggasagtctgagcagaaaccaggacatgactgaatcttcacaaaagtggactgggaaaggcagtgcaggtgaagcacctctgatctgaaatgataggaactagaaatgtgttggatactggatttttctggatttttggaatatctgcattacatttactggttgagtatcaaccaaatctgagcatcatgtcagcgttcaagaagttttggatttggggctgggcatggtgcctcacatttgtaatcccagctacttggaaggctgaggcacgagaatcacttgaacccgggaggcagaggttgcagtgagccaagataatgccactgcactccagcctgggtgacagagtgagactctgcctcaaaaaaaaaaaaaaaaagtttt

SEQ ID NO: 88991 - DNA, 1809 bp, Homo sapiens
actctttaaatttatcatcatgtaaaaaattttattgatgtgttattcattcttagaattctagagaaaattaacttttttatgttgataaagacataaagacaygtttttatatacaatttatacattccataattatagtaaataatatttgtagacacctatttagatcaaaatccagtattttctagaaaatggtaccattgtccttttgtgaatatttatggacaggttgctctctctccatgctaagattccttcctaagtctagtcccatgactatagcagacctttaattaccaaatgcccattgagatgtccagttgcaatcaggacgccttcttcacacaagtcttctttttttttttttgagacggagtctcgctctgtcgcccaggctggagtgcagtggcacgatctcggctcactgcaagctccgcctcccggggtcatgccattctcctgcctcccgagtagctgggactacaggcgcccgccatgacgcctggctaattttttgtatttttttgtagagacagggtttcaccgtgttagccaggatggtctcgatctcctgacctcgtgatccgcccgccttggcctcccaaagtgctgggattacaggcgtgagccaccgtgcccggccttcacgcgggtcttccataaaacataaaacaattcctaatggctgagagcaatatgttaaagacaaatacacttctaaactcacaacagaattttcttttttaccttcactgatacaggatttcagtagtgagaaaagttttttgttcgctgccttctgtttctaatttaaaacctttgttccgaggtcctagctttctgtgtccattcaaaaagattcacagcctgggagtgctcacggatctgagtcctgttcacacacataaacaggcagctcacaatggaatgcatgaagtcattctactaacaatgtttttgggggttttttttgtttttttgagacggagtgtcgctcttgttgcccgggctggagtgcaatggcgcaatctcgactcactgcaacctctgcctcccgggttcaagccattctcctgcctcagcctcggagtaactgagattacaggcacccgccaccatgcccggctaattttttgtatttttagtagagatgaggtttcaccatgttggccaggctggtctcaaactcctgacctcaggtgatccacccttctcggccacccaaagtgctgagattacaggcttgagtcacctcgcccagcccctactaacaatgtttaaatatttacatcttctcaggaagttagcagttcatgtcataagttatttaagaaattttcaagtttgaataaaatttcttaaggatttttttttttttttttttttttgagacagtcttgctctgtcgccaaggctggagtacagtggtgcaatctcggctcactgcaacctccgcctcccgggttcaagctattctctgcctcagcctcctgagtagctgggactacaggcgcccgccaccacgccaggctaatttttgcatttttactagagatggggtttcaccatcttggccaggctggtcttgaactcctgacctcgtgatccacccgccttggcctcccaaagtgctgggattacaggcgtgagccaccacgcccagcctctttaggaattttatgacagcagcactttaccaatatgtggagtagcatgaaagataatatggcctggaaaggccagaacttaagagcagtgaatcttcaagaagtgagcccagaatatttgttcaggaaattaacatga

SEQ ID NO: 88992 - DNA, 1809 bp, Homo sapiens
actctttaaatttatcatcatgtaaaaaattttattgatgtgttattcattcttagaattctagagaaaattaacttttttatgttgataaagacataaagacatgtttttatatacaatttatayattccataattatagtaaataatatttgtagacacctatttagatcaaaatccagtattttctagaaaatggtaccattgtccttttgtgaatatttatggacaggttgctctctctccatgctaagattccttcctaagtctagtcccatgactatagcagacctttaattaccaaatgcccattgagatgtccagttgcaatcaggacgccttcttcacacaagtcttctttttttttttttgagacggagtctcgctctgtcgcccaggctggagtgcagtggcacgatctcggctcactgcaagctccgcctcccggggtcatgccattctcctgcctcccgagtagctgggactacaggcgcccgccatgacgcctggctaattttttgtatttttttgtagagacagggtttcaccgtgttagccaggatggtctcgatctcctgacctcgtgatccgcccgccttggcctcccaaagtgctgggattacaggcgtgagccaccgtgcccggccttcacgcgggtcttccataaaacataaaacaattcctaatggctgagagcaatatgttaaagacaaatacacttctaaactcacaacagaattttcttttttaccttcactgatacaggatttcagtagtgagaaaagttttttgttcgctgccttctgtttctaatttaaaacctttgttccgaggtcctagctttctgtgtccattcaaaaagattcacagcctgggagtgctcacggatctgagtcctgttcacacacataaacaggcagctcacaatggaatgcatgaagtcattctactaacaatgtttttgggggttttttttgtttttttgagacggagtgtcgctcttgttgcccgggctggagtgcaatggcgcaatctcgactcactgcaacctctgcctcccgggttcaagccattctcctgcctcagcctcggagtaactgagattacaggcacccgccaccatgcccggctaattttttgtatttttagtagagatgaggtttcaccatgttggccaggctggtctcaaactcctgacctcaggtgatccacccttctcggccacccaaagtgctgagattacaggcttgagtcacctcgcccagcccctactaacaatgtttaaatatttacatcttctcaggaagttagcagttcatgtcataagttatttaagaaattttcaagtttgaataaaatttcttaaggatttttttttttttttttttttttgagacagtcttgctctgtcgccaaggctggagtacagtggtgcaatctcggctcactgcaacctccgcctcccgggttcaagctattctctgcctcagcctcctgagtagctgggactacaggcgcccgccaccacgccaggctaatttttgcatttttactagagatggggtttcaccatcttggccaggctggtcttgaactcctgacctcgtgatccacccgccttggcctcccaaagtgctgggattacaggcgtgagccaccacgcccagcctctttaggaattttatgacagcagcactttaccaatatgtggagtagcatgaaagataatatggcctggaaaggccagaacttaagagcagtgaatcttcaagaagtgagcccagaatatttgttcaggaaattaacatga

SEQ ID NO: 88993 - DNA, 1809 bp, Homo sapiens
actctttaaatttatcatcatgtaaaaaattttattgatgtgttattcattcttagaattctagagaaaattaacttttttatgttgataaagacataaagacatgtttttatatacaatttatacattccataattatagtaaataatatttgtagacacctatttagatcaaartccagtattttctagaaaatggtaccattgtccttttgtgaatatttatggacaggttgctctctctccatgctaagattccttcctaagtctagtcccatgactatagcagacctttaattaccaaatgcccattgagatgtccagttgcaatcaggacgccttcttcacacaagtcttctttttttttttttgagacggagtctcgctctgtcgcccaggctggagtgcagtggcacgatctcggctcactgcaagctccgcctcccggggtcatgccattctcctgcctcccgagtagctgggactacaggcgcccgccatgacgcctggctaattttttgtatttttttgtagagacagggtttcaccgtgttagccaggatggtctcgatctcctgacctcgtgatccgcccgccttggcctcccaaagtgctgggattacaggcgtgagccaccgtgcccggccttcacgcgggtcttccataaaacataaaacaattcctaatggctgagagcaatatgttaaagacaaatacacttctaaactcacaacagaattttcttttttaccttcactgatacaggatttcagtagtgagaaaagttttttgttcgctgccttctgtttctaatttaaaacctttgttccgaggtcctagctttctgtgtccattcaaaaagattcacagcctgggagtgctcacggatctgagtcctgttcacacacataaacaggcagctcacaatggaatgcatgaagtcattctactaacaatgtttttgggggttttttttgtttttttgagacggagtgtcgctcttgttgcccgggctggagtgcaatggcgcaatctcgactcactgcaacctctgcctcccgggttcaagccattctcctgcctcagcctcggagtaactgagattacaggcacccgccaccatgcccggctaattttttgtatttttagtagagatgaggtttcaccatgttggccaggctggtctcaaactcctgacctcaggtgatccacccttctcggccacccaaagtgctgagattacaggcttgagtcacctcgcccagcccctactaacaatgtttaaatatttacatcttctcaggaagttagcagttcatgtcataagttatttaagaaattttcaagtttgaataaaatttcttaaggatttttttttttttttttttttttgagacagtcttgctctgtcgccaaggctggagtacagtggtgcaatctcggctcactgcaacctccgcctcccgggttcaagctattctctgcctcagcctcctgagtagctgggactacaggcgcccgccaccacgccaggctaatttttgcatttttactagagatggggtttcaccatcttggccaggctggtcttgaactcctgacctcgtgatccacccgccttggcctcccaaagtgctgggattacaggcgtgagccaccacgcccagcctctttaggaattttatgacagcagcactttaccaatatgtggagtagcatgaaagataatatggcctggaaaggccagaacttaagagcagtgaatcttcaagaagtgagcccagaatatttgttcaggaaattaacatga

SEQ ID NO: 88994 - DNA, 1809 bp, Homo sapiens
actctttaaatttatcatcatgtaaaaaattttattgatgtgttattcattcttagaattctagagaaaattaacttttttatgttgataaagacataaagacatgtttttatatacaatttatacattccataattatagtaaataatatttgtagacacctatttagatcaaaatccagtattttctagaaaatggtaccattgtccttttgtgaatatttatggacaggttgctctctctccatgctaagattccttcctaagtctagtcccatgactatagcagacctttaattamcaaatgcccattgagatgtccagttgcaatcaggacgccttcttcacacaagtcttctttttttttttttgagacggagtctcgctctgtcgcccaggctggagtgcagtggcacgatctcggctcactgcaagctccgcctcccggggtcatgccattctcctgcctcccgagtagctgggactacaggcgcccgccatgacgcctggctaattttttgtatttttttgtagagacagggtttcaccgtgttagccaggatggtctcgatctcctgacctcgtgatccgcccgccttggcctcccaaagtgctgggattacaggcgtgagccaccgtgcccggccttcacgcgggtcttccataaaacataaaacaattcctaatggctgagagcaatatgttaaagacaaatacacttctaaactcacaacagaattttcttttttaccttcactgatacaggatttcagtagtgagaaaagttttttgttcgctgccttctgtttctaatttaaaacctttgttccgaggtcctagctttctgtgtccattcaaaaagattcacagcctgggagtgctcacggatctgagtcctgttcacacacataaacaggcagctcacaatggaatgcatgaagtcattctactaacaatgtttttgggggttttttttgtttttttgagacggagtgtcgctcttgttgcccgggctggagtgcaatggcgcaatctcgactcactgcaacctctgcctcccgggttcaagccattctcctgcctcagcctcggagtaactgagattacaggcacccgccaccatgcccggctaattttttgtatttttagtagagatgaggtttcaccatgttggccaggctggtctcaaactcctgacctcaggtgatccacccttctcggccacccaaagtgctgagattacaggcttgagtcacctcgcccagcccctactaacaatgtttaaatatttacatcttctcaggaagttagcagttcatgtcataagttatttaagaaattttcaagtttgaataaaatttcttaaggatttttttttttttttttttttttgagacagtcttgctctgtcgccaaggctggagtacagtggtgcaatctcggctcactgcaacctccgcctcccgggttcaagctattctctgcctcagcctcctgagtagctgggactacaggcgcccgccaccacgccaggctaatttttgcatttttactagagatggggtttcaccatcttggccaggctggtcttgaactcctgacctcgtgatccacccgccttggcctcccaaagtgctgggattacaggcgtgagccaccacgcccagcctctttaggaattttatgacagcagcactttaccaatatgtggagtagcatgaaagataatatggcctggaaaggccagaacttaagagcagtgaatcttcaagaagtgagcccagaatatttgttcaggaaattaacatga

SEQ ID NO: 88995 - DNA, 665 bp, Homo sapiens
ttccttacaaaaactcaagaggaatgacaattcaagaggaattgtcaagaaatcccagacaggtaatcagtacaatttaggtcccttgttttcatttaatattgcctattgaaagaaccagaatagtactctcttacagtggtattagggcagtggcatttattatttacaaatgacaaagagataaatattatttattatgtaaaatgacaaagaaccaaatttargtttattttaatggaaaataaataaggaatatttttcaaaatgtctttgcattctcctcatttcatacaagatttgagatggctcctactgcattttataactcccaagagtgccaactcaaaatctagaatgccaacacttttctagtaaattaaagatgcataggttatgcttatgtatgtattctaagagataaacaatttatagatcaggaaaatttttttaaataatcaaaaggcaacaatttatttaaacagacctcacagcaacaaaaagatatagctttagagagaacaggttgttcaacagaactatcacttttattactgggaccaagtcaaataaaattaacttttacaagcagctgctcttttaacttcattgattttaacagaaaatcctgtgtcttttgaactacattttcttataatagcaac

SEQ ID NO: 88996 - DNA, 523 bp, Homo sapiens
tttctagttttaaaatattccctggtcagcaacaacagttctccaaaaaaaaaaaaaaaaaaacgcatatctcaaaacaagggctccacaataaatgtcaccaaaagctgctttataacaccttgtgtcttttaaaagtttagcttaagttttcttttttctcctatcttgaatgaaatatgtaaaattcaacttttcatgtatttaataaactgttattgctacacaaataaattctctttccaaagcatatacttaatttttttcagaggaaaacaaggtgatttgatgattcacttaattccgtttaacttcatgactctttacaaaagtaaaaagatgcaaatcattcattgttcatccattcacctccaggaactgtgaagcattaaatgccacttgatctgccctatactgctgtgatttcaccttcaatataaacagaccatgtagctaacagcagtgactaccaccartgttagcagaacactggatatggagtcaatccatttctttcttcctt

SEQ ID NO: 88997 - DNA, 1007 bp, Homo sapiens
tgcatctaaataaaacagtattcaaatatactgagaaggtaaattacaaaaagtctggaaatggagaattttacatcacaacagtcaaaaccacaacaatcccaaaaacaggtaataaaaagcctaagtgaatgagtaataaatggaagaattattactgtaaaattattttattaaaataattataaaaataaagaaaataatggaagagttaacgatgttttgtgtcctttcccctcattccttgttcactgtgtattcttgctctcagttctttctcaactaatccatgtcattcactttctccaattcttaattcaagattggtctctaacacgatccactctaataactttcttactccacatcaccttaataatactttcctttttaccaacgtgttttggaactgttttccaaatccttcattctcaattaaactataaccaagtagattaaaatttttaaatttgctctaaagcaaaatagtttcttaaaaatcaatgttggcctatataatcagaaatccgaagttaggcgaaattaatttgaaccaagtggaaactttactcatactattttccgcttttcagtaaacctgcatagcatccaacattcattatattattttagtaaatattcaaagttgtgaaactacacatatttgactaaattccagttaccagttgaccctatcctggctgacaggatcctggttggcacctacctacccaacaagaccagttcctactggcctactaattcaatctatctttagtaattaggctaaaaaatctatgtctccagactcccctcttgccacaattacactggtacagttcaggttcctaccacctacaggatggactrcactttaaggtcctttaaaatgttgtccctttaacatgaaattcccttctttctctgtctgtacatttgtatttatctggtttttccaaataaatctcttggaagactctcataaataaggtcttggaggggccagg

SEQ ID NO: 88998 - DNA, 814 bp, Homo sapiens
tcccaccttggcctctcaaagtgctaggattacagatggcatgacccactgtgcctggccaataactacttttcaattatacataacagaacaattatttattaagtgttctggaaaataagctaggacctaattgtcccctttaattcagttaaggaaaaagacaccacaattactatattcactactatgtaagttaaacacatgaaataaatgataaaatgagggctccaacaagggcaaaacttgagcaccacagaagcactgtgacagggagcccgggaaagtccagtatattattactacaccaaaatgagtcctcggctccagtccactggattattcactatccgatgaccacgcagtcatgctctgtagcttctcatttttctcactctgctagccctgcctggtgcacccttctcatgcacatgccatgtagccaaagccaartcatcattcaagacccaactcaatttctatttcttttggcacattccttgattacttcttattcattcaatcaacaagtatctatttaacactgactatgtgtacagccctggggaaccagtagtgaacaaagaagtcaaaaaccctgtcctcgaagagcttatttttaataggaggagacggacaatgaatacagacattaaaaagataacatctgatgccaaaacactggaaatgaaataagagaaatgaaatcaagtgtgattaggggagaagtacttccatttgggtggccagggaagcctttttgaggagatggcatttcaagtaagacaaagtaagttggattctagtgaaatga

SEQ ID NO: 88999 - DNA, 814 bp, Homo sapiens
tcccaccttggcctctcaaagtgctaggattacagatggcatgacccactgtgcctggccaataactacttttcaattatacataacagaacaattatttattaagtgttctggaaaataagctaggacctaattgtcccctttaattcagttaaggaaaaagacaccacaattactatattcactactatgtaagttaaacacatgaaataaatgataaaatgagggctccaacaagggcaaaacttgagcaccacagaagcactgtgacagggagcccgggaaagtccagtatattattactacaccaaaatgagtcctcggctccagtccactggattattcactatccgatgaccacgcagtcatgctctgtagcttctcatttttctcactctgctagccctgcctggtgcacccttctcatgcacatgccatgtagccaaagccaagtcatcattcaagacccaactcaatttctatttcttttggcacattccttgattacttcttattcattcaatcaacaagtatctatttaacactgactatgtgtacagccctggggaaccagtagtgaacaaagaagtcaaaaaccctgtcctcgaagagcttatttttaataggaggagacggacaatgaatacagacattaaaaagataacatctgatgccaaaacactggaaatgaaataagagaaatgaaatcaagtgtgattaggggagargtacttccatttgggtggccagggaagcctttttgaggagatggcatttcaagtaagacaaagtaagttggattctagtgaaatga

SEQ ID NO: 89000 - DNA, 1171 bp, Homo sapiens
catacaatcagcctaaaatacagtaagctttttttttccttcccatgcaataatacttaatttactctctgccatttgttatactttggatcccacaggaataaaaacaactcttggaaatagaccatgcagtcagcaagtacagcacagtgaacagaacacttaagattatgattctaagagatgggtcagcaatattctccccttttggcttttactatctcctaacattcttatgatatccttttttataaagttcatgtatccagatattcatctggactcaamatctcaaacatgaatggaaaacaaaaccatcaccgtcttttgaatcaaacaagtttctataaatgctgcagattataacagcagaaatcatttcttctacaagaattaacatacattagatcacacaagatagatgattatacccaaagatttcagaagttatccactgtttctcagtttctgctgtaagtgtgacatcttcatcacagacactcacacatcattctctctcccatcctgtattagcaaatcccattgccatcctctggaagactgaggatcccaacatcattagaatagttactatgttctttctctcacagagttctgtcttcattccatttttatcttttctgcaaagttcatgctcccattatttcttattgaaactatagtgacaactttgcagttagttttatgtctgatccctccccttctgactcatcctgtgcattgctgccaacagtcgtgttattaaaacaataacttgcgaatttcaagctcaaaattcttacatgatttctcattcaatacaaaataaaatacaatctcatcaacccagaattcaaagtcctctaccatatgaaatagtcttcttaacaactatttgctgctggacacacacaaacatccacacaccatactcctcttaattccttcagtctacacttttagaactctgtgtggcttttgttaagctattgtttaagctaaaagctcttcttccaagccatctcttccttaacagttcaaataccactttttcttacatccattagttgatttttttcttgaatttttattgtactttaattcttcctttattttgatgctgaacactgctttttctataacatacgtgagtgcatacatatgtattata

SEQ ID NO: 89001 - DNA, 747 bp, Homo sapiens
caaccaaataggatgtggctaagtatgagatgccagaaagtttgactctttgcaaggtgactctaccaggctccattcatatgatgcttcctcccatttttctttaggtttggcaaatttacaataactttgatgagacttgggagtgagaagcctaagtctgactcagcaggtcttttcctaaatcctgagttctcttaaataagagtctaacttccaaaagcctttattcacactcaccagtacaagttctgattatcttatcaatgcttgagcctaagggagatcagtgatggtcacttgcctttacccccacttccatttgcttatacctgaagtcctgtccagtcatatccagcagaattttaaaaaataaaagatggccaataaactagaccaaaggacaaaaagataatcggtgaaacctcacctcaaagatggcagaggacaggagtttaagaaaacaaagggacagttgaatggacactaaggagaaaragaggttcccaaagaagggatataaacacttcctgagaaatccagagatgttcaacccctagaaataagaagaaagacacattgggaataggtgtttaagatgtagatgaggcaagatcaataaaatagaggcacatatgtgccacgaagggacactccatgtgaattataataggcaacttatggctcacctcaagaacagttatgtccattgttctgaactttgacatatgcacccacattattgaa

SEQ ID NO: 89002 - DNA, 747 bp, Homo sapiens
caaccaaataggatgtggctaagtatgagatgccagaaagtttgactctttgcaaggtgactctaccaggctccattcatatgatgcttcctcccatttttctttaggtttggcaaatttacaataactttgatgagacttgggagtgagaagcctaagtctgactcagcaggtcttttcctaaatcctgagttctcttaaataagagtctaacttccaaaagcctttattcacactcaccagtacaagttctgattatcttatcaatgcttgagcctaagggagatcagtgatggtcacttgcctttacccccacttccatttgcttatacctgaagtcctgtccagtcatatccagcagaattttaaaaaataaaagatggccaataaactagaccaaaggacaaaaagataatcggtgaaacctcacctcaaagatggcagaggacaggagtttaagaaaacaaagggacagttgaatggacactaaggagaaagagaggttcccaaagaagggatataaacacttcctgagaaatcyagagatgttcaacccctagaaataagaagaaagacacattgggaataggtgtttaagatgtagatgaggcaagatcaataaaatagaggcacatatgtgccacgaagggacactccatgtgaattataataggcaacttatggctcacctcaagaacagttatgtccattgttctgaactttgacatatgcacccacattattgaa

SEQ ID NO: 89003 - DNA, 747 bp, Homo sapiens
caaccaaataggatgtggctaagtatgagatgccagaaagtttgactctttgcaaggtgactctaccaggctccattcatatgatgcttcctcccatttttctttaggtttggcaaatttacaataactttgatgagacttgggagtgagaagcctaagtctgactcagcaggtcttttcctaaatcctgagttctcttaaataagagtctaacttccaaaagcctttattcacactcaccagtacaagttctgattatcttatcaatgcttgagcctaagggagatcagtgatggtcacttgcctttacccccacttccatttgcttatacctgaagtcctgtccagtcatatccagcagaattttaaaaaataaaagatggccaataaactagaccaaaggacaaaaagataatcggtgaaacctcacctcaaagatggcagaggacaggagtttaagaaaacaaagggacagttgaatggacactaaggagaaagagaggttcccaaagaagggatataaacacttcctgagaaatccagagatgttcaacccctagaaataagaagaaagacacattgggaataggtgtttaagatgtagatgaggcaagatcaataaaatagaggcacatatgtgccacgaagggacactcyatgtgaattataataggcaacttatggctcacctcaagaacagttatgtccattgttctgaactttgacatatgcacccacattattgaa

SEQ ID NO: 89004 - DNA, 1918 bp, Homo sapiens
gtggggcttaaaacctacatgacaggttgataggtgcagcaaaccaccacagcacgtgtatacctatgtaacaaacctgcatgttctgcacatgtagcccagaaattaaagtaaaaaaaaaaaaaaaaaaaaaagaaaggaaaaaaaaggaaaattaagggcatagagcatttgtttttttagatgagtcctcaaaagaatgctgctgggccaggtgcagtggcttatgcctgtaatcccagcactttgggaggctgaggcagttgtatcacctgaggtcaggagtttgagaccagcctggccaacatggcaagaccctgtctctactaaaaaatacaaaaattagccgggcgtggtggtgtgtgcctgtaatcccagctactcaggacgctgaggcacaagaatcgcttgaacctaggaggcggaggttgcagtgagccgagatcacaacattgcactccagcctgggcaacaggagcaaaactccatctgaaaaaaaaagaaaatgaccacaggatttcttgatactgaagtcattaatgatcttagcaagaggaatttagtggaagaaagggataagaagtcagcttggagtgggtaaaggagtaagtagaaaaatgaagaaatggagatgataagtgtaataaaaaactttttgtgaaatctgactatgaagaagagacagatgtagcacaacagggtgacagtgacaataatcaataataatttaactgtatgttttaaaataactaaacaagtataattggattgtaacacaaaggacaaatgcttgaggggatgggtgccttattttccatgattagattattacacattgcatgccagtatcaaaacatttcatgtaccccataaatatatacacctactatataccccccaaaataaataaataaataagaagagaaagatgtcaggctaagtggagctagggagggttttgattaactgattgatcattagaggtgttttataatgttgtgttttattttgtaatttttacgtatgtttctctttttttctttttctttttttatttctttgagggaggaatactaggcaaacttgtgagcaagaggctgaggaaaagagaaggttgattctgtaactttttgcaaaaagaaggaaaggatgaaaataaaaacaatggcaaagggattggtcttccacaggaggaatgatgcttgttcttaacaaaaaacaggagatgcataccaacgtgatttgattgattgttttgtagggagaaattcagagagttcttttctagtgtttttatctttcttgatgctctttctttgctaagtcacatttatggaaaataagaatgtaagaataatatttgatattcacagatcaagaaacagtattttctgtaccaaaaagagaaaaatattattcaaaaagagggaaacttttattttaaattcatttatataaaaattcttatagtagtataaaaattaaggcatactaagtttttgtgttttgtttttgtttttctctttttaaaaacaggactgtgccctgtcacccaggctgagtgcagtagcatgatcatatctactgcagcttcaaactgctgrgctcaggtgatcctcccaccttagcctcctaggccaccaggactgcaggcgtgtgccatcacgcccagctaatttttcattttttcatttttgtagacccttgtccaacataaggtctcactatgttgcccaggttcacactgacttttataggtaactaacaattatctaattgtcttaattaaaattaagaaagttacctaatattggcactgtcctggaaaatcagaatgtgtgggaactcttggttgaaagtgacaaaaaaccccagctaaaacaacttatgcagaaagaaaatattatcagcttaaata

SEQ ID NO: 89005 - DNA, 562 bp, Homo sapiens
tagaccccttcttgtaacactcatactcagatcagactctgatccagacatattcgctttcttgctcttcttcagcttcgccaagcaaggtcctatattaaagccttagcacatatatttctctctgccagagccactcatctcaggtgcttcgtttagctctctgcttcaattttactctttagaaaggcttttatctgaccacttatgttctttatcccttattctgctttatttgttttatttatatcacctagaaatcatataacatagtttatatttctctatttagttgtcctattcatcccttttgcagtcctaaaacgtaaggttcatgagggtgacaacttgatcatttctgttcaatgccttttacttcagaacccaaaaatttcttgaacatagtagatgctcaataaatctttgaaaattaataaacaatttaaatgagtctcagtttggaaaaatgagtgaaaatctgtatctgaaaggcttgtttttacttgcaaaaaacgagycatcactgtgtcctgtggtgtcaagctgactgaagtgagacttt

SEQ ID NO: 89006 - DNA, 544 bp, Homo sapiens
gattgtggtagataagctttttgatgtgctgctggactcggtttggcagtattttattgaggattttagcattgatgttcatcagggatattggcctgaaatttcccttttttggctgggtctctgccaggttttggtatcaggatgatgctggcctcataaaatgaattagggaggagtccctctttttctattgtttggartagtttcagaaggaatggtaccagctcctctttgtaactctggtagaattcggctgtgaatcagtctggtcctgggcttttttgttgttgttggtaggctcttaattactgcctcaatttcagaacaagaaaggaatttcatagtcactccactttctccctacatactaaatgaatacaatcattctatttatctcaatgttactaactctaaaggaacaatccaataagaatttcagttgagttttttttttttttctcagaatgtctcccacttccatgtaatctttataattttcccatctttttccttttggaatcaaatggaaattttggctgtg

SEQ ID NO: 89007 - DNA, 544 bp, Homo sapiens
gattgtggtagataagctttttgatgtgctgctggactcggtttggcagtattttattgaggattttagcattgatgttcatcagggatattggcctgaaatttcccttttttggctgggtctctgccaggttttggtatcaggatgatgctggcctcataaaatgaattagggaggagtccctctttttctattgtttggagtagtttcagaaggaatggtaccagctcctctttgtaactctggtagaattyggctgtgaatcagtctggtcctgggcttttttgttgttgttggtaggctcttaattactgcctcaatttcagaacaagaaaggaatttcatagtcactccactttctccctacatactaaatgaatacaatcattctatttatctcaatgttactaactctaaaggaacaatccaataagaatttcagttgagttttttttttttttctcagaatgtctcccacttccatgtaatctttataattttcccatctttttccttttggaatcaaatggaaattttggctgtg

SEQ ID NO: 89008 - DNA, 544 bp, Homo sapiens
gattgtggtagataagctttttgatgtgctgctggactcggtttggcagtattttattgaggattttagcattgatgttcatcagggatattggcctgaaatttcccttttttggctgggtctctgccaggttttggtatcaggatgatgctggcctcataaaatgaattagggaggagtccctctttttctattgtttggagtagtttcagaaggaatggtaccagctcctctttgtaactctggtagaattcggctgtgaatcagtctggtcctgggcttttttgttgttgttggtaggctcttaattactgcctcaatttcagaacaagaaaggaatttcatagtcactccactttctccctacatactaaatgaatacaatcattctatttatctcaatgttacyaactctaaaggaacaatccaataagaatttcagttgagttttttttttttttctcagaatgtctcccacttccatgtaatctttataattttcccatctttttccttttggaatcaaatggaaattttggctgtg

SEQ ID NO: 89009 - DNA, 574 bp, Homo sapiens
ttaggatcatattcctctctaatttcctcttttgagaaagtaattgtagttgtttgtagatagctgattaactttgaagcatatacatatattcctctgtgcccatgactgaagagttttctttgggtttcaagctctgcagtattctcactaacccagtcttcatgaaatcttttgacattgagggaatacctttgacttttgactggcagcactgtgaaccattccatcagctaacaaggttttacagtaactgtctgttgaccaaattaaattgcttcccaggagtcttgttctctgtgaagctgtctctgtctaaatcttttccctatagaawttcctacagacaaatcttgaagtaagacctttatgtttgccatttaaacagcaaaattcaaacaatgccctggtgcaaaataagtatagcagaacagaaattatgctgatttggcataaacagtatcagatcctctcattgaaccatcatgaatgtctgcatctctgacttagcaactgtgaaagctattgaactataggttactatttattgcttgctgaagtcaaatgcattgtt

SEQ ID NO: 89010 - DNA, 574 bp, Homo sapiens
ttaggatcatattcctctctaatttcctcttttgagaaagtaattgtagttgtttgtagatagctgattaactttgaagcatatacatatattcctctgtgcccatgactgaagagttttctttgggtttcaagctctgcagtattctcactaacccagtcttcatgaaatcttttgacattgagggaatacctttgacttttgactggcagcactgtgaaccattccatcagctaacaaggttttacagtaactgtctgttgaccaaattaaattgcttcccaggagtcttgttctctgtgaagctgtctctgtctaaatcttttccctatagaatttcctacagacaaatcttgaagtaagacctttaygtttgccatttaaacagcaaaattcaaacaatgccctggtgcaaaataagtatagcagaacagaaattatgctgatttggcataaacagtatcagatcctctcattgaaccatcatgaatgtctgcatctctgacttagcaactgtgaaagctattgaactataggttactatttattgcttgctgaagtcaaatgcattgtt

SEQ ID NO: 89011 - DNA, 574 bp, Homo sapiens
ttaggatcatattcctctctaatttcctcttttgagaaagtaattgtagttgtttgtagatagctgattaactttgaagcatatacatatattcctctgtgcccatgactgaagagttttctttgggtttcaagctctgcagtattctcactaacccagtcttcatgaaatcttttgacattgagggaatacctttgacttttgactggcagcactgtgaaccattccatcagctaacaaggttttacagtaactgtctgttgaccaaattaaattgcttcccaggagtcttgttctctgtgaagctgtctctgtctaaatcttttccctatagaatttcctacagacaaatcttgaagtaagacctttatgtttgccatttaaacagcaaaattcaaacaatgccctggtgcaaaataagtatagcagaacagaaattatgctgatttggcataaacagtatcagatcctctcattgaaccatcatgaatgtctgcatctctgacttagcaactgtgaaagctattgaaytataggttactatttattgcttgctgaagtcaaatgcattgtt

SEQ ID NO: 89012 - DNA, 700 bp, Homo sapiens
gggaagagggaagagtttaaattcattttacaatttgataactgcaaccccacaatttcctttgaaaagaatgtgctaattattatgagtgagtgccagtagtttaaagtcctgccccattccagcttcttcgtttcgactgttgggccatcattcagtcagcctttcaagcctagagtgtggtgatcaatatttatttctcttacaccacacatttccagttactctgccttcacatcatcttttgcttctacttgggcatttttgtttccactgtgaccaccttaataagctagaatcatgaaatactatggctaaagaatccctaagggtcagttagcctgtgtcttcctcccctctctcagctttacagatctggctgctgagatttagaggcattcattaaattcaccaaataagtctagtcagtatcagagcttggactagaactcatgtttcttccctatattattgcagtaaaccctcttacctgctcatctgatatgtcctatgtaagctacctatttggtgcagtatcacacaatttaccctgtaggtctgtttgactttccgtgtgtgcccatgagggcagggactgtgttgyagttgtagaaataggtaaattaattgaaagttgttaaaaagcacatgatctgtttatagtgtgagatgtcgttggatatacagaaaattgtatgca

SEQ ID NO: 89013 - DNA, 700 bp, Homo sapiens
gggaagagggaagagtttaaattcattttacaatttgataactgcaaccccacaatttcctttgaaaagaatgtgctaattattatgagtgagtgccagtagtttaaagtcctgccccattccagcttcttcgtttcgactgttgggccatcattcagtcagcctttcaagcctagagtgtggtgatcaatatttatttctcttacaccacacatttccagttactctgccttcacatcatcttttgcttctacttgggcatttttgtttccactgtgaccaccttaataagctagaatcatgaaatactatggctaaagaatccctaagggtcagttagcctgtgtcttcctcccctctctcagctttacagatctggctgctgagatttagaggcattcattaaattcaccaaataagtctagtcagtatcagagcttggactagaactcatgtttcttccctatattattgcagtaaaccctcttacctgctcatctgatatgtcctatgtaagctacctatttggtgcagtatcacacaatttaccctgtaggtctgtttgactttccgtgtgtgcccatgagggcagggactgtgttgcagttgtagaaatmggtaaattaattgaaagttgttaaaaagcacatgatctgtttatagtgtgagatgtcgttggatatacagaaaattgtatgca

SEQ ID NO: 89014 - DNA, 903 bp, Homo sapiens
ggacttagtaaaattgcatgggtagttgtggctgaaagggagtgaaactgaagcagtcttcttagatcactgcaacatttgggtctaatgtaggtattttaggatattaaaaacattaattttcttccttaatatgaatgtattctaagccaagtaatatgttatcaccaatttagcctttttacatatgagatgaatgaaatactggcatttgaggtttctttttgtttgtgacagaggaggaagtaagattataaatttgccaacaattggactaaatgaagttggaagtaaagtgagaaaactttccatttttggggggggttgggtaagttatataattactttcatgaaaggaatttgtttagattctactgaaaatggcaaaggaggaaatttcaaaacaggatatgtatgtggaaatactaagaattgtattcatatttttcttcgaagtcagaagactgaagggcattgaatgwgaaatctgggaggcaggagttcagttctacttgttctgtgacgggcactattaaacctaaaaagagtggacacttaatagcttctcagaaaatgtacaaaaagaaaatctgtttgccttgattatagccaattagcaagtgaagtgtttgcactttaaaaaaagtccttagtgttattatggcattaaaataaaatttttatattttccattttaatgttaagaatatgacagttaaaaatagttttgagaagaatttctgtaattcacaggttaacatgatcatatgttcagatttttctttttaagaccttatatacctcacaggatgttaagcttttaaaaaaattcctgtagaacattgaagaactgagtagtcctttgtcatctacatagcaggcagtcaaatatttgtttctttg

SEQ ID NO: 89015 - DNA, 903 bp, Homo sapiens
ggacttagtaaaattgcatgggtagttgtggctgaaagggagtgaaactgaagcagtcttcttagatcactgcaacatttgggtctaatgtaggtattttaggatattaaaaacattaattttcttccttaatatgaatgtattctaagccaagtaatatgttatcaccaatttagcctttttacatatgagatgaatgaaatactggcatttgaggtttctttttgtttgtgacagaggaggaagtaagattataaatttgccaacaattggactaaatgaagttggaagtaaagtgagaaaactttccatttttggggggggttgggtaagttatataattactttcatgaaaggaatttgtttagattctactgaaaatggcaaaggaggaaatttcaaaacaggatatgtatgtggaaatactaagaattgtattcatatttttcttcgaagtcagaagactgaagggcattgaatgakaaatctgggaggcaggagttcagttctacttgttctgtgacgggcactattaaacctaaaaagagtggacacttaatagcttctcagaaaatgtacaaaaagaaaatctgtttgccttgattatagccaattagcaagtgaagtgtttgcactttaaaaaaagtccttagtgttattatggcattaaaataaaatttttatattttccattttaatgttaagaatatgacagttaaaaatagttttgagaagaatttctgtaattcacaggttaacatgatcatatgttcagatttttctttttaagaccttatatacctcacaggatgttaagcttttaaaaaaattcctgtagaacattgaagaactgagtagtcctttgtcatctacatagcaggcagtcaaatatttgtttctttg

SEQ ID NO: 89016 - DNA, 775 bp, Homo sapiens
agcatttaacatcatgacatttagctcagtccaacacttcagccacaattacccacgtctggttctgacacacgccttgcattttacttttcacatgccttactgtctttgcctggaatgctcttccatcgcatgtccacctctgtggctgacacagactgttgcctaatcaatagttcttcccaccgttttctctctgctgtcttttcactagagatgctagaatagctgtatcctaattttccagcctgttgtttacctagtgatataaacgtaatgaagttttggtcaatgagcaaaagcagagtcctcctggaaagctttaccctttcctggctgtgactgcccttcttcttcctgactaaataaggatgtatttggagcttcaaaagctgtttgcaaccatcaggcataagcatgagargaacaccgagactcacacataccttgacattttctagctgctaaataagctctggcagctacatacctctagacctttcctatgtgagaagaataagcccccaattaagccctgtgtaagggcttcctatgacttctggtcaaaagcattcctaattttaaggtggcacttaggagaccagctcctttctatggcctttcctttgtacttcattgataaacttctttaggagcttgtaatgttttacccttaataggaggctcattttgatctgaagctctttgcacaatgcttagtgtataacacattaataaaaactcaaatatctgatgaagaattagggagttctga

SEQ ID NO: 89017 - DNA, 1281 bp, Homo sapiens
gcatacttgcacacactagtgacaacaacaacattaaaaggcttttgggcaggtcttcacaatgaataattcatattatttactcttcatatgcaccaatactcttcagtcaaaaaaataaaatacatataaaatacctacaaagtatatatactctatcatactccttcatggattgttttgaaattaaatgattgagcaaaagtgcttaatatcttatagcttattttataggtattaattgttattttggaaattatattaccattactatattgctatctgaagtaactagtttgtcacaaacatacatatacacatatattatatgatttttatattgttatcatgtatctctctctatcatctatctatctatctatctatctatctatctatctatctatctatatctccagtaatttgaacactatttggggtattacatttttattcatttagtgagggaatgttagttaaaactttattttggaaatgtgaagatgaactgttttggaggctagttttaaaaattaaaaagtgtgtttttttaaacaacagcaacaaaagaccagatctttatgttgtcttagttactaccatagttttaaaacttccatgttttccaagtctgtgattttctctctttgaaattcactttagatgtctgagtgccttttttttttttgacagagtctcgctctattgcccaggttggagtgcagtggcgcgatctcggctccctgcagcctccgcctaccggcttcaagtgattctcctgcctcagcctcctgactttttctttttcttttctttttttctttcttttttttttttttttacagtggatcctgcattagaaaaccaccaacttattgtaacttttagttaattataaaaagataactttgtcattgttcaatcttataaaacaatgaaaccaagtataaaytattttaagtaaattgcttttatgggatttctcttttcagaattgactgtggctccatggtttgttgtaattaattaaaccgtgttcatttggagttttgatcaaattagctaaatatatttattttattctatatttgaccaaaagtttgttagtattagcgtcatctagattttagagacagtaataaaaactggtcaaaatactaagtgggaaagtgtactgctgtagcttatcaatgttagagcttgaaaatacctaaaaaactgaacgcaaacaagtaaacaaacagaaagaaaaagcaagagcgctaaatccagacgtatgca

SEQ ID NO: 89018 - DNA, 1197 bp, Homo sapiens
actggcatcacttctaaacaaggactgcctcatctagtcctcaaagtaaccccacgaagtaatgttctattatcaccactttttggcaggaaaaaagagattcagagaggtgaagaaactggcccaagggccccagctaaaaatgatgatggttggatttgtaccatgatttcctgttgttttacagtagcaggtgatggaatgagatgaccacgtgaaaaagcccagcccaatgcttagttacaatgcagcagagaactcagacttcagtgggtccaaatcactggagaaaaggatgaacacactttttcagctacaaacttccctcaggtcaaaaccagcccttctccacccttggcatgttcatgtaaacaatcatcatctcttgagaactaagagaacaaccttcctctagtgaaaaggtcttgaggagggaccagatcccaccactgcaaaaggcattgtcatcctggcttctcaaaaggaattctgaaacgacagatgggcagggtcccttggtcctcagacttgataattctatgcctctctgcacagctggtgtctgggctccctggcattggagtggtatgctattcaatgagtcattcattccgtcatccattcaacacctgttactgagtacctgctacatgccacgccccattttaggcagtgaacaaaacagaagtccttgccctatagagctcatgttctactggcatgaggatattttttttcttctagcacttttcaattcataaactgcttacacattcacaactccattcaatctccacattaaacagaagaagggtaggatacatactattagcaacatttrgaggtaagaaaggcttagggaaaatgggtgatttgcccaattgctgagagttatgacaagaattcttttttgttgtttgattttttaaaaacatagtagctatgtagaatccttgagataatatagctaaaatcagtgaaaatgcaaagaacattataaactgtagaacatggccacctcaaagttgaatgaggatgtaaggcttatttgaaagatgttatagtgacactcttctagattacttatggactcagttaaaaaacaggatatgggtttcagctccaactctgcccctttctcagtataataatgagatattatttttcctggatcctcttactctgcatgaattttat

SEQ ID NO: 89019 - DNA, 790 bp, Homo sapiens
ggatccaatttctggctcggacacttactagctatattacatcaggtttcttaatctctttatgataatattattattttacaagagttttgtggctgggmgcaatggctcacgcctgtaatcccaacactttgggaggccatggtaggtggatcacctgaggttaggagttcaagaccagcctggccaacatggtgaaaccttgtctctactaaaaatacaaataaattagccaggtgtggtggcaggcacttgtaatcccagctactggggaggctaaggtgaggagaattgcttgaacccgggaggcagaggttgcagtgagctgagatcatgccattgcactccagcctgggcaacaagggcaaaactccatctcaaaaaaaaaaaaaagagttttgtaaacattaaatgagaccatgcatataaaaaccttagtacagtgcctgaaacatggtagctctcaaagtgattatactgttgaaggtatattaaggcaggaggaaggcagatagagactcaaagaggacagattgcatcaaagcctactttaagggtgagaaatgatcctggagtggctggcctaggatctgcagagggaacaaaatgggaaaacccagctggggagaaccacgtgtaggtgaggaggaagctaagtctctgaggctcagtttctttatctgcaagatgggtatgccaatacctaactcaaacttgggggtgaagacccaatggggcaagatggcattccacacatgtgatggcctcaattcaatcatagaggcaaaca

SEQ ID NO: 89020 - DNA, 790 bp, Homo sapiens
ggatccaatttctggctcggacacttactagctatattacatcaggtttcttaatctctttatgataatattattattttacaagagttttgtggctgggcgcaatggctcacgcctgtaatcccaacactttgggaggccatggtaggtggatcacctgaggttaggagttcaagaccagcctggccaacatggtgaaaccttgtctctactaaaaatacaaataaattagccaggtgtggtggcaggcacttgtaatcccagctactggggaggctaaggtgaggagaattgcttgaacccgggaggcagaggttgcagtgagctgagatcatgccattgcactccagcctgggcaacaagggcaaaactccatctcaaaaaaaaaaaaaagagttttgtaaacattaaatgagaccatgcatataaaaaccttagtacagtgcctgaaacatggtagctctcaaagtgattatactgttgaaggtatattaaggcaggaggaaggcagatagagactcaaagaggacagattgcatcaaagcctactttaagggtgagaaatgatcctggagtggctggcctaggatctgcagagggaacaaaatgggaaaacccagctggggagaaccacgtgtaggtgaggaggaagctaagtctctgaggctcagtttytttatctgcaagatgggtatgccaatacctaactcaaacttgggggtgaagacccaatggggcaagatggcattccacacatgtgatggcctcaattcaatcatagaggcaaaca

SEQ ID NO: 89021 - DNA, 2058 bp, Homo sapiens
gggagaaattcaataatgaatcaattcataaaaagacaaatcatttcataatgggcagaatctacttcctttatattatcactctggaaagtattctatttaggcccagggtaactcttaaacttaaatctatttcagaacacccaggaaaatggttaaaaatactgaattagttgagttctattctcaggaatccatgattttacagaggtggggctcaggaatctgcattcttccaaagagcattcaagcaagtcttctgaagcagggagttggtcagtgcaacccagtttgagaaacacaggataagtcctagagggcattttttaaaggaaacacagggtattttttttaaaagttgggggtgtaactgagatggatcagaaactgcagggctcctggaaaccgccccatctggctgcctcttcttcccttaccctgcctgacacaacatagagagatgtccctctatttccagaaagacaatcaactcctgaaaagcccattttctacttcactctttgatgtccttcataatctctttcccaaaagcctctcatgctctatcacatcatgtttctcctctttggtgcacacgaatccacagtgagctgtaaaaatcaccgatgcctgggtccctccctgggcatgctgacttatttggtctggggaatcaccttgtcaccctgctggttctaatcaggatccgagttgcatggactgcactaaaccctttatccctgcacctttttttctggcccggagattaatgtccacaaacccctcagctttcgctaagtatccccctcagccatatctccagtgaccagaagaggtatctagagaagaaagataaagccacatgcaggactggctctggaggctggaggctacagataaggcttaagaggggtccctggcggtccccaagttcactcctgagagtgggaagcctgttcatcaccctctgattgcctttcctcctgtctctctgggttttgtaggccagagacatagagcactatatggactcctggtgggacaggttgctggcaaattgatttcaccccaaccccagggtgggcaagcagacagtacccatcaaatctctcacctccttcctgccagacacagggcactgcagctcagaggaagtgagtgaatagctgaaactgacgtggctgcagaaattgacatcaagtgccagacaggcatttgcttagcaaattggctaattttaacctctgcctcacagaccaaaactctctggaaggaaagaaacaaaaagaaagtgatatttaacacatttctatttctgtgctacacagtctctctctgaggttgcaagtttgagcctaattgatttcttagtcaaaagaaaaaaaagccaaaaaggaaaaaacaaacaactgagagagatctcacattgcaatcaaacctctccagttctgttgtcgactgctgagcttttttttttttttaaagactggccaagtgacttgcataatttaagatcctttctagcactgatcagcccgctctggccaagcagtttgctgattaattattaatcagactgagtttaggatgagtaatcagcaagagtcagtgctaatttgcaaatgtcccccaggaaggttattacttaaaatacttggtggagaggctccatgttaacctttgcaattagccacaggacattgtaactggcaaggcagaagcagatctctcctccaaacaaaccaaccttggatacctactaagtgccaagatgcayattaggggcttgtcacggttctgctggcaatggcaggggaggggaagggcacagaagaaaaagaaatacgtaagtaagcaagaaaatatcaggtattgatgaatgtttaaaataaaacaagatcctctgatagacagcaagggttactttaggctgcatggacgggaaagtcttttctaaagataggaaatttacattgaactctatatttcaaaaaaacagtggtttttgttttttgtttttttaacttggaaggaagatttgaagactgtgaaggagga

SEQ ID NO: 89022 - DNA, 952 bp, Homo sapiens
tgcattcaaaccgtttttataaatgtgcattactctccatgtgtatccagcaggaaaatttccaatgaacactaacatggacacaygatcaaacagagggcattagtagggaaacatacattattcaagcctagctaatacagtgcggcagggggatagccctctgattcactatccctgggagaacaggagcagttccagcaccacaacaacaatttgagcctgatagccctggtaccccagcatcagggcagcagtgggtgaggggtctctatgacccggtgcagcccatttgtggtcaggtctgtggagatggctcagggcacctggccaagtgggaggtgaagaaagagtcttcatcgtctccttgtctctggctctagtgttgctagaggaaggggaatgaggaaggggaccagagcaccacagaggccattcccaggggcaaagctgcttggattttccatgtaggggctgatgtgggcactgtgagatatgtgtggccatgaggggaggcgatgctaagagggagcctccccttcctctcttctcacggttgcattgaggaaaagtctcctgctccttgcctctctcaagggcccagaaagaatccttctgatttctgtgtccaccctctccactcattcctccgcaaggaaagactgcctaacctaatggatctgtgcttaatattcattgggctgcttctagtaatggatgatgtcatcatgcaacgcaagcttgagctaacttctgttcttcctcttttacttcctgctacttagcataggatggagtttgtcaaggtgatgagaactgagtgagaaggaacctgaaaagctgcagggagctccataatgtacatatgaacttggtgattaccgctttgagctaggtctgagaggttatatcaccagtgttgcctgtagccaccacatggtcatcggatgca

SEQ ID NO: 89023 - DNA, 952 bp, Homo sapiens
tgcattcaaaccgtttttataaatgtgcattactctccatgtgtatccagcaggaaaatttccaatgaacactaacatggacacacgatcaaacagagggcattagtagggaaacatacattattcaagcctagctaatacagtgcggcagggggatagccctctgattcactatccctgggagaacaggagcagttccagcaccacaacaacaatttgagcctgatagccctggtaccccagcatcagggcagcagtgggtgaggggtctctatgacccggtgcagcccatttgtggtcaggtctgtggagatggctcagggcacctggccaagtgggaggtgaagaaagagtcttcatcgtctccttgtctctggctctagtgttgctagaggaaggggaatgaggaaggggaccagagcaccacagaggccattcccaggggcaaagctgcttggattttccatgtaggggctgatgtgggcactgtgagatatgygtggccatgaggggaggcgatgctaagagggagcctccccttcctctcttctcacggttgcattgaggaaaagtctcctgctccttgcctctctcaagggcccagaaagaatccttctgatttctgtgtccaccctctccactcattcctccgcaaggaaagactgcctaacctaatggatctgtgcttaatattcattgggctgcttctagtaatggatgatgtcatcatgcaacgcaagcttgagctaacttctgttcttcctcttttacttcctgctacttagcataggatggagtttgtcaaggtgatgagaactgagtgagaaggaacctgaaaagctgcagggagctccataatgtacatatgaacttggtgattaccgctttgagctaggtctgagaggttatatcaccagtgttgcctgtagccaccacatggtcatcggatgca

SEQ ID NO: 89024 - DNA, 952 bp, Homo sapiens
tgcattcaaaccgtttttataaatgtgcattactctccatgtgtatccagcaggaaaatttccaatgaacactaacatggacacacgatcaaacagagggcattagtagggaaacatacattattcaagcctagctaatacagtgcggcagggggatagccctctgattcactatccctgggagaacaggagcagttccagcaccacaacaacaatttgagcctgatagccctggtaccccagcatcagggcagcagtgggtgaggggtctctatgacccggtgcagcccatttgtggtcaggtctgtggagatggctcagggcacctggccaagtgggaggtgaagaaagagtcttcatcgtctccttgtctctggctctagtgttgctagaggaaggggaatgaggaaggggaccagagcaccacagaggccattcccaggggcaaagctgcttggattttccatgtaggggctgatgtgggcactgtgagatatgtgtggccatgaggggaggcgatgctaagagggagcctccccttcctctcttctcacggttgcaytgaggaaaagtctcctgctccttgcctctctcaagggcccagaaagaatccttctgatttctgtgtccaccctctccactcattcctccgcaaggaaagactgcctaacctaatggatctgtgcttaatattcattgggctgcttctagtaatggatgatgtcatcatgcaacgcaagcttgagctaacttctgttcttcctcttttacttcctgctacttagcataggatggagtttgtcaaggtgatgagaactgagtgagaaggaacctgaaaagctgcagggagctccataatgtacatatgaacttggtgattaccgctttgagctaggtctgagaggttatatcaccagtgttgcctgtagccaccacatggtcatcggatgca

SEQ ID NO: 89025 - DNA, 952 bp, Homo sapiens
tgcattcaaaccgtttttataaatgtgcattactctccatgtgtatccagcaggaaaatttccaatgaacactaacatggacacacgatcaaacagagggcattagtagggaaacatacattattcaagcctagctaatacagtgcggcagggggatagccctctgattcactatccctgggagaacaggagcagttccagcaccacaacaacaatttgagcctgatagccctggtaccccagcatcagggcagcagtgggtgaggggtctctatgacccggtgcagcccatttgtggtcaggtctgtggagatggctcagggcacctggccaagtgggaggtgaagaaagagtcttcatcgtctccttgtctctggctctagtgttgctagaggaaggggaatgaggaaggggaccagagcaccacagaggccattcccaggggcaaagctgcttggattttccatgtaggggctgatgtgggcactgtgagatatgtgtggccatgaggggaggcgatgctaagagggagcctccccttcctctcttctcacggttgcattgaggaaaagtctcctgctccttgcctctctcaagggcccagaaakaatccttctgatttctgtgtccaccctctccactcattcctccgcaaggaaagactgcctaacctaatggatctgtgcttaatattcattgggctgcttctagtaatggatgatgtcatcatgcaacgcaagcttgagctaacttctgttcttcctcttttacttcctgctacttagcataggatggagtttgtcaaggtgatgagaactgagtgagaaggaacctgaaaagctgcagggagctccataatgtacatatgaacttggtgattaccgctttgagctaggtctgagaggttatatcaccagtgttgcctgtagccaccacatggtcatcggatgca

SEQ ID NO: 89026 - DNA, 952 bp, Homo sapiens
tgcattcaaaccgtttttataaatgtgcattactctccatgtgtatccagcaggaaaatttccaatgaacactaacatggacacacgatcaaacagagggcattagtagggaaacatacattattcaagcctagctaatacagtgcggcagggggatagccctctgattcactatccctgggagaacaggagcagttccagcaccacaacaacaatttgagcctgatagccctggtaccccagcatcagggcagcagtgggtgaggggtctctatgacccggtgcagcccatttgtggtcaggtctgtggagatggctcagggcacctggccaagtgggaggtgaagaaagagtcttcatcgtctccttgtctctggctctagtgttgctagaggaaggggaatgaggaaggggaccagagcaccacagaggccattcccaggggcaaagctgcttggattttccatgtaggggctgatgtgggcactgtgagatatgtgtggccatgaggggaggcgatgctaagagggagcctccccttcctctcttctcacggttgcattgaggaaaagtctcctgctccttgcctctctcaagggcccagaaagaatccttctgatttctgtgtccaccctctccactcattcctccscaaggaaagactgcctaacctaatggatctgtgcttaatattcattgggctgcttctagtaatggatgatgtcatcatgcaacgcaagcttgagctaacttctgttcttcctcttttacttcctgctacttagcataggatggagtttgtcaaggtgatgagaactgagtgagaaggaacctgaaaagctgcagggagctccataatgtacatatgaacttggtgattaccgctttgagctaggtctgagaggttatatcaccagtgttgcctgtagccaccacatggtcatcggatgca

SEQ ID NO: 89027 - DNA, 717 bp, Homo sapiens
cctgaaaatcgtatagtgaggaaggcagaccccatggcctgtcactacagcctagggattttaagcccctaaagtgcagcaaaacccactgcctccaggaagccaaggagaattatttctgggggacatagctgcctcatagcctactatgaatgaaccatcatctttcatgagaggcaaacattgaccctcaagtaaccaaccaatacgagcacctgtacacaaatgcccacaggtgttggctgggattggctggcttgtggatgatgtcacagtttccctcctctgactcaacaatgccatcagcactgaaaaggctgagccctgactacagctcttgcagacagaaaaattcgctgcaagtacagcactttctagattgctcctggagtgtgggaacaacagtctctcctgtccacgttactgaatccagaaaaaaggtgaacttacgaacatgggaaaagaaatccagctaaagcctaaggcaaatgtctcttcttacgttcactttttgctgaattacagaaacaaattcaaggagcagcagccaaatacctaygttggctttaaagagttctctagaaagtgttcggaaaaatggagatccatctcaaagcatgaaaaggccaaatatgaagccctggccaaactcgacaaagcccgataccaggaagaaatgatgaattatgttggcaagaggaagaaacggagaaagcg

SEQ ID NO: 89028 - DNA, 627 bp, Homo sapiens
  misc_feature (1)...(627): n = A,T,C or G
ccacccgcctcggcctcccaaagtgctgggattacaggcgtsagccatcacacccggtctccgtgaaaatatattaaaaaccatcaaactattcactttaaatggagaactgggcccaggagtggtggctcacaccagcaatcccagcactttgggaggccaagacaggaggatcgcttgagcccaggagttcaagaccagcctgggcaacatagtgaaacctcatctctacaaaaaaatataaacattagccaggggtggtagtgcacacctgtagtcccagctactcgggaggctgcagtgggaggactgcttgagccaggaaatcaaagctgcagtgagccgagatcgtcccactgcactccagcttgggcgacagagagagaccctgtctcaaacaaacaaacaaaaaaaaaggagaattgtatggtatgtgaattatatgtcaataaacctattttttttttaagtctataaagcgctggatctctaggttcccaggaaagcccaggataggtgagggnnnnnnnnnnnnnnnnnnnnnnnnnnnnnnnnnnnnnnnnnnnnnnnnnnnnnnnnnnnnnnnnnnnnnnnnnnnnnnnnnnnnnnnnnnnnnnnnnnnntatc

SEQ ID NO: 89029 - DNA, 714 bp, Homo sapiens
tcaaatattcctgtactttttttagcttaaaatttaaagttctctatttcacgttttaatgtcaaacttagttattttacagagatagttgttgggttttgtttgtttgttttgagacagtctggctctgtcacccagggctggagtatggtggtgcaatcatagctcaggacagcctcgaactcctgggcttaagtgatccttctgccccacccttctgagtggctaagaatacgagtgtccaccaccatcatgagctatttttttaaatttttctatagaaacaggatcttgttacattgcccaggctggtcttaaactcctggcctcaagcaatcctccctcctcagcctctccaaagtgctgggattacaggtatgacgcatctagcctaaagaataattttagatgataattgagtgcaaaatcacattcataagaaggtggctgcacactattcacaatagcaaagacatggaatcaacctaaatgcccrtcaataggtaaagaaaatgtggtacacataccccatggaatactatgcagccattacacaagtttacctgtgtaaaaaacctgcacttgcatccctgaacttaaaagttaaaaaatgaaaagaaggtgactgctatgcttgctatataacatactctaattatgggcgttttgaaaaacaagtgattattgaaatgctattttttaaaaattattata

SEQ ID NO: 89030 - DNA, 817 bp, Homo sapiens
cttttcgtagtcagctgagaagcagaagcaaaactggttaggaatctccaaccttgcccctgtcctctgaacccacattccgagaatggcatggagctactgttttctttcgttaccccttgtctcaccctgaagatacatttaagatagaacaatatactccatctataggctcatgttggtaatttgccctgtctcactctcaaactgtattctaacaagaaacaatgcgtttggcaacattttcttatatcccacacgagtcatgtcccttggcatttaccctgagaatacagcactacgtgtgtggaagcgtgaaaagagtaattgcatgtgaaaagagtagttgcatgctagcaactaaagccacatctttgtagttttgccacttcctcaccttaaattatagcttcaaaatgaaatgtgaaaatgaaattacttgaaggttgccctaagtgtagaaactgtacccatttggggccaaatgatacccaatctttatttgacttcataakattcacccctttcatctctgctgttgaagtaaaagaacaaatgcattaactgatcaaaatttcagaataaaattgattttgtctgtaacatttcctggcactatttggacttgacactcctaaagatgaacaaagagagcagtcgaaaaaccatcccggccttaatattaaggaagcatagagaacagtttttttaaaaaatcagattacttaatgggatgatttaataaaagcttgagtaatccaaagtatatatgtaccaactgatacattttagagggaaaaatgtttgaaaagagaaa

SEQ ID NO: 89031 - DNA, 634 bp, Homo sapiens
agattggatgtagactcgggagacctgagttctggctctgtcttatcaattcaaattgtttaatctctctgagcctcagtttacccacttggaaaagaagagttaggccacatggtctctgtcatcctgggattctgagtcaactgctccccttcagccagatccwagggggcatatccccccaacctgggacccaggcccccttcccttgcagcctctctcagttgtgagtgccacaggccagagggggttgagaggagccaagggggggcatgccgtgggacaaacgggctgtctagggccagtggctaaaggggcgggaggggaggagtcctcagggatcctgtttcaacaaacgtttctttcggaggaggggaaggcgggggagagggggagaaggacctatttaaagctaccctgttgctttggctttctctgtctgccagggtctccgactgtcccagacgggctggtgtgggcttgggatcctcctggtgacctctcccgctaaggtccctcagccactctgccccaagatgggccgtggggtgagtatccctaaagagcaggggtcgcagtctagagggtgagggaggctgctgaggaaggatgaagtgggaatgggatgtggaag

SEQ ID NO: 89032 - DNA, 1556 bp, Homo sapiens
ctatttactcatctaacaagcatttattgaaggcagcagggacctggatgactcagtgacctgcccattaagggctcacagactgatagggagacactcaggggaagtgacaattccgatttggggagagtggcagagggacaagcgaggctggcacttaragagatgggtaaagctgtcctagaggttcgagggaggatcacagagggggtgggaagggcattctagccagaggaaatagcatgacaaaggcacgaggaatgacaccacatgacgtgtctgcctggggaaccaggagccctttggtattacttgcaggtagaaaaggggaggaagctgggatgaggtggggaggtcagcgggggccatgctgagggcatggggctggtgatggtggaagaaattttaaagcaggtggaatgacatggtcagttgcatagacagataaatcactccatccctgtagcggagggcagatgggggaggtccaggaggtagttaggttgttgtaaggagaggaagagcagattcaggtggcatttagggactggaatcagtgggatttggtgccagtgggggtgtggggtgtgagggacaaggatgtcaggcttgtctcgtcccctggcttgggcagctgggtgaatagctgtgtcctgcatgagatggggtggggcatcttcaagggggcaggtctgggtgagctgatgaggtcagcttgggagtggcgggtatgagatgcctgggggcctcccagggaattgtctagtgggcatttggtgggactcagaggcatgttagggtggaggtgtggttctgggagttgccaaagtctgagtggtggtggggtgggggagtatgggatggggaagttgtatcagtgaaaaagaacatgaaattccatagactccaggatccacaagggacctttcagctcagacactctcagtgggccctggcctgtaggatgtgcctcttgggcaccttgacagattcccatccctggcttgctctcagccgtgaccctcccaccgtcagaggggactcacctatccgggacctgtgctgggcagggctagggaggcccaacccacgctcattcctgtgatggacgatcactgagaactgactcctgctgggcacagggtctcctggaattcctctcctcctgctttggccaggtggttgcacaacccagaggcccctggagtagcctctgcctttgggcacagcccatcatgttctgggggcacacactgtgtgtgttggggggtgatgggtgagcctggatctgaggttccagtgctcaggtgctcactgagtagtcttggcatcctctctgaggtccacctaatcccccctgccccccgttttcctatcggccactccccacctggtctgcaaagtactgggaaaatcatatttattaagaggtttgacatatactgttgccatatacaaaatccccagtagctatcaacctccctcccctgaggctcaggacccagggaccaaactacccccaacctcccacattggcccctgggcgagcttcctga

SEQ ID NO: 89033 - DNA, 1483 bp, Homo sapiens
atattttcagatgccattagcatctaagatttagagtcataaaaggtcaaaatctccttgtccttagatatcttccagtcctaagacaacaacatgcggttcaagtatgaaattgttgcctagttttccattgaatgggcgtagcataaataactttacctcactgaggtcacgtgcagattctttccagtttttaactgttatgagcaacatcctatgcattagatctccatatacatctctgattgtttctaagggctaaattcctagaggtagatttctgggtttggttatgcatattcataaagcatccagtatctgagtgtcattgtcctcatctgtttgatggaagaaacttgacctcagtgacctgcatgatttcttctcctctccccagcttcccattgtattcaaacacccctgggcaggatgagccctgaaactaacattatccaaagtccttagtttgattaactcagacctgaacctcagaaagcagggccctgagagaagtgggagctggaaaaggcgagcaatgagggtatcagatcttccttcaccctcacacaatcccatacaatggatcctctccctgcagccttgtggggcaggtgagaaaactgttcccaatgagtacctgaggccaactctgcatctggactgatttcacagcccagagccctgaagctgtggtgctctgcccactacccgtcattcctccaggcaagagagatagcaggttgaccccctgttcacctccttccccctattcagatgaacccatgtctgagatctgactggccacctgtgactctgcctcactctggagcacaacatgtggagggaagagcctgggactcagatgcacacggggaacctgagctctaagctgggctcagctactgacccgctggatttcctcagacataatttcacctctccaggtgaagtgagactgtccagctgttcgaccaaacaagaaatttttttttcttcctgcgcatatagcacaactacatctcccagcctcctcygcaggtaggtgggatcatgtgactacatcccagccaatagcatgtgagcagaagcatagcacatagcatgtgctatgtccacttcaggcctttgagaacctcccatgaactcctcgcatttttgctggtccagtgcagatagtgcagatgagcaggaccacctgcccttctttccttgcccaggggaacatcacacatagcagcttgctccatcagagcatgcaggctaagaaggcaatagaaagagttggccagcaagatggaaactgggtgttgacaggtgggtgccctccccaggggctatcccggaacagacccagcctcattccatctcatgatgcctaccaatcaagaacacctgctttggacatacaacttgattgcactggagccattgtacatttggggttggattgttagtgcagttcatgttctcttgagtataatca

SEQ ID NO: 89034 - DNA, 580 bp, Homo sapiens
ggcagcagagtgagtgtctcaagaaaaaaaaaaaaaagtgcaagaggaaggcagaaatggaggtcagagtaaggtgatgtcacttgagctggcttaaagatggtggaaaggagccatgtgccaaggaatgtgtgtggcctctasaagctagaatgggtaagaaaacagtttctcccctaaagcctgaagaaaggatgcagcctgctgacacctggattttagctcagtaaaatccacttcagacttctggcctccagaactgtcagataataaatttgtgttgccttaggccaccacatttgtggtaatttgttcagcaacaataggaaactaatacatcctcctttttgcccttgccccataccatgcccagactctcctgtctcagacaattcagttccggcccaaaacctgcagcacatctcactcagttaaacaaaagccctgcagttgcccaatctatcctctttttttttttttttttttttttttttttgacacagagtctcactttgttgcccaggctgcagtgcagtggcacaatcatagctcactgcagcctcaaactcctgggctcaag

SEQ ID NO: 89035 - DNA, 622 bp, Homo sapiens
tgtcaagtgtcagcaagttatccacatcaacacagtctatgttggcaatgtggcctgggcccacattctggtcttgtggtccctgcaggaccccaagaaggccctaagcatccgaggacagttctactatatctcagatgacatgtcttaccaaagctatgactaccttagttacaccctgaacaaagaatttggcctctgccttgattccagatggagccttcctctagccctgatatgctggattggcttcctgctggaaatagtgagattcctgctcaggccaatttatacctgtcaactccccttcaatcgctacaggagatatcatcaagcttcatcctcctggcttcatacagaaggtgacaagggcacaagcccagrtcctgctgcctccctttcacacaatggccaacttattgtcttcctcgtgtcatcaaaacctgtgcagtcactggcccaaccagaagctttctgtgctaaccatataccaaaggacagacaatgtgatttgccgttaccaaatatcagtggctaattctgaacaatttgggatctcttttaacttgagggtctcttttgactactagagctccatttcccctcttaaatgagaaagtat

SEQ ID NO: 89036 - DNA, 622 bp, Homo sapiens
tgtcaagtgtcagcaagttatccacatcaacacagtctatgttggcaatgtggcctgggcccacattctggtcttgtggtccctgcaggaccccaagaaggccctaagcatccgaggacagttctactatatctcagatgacatgtcttaccaaagctatgactaccttagttacaccctgaacaaagaatttggcctctgccttgattccagatggagccttcctctagccctgatatgctggattggcttcctgctggaaatagtgagattcctgctcaggccaatttatacctgtcaactccccttcaatcgctacaggagatatcatcaagcttcatcctcctggcttcatacagaaggtgacaagggcacaagcccagatcctgctgcctccctttcacacaatggccaacttattgtcttcctcgtgtcatcaaaacctgygcagtcactggcccaaccagaagctttctgtgctaaccatataccaaaggacagacaatgtgatttgccgttaccaaatatcagtggctaattctgaacaatttgggatctcttttaacttgagggtctcttttgactactagagctccatttcccctcttaaatgagaaagtat

SEQ ID NO: 89037 - DNA, 1507 bp, Homo sapiens
  misc_feature (1)...(1507): n = A,T,C or G
ttttttttaaatttattgcatttggcctttattctcaactcaaaagcttggtataagtgcaagccttttggaattttaaaaaaaawaaaatttttctttgggtctgaaatctagattttcctcagaccttatttcaacttggttagttcaattttcttctttaaaactccttattttcatttaactaaggaaagtgtgttcatcatgtaccttcttacctcttgaaatatttgttttgtttagccataaaagtccaaatgcaatttaacacctaaaaagagaagaggtgcaattgtaaaactgtaacaattttgctaaattgagcagtacttctttaaaaatcttaggaaatatgaattcttctattatgagctatacacttgttatcactgaaagataattactacttttctaaactcagccagtgaggtatataatcctaatgtcctttctccaaggtaagaaatggtcatctttctggatattaaaagacaataaatacatcaattaaattaaaaagatgaagattattaaagtgatttaacagatttaaagattattagagttcatttggagctgactacagctccaaaggatgaatattaaatgaaacttattaaataatttttaattcaaatcaatttcatattcttgagttgttcatcaaaaataaatgctgacatgttatcatccaacaagttcaaagcacttcctgtttggtaaaaaaggagacctaatgttctgcataatcacgttgtcttgagaaaagacttcggttttacagaaattattctctctcccatgccaggaattgaaggagggaaaagagaaaaaaaaaagttcttgggtagaaaaataattcttgtagtatcattattaaatttggctacaaacagtattggtatgctttatgtctaaaatagtaccattggaattgctttaatggatgaataattattttacaatgtaaccatggattttatcaaaatacctcccttacgtaaggcaaaagtgagcaagtttaaaaacagtaactcatgatcacctgctactgtaaaaatccagtgatatgcatacctttcattcagaagttagtaatgccctctagatctctctttttattctgcacctttgtcaaccaacccactttatggctattaagtccctaaagcttctgaatcctctacagctcatctcaaaacaaaagctaaccacctgacatgcnagggctggttgtatgaaaatacaacaatccctctccaagaccatgataacctgagtcaacagcgaacacattagtgaaatacaattgttggcttatggagtaattccagttagccactgagcatgaggtatcttctattcttccattgttaaagataattccatttgtngccagannnnnnnnnnnnnnnnnnnnnnnnnnnnnnnnnnnnnnnnnnnnnnnnnnnnnnnnnnnnnnnnnnnnnnnnnnnnnnnnnnnnnnnnnnnnnnnnnnnntggtgct

SEQ ID NO: 89038 - DNA, 1047 bp, Homo sapiens
tgaaaaataattctgtagaggtcattgcaatgttgagttcttgatctttaaatccttttaaaattttagatgggcattgctaacgggagagatacagttcacaccaaatagataccayggatcattctctttttaaagtgttcctctttgagattccccaccccacctccccccactttgctgtgcctccattctcaacaagcatcttaaacattgtttatcccccatcctctgtctttggccatcttctcaatatataccctccttctgagtgttctcatccaaactcatggctgtatttactatccatcactgtagtttcctaaattaatattgctatttaaaattgagctgtaccctgaccttcagagctatacataaaatgggctgcccaacatctacttgaatgtcccataaggattcaaattcagtatagcaaaactgagcttaatatatcttctccctgaatttagttccagttcatttcatggcctcaaaaccccgtatctgggaaacataccagaatctttccttaccttcttccacaaccaaccggttactatatgctataatatttacctttttggcatttctggtattcgtcttctcgttaccatcttcactgctgttgccctcattgaggcactcatctcttacctggactattataagagattctactttcaactgaacaaacacattgtagccagaattgcttttcctaaatgcaaatcaaatcacgttcttccccatatccctcttttttttttgagacagagtctcattctgtcaagtgattctcctgccttagcctcccaagtagctgggattacaggcacacaccaccatgcctggctaatttttgtatttttagtagagacggagtttcaccatgttggccaggctggtcttaaactcccgacctcaggtgatctgcccgcctcggcctcccaatgtgttggtattagaggtgtgagccaccatgcccagcctatgttcttccccttttaagacacttcagggttgttgttgtgtgttttttttttt

SEQ ID NO: 89039 - DNA, 829 bp, Homo sapiens
tcttggaggatgcagtgaggggcagggatcggggagttgggatcagaagccaagaaaccaggttagagaccaactcccaggacctggaacaccatgcacctgccacacaaggggaagcccttggggactccccggagggaactcagaatctccagagtyaggcacctggattcttatgctaacctgtatcaagaccccattgcaggaacttgggacagtcatgtgacttctccggacttcagggtccacacctaagggttagcttatctccactgcctcctccagtaggcaaccttaggcttatataatccttatctcagaaatccctcttagaactgcaggaccaggaaacaaatacacacacacacacacacaccattcaagtctattttcatacttttattcaagattcgtcttcccatgagacactctgggctgtcaggctgtaattagactttctcccaggctgtgtggagtgagagacagagccagattagccccctgtaaacaaatttggtcagttctctcctcaccagccttgttctggttgagcggatttcagcagctcctgggtgaatgttaatgccccccacgtacacagttgcaagaaaaacaataactgtgcatttgtgcctccatttcttgagaacgctctgggtttcacttttcacaggtctttgtgatgtagcactaggcagtggggtgtggcatggcagggaggcagtgcaaagagactagaaaaaccttaaggcaggaggtagggcacctgggtttcaaggcaagctcagccactaattgtctttgtaaccttgcaaaagtcactttagct

SEQ ID NO: 89040 - DNA, 591 bp, Homo sapiens
caggcagagcctggtgggaggagctgragctcaggtgctgcctgcgccccctgctgctgctctgccgaggattttctgaagaggaacctgggaggcgcatcccctcctctcccacactctctgttttgggtttcccactttgcgtctgctctgggtttttttgtagttcaatatttttattggctcatgtatttacagttaaaaccattggtggtcgggcacagtggctcgcacctgtaatcccagcactttggaaagcagaggtggaaggatcacttgaggccaggagtttgacagtttgagaccagcctgggcaacacagtgagatcacatttctacaaaagaaaactttaaaaatgttttaaaacacacacacatgctcgcgcttgcacgctcacacacacacacgcgcatgcacacacacacatgcacacacacacaacctgtggtcccagatactcaggaggccaaggcaggaggactgcttgagcctgggagggcgaggctgcagtaagccgtgattgcagcactgcactccaacctggaccacagagccagatcctgtctcaaaaaaaaaaaaaaaaaaaaaaa

SEQ ID NO: 89041 - DNA, 591 bp, Homo sapiens
caggcagagcctggtgggaggagctgaagctcaggtgctgcctgcgccccctgctgctgctctgccgaggattttctgaagaggaacctgggaggcgcatcccctcctctcccacactctctgttttgggtttcccactttgcgtctgctctgggtttttttgtagttcaatattwttattggctcatgtatttacagttaaaaccattggtggtcgggcacagtggctcgcacctgtaatcccagcactttggaaagcagaggtggaaggatcacttgaggccaggagtttgacagtttgagaccagcctgggcaacacagtgagatcacatttctacaaaagaaaactttaaaaatgttttaaaacacacacacatgctcgcgcttgcacgctcacacacacacacgcgcatgcacacacacacatgcacacacacacaacctgtggtcccagatactcaggaggccaaggcaggaggactgcttgagcctgggagggcgaggctgcagtaagccgtgattgcagcactgcactccaacctggaccacagagccagatcctgtctcaaaaaaaaaaaaaaaaaaaaaaa

SEQ ID NO: 89042 - DNA, 591 bp, Homo sapiens
caggcagagcctggtgggaggagctgaagctcaggtgctgcctgcgccccctgctgctgctctgccgaggattttctgaagaggaacctgggaggcgcatcccctcctctcccacactctctgttttgggtttcccactttgcgtctgctctgggtttttttgtagttcaatatttttattggctcatgtatttacagttaaaaccattggtggtcgggcacagtggctcgcacctgtaatcccagcactttggaaagcagaggtggaaggatcacttgaggccaggagtttgacagtttgagaccagcctgsgcaacacagtgagatcacatttctacaaaagaaaactttaaaaatgttttaaaacacacacacatgctcgcgcttgcacgctcacacacacacacgcgcatgcacacacacacatgcacacacacacaacctgtggtcccagatactcaggaggccaaggcaggaggactgcttgagcctgggagggcgaggctgcagtaagccgtgattgcagcactgcactccaacctggaccacagagccagatcctgtctcaaaaaaaaaaaaaaaaaaaaaaa

SEQ ID NO: 89043 - DNA, 669 bp, Homo sapiens
taataagtatatatctaataaatggatatgcacaattttttttctaggaaaataattctatagggctaatgtttcacttgcctcactttaggaaatgttgaccaagctaagccacagtgcccaaaaccattgataaaactttagtcaggtaacctgattcagatactggaattataaaacgatgattgacatgttaaaggmtttaatttaaaaaaaaagtacataatatgcaagaacagatgggtaaggtaagaagagagatggaaactctgggaaataacaaaacagaaatagtagaactcagaaaaaacctactataacacaaataaaacatgtcctttgatgagcttatcatggatgggagagaagggaagaaagagttgatgagcctgaaaatatggcaagagaaacttgccaaaatgagatggaaagaaaaaaaattgagaacagcaccaatgacgacagcacgaatgggacatcaaagatctctaggacaatgtgaaaaggtgaaaaacatgaatatttggattaccaaaaggagattaaagagagacagatcagaagaaattgtgaagtaataattgccaaggaatttccaaagttaatggtagacaccaaatatggatccagaaagctcacccaatagcaagaatgttaattatcaataaa

SEQ ID NO: 89044 - DNA, 1015 bp, Homo sapiens
tgatccgcatcacatgcagggccagggagcacacatttagatggttagtcaaatctaaattatatttacaagaagccatcagcatgtgccatggaaatccatccagctctaaagtctatgctgttggtctggatgtaggcagttctggctgtgtgtgtgaggaagagagaaagagagacagacatacccaaacagcacatctgccttcaaaaccagtgcacccagacacaccagtctcctggggctggccttgaaaagctttccaattaatagaaatcagtgttatccaaaaaggcacattatggagttgaccccatccwtaagcattcttgcccttgagatataacaacctttaatttcaactttcataaaactgttctctttaggaatgatcctgatttttcaaaagctgttgaattggggtcatcttcgtcttactccaggtttgagaccaggaaaacacagcctgttcatttgatgctgaattccacaagtcgttatgtctcttcagtttgaaggaggctgttttctaaaagcataaatcataagccagagggagagcccttgggataattcccctgaatgtttcttttctaaagacaaatctatgcccatgtctttaaatagttttaacacagctcctgaaaatagcaaagagcattgcctacacatctgcataattagttgcagggaataaaccccaaatccacataccctttcctgcaacacccagggaggcaggttccttaggctcagcactccacacaggtccctcgacagcgttgagccgaagcaacgaaggaaccaccattgcaacaggcttggctctgtttcctggctctgtctcggccagcagagtaggtgggcagcgactctctttctggtaaagattgttccactttacccagcacatcagccacaattaaggcttcactaaaataaatgcagagagtggggaattgaatcaggagcccctagttctagactcagccctgctactaactagctccccatc

SEQ ID NO: 89045 - DNA, 1015 bp, Homo sapiens
tgatccgcatcacatgcagggccagggagcacacatttagatggttagtcaaatctaaattatatttacaagaagccatcagcatgtgccatggaaatccatccagctctaaagtctatgctgttggtctggatgtaggcagttctggctgtgtgtgtgaggaagagagaaagagagacagacatacccaaacagcacatctgccttcaaaaccagtgcacccagacacaccagtctcctggggctggccttgaaaagctttccaattaatagaaatcagtgttatccaaaaaggcacattatggagttgaccccatccataagcattcttgcccttgagatataacaacctttaatttcaactttcataaaactgttctctttaggaatgatcctgatttttcaaaagctgttgaattggggtcatcttcgtcttactccaggtttgagaccaggaaaacacagcctgttcatttgatgctgaattccacaagtcrttatgtctcttcagtttgaaggaggctgttttctaaaagcataaatcataagccagagggagagcccttgggataattcccctgaatgtttcttttctaaagacaaatctatgcccatgtctttaaatagttttaacacagctcctgaaaatagcaaagagcattgcctacacatctgcataattagttgcagggaataaaccccaaatccacataccctttcctgcaacacccagggaggcaggttccttaggctcagcactccacacaggtccctcgacagcgttgagccgaagcaacgaaggaaccaccattgcaacaggcttggctctgtttcctggctctgtctcggccagcagagtaggtgggcagcgactctctttctggtaaagattgttccactttacccagcacatcagccacaattaaggcttcactaaaataaatgcagagagtggggaattgaatcaggagcccctagttctagactcagccctgctactaactagctccccatc

SEQ ID NO: 89046 - DNA, 2463 bp, Homo sapiens
tgcattatgcctatgagctcccaagtgagttaaatatcctttgcatttatactagaatccatttagccaattttatttcaaaccatcaagtcttgcataaaccattttaacctgagagcacaaggaaatcacaagtaagaaatcttaatttttatttaaaatttcctgaatttgaaaatatcgtatgactccagtccagagggcaccagcttgcaatatctgatttagaccatgaatataccatagattcttcactttttagtcattacaaactgttcttgctaccaaggcaggcctaagaaaattgtttgtgctttgcaaagtattttaaatttttatatgattttaaaaaacttagtctacatttatcatcaaagcttgtcacagaagacatattagtttcagtgacattaaagctttaaactggtaaactctttgagggaatgtcctttgcccttaatttttctcatgccctcccagagcatggtccatgcaatggtcacttggtaccattgggtgccaagataggtacttgctgaccttaccagcacttttcatttcttgacttctctcttgccctgttgatgttcagggcccacatggaatattcagcaaattcattatttcatctctgtcctggggtagtgtatctactctctttttagtgtgctctaagattagactctctaacactttaaagtcctctctcaaaccacacagatatattctgccttggattcccaagcaatcttactgtgtatgggtgttttaataaagatcaaaagtgaccagcagctctctgcactctaagaggaacaaagactgctagtattagtagctgaaactgctgatgctgttcacgggcctgtttctttatttattattattattttgagacagggtctcgctctgtcatccaggctggcgtgcagtggcacaatcatggctcactacagccttgacctcccaggctcaagcaatcctcctgcttcagccaatttgggaggcacacgccaccatgcctggctaatatatatggtttttcatacggaatgggtccctactacgtcgctcaggctggtctcaaactcctgggcttaagcgatccttctgccttggcctcccaatatgttgggattataagcatgagctatcgtacccagccacctacttcttaaagtcaaatctttgcagtacaggggacccccaatcattttgtggatactaaatctacttccccaaactgataggaagtaaaggaatgcagctaacaaaaactctgaaactgttactctttcatgcataggtaaatatgcatttagtcaataaacatttatgaaatactgctaaagtgtcaggaatgatgctagatattagagacagcagaaggagcataacttggactttgtccctaagatctttcagtctagcgaaagcaaacagtgttgcagacaattcatgaaaaaaaaaatgtgttgaggattatagacatggaagggaagaagaggaagaagatgcttcattcttcctaagggtgaagtgtgaaaaaggcttcagagaggtggtggcacttcgattgagtcttaaaagctgagccagccttggggggtagagggaaggcaagaggggaagggataaattataggcagaggagcagcaaaagggacccaaaaatgtaaactatcctagaccataagaagtactctgagaaattcacaatggttctagtgtatgtgtttactgggaggaggggtgatggagaaatgaggccgagagagaaaccattcagagatatacggctggagaactgagcagctgccagaccttgaggtccctgtatgtatgctagggagtctggaataaatcccagagacagtgaaaaagacattgagggatttcaagtacaagagtaacacaatcacattgttctgctagaaagaacactttggacatgctacagaagagggactgaagggctacagagtgcgactgctggattagttcaggcagcagaaatccaaggtgtgaatttagaccctggatgtagagctgaacatgaaatcgaggaagaaatcttgatgatcgagtggttgtttgggggaaggggcaacagaatagagaggaagttgattcccaggttgttgtttagtggctgggtaactagcgragctattcaccatgcaaagaaatagaagaggaggaatgggatcttttttgcttaaaaacaacagtaacagaaagaaatcagtgccttcctgattatattctaggctaggaaatcatatcaaatgaagttgcgcttcaggcagtcttagaaaattctttttctgtccttgtggcttttgaatgtcatgggttagattaccatgtcaaagatgaaaccactttaaatctgttttggaaaaagatgggatataaatatgtaatataaaaaacatcaagatatttatattttaatctatt

SEQ ID NO: 89047 - DNA, 639 bp, Homo sapiens
atgtacccagaaaggatatgaaggatgaaaaaatgaggcaggaatggagggaaaggggaggtgttcaacataaagaacacttagttgtcttgtctagataaaaatagaagagttacgttctacaaagctagcatcagcctgaagccaaaatctggcaaagacacaatgaaaaaggaaaacttcaggccctgatggacatatgtgtaaaaatcctcaacaaaacagtaggaaaccaaatccagtagtacataaaaaagttaattcaccacgatcaagtaagcttcatttctgaggygcaaggttggttcaacatatgcaaatcgatatttatgattcatcacataaacagaattcaagagaaaaaccatatgatcatctcaatagatgcggaagcttctgagaaaatccatattccttcatgaaaaaatcctcaacaaattaggcatataagtaacatatctcaaaatagagtcatctataacaaacccacagccaacatcatactgaatgggcaaaagttagaagcattctctttaagaacaggaataggacaaagatgcccactctcaccactcctattcaacatagtactggaagtcctagccagagcagtcaggcaaaagaaagaaataataggga

SEQ ID NO: 89048 - DNA, 2061 bp, Homo sapiens
gtttaccaagtgcccactatgtatcaagcaaagacttaggcactagagaaacagctgtgagcaagacagacatggtctgcatccttacagcctaaacatgcaaacagttacacaaataatcagttagttacagttgtgagaagagctctgtgggtgagggacggcatactctggaagtgtaactgttagctacaacccataagaaggcatagggtctgggaaagtagccctgagaaagcatattggagaatgacatgaggcagaggacgctgcatataacacacactaggtgtcaacgagaaaataaaatcgtgatttaaccattacagtttgtttactagactcaagccttcaaaacctgggatctctaaagaaaaatagaataaaaagtagaaagtatggaaaccacaactccagagctcccccacctcacccaccccagccactgaagctgagagcggggaaggagggtgttaggaaaattcagctttaccatcacatacaaagagattaaaggacatcctcacaccctggctcgtgaagtgctatttcttaagattaagcagcagacccttcccaagtttaaatagggtaacgytaagttttggttgttgaagcagttccatctgcactaacctttacaaaccatgactgtgtcagtttttccaagcaggagaaatggatggaaagccaggccacatcttaatagggccctggtgagctaatgggtgtgattatttcattgtctcggattcacgccagccgaggctcatcagatacgggcataatccaggagaaacatgacctcactttcgacatgggactgtgcattcagatgccaataggaatttagtgatccctcagcgcaggtaaaactgagctctttacggtttcagctaatgagaagcataccaaagttacctaaatcagtaaagctaatattgacattaacatactagatactgttagggtatgggaagccaggaaaaacttctgagaccatctgtgctaagtgtgacacatctataatgaggcgtgtatttaagataaattgccatctctttaaatgattaagtaccagatttatggaaagctataaccccaccaggaccacagggttgttaagtggttagggctataaaggtgagaatctcaagatttcagttgtgccacaaattgtccactgacttgcaaaatctttgccaaggaaactttgcctcagttttcccaatgaaagaaaaggaagtctatcacctaggttgtatagctctgagaagagcaaaagtttcacagtcaggaacatgcatgccttcactgattccttctcagaatcttctcattatatcatgttgacatccactggaagataccaggaagtacaacacaagactcaatgcattccagttcagcttacagcacatttgctcattattcattcaatcattttttttctgagcacctattatgtgccagagtgagaccctgtcctaggcactaggaaaatcagaatgattaaaaacagacttgctctctgctccaacggtgcttagaatctgctgagggaaagtgccaggattgactatatgggagttgtgtgatattgggcaatttacttaatttctttgttgagtttcatttcctcatctttaaaatgaagataattaacatgtctggtatgaaagtgcttaaaattacatcacacacaaatataaggtgcccaataaatgtcggttcttttcttcctctctccagattacaaagataaggcttacagagtttcagctcttcaaataaaaggtgcttcacaaatgcaaatgaccaagctattattatcactgactacataagaggcagtgtggtatagtggaaagatctctggctttggaaacaaagactgaacttaaaatcttttttaaaaattcttatttattatactttaagttatgggatacacgtgtagaatgtgcaggtttcttacataggtatacttgtgccatggtggtttgctgcacccatcaacccatcatctaggttttaagccctgcatgaattaggtatttg

SEQ ID NO: 89049 - DNA, 1015 bp, Homo sapiens
tcactttattgtttaatcacctatgttaattcaccaaaccattactttatgcacagtacaaatttctgaaaataccagagtttcaaaaattctgtttatcgatagaatttgttttggcttctataaaacaaggagacatggtactttgcagtctcaggggtaagcaaagcggtatgaaaaactatcttgtacccaaaatctttcctcatgaaagtctcaactgtggcaatgtaggtttttttgcaccaagtttgcaattgggaagtactgcgatttgaaagtagctgggttcagtgcacaaaggctccgcctattttcagttgtttaccaggaacacaaatgtctctaggttgccctctctcctcccagtggtgcccaggactgtgcaagaaccccagaggcatttgcctttcacaaacacactcattcaaactagagataaaagtgagaaggagctaacaacatttctgttcgtttctttttttttttaattttttttttgagacggaatctcactctgtcacccaggctggagtgcagcggcacaatctcagctcactgcaacctctgcctcctgggttcaagcaattctcttgcctcagcctcctgagtagctgggactacaggcgcccaccaccatgcccggctaattttttgtatttttagtagagacggggtttcaccctgttagccaggatggtctcgatctcctgatctcgtgatccgcccaccttggcctcccaaagtgttgggattacaggtgtgagccacygcgcccggcctctgttatgtttctttcaggtctggtgcttactctttttcagagcagtgatggttatgaaagaacgtaggttctagaaccagaaacttgatcccaagctccccaacttcgcctctctgtcctcaccttcttatctgtaaaatggggctaacacttacatcatcagattgctatgaaaattagttaataatgaattaatatatgaaaaatccttacaaaaatggcttgatgcat

SEQ ID NO: 89050 - DNA, 668 bp, Homo sapiens
agccaggttaatatggataaaaccatgcaaatcagtcaccaatgggagaaaaaaatcatagtggatgtcctgtagacagtgggccagtgagtacttcattatgcaaaacattcctttttaattttgctaaagtatatgtttttattccaaatttaagttacaatagtagtctgtggggctgaaattaagaatgtggcttttttatcctttcaaaaatagattatttggctggatgtggtggctcacgcctgtaatcctagcattttgggaggctgaggcaggcagatcacctgaggtaaggagttcaagaccagcatgtcctggtgaaaccccatctctactaaaaatacaaaaaattagccaggtgtggtggcaggttcctgtagtcccagctacatgggaggctgaggcaggagactcacttgaaccyggggaggcggaggctgcggtgagccaagatcacaccattgcactccagcctaggtgacagagccacacttcatctcctcccacccgcccctcagcaaaaaaagattatttagttaggtatggtggctcatgcctgtaatcccagcactttgggaggccaaggtgggagcactggttgagcccaggagttcaagaccagcctgtgcaacagggcaagatcccatctctacaaaaaaaac

SEQ ID NO: 89051 - DNA, 694 bp, Homo sapiens
tgccattcctagcttttctttcccaacatgccaagctggaaggcaatcaatcaacccagggctccaaccagggtttggacaaagtgtcattatccctcaccagccaattcccarccactatgctctgtgaacctatctcaaaagggactttagaaaataaacacagataggaatatcatgcaagttatagttcatcagaaggcataggtggtggtgctggagacaggtataaaagaccataagaaaagacctataaattacttattaacttgaccactgtgactccctgatatatccaggtattaactcttttccttctcctaccctccatcagacatactcacgacttgctagtatctggtgtttatggattttacaaagtactatattcccaggagctgaagcccatggtccaaaatactgttttagtacaatactatttcctatttttcattgcaatgtatactgtgttgtcctctgcagctgtattattcatgaccctgccaattgttcttatcaactaagaaacgatgttttgaaatactacccctttgtgagctggagctgtccataaaatattactcagaggatagtgaagactcctattagagcaaccattaagctttcattccttagaattaataatttcaggttctttaacctactatggtctgaatgtttgtgtcccccccac

SEQ ID NO: 89052 - DNA, 843 bp, Homo sapiens
caaatgatgacaaaccaccgagagggctatgggaatgaatgttctaaaagagccaggaaccaggaagctctgcttcctggaatcaaatacaggccaaaaaacattctcacctggtagcctcaaacatatcacatggttagaagatgctgccaaaaactgagatcaaaagaatggagagaaggaggggaagagagacccaatattttcccctaggaccaaggtaatggcacttagtagcgtgacccactctatggcaccttagaaacaaaaggtcaccatccaagtgcaaacaaacttctttccctgctgtgactgcatttcataacttttgttgcacttcctaatatggagccactccatctatgaggtcatttgttttcctggaaattcagttacagggcttgccaatcattcagatcatagctctggctaggaaagctgtgtgaggaaagaaatgcattaagctctttactgctctctgttaggtcagtcaaagcatttgaatcccatacgattgtctttaaaaaaaaaagaaaaacctatgcatacaaagataacaagttccaaatgtctttttctaaaggtatgtttatttygaatcatatgtttttaatctatgacaaaacagcctcagttataattattccaatgctacatattatccaaaagccaagagataacatgcagaagtgatgaatgtgttattggtgctacagaatcaatctgttgattcaaaacaacagagtcacacagaaaaaggagaaatattaagcaacagatccaatttgcattatgcctgctcgcagaacagaacagtttcaggccttccaggtcagtagcaaa

SEQ ID NO: 89053 - DNA, 762 bp, Homo sapiens
tgaacgacctcctggcctcctacctggacagagtgaggaacctggagaccgagaattggtagccggagagcaatatctgggagcacctggagaagagagaccccaggtcagagactggagccattacttcaagaccattgaggaagatctgagggctcatcttcacaaatactgtggacaatgcccacatcgttctacagatcgacaatgcccgtcttgctgctgatgacttgagagtcaagtatgagacagagctggccatgtgccagtctgtggagagcgacatccgtgagctccgcaaggtcattgattacaccaatgtcactcagctgcagctggagatagagattgaggcctcaaggaggagctgctcttcatgaagaagaaccatgaagaggaagtaaaaggcgtacaagcccagattgccagctctgggttgactgtggaggtagatgcccccaaatctcaggacctcgccaaratcatggcagaaaactgggcccaatatggcaagctggctcggaagaaccgagaggagctggacaagtactggtctcagcagattcagaagagcaccacagtggtcaccacgcagcttgccgaggttggagctgctgagatatgcttatggagctgagacatacagtacagtccttggagattgactggactccatgagaaatctgaaggccatcttggagaacagcctgagggagatggaggcccgctacaccctgcagatggagcagctcaacaggatcc

SEQ ID NO: 89054 - DNA, 822 bp, Homo sapiens
agctcctttgaggcagaggtactttgtataatgcatttcatatttgaaaggggcattggagagggccaagattgctgagtagaaaagggcatccaatttttactatactaaggcactaattagtcaatctcaactggactaatgtgccaaatagtatcccagagagtgaatttcagagtaatatgcatatagcattggccaccccattgatggttcaaattgatccagccagtcaggctggcttcatatgtgagggaaagatggcaattcctccaggtagagggggcagtgtgctgattgtgagcttaggaatagctgtgtttgctgatcagaacctcccagttgctcttgtagtctgtagggagaaaaaaatacacatttatcttggagtcaaggtgttttccaaaatccgtaggcccaagttgttaattcctgcatgcctctcttctgccacttcccttttctaataaagccactccactctttccactatggttaccagaagctgggagccatgttagggtaaagggcaaaggtggagaaggagayctacctcacacacacacacgcatttcattatcacttctctaattccgacttctgctaaacatttacagaacgctaagaatcaagtcagtgaatgtttctgctgtgttggattaacagcctgtttcagattagcacaaatcaaaggaataaaatcgaaaaacacattggaattggcaaaaaaaaaaaaaagagaacacataatttcatgttgatatggagtctaaagaaggctgaaagcatcattcctggaggccctcaagtccatggctttct

SEQ ID NO: 89055 - DNA, 1300 bp, Homo sapiens
tgtgtgtggcatgaataaacaagtgaataaatgaacgaatatttttcaggcatatggggcccattaagctgagagttcatagtaacaaaaacactctgtcaagtactattacacctagagattgctccattttcaccaaaatccatgttttcttctccttgagtatataggtaatccccctttttgcagcctcccttgcattggatctggccctatgatgagatctagccaatggaatatgagtgaaagaggtatgagccacttccaggtctcactcataaaactgtccatgctcctccccttcgagctaattggaattgagacaagcacagtgaacttgaagttcacacgtatgtgatagcagagcctcatcaacctgagaccctgaatggcagtggagacttctcacaatcccagaagatatgtttattattatcccaactttaccaatgagaaaactgagtcagagaagttaatcatagataataaggggcagtaagggacctgaactggagccacttctgcctcagtcatcatattcttcttcaaaaatactcagaagctttaaaggagcatctgaatcattggcctataacctctcccagatgaccgttcccataacctgaaattaaagtaatgatttttttcaatatgccattttccrtctgtccccattcacttgctccctcccttctaacagatcatttgcccctgcaagtgcatatcatgatggcacacccacttagtgagactcccccagaactgccataacttctgtcttatcctagttattgtgtctacctctcaaacaatgccatcctgcctgttcattaactgatttttgacagtgacatagaatagagcttacgcattctgtaaggttttctccatttaaaacaaaacaaaacaaaagcacaattaatattgcacaaggttggccaaaaaaccctaaaggtttttatattttgctacaaaaacattcacattaaaatattcagaaacaggtaggtgaactcatttaaaggttatgtaatgttcaaatatgtctataacatacaataacacctaatataaaagcaaaattaagaaatcagaatattctctttaactgaaatggccaattagctgagaattaatgcatttatccaataaaactccccaaggcagagatgcatttaagatggggacatggaactaagctccgggggtgcccacacaaataggcagaactttaaaatggcctcgtacaaaaggaatgttatctccaatggccttaataacacacaatccacctaggaga

SEQ ID NO: 89056 - DNA, 1062 bp, Homo sapiens
tcatgtaacaaacatgcacatgtatgccctgattctaaaataaaatttgaaaaagaaaatgaaatttccagtgagtgtgtaagggggaatactaaaaatgaaaagtcaaaccaatggagtagaacaaatattaaaatccataattcataaaactttaatttaaaaaatgcatatttaatagaaacattatttataaaaggtgggtgggagaagaaatcaatcttacttattgaaaaggaatatattacatatgaggacaaaaactcagaatgatcaatagtcaaactaacagatttgcagtgggagggccaggatccttttgcatccagtctttagaaggattaaagattagacagatattacacctttcaacagcaacattctatatctgaggaaaatttaacaacrtatttccctaagagaaaaattcctcaagaaaccaaggtattacagaagaattgacatgaggtgtagtggtgagcattaagcacatgtgtgtaaaactgataataagggtaaaggttatttttaaaaatctataaatgtcatatgttcttattatttagatataatgcaattaacaatgtagaataagctcactgattaccttaaatattgtagttgggagtaaaggatgtcactttgaattaaacaccatgggagaatgagagaatggaaaagaaaaggtgatcaactaaactcattatagcttatagaagagaaccataagatgatatctaatttgtttaattaaagagattaattttgaaagtaaatattttaacaaaaatagaagccctgctaaataacagatgacatatcataaagagcaaaagaccacattataaaagtaaacacacacatatatatgaattaataaatgtacctataaaatatatatacatatatacagcacaaaaatatgacattaaacattagaagtaatatcaataaatgtaaatagacttaatccatccggtaaaacatggagattatcagattggctaaaaagcaaaatccaaatttatgatgtatacaaaagttatttctaaaagaggcaca

SEQ ID NO: 89057 - DNA, 859 bp, Homo sapiens
ttaatttcttgactttcagtttaacctggagatgaacagtataatggtcaatacacagtttttgcagctgggcaaaagtagatttaagttctggcaccagcaccaactggtgtgtaacttgggtctaattacttaatgtctgatatggttagtctttgtgttccctaaaatctcatcttgaattataatcctcataatccccaggtgtcaagggagagaccaggtggagttaattgaatcatagggccggtccccagctccccatgctgttctggtgatagtgagttcttatgagatctgatggttttacaaggggctcttcccmcttcgctctgcatttctcctttctgccacctgtgaagaagttgtcttatttccccttcaccttctgccatgatcataagtttcctgaggcctccccccagccgtggtaaactgtgagtcaattaaagctccttcctttataagttacccagtcttgggcaattctttatagcagtgtgaaaacagactaatacaatatctcaatctgagactgtaaatggaaagctcttaacaggacttgtgaatcaatgaagagtaagtgttcagtaaacacttagttgtgttactatttcataatgatccattattatcatgttcttcaaatacacctgcccaattctgtgttctgaaatggggtcaagcagaatgtagggcaaataaaagttaagtaagtaacataaaaacccaagacttgaaacaacagttctttcttttctttctggtcctaagaatcctgttcttaactgcctttcaagagaagaaaatacataggaatgaaaggtttaaagcttgaaaaggtgggaaacatggttgc

SEQ ID NO: 89058 - DNA, 532 bp, Homo sapiens
ttaattttttattgtggtaaaatatatataacataaaatttgccattttaacaaccttaaaatatgtacatatattttatcctccttcctctgcctcccaagtagctgggactgcaggcgggtgccattgtgcctggcttatattctttttaattttaaatcaccycccaccccaccccaacatacacttttccctgaggaataatttggaagcacttatactcaaaagctgaacaaaaataatgccctagtcacacctgggctaaaaagcctttgacccaagaaagaaaaagaacatctccctattttaaatttccacattccaactttgttttattagaatcatgaactagctcattatatttaataatcccgagcaaattaatttggaatgaaattcaaaagcacaagaggggtaaactttcagagaagataatgatcccattcataattgactgttacgagtgaagagaaaagcaaagtttaaacccaggtagactctatgagtcctacatactcggaagggaatttc

SEQ ID NO: 89059 - DNA, 682 bp, Homo sapiens
cttggtgccaaaaagcttggagacctctggtgtatagggttacatgttgtactcaccttataagaagtggcagaaagcaagtttagtgataaaactagctaaaaaacaaagcaagggtataacaaacacaaaaatcacaatgtagttaactctgggatagccaatagtttccctggtgttcatcttattattttattatgtaggtgccccttgattctgggtatttttgtatgtatcaaatattacataattaaaagccagccaaagccagctatcatgactgcactctcattactcacgccccgggcctgcaagctgtggtgtggtttccaggttccccgtgagcatcrccgcagcgaccgcccacagcaccagctgctgatggctcacacctcctggggctgcaaggcctgtccctggctctggcagcgagatgacagggctgttgccccggcagggtgaggccaaaggttagaggtgatcattctttctgctggcacactgaggccccttgtggatccccgtttctgggtttctgtctcccccttcaacctgcccatcggcttcagacagtggatctccacttccctgtggggctgttcaccaggatgctcacctgcccaatcccagcccctccaccttccttcagctcattcattcattcaacctgtattgactgagt

SEQ ID NO: 89060 - DNA, 1204 bp, Homo sapiens
aattggagctggcatttcctggaggcatttgtataaaacttagatgagatcacgtcccctaggatgtcaaggtacttgccctgattctgccatgaggcctccaatggaaactttgtcaggagtagaaaacagccaatgtatgtgaagtccaagttcattggcacctccctagcctccttgcagggttgtttctctccatcactaatcccctgttttggatcatttgcaacaactccctttactacgaagagggaatcttgaggtatgagcagtaaatatggagactgtggtaggcaaacagttccacagtgtcatgaggtcccttttacactctctcactctgtggattctttccccttcacaacacgtctgatttatcacaagctgtgattaattatttccttgcatgactgtttaatgcttgtctcaactcctactagctctgtgagactgggggccattttgttttactcaccggtgaagttagctcaatatctgacagagagtaggtacatgataaatactcattgaaaaaaggaatagaaaagttatagagttcagctatattcatagcttgaaaaatatgctaaaggaattttctcatttgtaggtgttcctgtccagttcccttagtgcaggccttcccagtgtagggtttatttctgcatgactttctataaagctgtatttccttcttatctaacttctcgttcctagtctaactagaaagttcatgcatatccctttctcccttctctccattttctttttatctctgaaacaattaggtacacacgtagctgggaagccttcttgtatgcctccagaaaaattctagatccctcaaactattgttctatctcttctttctrtaccccaatttttttctcaattatgctcttaaattatccttctgaaagattttctaattttgtttgcttcttgttgcctttttctcttctagttcacacacctttctctgtaagatttcttaatgcttattttattattatttatagttttatgtggacaagcatccctagatgcttacattaaaagtatttgtctaaaaaaagaaggaaggaaggaaggaaagaagaaaggaaggaaagaaagaaagagagataaatatggaaagaaagagaaaaaaaggaagaaaggaagaaagaaaggaagaagaaagaaagaaaagaagaagaaagaa

SEQ ID NO: 89061 - DNA, 961 bp, Homo sapiens
gacaagggagaaagaggggcacagaatcttttagatcctgccctctttcaagtcagctctccacctctttttaaaagaaacaaatcattattattttgttgtttttgttgagttgcttttgtgtttgtctaattttagaaagaagtaaaatgttttcctctcacacctctgggaagataatatatctaaatttattagtttagtttgttcatttatttattgttaacttaaaacattcactcccgtgccatttactgggtagctgagtgggtgctggaaatgccagcttagaggctaaaaaggaaattcaaggaggaatggaattaaaatgtaaagtaatgccctcttatctacagtatcccctcgtatctaattatctgtctacctctattgaattatctgcctgtgtgaattttttgatccttgtaagatctctctgaacttgataatggttgaacttgtaagtgaacaaatgatgctcactgagtctgaaattattaaataacattggttgaacctctaccctgtaacatcttttgagctaaactgttccgagctcagttgtgccatttcatcatctgtgtgctcatacattctaatgggctgccctccattcacttctgcagcctgaatgcaggtaattttttctttttttttttgagacagagtctcactctgttgcccaggctggagtgcagtagcgcgatctyggctcactgcaagctccacctcccaggttcacgccattctcctgcctcagcctcccgagtagctgggactacagcgcccgccaccacgcctggctaatatttttgtatttttagtagagatggggtttcaccatgttaggcaggatggcctcaaactcctgaccttgtgatccacctgccttggcctcccaaagtgctgggattacaggcatgagccaccgtgcccggctgagaaaaatcttaaaagcaaa

SEQ ID NO: 89062 - DNA, 602 bp, Homo sapiens
aaataagactcgtagatcttgagaactgccaagaatacagaccatcccaggtccctggaatcctgtgggatatgttgtaatgaaaagtaaatgcaaattagtaagtacccaccattgcaattaatttgacatcatactgatccagtcaggagggaactaaggtgatgtcaagggcggcatcagagttctggcctcacctgatgttttctgctgttaacagaatactacagactgggtaagttataaaaaaagaaacttatttctcacagttcttggaggcagaaaagtccaaaaacgtggcatcagcgtctggggagggtcatcccatggcaaaaggtggaaggctggagtgagcacactagacagagagatcaaacgggggctgaacttgtccttttttctgaagcccattcttgagatmactaatccactcctgagataggagcattaatctccttttaaagttcccatcgttaataccattacattgacagttaaatttcaacttgagttttggcaggaacatttaaaccatagctccagggaaggtgcacaaggtgtaaaagaaatcaaccttggtgtaaagaagataggctcatttc

SEQ ID NO: 89063 - DNA, 1788 bp, Homo sapiens
agctggtgtttgttcagtgatagctggtgtttggtggtagctgggtttgtttggtggtagctggtgtttgtttggtggtagctggcgttcggtggtagctggcatttgtttggtggtagctggcgtttgttcagtggtagctggtgtttggtggtagctggtgtttgttcggtggtagctgttcggtggtagctggtgttcagtggtagctgttcggtggtagctggtgtttgttcagtggtagctggtgtttgttcggtggtaggtggtgtttggtggtagctggtgtttgctggtagctggtgtttgctggtaggtggtgtttggtggtaggtagcagtgagcaaggtaagtgggaaggtgggaagaagacagggtgggcgagggacttcccacttaagtatgttcaacttcggctgtgtcacccagaggtacttgacatccctccctccctccaccctgtgcttctcagtcagggcctagttagaggcccttttaaagatgggaccctgacaatatctggtgacatttttggtttcacaactgagtgtggggatgtgtcattggcatctggtgggcagaagccagggctgctaccgaatgccctactatgcccaggatggcccttaaccccagagaatgagccacccccaaaggtcactactgcggaggctcggaaaccgaaaccctgcctcaaatgacagggtataaacacttcagctctcttgacgggactaggatgagggtgcaactttgtctccagaacctctagcaggaagagtgagccaaagtcacccttcggggtgctctgcgcagcaccgctccctcacctggcctccccatctccccactgcccgatgctcctaaaggcctttcctggaaacactttctaatccttcactctcacagccacacaatcctcagctgagggtgagctttggagaaacctgacctgaaaccagtggccaacaggtttcacttgatggcagcttcactcaactggcagtggctgccttatttagagacctgtaccaaggatccagggaaagggagggaaagggatccattagcaatgcctgccttggtcccrggaggagaagggtggcatgcgtgctggaatgcaagaccaggtgtcagctttccttcctcctttcttggggtggcaaaatggaaagccatgggcattgttgaggaaaaagaagaacatggcaccgacagaggttgcaataggaagacaaaggaagaagcagggtttggaagaaccttgagtatttacctacatgcctacttccaatctgaacttgaactagcttcattaactgtggttgtctcctttaaaacatcatcatgttcctggtaagcctgtattccccacccttagagttagtatttgagcagacacttttcttcccagctacagatgactgcttgtgaccaaattgaaaaatattaattctctttgtctcctgccaaaaaagctaaagcaattacagatcctgattcgaaacatagatgttaatacatttggaaaaatgagcttctataggcgagcagaggcccagggccaagcatgaagtgcttttggaatcaaagtgccaaatcaagttatccagagagctgcctccacgaaagcccattcttcccaaatgcatcccagtgtaaagaaccccaggctgccgcacacacgctgatgtctcccctatttgcaaacaagaaccgacctacccttgggcacccactggcacacagctgtaaataacgtaattataatcatcacagggaaacatc

SEQ ID NO: 89064 - DNA, 1788 bp, Homo sapiens
agctggtgtttgttcagtgatagctggtgtttggtggtagctgggtttgtttggtggtagctggtgtttgtttggtggtagctggcgttcggtggtagctggcatttgtttggtggtagctggcgtttgttcagtggtagctggtgtttggtggtagctggtgtttgttcggtggtagctgttcggtggtagctggtgttcagtggtagctgttcggtggtagctggtgtttgttcagtggtagctggtgtttgttcggtggtaggtggtgtttggtggtagctggtgtttgctggtagctggtgtttgctggtaggtggtgtttggtggtaggtagcagtgagcaaggtaagtgggaaggtgggaagaagacagggtgggcgagggacttcccacttaagtatgttcaacttcggctgtgtcacccagaggtacttgacatccctccctccctccaccctgtgcttctcagtcagggcctagttagaggcccttttaaagatgggaccctgacaatatctggtgacatttttggtttcacaactgagtgtggggatgtgtcattggcatctggtgggcagaagccagggctgctaccgaatgccctactatgcccaggatggcccttaaccccagagaatgagccacccccaaaggtcactactgcggaggctcggaaaccgaaaccctgcctcaaatgacagggtataaacacttcagctctcttgacgggactaggatgagggtgcaactttgtctccagaacctctagcaggaagagtgagccaaagtcacccttcggggtgctctgcgcagcaccgctccctcacctggcctccccatctccccactgcccgatgctcctaaaggcctttcctggaaacactttctaatccttcactctcacagccacacaatcctcagctgagggtgagctttggagaaacctgacctgaaaccagtggccaacaggtttcacttgatggcagcttcactcaactggcagtggctgccttatttagagacctgtaccaaggatccagggaaagggagggaaagggatccattagcaatgcctgccttggtcccaggaggagaagggtggcatgcgtgctggaatgcaagaccaggtgtcagctttccttcctcctttcttggggtggcaaaatggaaagccatgggcattgttgaggaaaaagaagaacatggcaccgacagaggttgcaataggaagacaaaggaagaagcagggtttggaagaaccttgagtatttacctacatgcctacttccaatctgaacttgaactagcttcattaactgtggttgtctcctttaaaacatcatcatgttcctggtaagcctgtattccccacccttagagttagtatttgagcagacacttttcttcccagctacagatgactgcttgtgaccaaattgaaaaatattaattctctttgtctcctgccaaaaaagctaaagcaattacagatcctgattcgaaacayagatgttaatacatttggaaaaatgagcttctataggcgagcagaggcccagggccaagcatgaagtgcttttggaatcaaagtgccaaatcaagttatccagagagctgcctccacgaaagcccattcttcccaaatgcatcccagtgtaaagaaccccaggctgccgcacacacgctgatgtctcccctatttgcaaacaagaaccgacctacccttgggcacccactggcacacagctgtaaataacgtaattataatcatcacagggaaacatc

SEQ ID NO: 89065 - DNA, 1788 bp, Homo sapiens
agctggtgtttgttcagtgatagctggtgtttggtggtagctgggtttgtttggtggtagctggtgtttgtttggtggtagctggcgttcggtggtagctggcatttgtttggtggtagctggcgtttgttcagtggtagctggtgtttggtggtagctggtgtttgttcggtggtagctgttcggtggtagctggtgttcagtggtagctgttcggtggtagctggtgtttgttcagtggtagctggtgtttgttcggtggtaggtggtgtttggtggtagctggtgtttgctggtagctggtgtttgctggtaggtggtgtttggtggtaggtagcagtgagcaaggtaagtgggaaggtgggaagaagacagggtgggcgagggacttcccacttaagtatgttcaacttcggctgtgtcacccagaggtacttgacatccctccctccctccaccctgtgcttctcagtcagggcctagttagaggcccttttaaagatgggaccctgacaatatctggtgacatttttggtttcacaactgagtgtggggatgtgtcattggcatctggtgggcagaagccagggctgctaccgaatgccctactatgcccaggatggcccttaaccccagagaatgagccacccccaaaggtcactactgcggaggctcggaaaccgaaaccctgcctcaaatgacagggtataaacacttcagctctcttgacgggactaggatgagggtgcaactttgtctccagaacctctagcaggaagagtgagccaaagtcacccttcggggtgctctgcgcagcaccgctccctcacctggcctccccatctccccactgcccgatgctcctaaaggcctttcctggaaacactttctaatccttcactctcacagccacacaatcctcagctgagggtgagctttggagaaacctgacctgaaaccagtggccaacaggtttcacttgatggcagcttcactcaactggcagtggctgccttatttagagacctgtaccaaggatccagggaaagggagggaaagggatccattagcaatgcctgccttggtcccaggaggagaagggtggcatgcgtgctggaatgcaagaccaggtgtcagctttccttcctcctttcttggggtggcaaaatggaaagccatgggcattgttgaggaaaaagaagaacatggcaccgacagaggttgcaataggaagacaaaggaagaagcagggtttggaagaaccttgagtatttacctacatgcctacttccaatctgaacttgaactagcttcattaactgtggttgtctcctttaaaacatcatcatgttcctggtaagcctgtattccccacccttagagttagtatttgagcagacacttttcttcccagctacagatgactgcttgtgaccaaattgaaaaatattaattctctttgtctcctgccaaaaaagctaaagcaattacagatcctgattcgaaacatagatgttaatacatttggaaaaatgagcttctataggcgagcagaggcccagggccaagcatgaagtgcttttggaatcaaagtgccaaatcaagttatccagagagctgcctccacgaaagcccattcttcccaaatgcatyccagtgtaaagaaccccaggctgccgcacacacgctgatgtctcccctatttgcaaacaagaaccgacctacccttgggcacccactggcacacagctgtaaataacgtaattataatcatcacagggaaacatc

SEQ ID NO: 89066 - DNA, 1788 bp, Homo sapiens
agctggtgtttgttcagtgatagctggtgtttggtggtagctgggtttgtttggtggtagctggtgtttgtttggtggtagctggcgttcggtggtagctggcatttgtttggtggtagctggcgtttgttcagtggtagctggtgtttggtggtagctggtgtttgttcggtggtagctgttcggtggtagctggtgttcagtggtagctgttcggtggtagctggtgtttgttcagtggtagctggtgtttgttcggtggtaggtggtgtttggtggtagctggtgtttgctggtagctggtgtttgctggtaggtggtgtttggtggtaggtagcagtgagcaaggtaagtgggaaggtgggaagaagacagggtgggcgagggacttcccacttaagtatgttcaacttcggctgtgtcacccagaggtacttgacatccctccctccctccaccctgtgcttctcagtcagggcctagttagaggcccttttaaagatgggaccctgacaatatctggtgacatttttggtttcacaactgagtgtggggatgtgtcattggcatctggtgggcagaagccagggctgctaccgaatgccctactatgcccaggatggcccttaaccccagagaatgagccacccccaaaggtcactactgcggaggctcggaaaccgaaaccctgcctcaaatgacagggtataaacacttcagctctcttgacgggactaggatgagggtgcaactttgtctccagaacctctagcaggaagagtgagccaaagtcacccttcggggtgctctgcgcagcaccgctccctcacctggcctccccatctccccactgcccgatgctcctaaaggcctttcctggaaacactttctaatccttcactctcacagccacacaatcctcagctgagggtgagctttggagaaacctgacctgaaaccagtggccaacaggtttcacttgatggcagcttcactcaactggcagtggctgccttatttagagacctgtaccaaggatccagggaaagggagggaaagggatccattagcaatgcctgccttggtcccaggaggagaagggtggcatgcgtgctggaatgcaagaccaggtgtcagctttccttcctcctttcttggggtggcaaaatggaaagccatgggcattgttgaggaaaaagaagaacatggcaccgacagaggttgcaataggaagacaaaggaagaagcagggtttggaagaaccttgagtatttacctacatgcctacttccaatctgaacttgaactagcttcattaactgtggttgtctcctttaaaacatcatcatgttcctggtaagcctgtattccccacccttagagttagtatttgagcagacacttttcttcccagctacagatgactgcttgtgaccaaattgaaaaatattaattctctttgtctcctgccaaaaaagctaaagcaattacagatcctgattcgaaacatagatgttaatacatttggaaaaatgagcttctataggcgagcagaggcccagggccaagcatgaagtgcttttggaatcaaagtgccaaatcaagttatccagagagctgcctccacgaaagcccattcttcccaaatgcatcccagtgtaaagawccccaggctgccgcacacacgctgatgtctcccctatttgcaaacaagaaccgacctacccttgggcacccactggcacacagctgtaaataacgtaattataatcatcacagggaaacatc

SEQ ID NO: 89067 - DNA, 1295 bp, Homo sapiens
atgtacagtcgtacatcataatgcacaaaactaaacgaacacaatacattgttacaaacacgagaaaacagatacagaagatatatttctcctgcttcctgagggatgattttgtgctgggcatagctcatcaggatgagcaaagttggggcatggctcattacaatgcacaactgttaaggagccttgcccatgtccccccacccccactcccatccctcgtgtatctgtctctcttggagagtccatcatcactgtcccagttgagccatgggactccaagggagccaccatcttgttccatgaccctcttctccccagttgagggatgggaggaagccagccttaaccttggccacacataggccttcttttatttttattggaacctggtatgaaagagcccctgttcgctctccccgccttgatctctaaggatgtaatccagtgctctgggaagccccttgccagcaccttgcagggaaggctggtctgtgagaaagaagcttccaagcacggaggactgaggttggaattgaggagagagacctgctgggttgatcccctggtctggtagtccctgcccttcctgaagtttggggtttcagctcttccaatctatgagttacgttgagatgcttcaaagaagtcccctttaagctaactctagtcagactgctgcctgactgcaaccaaggcagttctgagcaaaacacacacaagcccaattgtatacacacccagaagtggaaatggatgggcaggaaacactcccagtagctgtgttctctccagatgaccattcaccatgaaaaccgctttcttcagacttggatcattcccaaatgtaaggcatcccccttgactgagctctgtaagaacagggcccatgactgtctcagctctggatcgcatgccctccacagcctgatgcttagcagggyctcataaatcttctgcattgaacacattactcttcacgcaattcctttctagtttaagtaaactactttgttgataacgtacacacagtaaggcacacagacaagcattcacgaagtgtgatgaatttccacaacgtgaatgcacctagggcaggacacaaaacatttattaccagctccgaagtcgtcccgacaggggtccctcccaaacaccagtccctcctcccctaaggctgactgccttcctaacacccaataccacggactggctctgcctccatgagacctgactatggaatcacagatgtgttctcttctgtgtctgcagccttccacagcctcactcatgtg

SEQ ID NO: 89068 - DNA, 3326 bp, Homo sapiens
ccatcagcttcctccttcacccagatgtggtatcactgatgaaggctgcaggaagatagcttggataaaagtcctggtttgccagaacagtctcgggttatgcctgttgctcttgtctacattttaataattccctttctaaaaacagtccttgtttgcatgataaatgatatggtcacctatttatgctggtcccctctgtgaccacacaagctggggccagatggggagtttcagttataattttagtaccctcactggctttctgacccagctgggtctggtagaatctgtttctcaatcttaaagtaggggtaatcacattgacctacttacagtgggttgcaaggaaggttctgttctgttgtgtttttctgtcttctttaaaggtattgtgttggtatcatataaattagacttaaaaaaaattagtcgttggtgtgtacagcacctgtcatttagagatgcaagaatctgtaagcaataccatctaatccagtaaatgttgtcctctctgttatgctttcatgaagatccacccatcttctcgaacaacctacagggtggaacagcaggacattcaggcctagttaaaaagatcttctggctacctgtccttgggttgctgattgcatctgaatgtgatggtggagctaaggaagtatatctgggcaataacttgcccttggtggtcacactgtgtcagttcatcactataagagaaaggcagaaaagctaagccgaaaagctccatccccacgagaagctggtttgcatggctggaccagtgaggatgtcaagacagctctattgtgggttggctgctggatccaactccaccacttctgagcctttgagttataacatcaagcacaaacaaccaggcttattttcccagccaaagtcacatgcaatgtcaaggtatcattaaaaaaaaaaattgaagtttaaaaggcagcttcctctgagtgctgatttgggcacataaacagtggcgtggttaaatgccactctgtgtttaaggtaattatacatcagccctggaatgtagtgatgtgaaagccccactgcagcaaacaaagttgattctatcagcaaactctggcaaatcagctggcctggatgcttctccctgaatttactacttcctacttgagaactgtctctgggaacatcagaacttgaagacaagtgtggtgcactgcctagcactctaaggctggtgccagcttgtaaccaatgatatgtctgcagcagggcttggggaccttggcccatagcagcttgcagtgagagcccttggaaacagctgaggcccataggagtgtcagtggtttgggtctgtgcattgtcatgtcttaccaggtcctgctggggctggactgccactgctcaacaagccaaagacatccatccagagaaaggctggtggagtggacaagacttcttgggaaaggtgacattcctaggggtcaagagatgatggtttttggcttctagctctggaagcactgtcgtaatgggcccaagcaaacgtctgactggtgtagtctaactttgttctacataaaaggacacaggggcccatttatccttttccactttggaatcatacctttctcggtgaggactcagtcatcacccctctgcccttcatcctggtgcccaatccccaaccatgcgccaaatcagtggaactttccttgtggttttgcggaatctttttccttcatccctacagaatttccttcatgagttactgctggcagctgtatttgtgctaattagctgcccttgatggatttctttcatccagttgtaaattctagaggagacattcccaggccaatttaaaagtagaattcacagaccaaactaagtggaaatcaggtttggatggcctccacagagcaagtcaagccaattcccatggcacctgagcacagcattcccagggtggtaagtcaaagtagtagaaggacagacctggaagaaatctcacatagacctttagtttagtcacctcattttacaaactaggcacttggggctcataaaggtgaattaacttgtcctatctcaccgctatttgctggtcacctctgaaagtaacaaggtatgggtggctctgtagactacaggggaattaccccgttgccttctgcgacaccttgaatacagctgtcataaggaaaggccttgtctgttattgtcaagttcatcttttcttttcaacttctaacttttttttctcatggagtaatattatacccctaaagaaaacatatggaatccagctgttgagatatgtcagatattccaaaaagcatacaaagtagctgacctcattttggtaagtaccatggacgagctgctagaaggcacaaaactccctaaacatctggacagagctgggtcctaggttccagtaatacactgtccactagcaaaaagcctttatgctcttagtgtggagtagtctacggtttctcatctgtctctggtactttcagagtcatcagggaagcttctgtgaggtggtgatgtaggaaggtttgttttatggggtatttgggaagaaatcttcttggtcatatttatgacaactcttccaaagggtaactatttgtttacgtgctgacctcggatccgttaaaggtgaaagccaggacctttcttcttcttttcctttcctcttttttttttttctttatcctcctcctcttgcataccttaaagcccagctatgctatttaacttaataaacagacatccacagaagtctttgtgtaagtgatactgtatccattgggcaattgttgaactctggcctcctgtacatgtattaaaaataagtgtttcttcatattgttcagcttctgtatagatactatgtatattcatgttttcatgtaaatacaagaagacttgcgctttactgaatcaagaccaggacatttttgtataaaacttatgtcatgaaacacttctgttatgtgcaaagcaattatttgaagtagtgccaaaatcacagttaagggaattctaaatcacccaatgattgattatattttttgtcttacaacaaattatttgaaattctttaaacatatagaaaccaagaatcatctggacttctttattattacatatataatatatgtaattatatatgccmtaatatatcatatataataatatatattcatcatcagatgaaactgtcaattcttcatagaaatacatttataattgtattataataatttactgaatgcaatggattaaaataatttccatttcaattgaatgattctgaaagcaaa

SEQ ID NO: 89069 - DNA, 3326 bp, Homo sapiens
ccatcagcttcctccttcacccagatgtggtatcactgatgaaggctgcaggaagatagcttggataaaagtcctggtttgccagaacagtctcgggttatgcctgttgctcttgtctacattttaataattccctttctaaaaacagtccttgtttgcatgataaatgatatggtcacctatttatgctggtcccctctgtgaccacacaagctggggccagatggggagtttcagttataattttagtaccctcactggctttctgacccagctgggtctggtagaatctgtttctcaatcttaaagtaggggtaatcacattgacctacttacagtgggttgcaaggaaggttctgttctgttgtgtttttctgtcttctttaaaggtattgtgttggtatcatataaattagacttaaaaaaaattagtcgttggtgtgtacagcacctgtcatttagagatgcaagaatctgtaagcaataccatctaatccagtaaatgttgtcctctctgttatgctttcatgaagatccacccatcttctcgaacaacctacagggtggaacagcaggacattcaggcctagttaaaaagatcttctggctacctgtccttgggttgctgattgcatctgaatgtgatggtggagctaaggaagtatatctgggcaataacttgcccttggtggtcacactgtgtcagttcatcactataagagaaaggcagaaaagctaagccgaaaagctccatccccacgagaagctggtttgcatggctggaccagtgaggatgtcaagacagctctattgtgggttggctgctggatccaactccaccacttctgagcctttgagttataacatcaagcacaaacaaccaggcttattttcccagccaaagtcacatgcaatgtcaaggtatcattaaaaaaaaaaattgaagtttaaaaggcagcttcctctgagtgctgatttgggcacataaacagtggcgtggttaaatgccactctgtgtttaaggtaattatacatcagccctggaatgtagtgatgtgaaagccccactgcagcaaacaaagttgattctatcagcaaactctggcaaatcagctggcctggatgcttctccctgaatttactacttcctacttgagaactgtctctgggaacatcagaacttgaagacaagtgtggtgcactgcctagcactctaaggctggtgccagcttgtaaccaatgatatgtctgcagcagggcttggggaccttggcccatagcagcttgcagtgagagcccttggaaacagctgaggcccataggagtgtcagtggtttgggtctgtgcattgtcatgtcttaccaggtcctgctggggctggactgccactgctcaacaagccaaagacatccatccagagaaaggctggtggagtggacaagacttcttgggaaaggtgacattcctaggggtcaagagatgatggtttttggcttctagctctggaagcactgtcgtaatgggcccaagcaaacgtctgactggtgtagtctaactttgttctacataaaaggacacaggggcccatttatccttttccactttggaatcatacctttctcggtgaggactcagtcatcacccctctgcccttcatcctggtgcccaatccccaaccatgcgccaaatcagtggaactttccttgtggttttgcggaatctttttccttcatccctacagaatttccttcatgagttactgctggcagctgtatttgtgctaattagctgcccttgatggatttctttcatccagttgtaaattctagaggagacattcccaggccaatttaaaagtagaattcacagaccaaactaagtggaaatcaggtttggatggcctccacagagcaagtcaagccaattcccatggcacctgagcacagcattcccagggtggtaagtcaaagtagtagaaggacagacctggaagaaatctcacatagacctttagtttagtcacctcattttacaaactaggcacttggggctcataaaggtgaattaacttgtcctatctcaccgctatttgctggtcacctctgaaagtaacaaggtatgggtggctctgtagactacaggggaattaccccgttgccttctgcgacaccttgaatacagctgtcataaggaaaggccttgtctgttattgtcaagttcatcttttcttttcaacttctaacttttttttctcatggagtaatattatacccctaaagaaaacatatggaatccagctgttgagatatgtcagatattccaaaaagcatacaaagtagctgacctcattttggtaagtaccatggacgagctgctagaaggcacaaaactccctaaacatctggacagagctgggtcctaggttccagtaatacactgtccactagcaaaaagcctttatgctcttagtgtggagtagtctacggtttctcatctgtctctggtactttcagagtcatcagggaagcttctgtgaggtggtgatgtaggaaggtttgttttatggggtatttgggaagaaatcttcttggtcatatttatgacaactcttccaaagggtaactatttgtttacgtgctgacctcggatccgttaaaggtgaaagccaggacctttcttcttcttttcctttcctcttttttttttttctttatcctcctcctcttgcataccttaaagcccagctatgctatttaacttaataaacagacatccacagaagtctttgtgtaagtgatactgtatccattgggcaattgttgaactctggcctcctgtacatgtattaaaaataagtgtttcttcatattgttcagcttctgtatagatactatgtatattcatgttttcatgtaaatacaagaagacttgcgctttactgaatcaagaccaggacatttttgtataaaacttatgtcatgaaacacttctgttatgtgcaaagcaattatttgaagtagtgccaaaatcacagttaagggaattctaaatcacccaatgattgattatattttttgtcttacaacaaattatttgaaattctttaaacatatagaaaccaagaatcatctggacttctttattattacrtatataatatatgtaattatatatgccctaatatatcatatataataatatatattcatcatcagatgaaactgtcaattcttcatagaaatacatttataattgtattataataatttactgaatgcaatggattaaaataatttccatttcaattgaatgattctgaaagcaaa

SEQ ID NO: 89070 - DNA, 3326 bp, Homo sapiens
ccatcagcttcctccttcacccagatgtggtatcactgatgaaggctgcaggaagatagcttggataaaagtcctggtttgccagaacagtctcgggttatgcctgttgctcttgtctacattttaataattccctttctaaaaacagtccttgtttgcatgataaatgatatggtcacctatttatgctggtcccctctgtgaccacacaagctggggccagatggggagtttcagttataattttagtaccctcactggctttctgacccagctgggtctggtagaatctgtttctcaatcttaaagtaggggtaatcacattgacctacttacagtgggttgcaaggaaggttctgttctgttgtgtttttctgtcttctttaaaggtattgtgttggtatcatataaattagacttaaaaaaaattagtcgttggtgtgtacagcacctgtcatttagagatgcaagaatctgtaagcaataccatctaatccagtaaatgttgtcctctctgttatgctttcatgaagatccacccatcttctcgaacaacctacagggtggaacagcaggacattcaggcctagttaaaaagatcttctggctacctgtccttgggttgctgattgcatctgaatgtgatggtggagctaaggaagtatatctgggcaataacttgcccttggtggtcacactgtgtcagttcatcactataagagaaaggcagaaaagctaagccgaaaagctccatccccacgagaagctggtttgcatggctggaccagtgaggatgtcaagacagctctattgtgggttggctgctggatccaactccaccacttctgagcctttgagttataacatcaagcacaaacaaccaggcttattttcccagccaaagtcacatgcaatgtcaaggtatcattaaaaaaaaaaattgaagtttaaaaggcagcttcctctgagtgctgatttgggcacataaacagtggcgtggttaaatgccactctgtgtttaaggtaattatacatcagccctggaatgtagtgatgtgaaagccccactgcagcaaacaaagttgattctatcagcaaactctggcaaatcagctggcctggatgcttctccctgaatttactacttcctacttgagaactgtctctgggaacatcagaacttgaagacaagtgtggtgcactgcctagcactctaaggctggtgccagcttgtaaccaatgatatgtctgcagcagggcttggggaccttggcccatagcagcttgcagtgagagcccttggaaacagctgaggcccataggagtgtcagtggtttgggtctgtgcattgtcatgtcttaccaggtcctgctggggctggactgccactgctcaacaagccaaagacatccatccagagaaaggctggtggagtggacaagacttcttgggaaaggtgacattcctaggggtcaagagatgatggtttttggcttctagctctggaagcactgtcgtaatgggcccaagcaaacgtctgactggtgtagtctaactttgttctacataaaaggacacaggggcccatttatccttttccactttggaatcatacctttctcggtgaggactcagtcatcacccctctgcccttcatcctggtgcccaatccccaaccatgcgccaaatcagtggaactttccttgtggttttgcggaatctttttccttcatccctacagaatttccttcatgagttactgctggcagctgtatttgtgctaattagctgcccttgatggatttctttcatccagttgtaaattctagaggagacattcccaggccaatttaaaagtagaattcacagaccaaactaagtggaaatcaggtttggatggcctccacagagcaagtcaagccaattcccatggcacctgagcacagcattcccagggtggtaagtcaaagtagtagaaggacagacctggaagaaatctcacatagacctttagtttagtcacctcattttacaaactaggcacttggggctcataaaggtgaattaacttgtcctatctcaccgctatttgctggtcacctctgaaagtaacaaggtatgggtggctctgtagactacaggggaattaccccgttgccttctgcgacaccttgaatacagctgtcataaggaaaggccttgtctgttattgtcaagttcatcttttcttttcaacttctaacttttttttctcatggagtaatattatacccctaaagaaaacatatggaatccagctgttgagatatgtcagatattccaaaaagcatacaaagtagctgacctcattttggtaagtaccatggacgagctgctagaaggcacaaaactccctaaacatctggacagagctgggtcctaggttccagtaatacactgtccactagcaaaaagcctttatgctcttagtgtggagtagtctacggtttctcatctgtctctggtactttcagagtcatcagggaagcttctgtgaggtggtgatgtaggaaggtttgttttatggggtatttgggaagaaatcttcttggtcatatttatgacaactcttccaaagggtaactatttgtttacgtgctgacctcggatccgttaaaggtgaaagccaggacctttcttcttcttttcctttcctcttttttttttttctttatcctcctcctcttgcataccttaaagcccagctatgctatttaacttaataaacagacatccacagaagtctttgtgtaagtgatactgtatccattgggcaattgttgaactctggcctcctgtacatgtattaaaaataagtgtttcttcatattgttcagcttctgtatagatactatgtatattcatgttttcatgtaaatacaagaagacttgcgctttactgaatcaagaccaggacatttttgtataaaacttatgtcatgaaacacttctgttatgtgcaaagcaattatttgaagtagtgccaaaatcacagttaagggaattctaaatcacccaatgattgattatattttttgtcttacaacaaattatttgaaattctttaaacatatagaaaccaagaatcatctggacttctttattattacatatataatatatgtaattatatatgmcctaatatatcatatataataatatatattcatcatcagatgaaactgtcaattcttcatagaaatacatttataattgtattataataatttactgaatgcaatggattaaaataatttccatttcaattgaatgattctgaaagcaaa

SEQ ID NO: 89071 - DNA, 3326 bp, Homo sapiens
ccatcagcttcctccttcacccagatgtggtatcactgatgaaggctgcaggaagatagcttggataaaagtcctggtttgccagaacagtctcgggttatgcctgttgctcttgtctacattttaataattccctttctaaaaacagtccttgtttgcatgataaatgatatggtcacctatttatgctggtcccctctgtgaccacacaagctggggccagatggggagtttcagttataattttagtaccctcactggctttctgacccagctgggtctggtagaatctgtttctcaatcttaaagtaggggtaatcacattgacctacttacagtgggttgcaaggaaggttctgttctgttgtgtttttctgtcttctttaaaggtattgtgttggtatcatataaattagacttaaaaaaaattagtcgttggtgtgtacagcacctgtcatttagagatgcaagaatctgtaagcaataccatctaatccagtaaatgttgtcctctctgttatgctttcatgaagatccacccatcttctcgaacaacctacagggtggaacagcaggacattcaggcctagttaaaaagatcttctggctacctgtccttgggttgctgattgcatctgaatgtgatggtggagctaaggaagtatatctgggcaataacttgcccttggtggtcacactgtgtcagttcatcactataagagaaaggcagaaaagctaagccgaaaagctccatccccacgagaagctggtttgcatggctggaccagtgaggatgtcaagacagctctattgtgggttggctgctggatccaactccaccacttctgagcctttgagttataacatcaagcacaaacaaccaggcttattttcccagccaaagtcacatgcaatgtcaaggtatcattaaaaaaaaaaattgaagtttaaaaggcagcttcctctgagtgctgatttgggcacataaacagtggcgtggttaaatgccactctgtgtttaaggtaattatacatcagccctggaatgtagtgatgtgaaagccccactgcagcaaacaaagttgattctatcagcaaactctggcaaatcagctggcctggatgcttctccctgaatttactacttcctacttgagaactgtctctgggaacatcagaacttgaagacaagtgtggtgcactgcctagcactctaaggctggtgccagcttgtaaccaatgatatgtctgcagcagggcttggggaccttggcccatagcagcttgcagtgagagcccttggaaacagctgaggcccataggagtgtcagtggtttgggtctgtgcattgtcatgtcttaccaggtcctgctggggctggactgccactgctcaacaagccaaagacatccatccagagaaaggctggtggagtggacaagacttcttgggaaaggtgacattcctaggggtcaagagatgatggtttttggcttctagctctggaagcactgtcgtaatgggcccaagcaaacgtctgactggtgtagtctaactttgttctacataaaaggacacaggggcccatttatccttttccactttggaatcatacctttctcggtgaggactcagtcatcacccctctgcccttcatcctggtgcccaatccccaaccatgcgccaaatcagtggaactttccttgtggttttgcggaatctttttccttcatccctacagaatttccttcatgagttactgctggcagctgtatttgtgctaattagctgcccttgatggatttctttcatccagttgtaaattctagaggagacattcccaggccaatttaaaagtagaattcacagaccaaactaagtggaaatcaggtttggatggcctccacagagcaagtcaagccaattcccatggcacctgagcacagcattcccagggtggtaagtcaaagtagtagaaggacagacctggaagaaatctcacatagacctttagtttagtcacctcattttacaaactaggcacttggggctcataaaggtgaattaacttgtcctatctcaccgctatttgctggtcacctctgaaagtaacaaggtatgggtggctctgtagactacaggggaattaccccgttgccttctgcgacaccttgaatacagctgtcataaggaaaggccttgtctgttattgtcaagttcatcttttcttttcaacttctaacttttttttctcatggagtaatattatacccctaaagaaaacatatggaatccagctgttgagatatgtcagatattccaaaaagcatacaaagtagctgacctcattttggtaagtaccatggacgagctgctagaaggcacaaaactccctaaacatctggacagagctgggtcctaggttccagtaatacactgtccactagcaaaaagcctttatgctcttagtgtggagtagtctacggtttctcatctgtctctggtactttcagagtcatcagggaagcttctgtgaggtggtgatgtaggaaggtttgttttatggggtatttgggaagaaatcttcttggtcatatttatgacaactcttccaaagggtaactatttgtttacgtgctgacctcggatccgttaaaggtgaaagccaggacctttcttcttcttttcctttcctcttttttttttttctttatcctcctcctcttgcataccttaaagcccagctatgctatttaacttaataaacagacatccacagaagtctttgtgtaagtgatactgtatccattgggcaattgttgaactctggcctcctgtacatgtattaaaaataagtgtttcttcatattgttcagcttctgtatagatactatgtatattcatgttttcatgtaaatacaagaagacttgcgctttactgaatcaagaccaggacatttttgtataaaacttatgtcatgaaacacttctgttatgtgcaaagcaattatttgaagtagtgccaaaatcacagttaagggaattctaaatcacccaatgattgattatattttttgtcttacaacaaattatttgaaattctttaaacatatagaaaccaagaatcatctggacttctttattattacatatataatatatgtaattatatatgcmctaatatatcatatataataatatatattcatcatcagatgaaactgtcaattcttcatagaaatacatttataattgtattataataatttactgaatgcaatggattaaaataatttccatttcaattgaatgattctgaaagcaaa

SEQ ID NO: 89072 - DNA, 1199 bp, Homo sapiens
tggcacattctcctgcttgcaagacccacatccaatttctcttatgcctgtatttaagcaagccaggggatttggaaactctgcctctgtctacacaatgccacaaccatgggttgaaagaaaagtcaaagtcatagccatcagttgtttttctaattttcttttccatcaattgaccactgaaaaaacaaacacctgagtcaacttggaaggctttgttctccaagtcctgaagaatgtttgacaatttctaaccctgggacctggggaaaatatactttttcaaaactgaaagttatagtattatttcccttttctacacaaaattggaccataccacatactctgaatattttgacttatgtagagaattttatgatggaaccctaggaaactggcattagacttgaccaataaaaagtgatttttaaaattcttcaacctttaaactcagttggagcaatgttggggatcctggttctaatcttttcccatttttaaccccttcaatttttccttcggtttctaatatttgtttttatttaaaatatattttaaactttttattctaagtaggatacaaaaattaaacagatgtttagctaataatggccaaccaaatacaagcatttatctctttttctgtttgcaagtcaccaaagattgcagcttttttttttttwaaaaaaaaagggattaaaaaaagaataggatgggacctatcagcttatgagagagttaagaatattctagaagataggagtggttggaggaataatggcttggagaaaggaggctgcgctgtttatttactgactcccccacccccgggtccattggccgagggctgccctgggactgagcctgtgcctaggtcaagagagctaggactgccagttgaaagatgagtcagcacttgtacagaactgtccaccacaaatgcagatgaaactagaggcggactgcaggcacgtgatgcttgcaccagaaatgactctatagccacatacagctggatgtggaagagctcaatcctctatctgaacatgatattcctgcttaaaaactttcagaggtttctctgctgactgagcagagcagaggaatgggcttcggattcttcaagccctgaaactttgtgtgtatgtgcctattttggatgagaagatccataattttcatcacattttcaaaagggt

SEQ ID NO: 89073 - DNA, 811 bp, Homo sapiens
gtaattgatgacatcaaaaatttagtaggaggtttggaagatagagctgtaaaaatctcccagaaagtagagaagccaccccccaaggctggtgcacatgccctccttgtagcatgtaggacattccttctcaccagtgcatttatttgtcaccctgcattgtggtagccactttatggatcactgattcccaataaawaggctgggcttccttggagcagggactgtctcttcctccccatcacttatcctgtgcactaacgtacatgtgtattgaaagaatgaatgacaaatgtgtatgaaggagtgaaggcaaacttcagttgggctgggggttgaggggaagctttgctgaggttagaggaaaaggtgaatgagggtatatccctggggaacactagggaagatccaggctagggggaataaacaggttcacagctactgcaagcgtggctgaacagggaaagtgtgactgggcagatgcaaggggttgaaccaccaagaaaaagcctgagagaaggaaggggaggtggaaggtcactcaggatttcatctttccttaggaatgacttcatgccaggcattgtgttaaggactttccatgcattctcttacttaagcttcacaaaaccttataaagttgtaattactactacagccattttccaggtgataaggataggtgtacaaacaataagtatctgacctcagattctagagctggtggtcacagaaccaggatttgagggaaaagtctgattatgtctgtgttgttttaatcaccaggctactctctctggcaaaggatccc

SEQ ID NO: 89074 - DNA, 811 bp, Homo sapiens
gtaattgatgacatcaaaaatttagtaggaggtttggaagatagagctgtaaaaatctcccagaaagtagagaagccaccccccaaggctggtgcacatgccctccttgtagcatgtaggacattccttctcaccagtgcatttatttgtcaccctgcattgtggtagccactttatggatcactgattcccaataaataggctgggcttccttggagcagggactgtctcttcctccccatcacttatcctgtgcactaacgtacatgtgtattgaaagaatgaatgacaaatgtgtatgaaggagtgaaggcaaacttcagttgggctgggggttgaggggaagctttgctgaggttagaggaaaaggtgaatgagggtatatccctggggaacactagggaagatccaggctagggggaataaacaggttcacagctactgcaagcgtggctgaacagggaaagtgtgactgggcagatgcaaggggttgaaccaccaagaaaaakcctgagagaaggaaggggaggtggaaggtcactcaggatttcatctttccttaggaatgacttcatgccaggcattgtgttaaggactttccatgcattctcttacttaagcttcacaaaaccttataaagttgtaattactactacagccattttccaggtgataaggataggtgtacaaacaataagtatctgacctcagattctagagctggtggtcacagaaccaggatttgagggaaaagtctgattatgtctgtgttgttttaatcaccaggctactctctctggcaaaggatccc

SEQ ID NO: 89075 - DNA, 1060 bp, Homo sapiens
aaacaaacactttgctctaaatcagtagttgacaggcttttcttgtaaaggggcaggtagtaaatattttaggctttttgggccatacagtctctgtcaaaactactcagccatgccatcatagcacaaaagcagccatagacaatccataaatgaatcagcatggccatgtttcaacaaaattttatttatagaccctgaaatgtgattctcatataattttcatgtgtcataaaatagtcttcttcttttgattattttctaatcatttagaaatgtgaaaactacctttagtctgtgtgtcatacaaaagcaagtgactggtcctttcttgctccaaatcatccattcatccttagagacataagcctacatctgtttctagccacaaagttataggattgtgagaattctctttccaaccctcccttctcctggatttacacacacacatacacggacatacactcctgattaccccaaagtcctttcctagtaagctggccaccctctcccagagttccatawgttcaaaaattacttctattttctttaattctatttcttggagcatctgattatctgactgaattaattcacattaaagagtgattagtggggatcaactctccctttgagaatttccatttaaaagaacatgtaccagtgaggctaacggaatgttggggaaaacatttttgagtggctggatacccagctcttcatttaggaagttgattttggtattataaggcttgccaagtaggctaagatgacttatctactggtgcttacaatctaatcagggaggcagaacaactgtggtacaagaaaaaataaaaattcaaatcagaggctattaactgccaagaaaatgataaagaaattaaatgactaaattatgataaggacaaaaataattgctcaatgttaccaagcctaggcagtcagggacatttgtctgcatgttggtagacataggaccttgccttcttcctctcatggataatggcttcacaatatcctcagggtcttaagccttttatccagttgaagtcac

SEQ ID NO: 89076 - DNA, 1060 bp, Homo sapiens
aaacaaacactttgctctaaatcagtagttgacaggcttttcttgtaaaggggcaggtagtaaatattttaggctttttgggccatacagtctctgtcaaaactactcagccatgccatcatagcacaaaagcagccatagacaatccataaatgaatcagcatggccatgtttcaacaaaattttatttatagaccctgaaatgtgattctcatataattttcatgtgtcataaaatagtcttcttcttttgattattttctaatcatttagaaatgtgaaaactacctttagtctgtgtgtcatacaaaagcaagtgactggtcctttcttgctccaaatcatccattcatccttagagacataagcctacatctgtttctagccacaaagttataggattgtgagaattctctttccaaccctcccttctcctggatttacacacacacatacacggacatacactcctgattaccccaaagtcctttcctagtaagctggccaccctctcccagagttccatatgttcaaaaattacttctattttctttaattctatttcttggagcatctgattatctgactgaattaattcacattaaagagtgattagtggggatcaactctccctttgagaatttccatttaaaagaacatgtaccagtgaggctaacggaatgttggggaaaacatttttgagtggctggatacccagctcttcatttaggaagttgattttggtattataaggcttgccaagtaggctaagatgacttatctactggtgcttacaatctaatcagggaggcagaacaactgtggtacaagaaaaaataaaaattcaaatcagaggctattaactgccaagaaaatgataaagaaattaaatgactaaattatgataaggacaaaaataattgctcaatgttaccaagcctaggcagtcagggacatttgtctgcatgttggtagacataggacctygccttcttcctctcatggataatggcttcacaatatcctcagggtcttaagccttttatccagttgaagtcac

SEQ ID NO: 89077 - DNA, 728 bp, Homo sapiens
cagagtgaaaccttgtccctaaaagaaaacaaaaccaaaaacagatgggtagtcatggtagcatctagaagtctcatactggtaaccagagggtcaagggactttttaatttgaccttcactcgtttcaaaacaaatttgagttagttgccaacattaacaacttggaagattttacattaaaatacattttttcttttaaaaaatgacgagtctgtcaaaacctggcctacgtttctgcatggtaactggcctatgtttctgcatgaaccggagctgagtagcacccatcccttcagatggggcactaactactccttccccacctcccataccacttcctgttgcttctcccacttaacctgctgctttgctcatctgtagcagctgtctggctcttgtgggcatttgmgttttcaatgcctgctgtgcattaacagagcctcctgcatagggggcctgtgacaaatgctcaacctcaaccaattctgtgaaaacaagcgatcctgccctctcagtccaacttctgcaaggtaaaacaacttatacacagaaggatactttacaaaactttgttcttagtctagagaggaaactatcatggacaacacatacaaatagtttaacttttggttttgaaagtattgggttggtgcaaaagtaattgcggtaaaaagtaatggcaaaactgcaattatttcgcaccaaccggatacattgggtataatg

SEQ ID NO: 89078 - DNA, 728 bp, Homo sapiens
cagagtgaaaccttgtccctaaaagaaaacaaaaccaaaaacagatgggtagtcatggtagcatctagaagtctcatactggtaaccagagggtcaagggactttttaatttgaccttcactcgtttcaaaacaaatttgagttagttgccaacattaacaacttggaagattttacattaaaatacattttttcttttaaaaaatgacgagtctgtcaaaacctggcctacgtttctgcatggtaactggcctatgtttctgcatgaaccggagctgagtagcacccatcccttcagatggggcactaactactccttccccacctcccataccacttcctgttgcttctcccacttaacctgctgctttgctcatctgtagcagctgtctggctcttgtgggcatttgagttttcaatgcctgctgtgcattaacagagcctcctgcatagggggcctgtgacaaatgctcaacctcaaccaattctrtgaaaacaagcgatcctgccctctcagtccaacttctgcaaggtaaaacaacttatacacagaaggatactttacaaaactttgttcttagtctagagaggaaactatcatggacaacacatacaaatagtttaacttttggttttgaaagtattgggttggtgcaaaagtaattgcggtaaaaagtaatggcaaaactgcaattatttcgcaccaaccggatacattgggtataatg

SEQ ID NO: 89079 - DNA, 728 bp, Homo sapiens
cagagtgaaaccttgtccctaaaagaaaacaaaaccaaaaacagatgggtagtcatggtagcatctagaagtctcatactggtaaccagagggtcaagggactttttaatttgaccttcactcgtttcaaaacaaatttgagttagttgccaacattaacaacttggaagattttacattaaaatacattttttcttttaaaaaatgacgagtctgtcaaaacctggcctacgtttctgcatggtaactggcctatgtttctgcatgaaccggagctgagtagcacccatcccttcagatggggcactaactactccttccccacctcccataccacttcctgttgcttctcccacttaacctgctgctttgctcatctgtagcagctgtctggctcttgtgggcatttgagttttcaatgcctgctgtgcattaacagagcctcctgcatagggggcctgtgacaaatgctcaacctcaaccaattctgtgaaaacaagcgatcctgccctctcagtccaacttctgcaaggtaaaacaacttatacacagaaggatactttacaaaactttgttcttagtctagagaggaaactatcatggacaacacatacaaatagtttaacttttggttttgaaagtattgrgttggtgcaaaagtaattgcggtaaaaagtaatggcaaaactgcaattatttcgcaccaaccggatacattgggtataatg

SEQ ID NO: 89080 - DNA, 739 bp, Homo sapiens
atcctgtaccttttttagctgagctcgtaattaggctagttagatgaaaatgtatctttctaaggtgtttaactgtgtctttcttaagtttctttgaatgaatggtttaaaatctcaaactctggccctcataacagaaaatcacaaatggttctgacccacattatataaactgtgccaatggttaggggttgggaataaagaactgcwttatatcaataatagtggctttcttcagaagtactcacatgaagccatacagggaacatgagcaaaagacatgggccagtcagtggtactctttaaaagaactttgcacaacatcagtcaccgtaaggagaattttaaaaatctgcaggctggcttttttgacatatggaaagaaacagttatctagcagacagaagctgaaggactgagacggctggaaattagaagagaattaagaaaaataactcgatcaattagtaatcagtgcaacaggccagctgctcctactgcagcaacacagacttgccagtatctgtaactgagaaatactaggttttgttgcctgcttaatgccatcaaaaaacaaagttaaatctcatgaaatgcttataaatgaaggcttgggaacctccaataaaactataagtccttttatacatcacttctttttgtcttaagcagcaatagctaacatcacgtaagacgtttattatatatcaaagaccatgccatttgttttacacgtacc

SEQ ID NO: 89081 - DNA, 2219 bp, Homo sapiens
gcaaatagatgattccagtcctggaattttaaaaccaatgttttaaaacaatgttttaggtcttaattttctacacactgggcatacagattcattaaagaaataagctaaaagaagattggagaggacactcctctcttcatattctttcccaattcgtttgttctctgcctggctataaactgtgatccccgtaaatctcagatttgcagtgacttcatcaattattcagcctcaattgttcagtaaatacacatgtacgtataccctgtgttaggctcagaaaatgtggcaccagatcccaaaatgcaactgtgctgtttttcattgctctgctgtttttcccagggcctgctgcttcttccttcttagcaccttggctccatctcttactcttcactctgcaagccaagccctgattatagctcaactgggatgttgcaactgccttctcttggggcctccctgacttcagtgatccacyccttccaaacatcctgcatcctgctaccagacttttcactgaagtatagacaattaattgcttatagtatcaaaatccaaactcctttgcctgacttgtgaagccttcatgatcacaccccaccctctctattcaattttctttcccacgaagtcaatacacagtcactgagtcactgtgagcttaactgaagaggcagcaacccacatgcctctgcaactgctatttttctcaccttggatgacctcccaatcactcaggtatccagctctctaaattttacccattgctcaaaagcctagctcaagtctcagttctattattaaactttccctactgttgcagcagccagctttcacttctttctcttacctcctattaaaagttaataattatttacatgacagtaatgaagagctaacttctactgagcacttcctatataccatatcctgttgggataaatagttttattattcctgttttgcagatgaagaaacacaggcacagaaaagaagacaattctggttaacacctgattgtttgctaatcattttgtgtgacctctctaactagctttccacttccttgagagcagagactaagctcatatttatcctgtgcctcctacacagctagcagagtgctgggtgcagtataagtgattagttagtatagttgggtggtcatttatacatgtcgatgttatgcatctctaccctacaagagtgaccatggagggtaaaatttctaccctataagagtgaacatgtttgtacaatgtgcgcataaatgttaaaccaaccctttagcgcacaatgatgaatggtttgggggagtttatggtctaaaagtggccctatgtgattttttttctaagttactctcactacttccatcttctcactcacttgaaacgttaaagattggaaatcacagatgggctgtcagtaattaatgacataattaactagcatttttggagggctacaaggtaggggaggttgttaattctgccctggccaacacctgggtcttctgattttattaaaaatcaggtggcagcaaaattttcccaaggaaccaaatatttgtaccacaatattataggttttctccgaatttcttctggcacattttttttcttttgacaactatggtgtgtacagacctaaattcatcaaagataaatattacagtataactgtcaatgcaaaggaggcaaagactatgatttaggctaaagatagcatcccgatctgttttctcctcgtggtccccgacttccatctcatagggactatgcctttttagttttcttaaggataccaaaatatgtctgctaaaatattctctttcctgcaatagtattttttaaaggtataattatttattccattcttcataggcatactttccagtttctctttcccacacccattctttgaggaacaccatatggaagaactcacgagattcctcctccctcccacttcagatcaatgcttaacaaaagccaacaccatagagaaacattttatttcaaaatttttacattggctcaattggaattcatgaattcctgagtgaattctcataagcactaaaatagatactttttaaccaaaacatcaaattagaaaacttatcttaccaaagtcattctactttacgtttccactgactactattcattctcactgatgccagcgcttttcttcacttggaaaaaaaa

SEQ ID NO: 89082 - DNA, 2219 bp, Homo sapiens
gcaaatagatgattccagtcctggaattttaaaaccaatgttttaaaacaatgttttaggtcttaattttctacacactgggcatacagattcattaaagaaataagctaaaagaagattggagaggacactcctctcttcatattctttcccaattcgtttgttctctgcctggctataaactgtgatccccgtaaatctcagatttgcagtgacttcatcaattattcagcctcaattgttcagtaaatacacatgtacgtataccctgtgttaggctcagaaaatgtggcaccagatcccaaaatgcaactgtgctgtttttcattgctctgctgtttttcccagggcctgctgcttcttccttcttagcaccttggctccatctcttactcttcactctgcaagccaagccctgattatagctcaactgggatgttgcaactgccttctcttggggcctccctgacttcagtgatccaccccttccaaacatcctgcatcctgctaccagacttttcactgaagtatagacaattaattgcttatagtatcaaaatccaaactcctttgcctgacttgtgaagccttcatgatcacaccccaccctctctattcaattttctttcccacgaagtcaatacacagtcactgagtcactgtgagcttaactgaagaggcagcaacccacatgcctctgcaactgctatttttctcaccttggatgacctcccaatcactcaggtatccagctctctaaattttacccattgctcaaaagcctagctcaagtctcagttctattattaaactttccctactgttgcagcagccagctttcacttctttctcttacctcctattaaaagttaataattatttacatgacagtaatgaagagctaacttctactgagcacttcctatataccatatcctgttgggataaatagttttattattcctgttttgcagatgaagaaacacaggcacagaaaagaagacaattctggttaacacctgattgtttgctaatcattttgtgtgacctctctaactagctttccacttccttgagagcagagactaagctcatatttatcctgtgcctcctacacagctagcagagtgctgggtgcagtataagtgattagttagtatagttgggtggtcatttatacatgtcgatgttatgcatctctaccctacaagagtgaccatggagggtaaaatttctaccctataagagtgaacatgtttgtacaatgtgcgcataaatgttaaaccaaccctttagcgcacaatgatgaatggtttgggggagtttatggtctaaaagtggccctatgtgattttttttctaagttactctcactacttccatcttctcactcacttgaaacgttaaagattggaaatcacagatgggctgtcagtaattaatgacataattaactagcatttttggagggctacaaggtaggggaggttgttaattctgccctggccaacacctgggtcttctgattttattaaaaatcaggtggcagcaaaattttcccaaggaaccaaatatttgtaccacaatattataggttttctccgaatttcttctggcacattttttttcttttgacaactatggtgtgtacagacctaaattcatcaaagataaatattacagtataactgtcaatgcaaaggaggcaaagactatgatttaggctaaagatagcatcccgatctgttttctcctcgtggtcccygacttccatctcatagggactatgcctttttagttttcttaaggataccaaaatatgtctgctaaaatattctctttcctgcaatagtattttttaaaggtataattatttattccattcttcataggcatactttccagtttctctttcccacacccattctttgaggaacaccatatggaagaactcacgagattcctcctccctcccacttcagatcaatgcttaacaaaagccaacaccatagagaaacattttatttcaaaatttttacattggctcaattggaattcatgaattcctgagtgaattctcataagcactaaaatagatactttttaaccaaaacatcaaattagaaaacttatcttaccaaagtcattctactttacgtttccactgactactattcattctcactgatgccagcgcttttcttcacttggaaaaaaaa

SEQ ID NO: 89083 - DNA, 633 bp, Homo sapiens
cctttattgacgtcaatgatttttggataacttacctaacacaggtggtgctcttcatatataatgtttcttgctttacaataggtcaaagaactattatctggctacttctcttgtataggataattagataattccccccaccatctatgtcaccctatttcttacttgtcttttctggctttatttcctagcttgtatatcttttagtattttatatattgggagataatgatgaatattaatctaaaataaaggcttcaatttggagacagaagacgatcaatttaaatttcgattatctcttaaattggctgcatggccttgggcaagtaactttactactctgaattgttttctaacatgtagagttagtgttaattgtttcttacagctgatctaaggagtaaattaaatatatttgatatgtattattatcacctaactaggcctctgattggcttcgtcatttggtgtagtacttgaaatcataaaaaggtttctcatcttgcttttataaaaaaatacaaaatatttacaatgaacmactgtcactgaaatttctacctactttttctgctttccccaaaacacacacacacacacacacacacacacacacacacacacaca

SEQ ID NO: 89084 - DNA, 984 bp, Homo sapiens
ttgcctgaactaagttcaaaattgccctggatgtgggatatctaacacttttatgctatcaaacatggaatttccttggtcctacaagctaaaaattgctcactcatgaattccacaagtctgagagtccactgagaaatatgtcccctcattaatatgtctgattaataattaatgtaaactttgcctttagcacaagatagtactttgaattataaacctttataattaagaactatcattttgctttcagacaataaagatgccatttagtagactgcattgttgccctttttgcaacattgttttcctgggagccttgaagagttaatgaatctccaaatatacctaatytctgtgcaaaaatttagctttacctaagggatctgacccagttctttaaaataaaaattaaacctcatataaaaagcaagataaatgaaggtatgactgtactgaggtgataggaaaagccttaacatacttatcatttcccttctcacctacattttcctgtgatacttgctcttgtgtcaaccctttagtgaatattgcttgagctgcttaaaattatatattcaatgtcagctttatgctctaaggaatatttaatgtgagacatcattcacttttgcatagcaattagctctgtagtgtgaaaactggcttcaggtgaattctactttaaaaaaaatgcaagcgagaacaggaagaacctccaagcatgcaccactagcagctggagggtccagtatatacagaagattgtcttatacacagatcaatggagtctatttactgtacaaaaaaatacatccaaattaggaaaaataagagtcctgggatatgtaagacatggacagaacatgtttattcctttaaatctcaagaacattgtgaacttgactcacactttgacatttaagaaggcactgaaaacacactcagcacagtgaagaccttgtctttatttgctctttgaaa

SEQ ID NO: 89085 - DNA, 1210 bp, Homo sapiens
atatatatatatatatatatatatttaaaatttatcattttatatagagatactggaagaatttctaaaattggtaaatagttaaatgacaataggatgttcctgcaattttaactagttttgaggaacttttatgaaaatattcagaaattattttaaatttcagaaaaaaagacgtcatttattaacaaagtgggctattccaaaacactacaatattaaataagaattgaatgaaaagcaacacgagatcatgcaaaaatttgtttttaaaaaagcatcctaaaagagagatttctataaagccacaggccctatattctggatattagagaaagagttaaacagccaatcttttctgaagattccaacaactctttcagggaataacaaatgaaaacttgctgtaattatagtgcataagcaagatgaatcactgatcttgaatctctgtgaaaggctcagacttgagataaccacatttatagaaaactaacatattgatttaggaatttacaaaacgggtaaactagggaacggttatttatattacaatgtgcataacgattttacaaaaggattccaattgtgcatacttaaataatgagtctccccagtacagttaaatattaaaaattattattttgacttaaaattctgctaataagcaatgataaaagcatatctgtatttaatataaatcttaaagcttaggtttaaatgtgtaaataatatctaaaaatataattaaatatgaaaatagtatagggaatattcatttttmttatatatttatttcaaatgcagtttaaaacagtattttaaaataatcaatatagctacatataaatttgagtataattattgaataatcctttttttcttatagcataaaacattattgtagatcactacttgagtcctgtatgtacaataatccctttgaatacagactcctgatttgtatgctcttgttaagtattatcatccacaggtgctattactaaattactggtatgtgtttgctcaattgggactttcatcttttaaacaatgataaataaatgaaactgtcaaagtgctatgttaagactcacaagctcaaagagcaaaattagacattgaacaattcacttactactctttattattgtttttcaggaccacactgatactttttttaagatattacaccttctgtttaacaaat

SEQ ID NO: 89086 - DNA, 1210 bp, Homo sapiens
atatatatatatatatatatatatttaaaatttatcattttatatagagatactggaagaatttctaaaattggtaaatagttaaatgacaataggatgttcctgcaattttaactagttttgaggaacttttatgaaaatattcagaaattattttaaatttcagaaaaaaagacgtcatttattaacaaagtgggctattccaaaacactacaatattaaataagaattgaatgaaaagcaacacgagatcatgcaaaaatttgtttttaaaaaagcatcctaaaagagagatttctataaagccacaggccctatattctggatattagagaaagagttaaacagccaatcttttctgaagattccaacaactctttcagggaataacaaatgaaaacttgctgtaattatagtgcataagcaagatgaatcactgatcttgaatctctgtgaaaggctcagacttgagataaccacatttatagaaaactaacatattgatttaggaatttacaaaacgggtaaactagggaacggttatttatattacaatgtgcataacgattttacaaaaggattccaattgtgcatacttaaataatgagtctccccagtacagttaaatattaaaaattattattttgacttaaaattctgctaataagcaatgataaaagcatatctgtatttaatataaatcttaaagcttaggtttaaatgtgtaaataatatctaaaaatataattaaatatgaaaatagtatagggaatattcatttttattatatatttatttcaaatgcagtttaaaacagtattttaaaataatcaatatagctacatataaatttgagtataattattgaataatcctttttttcttatagcataaaacattattgtagatcactacttgagtcctgtatgtacaataatccctttgaatacagactcctgatttgtatgctcttgttaagtattatcatccacaggtgctattactaaattactggtatgtgtttgctcaattgggactttcatcttttaaacaatgataaataaatgaaactgtcaaagtgctatgttaagactcayaagctcaaagagcaaaattagacattgaacaattcacttactactctttattattgtttttcaggaccacactgatactttttttaagatattacaccttctgtttaacaaat

SEQ ID NO: 89087 - DNA, 747 bp, Homo sapiens
tgctgatattttatttaggatttttrcatcagtgttcatcagagatattgacctgtaggtttgtttgtttgtttatttatttattttttgtggtttcttggtctggcttaggtatcaaggtgatgctggactcataaaatgtgttaggaaatattccctcctgttgtttttcttggaagagtttaagaagtcttggtaataattctactttgaaaatttggtaaaattcagccgtgaagccatctcttcctgggcttttctttgttgggaggtcagattactttaataacagattgagatatttggaagctgggcctcagttcagaggattagtctgtttttggtttcgactttgttgtaaggtaggcaggttttctttttttttttttgagacagtcttgctatgtcactcaggctggagtgcatgatctcgactcactgcaacttccgcctcatgggctcaagtgattcttgtgcctcagcctctcgaatagctgggattacgagtacacgtcaccacgctcggctaatttttgtatttttagtagagacagagtttcaccatgttggctaggctgttcttgaactcctgacctcatgatccctgtgatctggcctcctaaagtgctaggattacaggtgtgagccactgcgcccatccaaggtaccagttttggttggtaaggacattaatttccttttgctgctgtaacaaattagtgcaacctagtggtgtaaaacaacaca

SEQ ID NO: 89088 - DNA, 747 bp, Homo sapiens
tgctgatattttatttaggatttttgcatcagtgttcatcagagatattgacctgtaggtttgtttgtttgtttatttatttattttttgtggtttcttggtctggcttaggtatcaaggtgatgctggactcataaaatgtgttaggaaatattccctcctgttgtttttcttggaagagtttaagaagtcttggtaataattctactttgaaaatttggtaaaattcagccgtgaagccatctcttcctgggcttttctttgttgggaggtcagattactttaataacagattgagatatttggaagctgggcctcagttcagaggattagtctgtttttggtttcgactttgttgtaaggtaggcaggttttctttttttttttttgagacagtcttgctatgtcactcaggctggagtgcatgatctcgactcactgcaacttccgcctcatgggctcaagtgattcttgtgcctcagcctctcgaatagctgggattacgagtacaygtcaccacgctcggctaatttttgtatttttagtagagacagagtttcaccatgttggctaggctgttcttgaactcctgacctcatgatccctgtgatctggcctcctaaagtgctaggattacaggtgtgagccactgcgcccatccaaggtaccagttttggttggtaaggacattaatttccttttgctgctgtaacaaattagtgcaacctagtggtgtaaaacaacaca

SEQ ID NO: 89089 - DNA, 573 bp, Homo sapiens
tggcctatgggctctggtacaattttgtcttttaaaaatgagacatgataccatcaccagatgacaaaccagagctgcagtcttggtatcttggatatataactcttcacactaccaagaaaataaaaagaaaacaaaaaatctctagttktttaagtaaaggttctataaggaaataacggaggaaagcaggtttattgcatattaattgtgacaggatataagctacaaacccttacatcaagggtgctcattaaattgcattccaagctctttctaaattaaatttattatgatttggtaaccatttaaagtagatttggtgggactgatccagtagtcagtttttcagattaaacaaagagaaacatctctgttaggtgttgacatctgttccctgtcatgctcagaaaacatgctaagaattggctggatcacggaaacaacagtactgtgtacttcttcatgagaatagtccagtttcaaaatgactgacacagcccttttaaggtcagttgaaggcacaggtggggaatgacatatgggaatcctggaagaatcagatcaacttcc

SEQ ID NO: 89090 - DNA, 573 bp, Homo sapiens
tggcctatgggctctggtacaattttgtcttttaaaaatgagacatgataccatcaccagatgacaaaccagagctgcagtcttggtatcttggatatataactcttcacactaccaagaaaataaaaagaaaacaaaaaatctctagttgtttaagtaaaggttctataaggaaataacggaggaaagcaggtttattgcatattaattgtgacaggatataagctacaaacccttacatcaagggtgytcattaaattgcattccaagctctttctaaattaaatttattatgatttggtaaccatttaaagtagatttggtgggactgatccagtagtcagtttttcagattaaacaaagagaaacatctctgttaggtgttgacatctgttccctgtcatgctcagaaaacatgctaagaattggctggatcacggaaacaacagtactgtgtacttcttcatgagaatagtccagtttcaaaatgactgacacagcccttttaaggtcagttgaaggcacaggtggggaatgacatatgggaatcctggaagaatcagatcaacttcc

SEQ ID NO: 89091 - DNA, 706 bp, Homo sapiens
tggtgtgctgcctctgtgcacctaaccgtagtactgtgcacttaggtcctcggggaagggcagttgaccaggtagacagggcatcctgagctccatgcctatttgagaaagccactagttctccacaatcagtggactcatgtgccccaatcccattcacgtggccaggtccagcctttggcagctgttcccgcctctccccytctctcctaagcacgtgatttataatgtggaaccctgtgtggggagaaatgaagtgtctgctacagccaaaacttggctccaggaaggcagatatcaactcacacacccgatgatggacagcgggacctcgtggtgcagcgtgtttacagcttacaagggtgagttgtgcgtatttcgaacttggcccggacgcctacttgcccaatcagcttgttgggcggtgtctcttctgatttagagctctggatctgccaatttgatttctgaagctaactcttaggtttgccaagtctgcagcaggtctgggctcacaggatctatgcaccgcagagctaggtcaccattctagccccccagccagaaactacagatgaggagctgagactgagaaagggaaggtgctggccccaggtcacagcacatgagggagaacgaaacccctgggggctgtggtctgttgcctgtgttcagggctcagcttggccttaggtccttaggcaaa

SEQ ID NO: 89092 - DNA, 706 bp, Homo sapiens
tggtgtgctgcctctgtgcacctaaccgtagtactgtgcacttaggtcctcggggaagggcagttgaccaggtagacagggcatcctgagctccatgcctatttgagaaagccactagttctccacaatcagtggactcatgtgccccaatcccattcacgtggccaggtccagcctttggcagctgttcccgcctctccccctctctcctaagcaygtgatttataatgtggaaccctgtgtggggagaaatgaagtgtctgctacagccaaaacttggctccaggaaggcagatatcaactcacacacccgatgatggacagcgggacctcgtggtgcagcgtgtttacagcttacaagggtgagttgtgcgtatttcgaacttggcccggacgcctacttgcccaatcagcttgttgggcggtgtctcttctgatttagagctctggatctgccaatttgatttctgaagctaactcttaggtttgccaagtctgcagcaggtctgggctcacaggatctatgcaccgcagagctaggtcaccattctagccccccagccagaaactacagatgaggagctgagactgagaaagggaaggtgctggccccaggtcacagcacatgagggagaacgaaacccctgggggctgtggtctgttgcctgtgttcagggctcagcttggccttaggtccttaggcaaa

SEQ ID NO: 89093 - DNA, 706 bp, Homo sapiens
tggtgtgctgcctctgtgcacctaaccgtagtactgtgcacttaggtcctcggggaagggcagttgaccaggtagacagggcatcctgagctccatgcctatttgagaaagccactagttctccacaatcagtggactcatgtgccccaatcccattcacgtggccaggtccagcctttggcagctgttcccgcctctccccctctctcctaagcacgtgatttataatgtggaaccctgtgtggggagaaatgaagtgtctgctacagccaaaacttggctccaggaaggcagatatcaactcacacacccgatgatggacagcgggacctygtggtgcagcgtgtttacagcttacaagggtgagttgtgcgtatttcgaacttggcccggacgcctacttgcccaatcagcttgttgggcggtgtctcttctgatttagagctctggatctgccaatttgatttctgaagctaactcttaggtttgccaagtctgcagcaggtctgggctcacaggatctatgcaccgcagagctaggtcaccattctagccccccagccagaaactacagatgaggagctgagactgagaaagggaaggtgctggccccaggtcacagcacatgagggagaacgaaacccctgggggctgtggtctgttgcctgtgttcagggctcagcttggccttaggtccttaggcaaa

SEQ ID NO: 89094 - DNA, 706 bp, Homo sapiens
tggtgtgctgcctctgtgcacctaaccgtagtactgtgcacttaggtcctcggggaagggcagttgaccaggtagacagggcatcctgagctccatgcctatttgagaaagccactagttctccacaatcagtggactcatgtgccccaatcccattcacgtggccaggtccagcctttggcagctgttcccgcctctccccctctctcctaagcacgtgatttataatgtggaaccctgtgtggggagaaatgaagtgtctgctacagccaaaacttggctccaggaaggcagatatcaactcacacacccgatgatggacagcgggacctcgtggtgcrgcgtgtttacagcttacaagggtgagttgtgcgtatttcgaacttggcccggacgcctacttgcccaatcagcttgttgggcggtgtctcttctgatttagagctctggatctgccaatttgatttctgaagctaactcttaggtttgccaagtctgcagcaggtctgggctcacaggatctatgcaccgcagagctaggtcaccattctagccccccagccagaaactacagatgaggagctgagactgagaaagggaaggtgctggccccaggtcacagcacatgagggagaacgaaacccctgggggctgtggtctgttgcctgtgttcagggctcagcttggccttaggtccttaggcaaa

SEQ ID NO: 89095 - DNA, 706 bp, Homo sapiens
tggtgtgctgcctctgtgcacctaaccgtagtactgtgcacttaggtcctcggggaagggcagttgaccaggtagacagggcatcctgagctccatgcctatttgagaaagccactagttctccacaatcagtggactcatgtgccccaatcccattcacgtggccaggtccagcctttggcagctgttcccgcctctccccctctctcctaagcacgtgatttataatgtggaaccctgtgtggggagaaatgaagtgtctgctacagccaaaacttggctccaggaaggcagatatcaactcacacacccgatgatggacagcgggacctcgtggtgcagcgtgtttacagcttacaagggtgagttgtgcgtatttygaacttggcccggacgcctacttgcccaatcagcttgttgggcggtgtctcttctgatttagagctctggatctgccaatttgatttctgaagctaactcttaggtttgccaagtctgcagcaggtctgggctcacaggatctatgcaccgcagagctaggtcaccattctagccccccagccagaaactacagatgaggagctgagactgagaaagggaaggtgctggccccaggtcacagcacatgagggagaacgaaacccctgggggctgtggtctgttgcctgtgttcagggctcagcttggccttaggtccttaggcaaa

SEQ ID NO: 89096 - DNA, 706 bp, Homo sapiens
tggtgtgctgcctctgtgcacctaaccgtagtactgtgcacttaggtcctcggggaagggcagttgaccaggtagacagggcatcctgagctccatgcctatttgagaaagccactagttctccacaatcagtggactcatgtgccccaatcccattcacgtggccaggtccagcctttggcagctgttcccgcctctccccctctctcctaagcacgtgatttataatgtggaaccctgtgtggggagaaatgaagtgtctgctacagccaaaacttggctccaggaaggcagatatcaactcacacacccgatgatggacagcgggacctcgtggtgcagcgtgtttacagcttacaagggtgagttgtgcgtatttcgaacttggccyggacgcctacttgcccaatcagcttgttgggcggtgtctcttctgatttagagctctggatctgccaatttgatttctgaagctaactcttaggtttgccaagtctgcagcaggtctgggctcacaggatctatgcaccgcagagctaggtcaccattctagccccccagccagaaactacagatgaggagctgagactgagaaagggaaggtgctggccccaggtcacagcacatgagggagaacgaaacccctgggggctgtggtctgttgcctgtgttcagggctcagcttggccttaggtccttaggcaaa

SEQ ID NO: 89097 - DNA, 630 bp, Homo sapiens
ggtgccgaaggaatgtcccgtgtttaccgggaacatgggagataatggcctcatgagtacgtaagagagcacagacagcgcagtgacgaatcctgcttagctgcgtccccaaggatgaccagctggaccgtgcggcagatgggggccatggaaggcatttgagcagcgagaaggccagtcatacttgtgctttggaaagatctccatggatagttacacatagaaggtgaattgagctggtctggtcccgaggagaagggaacagatgtttgaccactatgaaccttatggtacatcttgcctggagccaaaactgagacaggttgagccgcaaggaacaaagatacaaatagatctgctgtggaggggacttgactgtttcccaagaagtcycttgggactgctctttgctggaacaggtgcaaatccaaggaattaaaaggaggtggtggcttgtgggttgagtcagcattaatgccagtgaaatacagcctttgacgtcactcagttgatcttgcatcttgaaagctcctataaaaccagaaaattaatggcaaatcatctaaaaacagctcagtagctctcagagctttgtgtcagccttgtcctccggaagccaagctgtagctg

SEQ ID NO: 89098 - DNA, 644 bp, Homo sapiens
ccctctcccacttaccttttaaaaaatgcctataattttacaaaggagaaaatgtgaagtcttttttttttttgagaccgagtcttcctctctcccctaggctggagggcagtttggacgatcttagctcactacacccccacctcccgggttcaagcgattctcctgcctcagcctcctgggtacctgggattacaggcacccgccaccatgctcgaccagaaaatgtggtcttttacatatcaaggaaatagtaactggctggaaagcaggaaagagcatcaactccctattagactcatcggagccgaactccctgttagacttatcggacccgaactctgatcttgatctgcacttcaaccagtggcctcagcccactcccctggtcttgcatttgtctcactgtctcccctaaagacatcccttcctccccttcaccaagcatgtcccccttggggtcagccctcgcctggactattgcagtagcctccaggctagtctcagctaccctgtacaccctccaaataggccacagagtctttgtctcaaacacaggccagacctcctgcccttactcaaaaccctaccatgggcctctggtggccycaggattaggtcttgacaccctagtctggccttca

SEQ ID NO: 89099 - DNA, 1233 bp, Homo sapiens
atatgcacactcacttctgtatatacaacttgatttgtaataattttaatatgtttaaataattttatgagttttaaaagatacgattcatcrtcttaactctggaaggtacctttaaaagtatctcttgcactctcatcattttacagatgagtattttcaaagaaataatttgagtagcagacagacttcagcctggaatccagttcctgagactcctagttcatcattccttttactaaaccctaatgtctcccacgcagattctaattatatcttatgaatttttaaacttccaagattagagaattgcaagattgaagtttttcatagactagttgtaatgagagcaaatataaattagaaggtgattggaagtgaatcagaagcctgaatttatagcttctaggatgctacttaaattaaaaagttaattataatgtgaatatgaatgaaaagtttattgctcattatttaaaatatatacacatttataagaaacttcatagaaaacacttggatgttcatttttcttgtgtctataatacccagtaactgttatattgtataatagaattcattagttttaaaatatgtcaaaatccattgacatgtcaagtagagaaattatatctcttggagccttgaacactcttttgaaggattgataacagctcctggtgaaaattgaagctagatttggtgacttaatgtggtcctttcagggatagaaatccatccatgtattaatggagtgtagacaattattggtggtgacaatcaatacgttttattagatagcaaaaggagaacaaaggagaagcctgacttgcaaatgtttatttctgttagcattcagtcatccttacctcctagtccataccagggctggttttgaactgttgtcgtgatacagtcacatacacacagtgtgagagaagcttccaaggggggatgtttgagcacgccagactttagtggcagacagacaagatttgaaaactggttctgctactaacttgtgactctgggcccaatacatgacacagttgcccaaacctcattgtcttcatcttaaaaaagagaatgctaagatttgtgtcccaaggtagtgtcatcatgtctgcaaagtacttggcttatgggcctctaaataagtggcagcgattactatcatcatcatcatcatcatcatcatcatcatcaccatcatcattgttttgctattttgaa

SEQ ID NO: 89100 - DNA, 1218 bp, Homo sapiens
tttgagatcatttcaaaatttaaatatctgttttttamaatatccataacagttatcatatataaaaaaactgtttaaaagatttaatagaagaaatgactccatttataagttcaataaaaaggtaaacatagctaaaaataaacttagaggaaagaagccatatctatatgaagaaaactttgaaacagtaccgaattaaacaaaagatttatttcttgttatatatctttttgtcttttgaatttttgccaattgcatttattttttatttaagaataagtgaatagaattacaacaacaaaaacagtgcattggagaaagtattatcagaacatgaattggaccccattattctgataatgaaaaaaaaatttttcagcctggctcagtgactcacacctgtaatcccagcactttgggaggccaaggcaggtggattacctgagatcaggaattcgagacccagcctggccaacatggcaaagccccgtctctactaaaaatacaaaaattagctgggtgtggtggcctgcacctgtaatcccaattactcggaaggctgaggcaggagaatctcttgaacctgggaggcagaggttgcagtgagcctagattgcaccattgcactccagcctaggcaacagagggagacaaaaaaaaaaaggaaacttccaatttgctttttgaacctagtagaaatcgctataaagaaatcactgttaaattttttttaaatggcacagaaatggattctgattgttaaatacatgattgaacatgatggagacccctcattgactcgtgagcacctcaagctggaagttcaaggccatccatgattcaattcagtcaagcttaggagaaatgattcactcccttccagaaacctctgcaacacactggacgacctcacttaagggctcatgccacaccttcttaccttcctataagactgaaaattccttcagggctgggaaaataaactcttgcccatcatccattgccactttctgggtctttgcacacaggaaacatgtgactgtgcgactgtacgtttcattttcatttctctcttggtccaaactcaggcccagactgtcaaaagtgccttgccaattaagaaccaagttttacgtatgtattttactgaagatgggagaaaaagaagaagcaaaacaatagtaatttactgcttctgatttttcaaaagagaat

SEQ ID NO: 89101 - DNA, 760 bp, Homo sapiens
tctgcagacctactaaatcagaaactctggaaatgggatctagcaatctatgttttaacaagtccttcatactgaagtttgataaccactgatcartaccatccttccagctgctagtgaattccctaccatggcaattctaaaagaaatttatccatgcatatgataacatatgtaaagtaccacaatcagagcctggtgatgtacgatttatttgctccttagttcagccaaatctgggttcttgtctcacaaccaggaaaaattaggcaagtgaacacattgaaaggtgaagagggctgaatttattaagtgaaaggaaagctctccataaaaaagaggggtccgtcattcaggtttctacctcacaaattgaataccaggccactacacatgagctgaagaggccaggtcccttccctgcataaggcgtggattcctggtgactccaccccattcttccagtgttcttgtgggcccttagtctgagccacttgacattgatttatttcccttactgcacgtgtgttaagggacagaagttttcaccgtaggcatggttaggcaagccccctctgcacaatgacctgggtgggtcggagactctctgggtacccttccttatctgcctaggcatttggctgtctcctgcctgtatcattcccccctctaaagaagtacatctaacagccattagaataaggataaggatgatgattgaccttaactgctttctgctgacagggggtgctgttttcaa

SEQ ID NO: 89102 - DNA, 857 bp, Homo sapiens
ccctgattcaggcacctttggcagtgacgagatagatttaggcatgacagagcagcgcgaagcagcagcagaaagaaatgagctgaaaatctactgcggcagcagcaaaggcacggcaggttgtatggaagcttcagaagctctccccatcaaagtggtacttgaggccgcaaacttcagatttaggtgtaattaatgccttcccgcctgtcccccccgccccctcacttcttgggtagtgatggaacttgtgaagagagcgcgccaactttaagagagagagagagagaaagaaaaaaaaaagattagtggagaggagattcattcctgattcattagctttyctcttaccaaaattaaaagcagatggaagagaaaggcagccaaaggcatcccagaaacaaaaggcaaatagcaaagacttgagtctcccggaaagcggacccgcccccctccccagatgtagcgcggtgtgtcaagtcacttctgtggagaaagctccaaggatgaggagtggggattgcaggagctgacctgggagagaagtttggtttcaaagtcgattgtcccagggggcatctggcaaatggtgatggagaggatggggttggggagagggacaaattgaatggttggttaccggaaggatctgttattataccagacaggttttgggttctgaaagccctatcgttgctctctgtaactccacatcccctttgtcccaattaaataatttccccgaagggataagaaggttcttccaggcttcttcattttagagagaaaatggcaattagggaaaacatggttcggaaatttaagatctggtcgtattaaaaaagatcaaataagga

SEQ ID NO: 89103 - DNA, 857 bp, Homo sapiens
ccctgattcaggcacctttggcagtgacgagatagatttaggcatgacagagcagcgcgaagcagcagcagaaagaaatgagctgaaaatctactgcggcagcagcaaaggcacggcaggttgtatggaagcttcagaagctctccccatcaaagtggtacttgaggccgcaaacttcagatttaggtgtaattaatgccttcccgcctgtcccccccgccccctcacttcttgggtagtgatggaacttgtgaagagagcgcgccaactttaagagagagagagagagaaagaaaaaaaaaagattagtggagaggagattcattcctgattcattagctttcctcttaccaaaattaaaagcagatggaagagaaaggcagccaaaggcatcccagaaacaaaaggcaaatagcaaagacttgagtctcccggaaagcggacccgcccccctccccagatgtagcgcggtgtgtcaagtcacttctgtggagaaagctccaaggatgaggagtggggattgcaggagctgacctgggagagaagtttggtttcaaagtcgattgtcccagggggcatctggcaaatggtgatggagaggatggggttggggagagggacaaattgaatggttggttaccggaaggatctgttattataccagacaggttttgggttctgaaagccctatcgttgctctctgtaactccacatcccctttgtcccaattaaataatttccccgaagggataagaaggttcttccaggcttcttcattttagagagaaaatggcaattagggaaaacatggttcggaaatttaagayctggtcgtattaaaaaagatcaaataagga

SEQ ID NO: 89104 - DNA, 851 bp, Homo sapiens
tcgcatgaaagtttcactcaaggcaagagtggcaaatgcagacccatgggcacctgcacctccaccccatttagggaatcaggttcgacctcctaggagactttatgttttacaagtgccttgattggaaccactgtgccaacctcaatgaccttttattttaggatgagatttacttgtactattaaatcattctactttccaacaataatgttttattgtttttaattatgaataagatgcatgctctttgtaagaaatttggagaatacaaaaatctgcaaagaagaacttaaaagtcacttcaattttgtcatgaagagattctctcataaataaatactcatttaattctaagcttgttctacttacttgggagacatgggtgatcatgagccaatgatttcacttcacaggtttctcaaagtagtaagaagaaaggtctttctctgtttgtgaaatttccttccaattttcttttcgtcacctaagctggagtgcagtggcacaatcttggctcactgcaacctcttctgcttcccaggttcaagggattatccagcctcagcatcccaagtagctgaaattacaggcacccgccaccctgtcaggctaatttttatatttttagtagagacggggtttcaacatgttgtccaggctggtctagaactcctggcctcaagtgatccacctgccttggcctcccaaagtgctgggattacaggcatgagccaccgcacccagccccttccaatctttttattcatacacagatyatattttatttgaagcatcaacaaaatactggaatggtttggtgtggtagtgaaggcttggactgggggata

SEQ ID NO: 89105 - DNA, 754 bp, Homo sapiens
aagtccrcctagctgcagtcaccccacatcctctgcatgtcacaggtgctcagaaagatgctgaaggcacctggcccttcaccttcggaaagccaaaatgagcacggcccctaaagaggggattgacagccttttctggaaaaaatggaagtttgaatctgaggaggtgtccctcaacaacaggtgctgctccccaaatctggggccaaacgcagcagttgttcccccacttagacccctgagacccatctatatggtttttcagagccaggacacatccccaaaggtcatggcctttggtggttagcattgacttggggcccatcacatgccagaggctgcccgaagtgcttaaatgttattatctcattcgatcttcacagtcctgatggaagtgactcttcttagagtcttcctatctcacagatgaggaaaccgaggcacagagaggttaagtggcttgtctaagagctcacaaaaagagcgatggagctaaggcttggccccagatattagatcccgaacccacgccttaaccagtgacctgcactgactctcaaagaaggaagctggtgcctgggaaggagggtgcatagtgagggtgtgcatggggtgtgtgtgtttgtggggtggccagcactctccgggggcactttgccaatgagttcagctcccatgaagtccactgttgttctcctgaccagccactcagtcttgatttacttggcccagggccactggcacacctcacccc

SEQ ID NO: 89106 - DNA, 754 bp, Homo sapiens
aagtccacctagctgcagtcaccccacatcctctgcatgtcacaggtgctcagaaagatgctgaaggcacctggcccttcaccttcggaaagccaaaatgagcacggcccctaaagaggggattgacagccttttctggaaaaaatggaagtttgaatctgaggaggtgtccctcaacaacaggtgctgctccccaaatctggggccaaacgcagcagttgttcccccacttagacccctgagacccatctatatggtttttcagagccaggacacatccccaaaggtcatggcctttggtggttagcattgacttggggcccatcacatgccagaggctgcccgaagtgcttaartgttattatctcattcgatcttcacagtcctgatggaagtgactcttcttagagtcttcctatctcacagatgaggaaaccgaggcacagagaggttaagtggcttgtctaagagctcacaaaaagagcgatggagctaaggcttggccccagatattagatcccgaacccacgccttaaccagtgacctgcactgactctcaaagaaggaagctggtgcctgggaaggagggtgcatagtgagggtgtgcatggggtgtgtgtgtttgtggggtggccagcactctccgggggcactttgccaatgagttcagctcccatgaagtccactgttgttctcctgaccagccactcagtcttgatttacttggcccagggccactggcacacctcacccc

SEQ ID NO: 89107 - DNA, 1920 bp, Homo sapiens
aattccaggttggaggggcggcaacctcctgccagccttcaggccactctcctgtgcctgccagaagagacagagcttgaggagagcttgaggagagcaggaaaggtgggacattgctgctgctgctcactcagttccacaggtgggagggacagcagggcttagagtgggggtcattgtgcagatgggaaaacaaaggcccagagaggggaagaaatgcccaggagctaccgagggcaggcgacctcaaccacagcccagygctggagctgtgagtggatgtagagcagcggaatatccattcagccagctcaggggaaggacaggggccctgaagccaggggatggagctgcagggaagggagctcagagagaaggggaggggagtctgagctcagtttcccgctgcctgaaaggagggtggtacctactcccttcacagggtaactgaatgagagactgcctggaggaaagctcttcaagtgtggcccaccccaccccagtgacaccagcccctgacacgggggagggagggcagcatcaggaggggctttctgggcacacccagtacccgtctctgagctttccttgaactgttgcattttaatcctcacagcagctcaacaaggtacataccgtcaccatccccattttacagatagggaaattgaggctcggagcggttaaacaactcacctgaggcctcacagccagtaagtgggttccctggtctgaatgtgtgtgctggaggatcctgtgggtcactcgcctggtagagccccaaggtggaggcataaatgggactggtgaatgacagaaggggcaaaaatgcactcatccattcactctgcaagtatctacggcacgtacgccagctcccaagcaggtttgcgggttgcacagcgggcgatgcaatctgatttaggcttttaaagggattgcaatcaagtggggccccactagcctcaaccctgtacctcccctcccctccacccccagcagtctccaaaggcctccaacaaccccagagtgggggccatgtatccaaagaaactccaagctgtatacggatcacactggttttccaggagcaaaaacagaaacaggcctgaggctggtcaaaattgaacctcctcctgctctgagcagcctggggggcagactaagcagagggctgtgcagacccacataaagagcctactgtgtgccaggcacttcacccgaggcacttcacaagcatgcttgggaatgaaacttccaactctttgggatgcaggtgaaacagttcctggttcagagaggtgaagcggcctgcctgaggcagcacagctcttctttacagatgtgcttccccacctctaccctgtctcacggccccccatgccagcctgacggttgtgtctgcctcagtcatgctccatttttccatcgggaccatcaagagggtgtttgtgtctaaggctgactgggtaactttggatgagcggtctctccgctctgagcctgtttcctcatctgtcaaatgggctctaacccactctgatctcccagggcggcagtaagtcttcagcatcaggcattttggggtgactcagtaaatggtagatcttgctaccagtggaacagccactaaggattctgcagtgagagcagagggccagctaagtggtactctcccagagactgtctgactcacgccaccccctccaccttggacacaggacgctgtggtttctgagccaggtacaatgactcctttcggtaagtgcagtggaagctgtacactgcccaggcaaagcgtccgggcagcgtaggcgggcgactcagatcccagccagtggacttagcccctgtttgctcctccgataactggggtgaccttggttaatattcaccagcagcctcccccgttgcccctct

SEQ ID NO: 89108 - DNA, 1920 bp, Homo sapiens
aattccaggttggaggggcggcaacctcctgccagccttcaggccactctcctgtgcctgccagaagagacagagcttgaggagagcttgaggagagcaggaaaggtgggacattgctgctgctgctcactcagttccacaggtgggagggacagcagggcttagagtgggggtcattgtgcagatgggaaaacaaaggcccagagaggggaagaaatgcccaggagctaccgagggcaggcgacctcaaccacagcccagtgctggagctgtgagtggatgtagagcagcggaatatccattcagccagctcaggggaaggacaggggccctgaagccaggggatggagctgcagggaagggagctcagagagaaggggaggggagtctgagctcagtttcccgctgcctgaaaggagggtggtacctactcccttcacagggtaactgaatgagagactgcctggaggaaagctcttcaagtgtggcccaccccaccccagtgacaccagcccctgacacgggggagggagggcagcatcaggaggggctttctgggcacacccagtacccgtctctgagctttccttgaactgttgcattttaatcctcacagcagctcaacaaggtacatacmgtcaccatccccattttacagatagggaaattgaggctcggagcggttaaacaactcacctgaggcctcacagccagtaagtgggttccctggtctgaatgtgtgtgctggaggatcctgtgggtcactcgcctggtagagccccaaggtggaggcataaatgggactggtgaatgacagaaggggcaaaaatgcactcatccattcactctgcaagtatctacggcacgtacgccagctcccaagcaggtttgcgggttgcacagcgggcgatgcaatctgatttaggcttttaaagggattgcaatcaagtggggccccactagcctcaaccctgtacctcccctcccctccacccccagcagtctccaaaggcctccaacaaccccagagtgggggccatgtatccaaagaaactccaagctgtatacggatcacactggttttccaggagcaaaaacagaaacaggcctgaggctggtcaaaattgaacctcctcctgctctgagcagcctggggggcagactaagcagagggctgtgcagacccacataaagagcctactgtgtgccaggcacttcacccgaggcacttcacaagcatgcttgggaatgaaacttccaactctttgggatgcaggtgaaacagttcctggttcagagaggtgaagcggcctgcctgaggcagcacagctcttctttacagatgtgcttccccacctctaccctgtctcacggccccccatgccagcctgacggttgtgtctgcctcagtcatgctccatttttccatcgggaccatcaagagggtgtttgtgtctaaggctgactgggtaactttggatgagcggtctctccgctctgagcctgtttcctcatctgtcaaatgggctctaacccactctgatctcccagggcggcagtaagtcttcagcatcaggcattttggggtgactcagtaaatggtagatcttgctaccagtggaacagccactaaggattctgcagtgagagcagagggccagctaagtggtactctcccagagactgtctgactcacgccaccccctccaccttggacacaggacgctgtggtttctgagccaggtacaatgactcctttcggtaagtgcagtggaagctgtacactgcccaggcaaagcgtccgggcagcgtaggcgggcgactcagatcccagccagtggacttagcccctgtttgctcctccgataactggggtgaccttggttaatattcaccagcagcctcccccgttgcccctct

SEQ ID NO: 89109 - DNA, 751 bp, Homo sapiens
ttaatatatcctatgctttgtgaactctggaaattattttgcttataccttcmcagtaggtttattttttcgtgtgtgtgtgtgtgtgtgtgtgtgtgtgtgtgtgtgtgtgtgtgtgtggaccagccatgtggaatttcactttatgcatgcagagcttagtacttagctttggacttaaagagacccctatgaacatttctaaagctctcctctagtacttcactgcacaaattatagcttcctcagttttctcaaactctaatgtctgtctcctaagctcagcaagcctcccatgccctccttgggttttcttccacacgtccagaaagtatccttaggcagaaaattgggacaattgtagagcttatctcattttttaccttccctgcctgttctctaatgtctgaattgttatatgtatttttcgagtatctcaatagtgtcataaattttgtctagttttctgtttacaacagtttgcaaccaatatcagttactttgttttggccaaaagtgtaagtcaactcaaactttacatatatacctgtgtaactttaccttaagtagctacaggactttccatcaccctgagttccccttgcttattaccagtcaggattactcttcaaagataaatggattatttcattttatttcaattcatttattcttttagcaaccacttactgaaccgtgagtattggccaaagagtgggtgcacaagtagacaaaattaaggtagacagga

SEQ ID NO: 89110 - DNA, 759 bp, Homo sapiens
cttccactagtgatcttgttattaaccagtctgttgtagggcctgggagttaaacatgtatttttgaaactccctgtgtaattctgttgtgcaccagaattaagaaaagtgccctgggtcttgtatattacagccatgcttatgaaaattatctgtttgaggagcttgcagagaagagaaccttcatttcattctgattgacccaagaggctctctcccgttcagagggaaaaaaatctctatctttgtctgagacccaactcttgatctttgtttgtcatcttgaaaagcaagcttttgttacagtaggtagctagttgggtgtgagccgggcaggggagggctaccctctacacacaccagaaggtgatgatcaggctgttaacactctctgtaaagtaatgattggtcacagctggtaccagcgaactgcagtctcctactagatagaaaacacctgaaactgttgataagcmgcttctcaataagatctcaggagtttggagaagtaatgcaagactccagaagtatgccaatgtatgaaaaccccaagtctagaggtcaaactaggcacttgtctttcaagttgcttgcttggccttcttccaagtgtactttccttcctttcattcttgctctaaagcttttttgtaaactacctctcctgctctaaaacttgcctcagtctctccttctgccttatgtccctcaaattctttcttctgtggagtgtggggggcaagaattgaggatgctgta

SEQ ID NO: 89111 - DNA, 612 bp, Homo sapiens
aattttgaaattcaaaatatctccttttgaatattatttcctcttgtgggatgtgctctgcctcttaaatgcatgaaataatgtaaaaaagtaagtctatcacatgtacaggcsggataggctgcagaatattggaagtttgtaatcatttttcattactaaaatttacattaaaaatcttattagataacattagcaatatttcagtacagaatcttagagaaaatcatttgagtctttgagtttattttcatggatctatacataaatattcctcaatgaattgctatctgaccacttctgcttctccaaaaatggttgggccataggacaggagaatctgaacatcgaaatgtattctttattcaattctgggcacatttttacaatctttgaatgcattttttaaaaattctagttattttcttaagtggtgggatattaacatacactgaaagctacttgatgggagactggaggttcgtttcacaatatccttcacagacaatattacattgccttgagcatagtagatgttcaataaataataaattcgtatagattcaagtttaattatatttcacaatgttctgtaggagatttttgacattt

SEQ ID NO: 89112 - DNA, 1034 bp, Homo sapiens
tgcatactgtatatagggttcagtactgtctgtggttttaggcactcaccaggggtcttggaacatatgcccygaggatcagggagaattactatacaagcaaaaggaggaggagaagggaatctttccagcaatcatcttttatacttttcacagcaactatctcatacgaaagtcttgtgatatgtgctatttgtttacatctaaacaagcagtatggcattccatctatgaaatgctttagtgaattataaacaaggaaggaatagaaaggccagtggagttctattgtggccatcagataatatgtaaaatatttgcatatattggctctattagaaagtctcaaatatggaagattatttggaggaggtgaatactatgtgttataagaaaacattcaggaaaacagtggagggggaagcaataccattaaaaagaaatagaatcaggaaaacaatattaccgtgttcttcttcctaaatttagactaccatagctgaatatgaacagaaaacagaaaagatggtatgcagaaggcaggcgtttgtcctaatatcctggtgcattcgatataagaaagcaccagctacatgccataagatctaattaccaagaattgcctttcatgccccacagcaatcattttgatgacaggcttctctgcactgtaaaacaaaatggggattctgtgctgtataaactgcctcagcgcttcctttccttcctctgctatcggcctccccatctcatttattttccacacattaatggtagcagtcaccttgagctggtgatgcagagtaattttcacagaaaccttgatcagaaaccataaatcagcctgatgtgcttttatggtctaataacattcaggttgctcctacaggcctgtatgtaaaactgcattgcagtgaatcctttgagttttttttctttttctctctggctgtgctcttactctccttctcatgcacactctctctctctccttccctctcttctcttctcaccatctctctaggcacatatgt

SEQ ID NO: 89113 - DNA, 1034 bp, Homo sapiens
tgcatactgtatatagggttcagtactgtctgtggttttaggcactcaccaggggtcttggaacatatgccccgaggatcagggagrattactatacaagcaaaaggaggaggagaagggaatctttccagcaatcatcttttatacttttcacagcaactatctcatacgaaagtcttgtgatatgtgctatttgtttacatctaaacaagcagtatggcattccatctatgaaatgctttagtgaattataaacaaggaaggaatagaaaggccagtggagttctattgtggccatcagataatatgtaaaatatttgcatatattggctctattagaaagtctcaaatatggaagattatttggaggaggtgaatactatgtgttataagaaaacattcaggaaaacagtggagggggaagcaataccattaaaaagaaatagaatcaggaaaacaatattaccgtgttcttcttcctaaatttagactaccatagctgaatatgaacagaaaacagaaaagatggtatgcagaaggcaggcgtttgtcctaatatcctggtgcattcgatataagaaagcaccagctacatgccataagatctaattaccaagaattgcctttcatgccccacagcaatcattttgatgacaggcttctctgcactgtaaaacaaaatggggattctgtgctgtataaactgcctcagcgcttcctttccttcctctgctatcggcctccccatctcatttattttccacacattaatggtagcagtcaccttgagctggtgatgcagagtaattttcacagaaaccttgatcagaaaccataaatcagcctgatgtgcttttatggtctaataacattcaggttgctcctacaggcctgtatgtaaaactgcattgcagtgaatcctttgagttttttttctttttctctctggctgtgctcttactctccttctcatgcacactctctctctctccttccctctcttctcttctcaccatctctctaggcacatatgt

SEQ ID NO: 89114 - DNA, 1034 bp, Homo sapiens
tgcatactgtatatagggttcagtactgtctgtggttttaggcactcaccaggggtcttggaacatatgccccgaggatcagggagaattactatacaagcaaaaggaggaggagaagggaatctttccagcaatcatcttttatacttttcayagcaactatctcatacgaaagtcttgtgatatgtgctatttgtttacatctaaacaagcagtatggcattccatctatgaaatgctttagtgaattataaacaaggaaggaatagaaaggccagtggagttctattgtggccatcagataatatgtaaaatatttgcatatattggctctattagaaagtctcaaatatggaagattatttggaggaggtgaatactatgtgttataagaaaacattcaggaaaacagtggagggggaagcaataccattaaaaagaaatagaatcaggaaaacaatattaccgtgttcttcttcctaaatttagactaccatagctgaatatgaacagaaaacagaaaagatggtatgcagaaggcaggcgtttgtcctaatatcctggtgcattcgatataagaaagcaccagctacatgccataagatctaattaccaagaattgcctttcatgccccacagcaatcattttgatgacaggcttctctgcactgtaaaacaaaatggggattctgtgctgtataaactgcctcagcgcttcctttccttcctctgctatcggcctccccatctcatttattttccacacattaatggtagcagtcaccttgagctggtgatgcagagtaattttcacagaaaccttgatcagaaaccataaatcagcctgatgtgcttttatggtctaataacattcaggttgctcctacaggcctgtatgtaaaactgcattgcagtgaatcctttgagttttttttctttttctctctggctgtgctcttactctccttctcatgcacactctctctctctccttccctctcttctcttctcaccatctctctaggcacatatgt

SEQ ID NO: 89115 - DNA, 1034 bp, Homo sapiens
tgcatactgtatatagggttcagtactgtctgtggttttaggcactcaccaggggtcttggaacatatgccccgaggatcagggagaattactatacaagcaaaaggaggaggagaagggaatctttccagcaatcatcttttatacttttcacrgcaactatctcatacgaaagtcttgtgatatgtgctatttgtttacatctaaacaagcagtatggcattccatctatgaaatgctttagtgaattataaacaaggaaggaatagaaaggccagtggagttctattgtggccatcagataatatgtaaaatatttgcatatattggctctattagaaagtctcaaatatggaagattatttggaggaggtgaatactatgtgttataagaaaacattcaggaaaacagtggagggggaagcaataccattaaaaagaaatagaatcaggaaaacaatattaccgtgttcttcttcctaaatttagactaccatagctgaatatgaacagaaaacagaaaagatggtatgcagaaggcaggcgtttgtcctaatatcctggtgcattcgatataagaaagcaccagctacatgccataagatctaattaccaagaattgcctttcatgccccacagcaatcattttgatgacaggcttctctgcactgtaaaacaaaatggggattctgtgctgtataaactgcctcagcgcttcctttccttcctctgctatcggcctccccatctcatttattttccacacattaatggtagcagtcaccttgagctggtgatgcagagtaattttcacagaaaccttgatcagaaaccataaatcagcctgatgtgcttttatggtctaataacattcaggttgctcctacaggcctgtatgtaaaactgcattgcagtgaatcctttgagttttttttctttttctctctggctgtgctcttactctccttctcatgcacactctctctctctccttccctctcttctcttctcaccatctctctaggcacatatgt

SEQ ID NO: 89116 - DNA, 1034 bp, Homo sapiens
tgcatactgtatatagggttcagtactgtctgtggttttaggcactcaccaggggtcttggaacatatgccccgaggatcagggagaattactatacaagcaaaaggaggaggagaagggaatctttccagcaatcatcttttatacttttcacagcaactatctcataygaaagtcttgtgatatgtgctatttgtttacatctaaacaagcagtatggcattccatctatgaaatgctttagtgaattataaacaaggaaggaatagaaaggccagtggagttctattgtggccatcagataatatgtaaaatatttgcatatattggctctattagaaagtctcaaatatggaagattatttggaggaggtgaatactatgtgttataagaaaacattcaggaaaacagtggagggggaagcaataccattaaaaagaaatagaatcaggaaaacaatattaccgtgttcttcttcctaaatttagactaccatagctgaatatgaacagaaaacagaaaagatggtatgcagaaggcaggcgtttgtcctaatatcctggtgcattcgatataagaaagcaccagctacatgccataagatctaattaccaagaattgcctttcatgccccacagcaatcattttgatgacaggcttctctgcactgtaaaacaaaatggggattctgtgctgtataaactgcctcagcgcttcctttccttcctctgctatcggcctccccatctcatttattttccacacattaatggtagcagtcaccttgagctggtgatgcagagtaattttcacagaaaccttgatcagaaaccataaatcagcctgatgtgcttttatggtctaataacattcaggttgctcctacaggcctgtatgtaaaactgcattgcagtgaatcctttgagttttttttctttttctctctggctgtgctcttactctccttctcatgcacactctctctctctccttccctctcttctcttctcaccatctctctaggcacatatgt

SEQ ID NO: 89117 - DNA, 615 bp, Homo sapiens
aaagatgttttggaggagcactattagaatttgtaaatggattagaaatggggtaatcaaaagtatcaaacataattaaacattaaatattctttggaaatacaatttaatcgacataaacttttccatggtaaaaatgtagtataattttttaaattacacatctatttttgattattagttttttccttagttttgctaaaataaatgacatcatgtcattttctcacctctctgcmattgaatgtaacaatgatttttgatggcttgtcagtttgaaaggtagaaaattgtatcttgctattttactttgtttgtctttgattactacttagattcaaattttaatgtgtgtattaaccaactgtatttttcagttgtggattatttctagtcttgattgtttgggggatattgggtattttctttattgatttgaaaggccttattaatttcctgagataatctaaaagttccaacttgatttggctctgagtctttctgattctcttatgtcagtttccccctgccgtttatgctgtagacaatctggacacttctcagccaagcaagttttgtattgcctcttagcttttgcacttgttctccatttct

SEQ ID NO: 89118 - DNA, 1603 bp, Homo sapiens
aaagctctcaaggaggtagggagagcagaagaggaagtccatgtgggaggatggcccaggagactgttttccgagctgctgggccctggagtcagacactaaccctgtttcctctccaagggtccaggaagataacaggatttacttcctcttgtagggccagtaatcaccagtgaccccaagaactttataaaatcctggaccctattcattctggtgcagctgagtaatgggagaaacaagagggctttttctgtcagagaggctgcagtgggtctgacgttggggccctagatgaggtggccaactccaagccctgtggaagattaagttcaggtgagttgcacaggtgtctagaaggccccagtcatgtaagtatgtagccttactctgcctggagcatggatcagtcctacatgtctgtgttccttttcccctcgtgtgaggctttcagctcctaccaaaacgcagcgataggacatagagagccacccagtcaatctgtggggatttagggatagcttccagagaaagacagcaagcatgagagttaaggaaactgcagggtgtcccagagagaaaagaaggaatgcatatgcaaaggccaaggggaaaaggaaaatatagacatgtctgggaaactcataggtttagcatagttggaagttggaagataaacagggaaagaagaatctggggacagaagtgataccaggtgctagaggacattggatgccatgatgctaaggagtttaaagttgagtctgagggtrgtgggggtcattgagacaaggaaggaatttaaacttgagtctgagggtagcaggagtcactgaggcaaggacatcaacatcactgaatctatactgtaaatggagtgtgtagtttgggctccaggaaaacaagtctggccactgtgagggaggtcaggtgggaacacacttcaacagtcaagacaccagagaaggaaggccagagccagagcaggatgctggggaaggagaagttgggagtggatttgagagatgtcgttgaggtgactttgaatgtagggatggaggaagcctggggaatccaatttgatgggtgaaggtggataccgatcagatataggtagggatctgatgggccttacagaaaaagctgagttggtcaggatgatgagagctctcattgatggagttttcatatgtgacaggtgtgttttgcatgtagctcccatgctcaatcctcacaataatggaggcttaaacaccttggccaaggcatcagcagccaggaagtggtggaagccagaatccaaacccaggcatgtggggtttcaaagcctcactgttaaccaccacaaaattgctgccaccgagtgagctgtgcagatgttgggtttcgggggcttaatgtacgcacaagagtgattcccaatagtccattgggttgagagtccaaattcagaatgaaagaagaggcagccagatggatttgcatgctttccaacaattacaaatgtagaagtggtacccagtaggaagagatcttagagaaggcctgaggatttggcaataaaaaatctgttcactcattcttctgctgaatcatttatgca

SEQ ID NO: 89119 - DNA, 1603 bp, Homo sapiens
aaagctctcaaggaggtagggagagcagaagaggaagtccatgtgggaggatggcccaggagactgttttccgagctgctgggccctggagtcagacactaaccctgtttcctctccaagggtccaggaagataacaggatttacttcctcttgtagggccagtaatcaccagtgaccccaagaactttataaaatcctggaccctattcattctggtgcagctgagtaatgggagaaacaagagggctttttctgtcagagaggctgcagtgggtctgacgttggggccctagatgaggtggccaactccaagccctgtggaagattaagttcaggtgagttgcacaggtgtctagaaggccccagtcatgtaagtatgtagccttactctgcctggagcatggatcagtcctacatgtctgtgttccttttcccctcgtgtgaggctttcagctcctaccaaaacgcagcgataggacatagagagccacccagtcaatctgtggggatttagggatagcttccagagaaagacagcaagcatgagagttaaggaaactgcagggtgtcccagagagaaaagaaggaatgcatatgcaaaggccaaggggaaaaggaaaatatagacatgtctgggaaactcataggtttagcatagttggaagttggaagataaacagggaaagaagaatctggggacagaagtgataccaggtgctagaggacattggatgccatgatgctaaggagtttaaagttgagtctgagggtagtgggggtcattgagacaaggaaggaatttaaacttgagtctgagggtagcaggagtcactgaggcaaggacatcaacatcactgaatctatactgtaaatggagtgtgtagtttgggctccaggaaaacaagtctggccactgtgagggaggtcaggtgggaacacacttcaacagtcaagacaccagagaaggaaggccagagccagagcaggatgctggggaaggagaagttgggagtggatttgagagatgtckttgaggtgactttgaatgtagggatggaggaagcctggggaatccaatttgatgggtgaaggtggataccgatcagatataggtagggatctgatgggccttacagaaaaagctgagttggtcaggatgatgagagctctcattgatggagttttcatatgtgacaggtgtgttttgcatgtagctcccatgctcaatcctcacaataatggaggcttaaacaccttggccaaggcatcagcagccaggaagtggtggaagccagaatccaaacccaggcatgtggggtttcaaagcctcactgttaaccaccacaaaattgctgccaccgagtgagctgtgcagatgttgggtttcgggggcttaatgtacgcacaagagtgattcccaatagtccattgggttgagagtccaaattcagaatgaaagaagaggcagccagatggatttgcatgctttccaacaattacaaatgtagaagtggtacccagtaggaagagatcttagagaaggcctgaggatttggcaataaaaaatctgttcactcattcttctgctgaatcatttatgca

SEQ ID NO: 89120 - DNA, 1430 bp, Homo sapiens
cagaagcatctctttgtacctcagggcagccctgtcctcctggttgtgttcctgctgtctggagtctgtgtgttttcctttctcccacatatccctgcataagggtttgtgggcttctatggcactgctcctgtgagggcccatgggcacccaaagtgcccaacccctgcctgggacatgcccctcactgctgcatgcctgagggaactattgagaggtgcagaaaaccacatgggtctgtacttaggaaaacgcagccacccaactggcaaggtgacggcatagatgaggttgaaggggcttgaaggttggccaaatccggagagtcagcacagacagacaccaagtgtgccaggctgaagggtgaaggttcctagagccaagtacacactttaaatccagggagagattgtgggtcagggctggggtgtgctgacgtgagggtgattgttatagcaacattacctttgagaccctcattcacctgggcacttcatatgagctcattctaagccactcagtgacccggcttggggattatcatgacccatatagatcaagaagaaaaaagtagctgttggttagttggctgaactcacaggtatgagcttaacacgaaggattcaagctctggctcttctcttcgccaagtatatgatcttgggcatgttactaaactgtctaagcccccatttcctcatctggcaaatggggctcagatatgttcctacatcatagctttgtcgtgaggattaaataagatgtctgtgaattagcaagacacctagcccatccgtagtaggggatccttaagtgatggcaggaatggagaggtaggaacagatccaccaagtaaagggtaaagccaagatcaaacacaaatccagccaggtgtggctccttctgccttttcactgccactaagagaggggtagcattcaatgagcagatggcagtggctcagagtgcagatcagtgcaaaggtctttctcgtcttctctgcaaagaaggagggatggcatatgtgtatctttggtcatttccaggtgactctatccaaagtccatgcaggcaagtagacgctgtgagcaggatggaatatacagatccaawcctctagagcagagctagggccaggcatgacttgatcaacatctaaatgccaccaacacccaagggccacacagagggaagagaccggggaccacatcttggcactttcagatgggtttgcaagcactggaaatcaaagcttcaccagggatgctttaaagatgaaaatcccagccgggcgcagtggctcacgcctgtaatcccagcactttgggaggccaaggcaggcagatcacgaggtcaggagattgagaccatcctggctaacacagtgaaaccccatctctactaaaaaaaaaaaatacaaaaaattaacc

SEQ ID NO: 89121 - DNA, 1336 bp, Homo sapiens
tcaatgaaagaacaattacttcaatcaacaacttcaacaaatatttagtgtttatcatctatgtgccaagtgacattcgaaaaattcattggcaattcagtgatgaagaaaacaaagtacctatacttatggagcagatattctattagggttaaagagacagtaaacaactaaacaaatatacartgtgtcagttgctgataagtgcttcaaaaatcatacagaacagaaagaggatagacagtggaggcaagtggggtggcaaactacttagataaggtgatcatcaaggcctttcggatttattagtagagagctcatcttataccagttagaattgggatctttgaaaagacctgttaaaaatatataaacatatatatatatatatatacacacacacacacacacacacacacacacatatatatatatacacatatatatacatatatatacacatatatatacatatatatatatacacacatatatatttctgatggcaagtctgagtaaatacaagagaagtcacaatttaattatctttggcacaaagataattaaactacagttgcagatggcatatttttagcattagggaatagaaactattatgtacagtattatgtcccccaaatttaaaatctacataaaatgcatgattttctagaaaaaaagacaaagtgccaaagttgactcaagaaatagaaaacttgagaagaacaaaagaaaatataaaaattagtttaaggctgactttgttagatttatgtttaagatcaggtctaaggacctgctggtttctcaggccaatactatcaaagctttaaggtacaggtaagtcttgccttatataacttgttcagagaaaaggcaaagaaggaaatagtcccaatttattctttattttgtgttttcacaaacacaaaaccaaaataaaacataggccttccttgtgaaaataaatgtaaagatcctaagtaaatgactaataaaccatatctagcagtagttccagagaacacacctcaagcccgagcagaatgtatcatagaaggccacaattgtttggcattagcgaatccattaatataatttactacattaacaaattaaaggaggggaacacctagttaatgaaactaaatacccaccactgatgaaaagtcttacaaaaataagacaagaaatttatttgacatattaaaggatatctgccagaagcctaacagaaagagcagaacagatgatggaatattagatgcttttccaccaaagtcaggaacaagataaggatcgccaccagtcagcattatgcttccaaacctaaccc

SEQ ID NO: 89122 - DNA, 1336 bp, Homo sapiens
tcaatgaaagaacaattacttcaatcaacaacttcaacaaatatttagtgtttatcatctatgtgccaagtgacattcgaaaaattcattggcaattcagtgatgaagaaaacaaagtacctatacttatggagcagatattctattagggttaaagagacagtaaacaactaaacaaatatacaatgtgtcagttgctgataagtgcttcaaaaatcatacagaacagaaagaggatagacagtggaggcaagtggggtggcaaactacttagataaggtgatcatcaaggcctttcggatttattagtagagagctcatcttataccagttagaattgggatctttgaaaagacctgttaaaaatatataaacatatatatatatatatatayacacacacacacacacacacacacacacatatatatatatacacatatatatacatatatatacacatatatatacatatatatatatacacacatatatatttctgatggcaagtctgagtaaatacaagagaagtcacaatttaattatctttggcacaaagataattaaactacagttgcagatggcatatttttagcattagggaatagaaactattatgtacagtattatgtcccccaaatttaaaatctacataaaatgcatgattttctagaaaaaaagacaaagtgccaaagttgactcaagaaatagaaaacttgagaagaacaaaagaaaatataaaaattagtttaaggctgactttgttagatttatgtttaagatcaggtctaaggacctgctggtttctcaggccaatactatcaaagctttaaggtacaggtaagtcttgccttatataacttgttcagagaaaaggcaaagaaggaaatagtcccaatttattctttattttgtgttttcacaaacacaaaaccaaaataaaacataggccttccttgtgaaaataaatgtaaagatcctaagtaaatgactaataaaccatatctagcagtagttccagagaacacacctcaagcccgagcagaatgtatcatagaaggccacaattgtttggcattagcgaatccattaatataatttactacattaacaaattaaaggaggggaacacctagttaatgaaactaaatacccaccactgatgaaaagtcttacaaaaataagacaagaaatttatttgacatattaaaggatatctgccagaagcctaacagaaagagcagaacagatgatggaatattagatgcttttccaccaaagtcaggaacaagataaggatcgccaccagtcagcattatgcttccaaacctaaccc

SEQ ID NO: 89123 - DNA, 1336 bp, Homo sapiens
tcaatgaaagaacaattacttcaatcaacaacttcaacaaatatttagtgtttatcatctatgtgccaagtgacattcgaaaaattcattggcaattcagtgatgaagaaaacaaagtacctatacttatggagcagatattctattagggttaaagagacagtaaacaactaaacaaatatacaatgtgtcagttgctgataagtgcttcaaaaatcatacagaacagaaagaggatagacagtggaggcaagtggggtggcaaactacttagataaggtgatcatcaaggcctttcggatttattagtagagagctcatcttataccagttagaattgggatctttgaaaagacctgttaaaaatatataaacatatatatatatatatatacacacacacacacacacayacacacacacatatatatatatacacatatatatacatatatatacacatatatatacatatatatatatacacacatatatatttctgatggcaagtctgagtaaatacaagagaagtcacaatttaattatctttggcacaaagataattaaactacagttgcagatggcatatttttagcattagggaatagaaactattatgtacagtattatgtcccccaaatttaaaatctacataaaatgcatgattttctagaaaaaaagacaaagtgccaaagttgactcaagaaatagaaaacttgagaagaacaaaagaaaatataaaaattagtttaaggctgactttgttagatttatgtttaagatcaggtctaaggacctgctggtttctcaggccaatactatcaaagctttaaggtacaggtaagtcttgccttatataacttgttcagagaaaaggcaaagaaggaaatagtcccaatttattctttattttgtgttttcacaaacacaaaaccaaaataaaacataggccttccttgtgaaaataaatgtaaagatcctaagtaaatgactaataaaccatatctagcagtagttccagagaacacacctcaagcccgagcagaatgtatcatagaaggccacaattgtttggcattagcgaatccattaatataatttactacattaacaaattaaaggaggggaacacctagttaatgaaactaaatacccaccactgatgaaaagtcttacaaaaataagacaagaaatttatttgacatattaaaggatatctgccagaagcctaacagaaagagcagaacagatgatggaatattagatgcttttccaccaaagtcaggaacaagataaggatcgccaccagtcagcattatgcttccaaacctaaccc

SEQ ID NO: 89124 - DNA, 1336 bp, Homo sapiens
tcaatgaaagaacaattacttcaatcaacaacttcaacaaatatttagtgtttatcatctatgtgccaagtgacattcgaaaaattcattggcaattcagtgatgaagaaaacaaagtacctatacttatggagcagatattctattagggttaaagagacagtaaacaactaaacaaatatacaatgtgtcagttgctgataagtgcttcaaaaatcatacagaacagaaagaggatagacagtggaggcaagtggggtggcaaactacttagataaggtgatcatcaaggcctttcggatttattagtagagagctcatcttataccagttagaattgggatctttgaaaagacctgttaaaaatatataaacatatatatatatatatatacacacacacacacacacacayacacacacatatatatatatacacatatatatacatatatatacacatatatatacatatatatatatacacacatatatatttctgatggcaagtctgagtaaatacaagagaagtcacaatttaattatctttggcacaaagataattaaactacagttgcagatggcatatttttagcattagggaatagaaactattatgtacagtattatgtcccccaaatttaaaatctacataaaatgcatgattttctagaaaaaaagacaaagtgccaaagttgactcaagaaatagaaaacttgagaagaacaaaagaaaatataaaaattagtttaaggctgactttgttagatttatgtttaagatcaggtctaaggacctgctggtttctcaggccaatactatcaaagctttaaggtacaggtaagtcttgccttatataacttgttcagagaaaaggcaaagaaggaaatagtcccaatttattctttattttgtgttttcacaaacacaaaaccaaaataaaacataggccttccttgtgaaaataaatgtaaagatcctaagtaaatgactaataaaccatatctagcagtagttccagagaacacacctcaagcccgagcagaatgtatcatagaaggccacaattgtttggcattagcgaatccattaatataatttactacattaacaaattaaaggaggggaacacctagttaatgaaactaaatacccaccactgatgaaaagtcttacaaaaataagacaagaaatttatttgacatattaaaggatatctgccagaagcctaacagaaagagcagaacagatgatggaatattagatgcttttccaccaaagtcaggaacaagataaggatcgccaccagtcagcattatgcttccaaacctaaccc

SEQ ID NO: 89125 - DNA, 1336 bp, Homo sapiens
tcaatgaaagaacaattacttcaatcaacaacttcaacaaatatttagtgtttatcatctatgtgccaagtgacattcgaaaaattcattggcaattcagtgatgaagaaaacaaagtacctatacttatggagcagatattctattagggttaaagagacagtaaacaactaaacaaatatacaatgtgtcagttgctgataagtgcttcaaaaatcatacagaacagaaagaggatagacagtggaggcaagtggggtggcaaactacttagataaggtgatcatcaaggcctttcggatttattagtagagagctcatcttataccagttagaattgggatctttgaaaagacctgttaaaaatatataaacatatatatatatatatatacacacacacacacacacacacayacacacatatatatatatacacatatatatacatatatatacacatatatatacatatatatatatacacacatatatatttctgatggcaagtctgagtaaatacaagagaagtcacaatttaattatctttggcacaaagataattaaactacagttgcagatggcatatttttagcattagggaatagaaactattatgtacagtattatgtcccccaaatttaaaatctacataaaatgcatgattttctagaaaaaaagacaaagtgccaaagttgactcaagaaatagaaaacttgagaagaacaaaagaaaatataaaaattagtttaaggctgactttgttagatttatgtttaagatcaggtctaaggacctgctggtttctcaggccaatactatcaaagctttaaggtacaggtaagtcttgccttatataacttgttcagagaaaaggcaaagaaggaaatagtcccaatttattctttattttgtgttttcacaaacacaaaaccaaaataaaacataggccttccttgtgaaaataaatgtaaagatcctaagtaaatgactaataaaccatatctagcagtagttccagagaacacacctcaagcccgagcagaatgtatcatagaaggccacaattgtttggcattagcgaatccattaatataatttactacattaacaaattaaaggaggggaacacctagttaatgaaactaaatacccaccactgatgaaaagtcttacaaaaataagacaagaaatttatttgacatattaaaggatatctgccagaagcctaacagaaagagcagaacagatgatggaatattagatgcttttccaccaaagtcaggaacaagataaggatcgccaccagtcagcattatgcttccaaacctaaccc

SEQ ID NO: 89126 - DNA, 1336 bp, Homo sapiens
tcaatgaaagaacaattacttcaatcaacaacttcaacaaatatttagtgtttatcatctatgtgccaagtgacattcgaaaaattcattggcaattcagtgatgaagaaaacaaagtacctatacttatggagcagatattctattagggttaaagagacagtaaacaactaaacaaatatacaatgtgtcagttgctgataagtgcttcaaaaatcatacagaacagaaagaggatagacagtggaggcaagtggggtggcaaactacttagataaggtgatcatcaaggcctttcggatttattagtagagagctcatcttataccagttagaattgggatctttgaaaagacctgttaaaaatatataaacatatatatatatatatatacacacacacacacacacacacacayacacatatatatatatacacatatatatacatatatatacacatatatatacatatatatatatacacacatatatatttctgatggcaagtctgagtaaatacaagagaagtcacaatttaattatctttggcacaaagataattaaactacagttgcagatggcatatttttagcattagggaatagaaactattatgtacagtattatgtcccccaaatttaaaatctacataaaatgcatgattttctagaaaaaaagacaaagtgccaaagttgactcaagaaatagaaaacttgagaagaacaaaagaaaatataaaaattagtttaaggctgactttgttagatttatgtttaagatcaggtctaaggacctgctggtttctcaggccaatactatcaaagctttaaggtacaggtaagtcttgccttatataacttgttcagagaaaaggcaaagaaggaaatagtcccaatttattctttattttgtgttttcacaaacacaaaaccaaaataaaacataggccttccttgtgaaaataaatgtaaagatcctaagtaaatgactaataaaccatatctagcagtagttccagagaacacacctcaagcccgagcagaatgtatcatagaaggccacaattgtttggcattagcgaatccattaatataatttactacattaacaaattaaaggaggggaacacctagttaatgaaactaaatacccaccactgatgaaaagtcttacaaaaataagacaagaaatttatttgacatattaaaggatatctgccagaagcctaacagaaagagcagaacagatgatggaatattagatgcttttccaccaaagtcaggaacaagataaggatcgccaccagtcagcattatgcttccaaacctaaccc

SEQ ID NO: 89127 - DNA, 1265 bp, Homo sapiens
tggcatctttctatctagggcaccagaactagcacctctgaaaagtaaaatgatctatgcaagctccaaggatgcaattaaaaagaaatttcaaggtatgttctagatgacctctgaatatgtagaggtatggtgaacactcagaatggggcagcaccttttctgagaagcaccttatttttttgcagagcttcgggcacaagggagaagtgttacttgttttgagaaaagcagaagactgaatttgactttccatgtatcttctgctttgtgctggttgctctgggtctgcccagcctgtgtttaataactatacccttgacattgtctatatatatcgtttattcaggctggttttaaactagtttgaggtgctaccagttttctcatgtaggaggtggagactgattgtttaacattggacataatagtaaatttgctcttgcctttgaatgtagttgttataataaagttgcaaaaaggaaatgtacctaaatgagaaaggatgctcttttctccagctttactgttgaatggcatgattttaggtaattaattcatctgtgtcccaaggaaagtgcacccactcctgagctggtcagttgtatttgacttgccactgggtgattgggatcctgatgagatggcctggccagacttcagccaggagaaaatgttggtatgatggaaagaacgtgcatggggcaagtgcccaaaggcctgcactgagggcgaagcctgtctaactgctgtgtggccttggccagaactgcttaacctccatgggccttgattctctcagctgtagaaggggagacttggtctcatgtgtgagttttagtttaagagtttgccctgccaccttcctgccatggctgtttccaaacagctgagtgagccaaggtcacaagggcttggcctgatgttgattttgttttgtttgttttactgtcactggtttttatattttcatggtagaacaggtttgccctagcctgttttacttagttcggaaaaaaaaattcttgcttcctttcccgagccttgctgctgcatagtttattgctgggtcaggttcttcgtgcatttggtttgatgtttggcamcccccagaagtgtgtcactgggttgctaactgacacttttaaatcctttagcttcaacactttcccagcccaaccaaaaggttcacagtggattccttattatctttattctgcattgcctttcagtaaagggaattgctttgcacacttgatttggtg

SEQ ID NO: 89128 - DNA, 777 bp, Homo sapiens
gatggtctcgatctcctgaccttgtgatccacccgcctcggcctcccaaagtgctggaattacaggcgtgagccaccgtgcctggcctcccatctttgttttaaagttaacaaaggcagtcagcttttgaggttagaagcaagctggaacattttggttagatttctctccctgttataagtgttgtgaaggtggtttcacttctatccagattctttgacattgctggtaaatttagcagattaggtaaattattccttgctaagaggccragaagaaaagagccctggagaatctacacactcaccttctacctttctcaggtgtcatctgggaattattccaacctctaaagacaaggtcctgacctttattctctagtccaaataaatgactaaggtaagcaattttaggccagataggaagggtgggagatatattagaacaggaggatcttcaccttatactgctacaaataggtcatcctcaacaccggaccagttcagaagagaaaaatcaatggccttctttgcaagccatcttctgcaagaagggaaaaacattaatatatacttcaggttgcatttatgtatgctttgtaaattttctgccatagttttcattgaaaaggctttcctacaaccataatgtataggtatttctctatacttttctaataaaatgaccttagaatttaagaaaattttataataaagggttgggaaaagtaactttagagagtaaatattgactatttcctattaaacaaaggatcca

SEQ ID NO: 89129 - DNA, 1036 bp, Homo sapiens
ttgagcatccatagattttggtatccttggagtcctggatccaatcccccaaggatatcgagggatgactgtagttcctgttcttaattaggttcaatcaatatatcataaaaattccgagagaaattcaattacaagtcaaggctatgaagctaacaggggtatcttggatcctggatccaatcccccaaggatatygagggacgactagttcctgttctcttaccctttttaatgttatatgtactcatatttactgcatgctagtttcacaggtttaggtaggtattttatctctcccactctcttcattttaaagccacattatcaagtcagacaggctccagggaaataaattctcagtagcagcatgtgggatagatcctggtaggcaggcctaggagccagagagatcagctaggaggccaggtccgtgattcataagtgaggtgacggaggtgtggactagtaggtggttttagctggttagtttgttctgttttttgaactttggtaatcctaagtgcctggaattgtgatgagtaaaggcagaaaacaaagtccccccaggcattactgtgcccagggcgtaagggacctgaaatgttagaaaataactgataggacttaatagctgaatggaatgaaaaaaatcatagcacaaggttttaagcctgaatcactgagaaaatagtactttttatagcaatagaaaaattaggaagccatgagggttgtagagagaaaattatgaattctttatttgaaatgttgaatcttaggtgagctgaaataactacttgaaagccgtagttgtggaagctccccgcaaccacatatccaagtctgaaagtctggtgcttccagaatctcctggttatgctttttccctagaactgataaccctatatcatgagtacaggtctacttttccatcttcctgacagtctgagttccttaaaagatgagattgtggccaggcacggtggctcatgcctataatcccagcactttgggaggccgaggcgggtgcatc

SEQ ID NO: 89130 - DNA, 772 bp, Homo sapiens
tgggaccacaactggataatgaattaatcctagaccagtctgtgtatattttgggtcccaaattatttctattccaggtgtcctgtggtatctgctttcagatttagaactgttgctattcagatggttttcagtgtttggtaatgtactgggtcaagagggtctttaagtatctgttgtctgtcagttgattttgctgaaagactatatttccttctaaggccctgcaaattttttcctgggtggtgctgcagtcctttatgcttctgcactgtagtggctctcaagcccattgatggcttactacatacccttttgaggagacccaggagtgtcaatcatataattctctcctcrctatcattactcagttcaacccagacacatattagtcagtgagtttcttggggtgtgcattttctctggtccagtcagcttatctttcttattaatcagtatctttttcaatctaaagaaagaaaaggaaggcacaagatagccaacaagacatagccaggaaaagcctcttgcaccaaatgagacaataatatcaagtaaatgaacatatatccaactcatcttttgaaaaaaaaattgagagttgatagagaagtgacaccgacaatgaggctgaagagggggaacctaagagccctgcaaggggttgttgtgtgcaccacgactcattcttggccctgaatgactcctaaggaagtggtgagttaaataactgtgggacaacccactgtcactgtggtatcctagctacaaa

SEQ ID NO: 89131 - DNA, 772 bp, Homo sapiens
tgggaccacaactggataatgaattaatcctagaccagtctgtgtatattttgggtcccaaattatttctattccaggtgtcctgtggtatctgctttcagatttagaactgttgctattcagatggttttcagtgtttggtaatgtactgggtcaagagggtctttaagtatctgttgtctgtcagttgattttgctgaaagactatatttccttctaaggccctgcaaattttttcctgggtggtgctgcagtcctttatgcttctgcactgtagtggctctcaagcccattgatggcttactacatacccttttgaggagacccaggagtgtcaatcatataattctctcctcactatcattactcagttcaacccagacacatattagtcagtgagtttcttggggtgtgcattttctctggtccagtcagcttatctttcttattaatcagtatctttttcaatctaaagaaagaaaaggaaggcacaagatagccaacaagacatagccaggaaaagcctcttgcaccaaatgagwcaataatatcaagtaaatgaacatatatccaactcatcttttgaaaaaaaaattgagagttgatagagaagtgacaccgacaatgaggctgaagagggggaacctaagagccctgcaaggggttgttgtgtgcaccacgactcattcttggccctgaatgactcctaaggaagtggtgagttaaataactgtgggacaacccactgtcactgtggtatcctagctacaaa

SEQ ID NO: 89132 - DNA, 532 bp, Homo sapiens
gtggaatgtatataaatcttctttattgtttgaagtgctcatgtgtaaatgtttttgccttcaacttcattaaaattttttgagggcagaatattttaaagtcttcaataacaatcattatattactttaaacgagatcagataaaaaaggacataaataaagtctactgagttataaaaggagtaaaccgaatttcacatcatttacatgaggcaattaaaagatcagcatttaaaaagctatactctaaggtaaataaatcagtacctgaaggcaaatggtaaggaaatatttagttaacagaaagaagtcagtttatctcaaaagccgtcttccctgaaattcgggcctgcattgctttgcttaagtaacagcaaatatgaatgggaagttgagtggatgctcagaattatttaaattttttcaagcttttttcaagcactccgtttagtgaaccaggctgagtagraaaatctctcctctccatgaacttgtttaattgcagaaaagctacagaaggaaaggttcctg

SEQ ID NO: 89133 - DNA, 1584 bp, Homo sapiens
ataaaatttatatatacacactatgtaaaaatatatacacaattctatgtatacacacaccatatatataaaatatgtatacatacaactatgtatacacacacactgtatatatatactatgtatgtacacacacatatatatacacactatataaaatgaatactaatgcctagtgctgagagtttagagatgttttacactatataaaaaaatatatacacacaactatatatatacacacacatatgtgcaatcagggaaatgttgactttccctggatgttggttatataaagacgttattgtcatatgttatgctgmtaatggtattgtggccatttaaaaagtcttgtattttagagatacgtgtgaattatttccagaaaaaaataagctcaccagaacgtgcaacagaggtagcttcttttgactttcactaattttttaggtccttgagactgttctgttttgaatactcaagatgagatttaattattttcagtgctcagaaattttcttctataattttattgatccttgccacaactccatttattctgtttctcattttgtaattcccttgggtaaatgaggtatcctgggctggttctatatttctcttttccttttttctccaaattcatcattcaatcataatagaattaattgaattaaatgaagttgatccaaagcaacttatatcccacatcttatatgccaacttatatgcaacttatatgcaacttatatgccaacatctagatttcacatcagccagatatcacgacaatggaaagcttgaaatatgaaagaaaaaatacaaagatccttcttattttgtaggaaagtgaagtttacggaaaaaaactaacaatcaccttttattctgtagagaagcagtgagagctgagagcttcagacacattggaaataatatgaagtatttgaatcaattatatgacggcaacaaagaataattctatttttgtgggtcaaccactaattgcagtataatgttctcagcactttcatctgtcattgctgggaaatattaatgggactcttaagaccaaggcttcagcacaactattgggtaattagggcacgaatccccatgcatacttaattgtatgatataggaccaggctaactttagagtgggggtggtttcagaatgacaatacagagaaacacctccttggtttctataactctaagacatcagattaaattgagtatgttgaaaagaattgcactgaaatatcccagactgtgtttctgttctaattagcttatttacaaagtttagttcatctatttttccaaaaagacgtttctctggactgcccgacaattctgtagtcttctagttactgaaatccagctcaaaacataggttcatttcccttttaaaagggaatttattgtctcatataatggaaaagccagaagccagcatcccaggcatggtggatccaggtgcataaatggcgtcctcaggaatcagttcctgttctcgtgtctttccacctggtgatgaaggtggtcaccaggagtttctggccacatcttaccagtttag

SEQ ID NO: 89134 - DNA, 815 bp, Homo sapiens
cactggctggatgtgtcttcagtcctgcaggaggccactgtgatcagccgccctgctgatagtggcacattttgaaattacacagggaaccataaaaagaattagacattctggacaggcttgaaaaccaaacaagtcaggctctctcagtgttctaaattaagaatcaagtcattctatatttctcacatcactgaaaattaaaaacagacatatctaccgcatagcaagcacgctcactcaagagagacttgatggcccgaaacatgctagatttgtttccaattaccatgtcmacatttgaaaccctgaggaagccctagaaaccagtgtggagagatcagagacaaggcacattagcctaacaggactcaggaccaaacgctgcaccccagccccctctactcatggtcccccatggggtctttaaataaaaaacctggatcattttgtcccttcctttgggggctggaggcatgaaccttcccttctctgctctcagctgcccctctccactctcagcttccagcttctggtcccctggacagagatgtcaacccagccacgggctccctaccaacattcccgtccccaccatcatataggagctgggtctggaagtatgggattaaaatatgcaagccttctttgagttgacctttgaagttgggctttttcttgttgattttttttttttaagaagccatacaagtgcttttcacatcttctgtctatattcctcttgcgcagaaccagtgtaacactgagatcaagagtctgagccctggagtccaaccatctaggtttacatcctg

SEQ ID NO: 89135 - DNA, 682 bp, Homo sapiens
ttttcaaagtcttcagaagatagagcggtttttccaaaatgatcaaaggacacgcctcctgaggcgccctccccttctcctggcccactcctcagctggcctctgcgtctgccagaagtgctcaaatgaggctgatttctgaagaaatgttttcatcataagaattgcaagcaggcaagcctccggcttttgcttgtcaatgcacgcgtttccwgcctttttagttcctttatcagatacttcctgccccctagtggtgggaagcagcaaaaaggacaggctgacctagatactgtttccagagctgactattcagccgttagagcaatcattgttcgaagcaagcaagagcaggaaataaacaaaaaccctttcacggtggtgctccagggtctagttgttaatttttgagcgaggaaaagttgttcatgaaaaaatatatagtatttgagcacatttgatggaaaataaaaaggaatcttttgcagggccacacctcgccatcctccagggttgtcattctcaatgtgctctacgtggacggctctgccctgcgtcgccaggtgctgccaccctgcaatgtcactgtatttcttagatgctgaaccaagcccaaggcaaggactcccctgctctggaatgtgtgagcagctgctgaggtctgcatgtagaggaataatta

SEQ ID NO: 89136 - DNA, 376 bp, Homo sapiens
ggatatttctagctattcttgcttctttattcctccaagtaaatttgtctatttttctaaatctggacaaagaaattctagaaaatrtcgttttgttatgacatagaagatataagtttatttaaagaactggcacatttatgattttaaggctttttcaagagcatggaatttctttccccgtgctcaagtccaaatttgtgccattcagaagtgttttctagttttttttatatataggttttaaacatttctggttaagtttatgccctcacattttattttagtttgggtaatgacgttttacatgtgtgagttcctcaattatttcttttaaatgttctgattcaataggaacactctccttagtatcctt

SEQ ID NO: 89137 - DNA, 1690 bp, Homo sapiens
cttggtttgcatatttatgtttaaatatttgtctatgagctacaaagagagagagagaggtrggtttttactttatttaaatttgttttggataaagctctctagtttacctttaaaacaatgatatatgattggcactaaatctattctctctctcacaaatccatatttattcctgatattaaatatgtttagcaagctacctttcttcaataaaaataaacatttgcagtttctaagttctgaatgtgattctcatggaagaatattagcaggaaaactgattcaactaattttaatacccaaaatggatacactgtagtttcttctttttataattatatttattattatatgtaagacaattagagaacaatctgaaaacgtagttattttcagtattatgatgaggctgtctttttgaaaggaatgttatagaaaccaactgcaatgtagagattgcaaaagctatctgaatatgtgatagctcccagcaggattactgagaaaggagtgaagattaaaactaggctatagttctggagaaacaggttacctatggttacagtcatgactgacattgtctaaaacaaaggggatatatcactaataaatgacacttaacccatggacaagtatagagaagagaagagagaacctgaagattctgacaggatcatgtcagagaaagatcagagaaaatagccttcctttcatatttttatattttaactagaaagaaaaacttctatgttatattttgacactggtgatggatgaatcaagtgagaagttgtacagttgcttgatgtgctggaggaggaatagagataaattacagctggggaggccacatcgaagccaaattaactcaagatcaaaccactgtatcaatgatggatatgaaagatatttatgaagccaggctctgtgcttccccactcacccatactcccatgacaaagggggaaaataaaggctttctttgggctgggagctagaaagaaaaccagagccctaggtcactgagaagggaccccgcaccatgccacctcctcaggcagagtcccagactggggaatcaaaggcagagtcccaggccagggaaccaaaccctgagaaatagttggcaatctgagtgttggggatgcatactttatcttctggcagtgaaccattactttttgagggattgtgggcctgccattggttgccagtttatgatattctagccttttgactggatcccattagggaagagacaccagctatgtcccagaagttccttctttgctgaatagccatgtgactcttcatgcatttaatagtgtgtttcaaaagtttccaagagctaaaatgggctgccataacccttcatctttttacgatagcaagatatttagctaacaataaggttacttaaagagtgagtctctccatccatggtgaggtttttccattgacacactggaaatgggaaagctaggaacagaagatgccaagttacgtaatgaaagtgagtggtgaattttatacacactctctaaaaagcagcattatttccctgccatatttcacagtattaacaggaataaaagactaatatgtgataataaaagggtaataaaagacaattgtatatttatcaggaaattagttaggatgattcatttattttcttggctctgat

SEQ ID NO: 89138 - DNA, 1690 bp, Homo sapiens
cttggtttgcatatttatgtttaaatatttgtctatgagctacaaagagagagagagaggtgggtttttactttatttaaatttgttttggataaagctctctagtttacctttaaaacaatgatatatgattggcactaaatctattctctctctcacaaatccatatttattcctgatattaaatatgtttagcaagctacctttcttcaataaaaataaacatttgcagtttctaagttctgaatgtgattctcatggaagaatattagcaggaaaactgmttcaactaattttaatacccaaaatggatacactgtagtttcttctttttataattatatttattattatatgtaagacaattagagaacaatctgaaaacgtagttattttcagtattatgatgaggctgtctttttgaaaggaatgttatagaaaccaactgcaatgtagagattgcaaaagctatctgaatatgtgatagctcccagcaggattactgagaaaggagtgaagattaaaactaggctatagttctggagaaacaggttacctatggttacagtcatgactgacattgtctaaaacaaaggggatatatcactaataaatgacacttaacccatggacaagtatagagaagagaagagagaacctgaagattctgacaggatcatgtcagagaaagatcagagaaaatagccttcctttcatatttttatattttaactagaaagaaaaacttctatgttatattttgacactggtgatggatgaatcaagtgagaagttgtacagttgcttgatgtgctggaggaggaatagagataaattacagctggggaggccacatcgaagccaaattaactcaagatcaaaccactgtatcaatgatggatatgaaagatatttatgaagccaggctctgtgcttccccactcacccatactcccatgacaaagggggaaaataaaggctttctttgggctgggagctagaaagaaaaccagagccctaggtcactgagaagggaccccgcaccatgccacctcctcaggcagagtcccagactggggaatcaaaggcagagtcccaggccagggaaccaaaccctgagaaatagttggcaatctgagtgttggggatgcatactttatcttctggcagtgaaccattactttttgagggattgtgggcctgccattggttgccagtttatgatattctagccttttgactggatcccattagggaagagacaccagctatgtcccagaagttccttctttgctgaatagccatgtgactcttcatgcatttaatagtgtgtttcaaaagtttccaagagctaaaatgggctgccataacccttcatctttttacgatagcaagatatttagctaacaataaggttacttaaagagtgagtctctccatccatggtgaggtttttccattgacacactggaaatgggaaagctaggaacagaagatgccaagttacgtaatgaaagtgagtggtgaattttatacacactctctaaaaagcagcattatttccctgccatatttcacagtattaacaggaataaaagactaatatgtgataataaaagggtaataaaagacaattgtatatttatcaggaaattagttaggatgattcatttattttcttggctctgat

SEQ ID NO: 89139 - DNA, 740 bp, Homo sapiens
ttggggctctgctcagccaccaagtgtcaggtgtctcaggaacgccagtcattcctgtgggataaagtcacgtcatccagggcacaggagcaggcatggagggacagagggacaaagcagcctctgctgtggtcatgggtgacatgtttctcagcctcctccatggcccaggctctcctgcatgtccttcccaagacccttctgcagcttcttccttgggagaggcccatgcccttcgttaagtccccagcatgcagcagtcgctgcaaagcccatccattcaggtatttggtcgttcattcgtccagtgactattcatggaggtgctaccctgaccgcatcaccctgggtgcaggggacagagcaggaatgacgggagacctcgtccttgctctccaggaatgtatgcacagtggagagagaaagtcagcagtcacagaggtaataatgcattgaccacagtcctctcagcgtaaccatggaggaggtgctgcagatatctagaagaaacacgcacaccgaggtctacagggggagctgaagttggctagggaaagaagtgtggaagagcacttatttaataaacccagcagccactgttttaatgctttacaaatactaactcatttaaccctcctaataactctatgatgragtactattagaaacctcattttacatttgaggggtgaaatgacccatccacaatcaccctgctaggcacagtcttagccaggatc

SEQ ID NO: 89140 - DNA, 688 bp, Homo sapiens
tccattggctggagccagatctcacaatctaaactaaaacccaacaggctaataatttaaaacttttctaaataggtaaaggcaagggagaacaaaggaaaagaggaagttgcttatgccaaatagggaaggggcataggctaagagctgggacatgcctgtgagcacgtccggcacaaatatcttggttaaagtacaaggacatagactgtattacgtgcctgtgagcatgtctagcacaagtattttggttaaagtataaggaaatagaatgcacttattcctttatatctagcagctacataggatagggcttaacaaagagttaatagcacaaagcaaggaggcttgaaggaagttagtctttaaaataaactattatttctaacatgatttattttttaacaagaaggaaaactttgaagaggaaactttttactttctacacttactgtttgaggcctagcttgggttgtatgctcaccctagggtggcgggtgcggtcccacccaggccacctgaattcagaatggcctggccagtatgtcagggctccttatcacaagcaacagaaaccctttctgcctgcccccaaaactcatatagggcgtgggcttctccagaggcagatgccggtcragagacaggacagacatctatgagcatggggaggagtgggctcccagcc

SEQ ID NO: 89141 - DNA, 1478 bp, Homo sapiens
atactttggggcggcacgttccggactcctgcagtattgtgttcttaaccccggcaaggttaagagggatcattttatttcaaagaaaacgtctcaggacccagtctggaaaattctaacttggaaatttaaggtcttattctgttaaaatggctttcagttgtgaaatagtaatataacaatgtcatccttaaaaacttgtaaaaaaaaacacaaaaccttaagattatttattaaaataaacacaaaacttaaaaatctcatagaattttagttcctgaacacgggcaggtctaagtgctccaatttgagacacacttacgtgcgacacatacggatgtcaagttggtgctaagacgcccccatggcccccaggtattaccaggcaggtgcagataagactgtgtgatggtgtggaggagtgctgagaactgaagtagtaggatataaaggaaattgtaggcttgaagtttcaggccgcagggtccgattgcttgtgctcaaatcctagctctgtcccttgccaactttgtgtccttaagcagctttaattctctaaatcttgatttcctcatagagttaaaaatgacctctgttttaagcctctttggagggttgaatgagggggaaaaaaggcaaagcatttttatagcatactggcacctggcacctgtagcaagccttccgaatgaggaaaaggtgttgcaaggtctaccccatacccttattgcaaaagacagattaaccagagagaggcatagcaagggtattcagggtaagttttacatgatgaagacacaaagacctgggggtatgacccagtggtaatgaactggagggatcttgccaaagcctgtttgttcagattctttctggcctctctgtgaggcatgtcctcgccccaaatatggggtaggatccttttgcaatgaggktcctgtggccaccttgaggggaaggtaggtcagaggtctctaggttttatggctggctttgcgggagagtagttctagtttttatgacacaccttggggaggagaaattctagtttctatgacctgcttcggggagaaatgggaaaagaagaaatgagggcaggagaaggtcagagagagactttgcttctgaggccttctaatctcctttagttcaaagtactcagcctgcccaaggtccagacttcagggtattgttttctgagccccgacactatcaatgtttaccacattagaaatgaaaattaagaaaaagttaaagtagtatttattagtttaaaataatgaatgtatatattgttatatttataataaaaattttttaaattatatcttccaaaacaaaaaagtgagaaaatcagtattatttttaaaataatttttaatttttgtgggtacatagttcatgtatatatttatgaggaacatgagatgttttgtttggtaagacgtgcaatgcataataatcatatcatatagaat

SEQ ID NO: 89142 - DNA, 615 bp, Homo sapiens
ggatccaagatcacaggaaattgtcaacagattttccaaggaacccactgagctctgggagtgtattcaagggggcctaggattttctacctgaacccagacgttgcaccaactcatagagaaggtacacatctgtctttcttttcatgtgagagggggaaaaataaacaaagacaggtttgaacatgtaatcacacttggtgcccttgaaacagttctctagttatctatctatctatctatctatctatctatctatctrtctatctatgtcctgggcctcatcagtttttctgattctctgagtgccctgtaaatagtgcttatatggggtgcctgtatgaaatgtttagagaaaatcaactccttatccagtggtggggagcggggagacggtggaagtagctggccttgcctaagctcgcttacccctcaatctcatggaacacagcagaggctggctgctgcctagtccagtgggcagaccaagggcctcattagggcagcagcaaagcagaggttccagagctatgagaaaatgcacctttgataaaattatccagaattttgtgttcagaaatatccagaagaagccattttaacttcagcatacat

SEQ ID NO: 89143 - DNA, 672 bp, Homo sapiens
ataaaataaaaagcataaattaaaagagaaagtgatactaaagttatgtagaaatggaagaaatgttcctgacttgaagcccaagtttttattaaaaatatctatagagaatattcaactaaaatttttatacctgttagctctatagtccaaggttttcttttccttttttttttaatcaaccttattaaggtcaggcatggtggctcatgcctgtaatcgcagcactttgggaggccaaggtgaatgaattacttgaagtcaggagttcgagatcagcctggycaacatggtgaaatcccatctctactaaaaataaaaaaattagccaggcctggtggtgggcgcctgtaatcccagctacttgggaggctgagggaggagaatcgtttggacctgggaggcagaggctgcagtgagcagagattgtgccactgcactccagcctgggcaacagagcaacactccaactcaaaaaaaaaaaaaaaaaaaaaagctgggggcggtggctcatgcctgtaatctcagcactttgggagtctgaggtgggcagatcatgaggtcaggagatcgagaccatcctggctaacatggtgaaaccccgtctgtactaaaaaaaaatacaaaaaaattagccgggcatggtggctggcacctgtagtcccagctact

SEQ ID NO: 89144 - DNA, 1437 bp, Homo sapiens
ttagggaagaaaagccccagcccagctcaattcctctgctctccaggctcacctcccttagagatgttgggtcattcttgtttaatttctctgaggttccattttctcatctgtaaaatgggaatagtaatagtccctgcttcacagatttttcatgaagataggctgataaaataatactctgctagtaggttctgagctggtattaagaacaaaacaagagcacttattattcctctaataccaaagggggaaaatcattttaatattgggctcatggggtctttgacttcaggcctgtctcctacctaccctaaacctcctcctattctgtcatcatctgatacttgttgaawactcatgagacttccttagaagactgatgtgcctctccgtagacctactgtgggatgaccattaatgctggtgacagaggcctgtcccctcctattctcccaagagtgagctgccagcctgcctgagtgctctgaaacagaggagctgcaattcaaacttcacccagttctctgtttttttctctcaaaagggttgaaaatatgtgaagtaaccctcagctctgcaaaagatattgttttcactatttcctttaactgctctctggatctggaaccccattgtagggagaaagagcagggcatggggaagaggtgccttgaagctgccacttagagacagctcagattccactggtttaaatcactttccttcagattcctttggaaaagtggattcgtctttcaggctgtcttcctggcagccccctaacttcctttagtggtagaactcctgagctttagccaggcccatggcttcccaattaaaggctacatttcccagcctcacttgaagccaggtacagccatgtgactcagctctggccaataggataatatccatacagtctctatgttgctgcctggaaagtgccatggtgtggagccatcttagaccagatgaagccaacagtctaggaatggaagagctcaagggagaacgaacctgagtctccaacaccaaagagcttctccattagctctggactgctaatacttggatgcttcacaagagagaaaccttctatcttgtttatgtaactgtcactttggtctctgtcatggtagctgactctgcattctgactaatacacttcctgttcccacttctcttttccaagatggcatctggagacagggtgggcttctgtagcctcgtggcagtgggaagaggaccctttgtcacatgctgttcttctaggtttactggtctctgatgtcttgagacttgcccggtctagttcctgggccctggtgcttgcttggctggtcccacttgggttttcaaggtgctgaactgagacttgctgctggcaccatgctgcacaccacagagttgttctgagcttttgtgctttgcaag

SEQ ID NO: 89145 - DNA, 1437 bp, Homo sapiens
ttagggaagaaaagccccagcccagctcaattcctctgctctccaggctcacctcccttagagatgttgggtcattcttgtttaatttctctgaggttccattttctcatctgtaaaatgggaatagtaatagtccctgcttcacagatttttcatgaagataggctgataaaataatactctgctagtaggttctgagctggtattaagaacaaaacaagagcacttattattcctctaataccaaagggggaaaatcattttaatattgggctcatggggtctttgacttcaggcctgtctcctacctaccctaaacctcctcctattctgtcatcatctgatacttgttgaaaactcatgagacttccttagaagactgatgtgcctctccgtagacctactgtgggatgaccattaatgctggtgacagaggcctgtcccctcctattctcccaagagtgagctgccagcctgcctgagtgctctgaaacagaggagctgcaattcaaacttcacccagttctctgtttttttctctcaaaagggttgaaaatatgtgaagtaaccctcagctctgcaaaagatattgttttcactatttcctttaactgctctctggatctggaaccccattgtagggagaaagagcagggcatggggaagaggtgccttgaagctgccacttagagacagctcagattccactggtttaaatcactttccttcagattcctttggaaaagtggattcgtctttcaggctgtcttcctggcagccccctaacttcctttagtggtagaactcctgagctttagccaggcccatggcttcccaattaaaggctacatttcccagcctcacttgaagccaggtacagccatgtgactcagctctggccaataggataatatccatacagtctctatgttgctgcctggaaagtgccatggtgtggagccatcttagaccagatgaagccaacagtctaggaatggaagagctcaagggagaacgaacctgagtctccaacaccaaagagcttctccattagctctggactgctaatacttggatgcttcacaagagagaaaccttctatcttgtttatgtmactgtcactttggtctctgtcatggtagctgactctgcattctgactaatacacttcctgttcccacttctcttttccaagatggcatctggagacagggtgggcttctgtagcctcgtggcagtgggaagaggaccctttgtcacatgctgttcttctaggtttactggtctctgatgtcttgagacttgcccggtctagttcctgggccctggtgcttgcttggctggtcccacttgggttttcaaggtgctgaactgagacttgctgctggcaccatgctgcacaccacagagttgttctgagcttttgtgctttgcaag

SEQ ID NO: 89146 - DNA, 1437 bp, Homo sapiens
ttagggaagaaaagccccagcccagctcaattcctctgctctccaggctcacctcccttagagatgttgggtcattcttgtttaatttctctgaggttccattttctcatctgtaaaatgggaatagtaatagtccctgcttcacagatttttcatgaagataggctgataaaataatactctgctagtaggttctgagctggtattaagaacaaaacaagagcacttattattcctctaataccaaagggggaaaatcattttaatattgggctcatggggtctttgacttcaggcctgtctcctacctaccctaaacctcctcctattctgtcatcatctgatacttgttgaaaactcatgagacttccttagaagactgatgtgcctctccgtagacctactgtgggatgaccattaatgctggtgacagaggcctgtcccctcctattctcccaagagtgagctgccagcctgcctgagtgctctgaaacagaggagctgcaattcaaacttcacccagttctctgtttttttctctcaaaagggttgaaaatatgtgaagtaaccctcagctctgcaaaagatattgttttcactatttcctttaactgctctctggatctggaaccccattgtagggagaaagagcagggcatggggaagaggtgccttgaagctgccacttagagacagctcagattccactggtttaaatcactttccttcagattcctttggaaaagtggattcgtctttcaggctgtcttcctggcagccccctaacttcctttagtggtagaactcctgagctttagccaggcccatggcttcccaattaaaggctacatttcccagcctcacttgaagccaggtacagccatgtgactcagctctggccaataggataatatccatacagtctctatgttgctgcctggaaagtgccatggtgtggagccatcttagaccagatgaagccaacagtctaggaatggaagagctcaagggagaacgaacctgagtctccaacaccaaagagcttctccattagctctggactgctaatacttggatgcttcacaagagagaaaccttctatcttgtttatgtaactgtcactttggtctctgtcatggtagctgactctgcattctgactaatacacttcctgttcccacttctcttttccaagatggcatctggagacagggtgggcttctgtakcctcgtggcagtgggaagaggaccctttgtcacatgctgttcttctaggtttactggtctctgatgtcttgagacttgcccggtctagttcctgggccctggtgcttgcttggctggtcccacttgggttttcaaggtgctgaactgagacttgctgctggcaccatgctgcacaccacagagttgttctgagcttttgtgctttgcaag

SEQ ID NO: 89147 - DNA, 571 bp, Homo sapiens
aatatgcttttgctatcgctaatgacagcacacacagttctattgttttatttttgtcccttccagtgattactagaaattatttttatgaagaaataaatgacttttcagataactatcaacctacgacttcccttcaaccagccagctataatgtaattgacagggcaaaggttctttaattactcaactttgaatcttcattaaactatacatgtaattcaaaaactgagtcttcatcccaactgagtcatttatacgtactacactttttaacaagtgtttttcctctcccaagacatgaaagtaaaccatgaaaggggggaaaagggggcttctctatagtaaaaaatctgggtaaagaaacagaaacttctcttcctttgtactcctgggcatataaactctcttacagtgtccactgcacgctgcagcaactatctgtttaggtatttgtctctccctactaataactaatyaggaatatacaacacatttgtcttcccagcatatactaagcatttaataaatattcacaaaatagaagtttggatatattaataaagctggg

SEQ ID NO: 89148 - DNA, 587 bp, Homo sapiens
tccagtgtctcatgcctcagaggcaacagggaagctgactgcggtaggcaagaggagatgtgttctcaggttgtgtctgcaagcaataggtaggacctggggcagccacccctgcagccaagccagccaagcaggcggagtcccacagaagatagccccacaacaaatgcagcaatgaatcttctttaactgaaaagaaaaacttcctcttaggagctttcaacaatgcaatcaatgcaagatgatcttaacagagtcagtggtaacactgaacaaaartcttggccgagcaaatccaagcagacactgaacagtccagtttattatctgtggtaaaaatttaatcttttttttttggtcaatgatccagggccttttttgagtaattcaatatgtattctgaaaatgcaaatttaataataatagcaacttaatgcaattcacccttccctcaactgcctccaaaatgaaaaaaaaaagtgtgtcaagtttataaaagttgtgttcactttggtcagtacttgacattttttttgccttagcatctgtattagtccatttttatgctgctgataaagacatacctg

SEQ ID NO: 89149 - DNA, 677 bp, Homo sapiens
ttcctataagagatacactttaaatgtaaagattccaatcagttgaaatcaattggatggaaaaaagatacgttatgcaaacagtctatataggaaggctggagtggctttcataatatcagataaagcagacttcattacagagttttgccagaggaaaagaggggcttctcataatcacaaaaaacatgacaattacagatgtatatgtacctaataacagcttcaaaatacacaaagtaaaaattgacaatctagacaatttacaatcacagttagagattttactcccctcccatagcaattgacagaaaaactagacaaaatatctgtaaagatgtagaggatctgaataayactattaataaatatcagctgctataattttctctttcgtttgattcacatcttcagacatctgcaaagctgccagttctggccctctagactctgtgaggaagccactaaggccactgtcccttcaggagacacaaacacatggatggcatcatgctgcaggagactttcagagcttagtctatggagaaaatgctgaatggtgcaaggctgcatcttttttcctcctgaacctgtttcatatgaatcgattctaggatcaccagtctgtccccacagtcatcctgccatctgctaggcttggtagctgttgccggaac

SEQ ID NO: 89150 - DNA, 514 bp, Homo sapiens
taggggtccctagagactgtggaaggcggggtagcataaaacacaatgggggactgcggaggaactaaaatttcgagactacatggttttgttgtgcaccagaagttcattagagaagttccttaattgcttctccgcccgccgcgatggcactcgaccccgcggattaatttaacaactctgatggttgctctgtgaaatttaaagaacagtggtttaagcaaagaccacaagaaagaagaattgagatcaaagaggagtgtgtgccatcgctgtggaggagtttcrgttgtgaatcatgaaatgtcctgtaaaccatttcaaggagtttgatttttataccaaaaacaatgggaagacactacaggtttttggagcagcagctcagacgtgtcgaaaaagatgttttgatccctaaaataatgagagaaaaggccagagagaggtcttctgacaagttcaagattttaccaaatgttgcaagaactctggaatccttatggtagtaaaatgc

SEQ ID NO: 89151 - DNA, 740 bp, Homo sapiens
tgtaacacacctgggatcatctcatcatgattagatgattagctctcatcatgattttttaacttcccacactacaccaacctaaagggctaccttctttaagacatgttggggtaagagctggaacacttaatatgttgcagtgggctctaggtgagaaatgatcaggctgaaagcctgtttagttttcctttctctgggttgcctgggctctttccctgggcctcatctcctcggcttcttctcttgactatgactttttgcactctcttgctcagctctggtgtttcttcatggcctcccaagatcagtcttggctgagaatctgcctcttggaccatgaattctctcctttcccatgctaaccgtgtaagcctctgctctcagctttaatcggtcaggcctagcatagggcctgggaaaataatgctgacctttaactgctgctcagagaaagcacagtgttcccatttcagtggttgaaggagggtcctgttttcattctttatcatcatctctcccttcatatttttctttgatccaacttcaaatagaaattttcaacctgagaaagttgattggaaaagaaaaagaaataatattataagcccaagttaaactaaactaaacaaaaatttcaaggccmcccatgttaggaaaaaaaaatgataccactgatttttcgtacaacaaaatacatgtgcagtccctgtaagactgtgtggtaagatccgatctat

SEQ ID NO: 89152 - DNA, 579 bp, Homo sapiens
acttctgatgggacaaatgtgaaagaacttgataacaagtttaaaaatcaccttagatgatgttaacccatagagttataaggaaagagattgcatttacagccaataatacaaaataaatttcagagaggttgaggtagggtgtagattaaaagaatcagttcatctcaattccttattaatttttttttaaatgtagacacgtggtcttgctctgttgcccaggctggagtgcagtggcatgatcatagctcaggagtcttgaactcctgggctaaagtgaccctcttgcctcagcctctcagctcagccttctgagcaacgggtaccacaggcatgcaccactacacccggctaatttgtgtgtgtgtgtgtgtgtgtgtgtgtgtgtgtgtgtgtgtgtagagacagggtttcaccctgttggccaggctggtcttgaactcctggattcaagcaatcctcccacctcagcctcccaaagtgttgggattacaggtgtgagccaccatgcgcagccccttatctcacttcctaacagaccccagaaagayactcgtctggtttggaggataactg

SEQ ID NO: 89153 - DNA, 515 bp, Homo sapiens
gaacgcccacgccaggatcgactcacaatcattctgtctatcgctttgctctgatgcaggaggctggggtggaacttaccttccttacaagaccctagatgcccacaacccgaaacccaaggtcatgaccctcttctggccaagtcagaagctccactaggccctcaagtcaaaggagctggggttcttggagagaatgcctgcttctcccaacaatgagatgcaactcggtcagcagctgcccctgctgcctgcgggggtgccttatgcaggagggcctaaccagagaggtttaatggacctttgtttattttgtcctgctttccctttgttttttcttttccctggcctgagagctccctctggaatttctctttaattataacttcttggtattcctctccaagggggtgcacwtctctgcccacgccagtctgtattgcaccctctggctaggcatccacacgtgtccctatctgcaagtaggcattcacaggcattggggtgggtaccta

SEQ ID NO: 89154 - DNA, 691 bp, Homo sapiens
cttgagctcaagggttcgagagaccatgtctctttaaaaatagaagtttagggccaggcgtggtggctcatacctcttaatcccagcactttgggaggcggaggcgggtggatcacctgaggtcaggagcttgagaccagcctggtcaatatggtgaaacccygtctctactaaaaatacaaaaattagcccagcgtggtggtgcacgcctgtaatcccagctactcaggaggctgaggcaggagaatcgcttgaatctgggaggcagaggttgcagtgagcccagatcacgccactgcactccagcctgggtgacagagcaagaccccctctcaaaaaataaaaataaaaaatagaattttaaaaataaaagagtgaaaagagccctatacagatgaacaacaaaagatgaaacaaggcatacagtcattgtttaatttggtaaagaaaagaaattacttcaaatgatccacatatttcaacctgtcacttcacaaaccctgttttgacacagctggtgaaaatagtagagttgcaactttgaggaagaagcaggaatgaaacaaatggtccatactgacctattaaagacggatatggagaaattgtgcttcctgtgaatattagaattggttgattaaaaaaaaaacctcaacatagataattaaaatggaatactttgtagctacca

SEQ ID NO: 89155 - DNA, 582 bp, Homo sapiens
gaggataatgaatattctctgtctggctactccaggcaaggcaggaactgctctgtcagaagacaatatgtctctagccagtcatggtggcccacacctgtaatcccagcacttggggaggccaaggtgggaggatggcttgagcccaggagttcgagaccagcctgggcaacataacaagactatctctacaacaaagaaaaaaaagaaaaaaaaagtctctagtacccttcagaacatacacgtggatgtgtgaacatagatgtggagacgaggtcttctgaaagcccttatgattctggggatcccatgatcagtatttttagcaactagcttttctatttgggactgaaaaaaatagaaaagctactggctaaaaatgctgaccatgggatccctcggaattataagggctttctgaaagattgccatttattcrtttatttatatctttattcctcttcagtaccttttttttttttgagttggactctcactctgtcactcaggctggagtgcagtggtgtgatctcagctcactgcaacttccgcctcctgagttcaaacagttctcctgcctca

SEQ ID NO: 89156 - DNA, 516 bp, Homo sapiens
agctaggaatatgatttctgatatctttcttgtctaccccaggagactgtctcttctccagtgtatttcaggtttctggtttcattgtattgttttcctatagaaattgcatataaaaaccaatttgaataccttccttcctgtttcaggtaatagagcagtttttgcttatttatatttttggataggcacacttcctatcactgaatgctctagccatcaagggggtctgtaagacccccacatttcttaaaaaccagcacagcctgaattctccgaatgtccatccactgagtatggtcactgcactacaaagaagccctgttgcaagaggtttagtttagaatctacctctctcagtgtgstatgaggaatggtcattttaacttaattaacttattaaagtttaaagtttctaagttgaactttctagtttattactaaatattttaaaataacacttattactctaagtcattgattctgaaacatttagtcttcacattttaacatctc

SEQ ID NO: 89157 - DNA, 645 bp, Homo sapiens
ttttcacagttgaacataggggagggatatagaatataccaaaatatcattataatgatggtatgaaaatgaagccagtcgcatgamaaagttatattaccctatctcttaacatttggtttactaacatacaatgattggatatattttagaaattatataataggttaatatacactgaggtcaacaacatggtagaggaggaagccttggatcctcctcctttaccccgaaatacactgattcagcagcaattcatggactaattatctttgtgggaaatcagaaattaattgaaaatgtactgtttctgttctccttagaggaagcaaaacgaaacttataaagccagtagaaagatttgagacattcctacccaggcacagtacaacatgatcagggaaacgccctctagctttcagattcacccagggaaagaaaaaggttaggcagtgcattcagggttttagctttcctgaagggctccccagaggtttggcttctgtcttgccaggcctgagctctgacgggttcagccacctaggggagaatgaaagtgatggcttgagctggtaggcattactaatcctcatccttgcttagtacagagtaaggggttaagaaaatctacctcccagcatccct

SEQ ID NO: 89158 - DNA, 645 bp, Homo sapiens
ttttcacagttgaacataggggagggatatagaatataccaaaatatcattataatgatggtatgaaaatgaagccagtcgcatgaaaaagttatattaccctatctcttaacatttggtttactaacatacaatgattggatatattttagaaattatataataggttaatatacactgaggtcaacaacatggtagaggaggaagccttggatcctcctcctttaccccgaaatacactgattcagcagcaattcatggactaattatctttgtgggaaatcagaaattaattgaaaatgtactgtttctgttctccttagaggaagcaaaacgaaacttataaagccagtagaaagatttgagacattcctacccaggcacagtacaacatgatcagggaaacgccctctagctttcagattcacccagggaaagaaaaaggttaggcagtgcattcagggttttagctttyctgaagggctccccagaggtttggcttctgtcttgccaggcctgagctctgacgggttcagccacctaggggagaatgaaagtgatggcttgagctggtaggcattactaatcctcatccttgcttagtacagagtaaggggttaagaaaatctacctcccagcatccct

SEQ ID NO: 89159 - DNA, 623 bp, Homo sapiens
taataattttaataacttccagagtattccagtaaatattcctaattttatttacaattccaataaaacatttacattaataattttttgatataagtattatgatgagtctaagtctccatccaattgtccaatcacttccctctggagaaatttctaacattagaacttctgtcaaaaggataggtatgttttaaatttcagtatacattaacaaaatcctccaaagttttcacttcattttcattcctaacagcagggctaatgagtgcttcttttctctaatcaatattgatttcaaatattaaaaaatatctctgcctaagtatcttgctttactcacatctttgattcctattaagctcggcatttacccctctcttagttggccattgtatttattatytgaaatgtcattttgtgtcctgtgttcatttttttcaactgagtagtttgtattgcttcaaaaagagctgtgtagacattaatgctgataactttttttaacctgtctgcatgttgaaaatatcttttcaagggtttctccctgcctttgtttattattgtttttgatatacagaggttttaaaattgcatgtatcaattatgatatgtgtaagtta

SEQ ID NO: 89160 - DNA, 623 bp, Homo sapiens
taataattttaataacttccagagtattccagtaaatattcctaattttatttacaattccaataaaacatttacattaataattttttgatataagtattatgatgagtctaagtctccatccaattgtccaatcacttccctctggagaaatttctaacattagaacttctgtcaaaaggataggtatgttttaaatttcagtatacattaacaaaatcctccaaagttttcacttcattttcattcctaacagcagggctaatgagtgcttcttttctctaatcaatattgatttcaaatattaaaaaatatctctgcctaagtatcttgctttactcacatctttgattcctattaagctcggcatttacccctctcttagttggccattgtatttattatttgaaawgtcattttgtgtcctgtgttcatttttttcaactgagtagtttgtattgcttcaaaaagagctgtgtagacattaatgctgataactttttttaacctgtctgcatgttgaaaatatcttttcaagggtttctccctgcctttgtttattattgtttttgatatacagaggttttaaaattgcatgtatcaattatgatatgtgtaagtta

SEQ ID NO: 89161 - DNA, 623 bp, Homo sapiens
taataattttaataacttccagagtattccagtaaatattcctaattttatttacaattccaataaaacatttacattaataattttttgatataagtattatgatgagtctaagtctccatccaattgtccaatcacttccctctggagaaatttctaacattagaacttctgtcaaaaggataggtatgttttaaatttcagtatacattaacaaaatcctccaaagttttcacttcattttcattcctaacagcagggctaatgagtgcttcttttctctaatcaatattgatttcaaatattaaaaaatatctctgcctaagtatcttgctttactcacatctttgattcctattaagctcggcatttacccctctcttagttggccattgtatttattatttgaaatgtcattttgtgtcctgtgttcatttttttcaactgagtagtttgtattgcttcaaaaagagctgtgtagayattaatgctgataactttttttaacctgtctgcatgttgaaaatatcttttcaagggtttctccctgcctttgtttattattgtttttgatatacagaggttttaaaattgcatgtatcaattatgatatgtgtaagtta

SEQ ID NO: 89162 - DNA, 540 bp, Homo sapiens
atatgttctgaactcaattgtgtccctcaaaattcatatattaaagtcctaatctcagtaccttagaatgtgactgtatttggagaaagggcctttaaagaagtaattaaggttaaatgaggtctttaggatagtgtcctagtccagtatggttggtgtccttacaagaagaggaaaacaccacaaatgcttgtgcccagagaaaaggttgtgtgaggacagagtgagaggcagccatctgcaagccataatgaaagtctacaggagaaaccaaccctactaacaccttgatcttagccttctagcctccaaaactatgagaaaataaacttctgttatttaaagccaccagtctgtggggttttttttagggcagtcctagcaaatacaatgtacacattagaaagatcttcctctaatcttctgtgacttactgttcctctctttctctctctctctctctctctctatgctatcyttttaaaacaaaagttcttgattttaatgtggtattttttttcctttttggtttctgctttt

SEQ ID NO: 89163 - DNA, 692 bp, Homo sapiens
ttccctccttgggctaggactgactctgcagctgaggcctctcttgggcctgggggattctggggaggacatcactagtccccctcaaggaagaggaggttcagggtctgtaacaggagctcctcctgagcgttccagagtaggtgtgcaaatgaggcatctgcagccccctcctctagagggtaatgggctgtcatacaaagccsgcaggtcaccaccacagccctgctgtggccttccatagctccctgtcttgcacaagactcagtttccccttatgtacaatggagaggggctgacataggtgcaggcctaagatcttggcttggacacttggcccaaccctgggaagcaggcaggcccccctatcatcaacccagcccacccacctgcctccctccctcgggggacatatttgctgctgggaaagttaatccattacagtttaaaggctccgttcctcgctggcagtaaattacctgctttgcattttgcagcaacaacttaacggtattaatttattgtgctctgtctttaacaaacatcattatcatattgccagccaggattatgcaaatgggagggacaagggagaaagaggctgaatcttgtccccaaagtcaccttgatttattaactttggggccctgcaattggccaggtctgggaggtgcaggtgagtgcagaggcca

SEQ ID NO: 89164 - DNA, 738 bp, Homo sapiens
gtgggctgggccccccctctgcccctccctgtgcgcctcctcccttgggctggctgtggtgagaacccgcctgattacacagctggctgcccccggccactgggcctgctccccaccacctgcagactggctctgccaggaactcactgggactacatccaagcacccgtgggcgccagcccagggttctgccctggccatcagggtccttcccgggccctgcagaggcgccaaggtgggagctggagaggggccaacagagaggagatgacaccaacctggctggccaaagctctggcctggcgggtgtggggtggtggggaattccacggggagggtggcaccccctgtctactgaattcctgagtggccccctctgtggccccatccctgccctgcctttggcattttgccaaacctgcccttgcctcctggtgccccaatctctgcctcagtctctgagcacccccactgccccctctacttgctctgtcctgcatcgctgtctctgggtctctccctgtcatgggggatggggctagggagggagcaggaagcagagggaagaggtattgagggggcatggagtgggggagcaattcaatttccagagttggccctggcaatmccggttgtgtcgtgataagaaagccatttcccgtgatggctcctaatccacaccctcctgcctttgcatgcagcagctcccttcatctgcctgtggccagaggctggaag

SEQ ID NO: 89165 - DNA, 769 bp, Homo sapiens
atgctagttaccccacccccccttctatatatatctccctattcagcgactactgcaagagttccaggaaatgtacactgtgtgttcacttactgcattttaaatcattgcctttactatayttctgcatttcccttcaatctagctctgtctgtacatttctgaaagccagtagcttccctgaagaaccaggtaacaacccgaacaatcaaattagataaccatttgtagaatggaggttccgggagatcttagaagatgtgatgggtgctaagggactttgtagttccctgaagttccagtgagtaaaaggtacccttggaattttttattccttcagacttttaaaacagagatcactttcaaaaattactctttctgctttgaatccatgttttagtaactattttgacactgtttggtcagaaggctgtgtgggtcaactgcaaataaataaaataaatgtgatttcagtaatttccattttgtaacaagtaattgagaaaataggattggatcagatatttgcttatacacattccctttcaggagcacttctgttctataaagaatgttggtatattgttaaggacacttcaagctttgggaacctttgaagtatccattgattcagttaacaaaattatgttgagtgcctaccctgggcctgggcctgtgttaggaggggacactaagatgagagtccaaagcacttcttctcagactcctggctgctaatgggttgctgcctctacttcttcacttagca

SEQ ID NO: 89166 - DNA, 1028 bp, Homo sapiens
tattgtaaaccaaatagaacactaaaaaatgaaaataaagagatatggctaatgtgccaatggtggagataagatagatgcaaaaaaagaaaaacattcaaaagaaggcagagacagaggaaaaaaggamcaaagatcaaatgagtcaaatagaaagcagctaaactagcaatatggcagatttaaatctagccatgtcaatagttatattaaatgtaaatgttctaaatacctgaattaaaggatgaagattgtcagattagattgaaaaagcatgacccaactacatgctgtctgtaagaaattagaaaaagaacaaattaaatccaaagtaagaagaaaggaaatagagtagaagttagtgaagtataaaacaaagagcaaagaaaatcaattaaatgaaaagctggttctttgtaaagatcagtaaaattgataaatttctagctaaactggccaagaaaaaagaaaagacatacaaattaacagtatcaggaagaaaaacagagaattcaaaggagtgtaatgcaaactttatgctagtaaatgcaataagttagatggtatggaaaaaaatgtgaacaatacaaagcagactgtggttgcctttggtggcagtagcggggtgggagtggaaggttgaattgactggaaccagaagcacaagtgaactttttggggtgatggaaatgttttgtatcttggttgcattgatagttaaatggttgtagacattgcttaaaactcactgaacacttaagtgggtatgttttattatttgtaaaatatacctcaaaagcagttttaaaaatgtattcaagtacatacttaagatctttgcattttactctgagtataccttaattttaaaatctgttttttaaaaagtattatgtagataccttttattttcccaatgtctttattaaatgacatctccacgttttgcttcttacctctatttttttttttttatttctctgtctctcaggcatgcacacacacacaccaaaaaaagtacatatgca

SEQ ID NO: 89167 - DNA, 2411 bp, Homo sapiens
accatgggcacccttcacttctacaaaaagcatttgtttctcagaggcacctgctgtgcacaactctgagcctgtgctccagctgtccttcctgcttggaatgctgcccctttgggtctgaccagacatccctagtcctctgccagtgttcagagtagcagatggtgaaggcctctttgccactttttgccaaccttgctgcaaagtcttgttgtgttcatcacaccatattttgacttttctcccttcatccctgattctcacttccatttccctcccctaacagggcacccactcccatatctttgacgcatgcctttggatatatgtgtgtctttataaaatgtgcatggcgttgatttgtgtgtggaggtttttaatgtatataaatagtggtttcaatagatctgtgtcataggctattttgtttcctcgacactgctctgtgtgctgagtccagctcaagtcccttggttcccactgctgctaagcatgcacggtgtgcgtgtgccaccatgcctccttttcccaccgctttagtgatggatgctggctacctccagttcccacctccccaagcaaagctgtgatggacttgcagtgtgtgactctcatggactcccgtgtgtatttctctgggatgtacactcgggggcaggatccctggggtggagagaatacatacagttactgcactctatgacggctgcctcagtctacatgcccagcagcagggcatgagggaccactttctccacatgcaccctagcacttggaattatctgacttcccaatgatggagatatgggttgttttccatctccttgtgcttgcctccatcacggtgtgggcaataatgaatacttgttgcactttgggtggccgaggcgggtggatcattgaggtcaggagtctgagaccatcctggccaacatggagaaaccccgtctctagtgaaaatacaaaaattagccaggcgtggtggtgtacctgtaatcccagctactcaggaggctgagtcaggagaatcgcttgaacctgggaggcagaggttgcagtgagccgagatcgcgccactgcactccagcctgggtgacagagcaagactccatctctctctctctctctctctctctatatatatatatatatatatacatatatatatgtatatatatgtatatatatgtgtatatatgtgtatatatatgtatatatgtgtatatatatatgtatatatatatataatgaatacttgttgaacaaatgaatgaaaaggctaatacacagcctcccacacctaccttgtaccaaacctcagtctagaaggtggcggtatatgtgtgtatgtttgtgtgtagagaggggaatataagacaaagtcttatgcctcaacctgcttagagaaaaagactaatgacagttagcatttattgagggcttactttgtgtcaagaattcataggtgtatattcacaaccttaacttcagtgagacaagtaaaatgcatttctctctcattcaaggcctttggaggtagggctgctctggcattccacagtgtggtcgccagcttccaagattgccagcaatgatccttgcctcctagtattcatctgcgtgtgtagaaccctcccccattgaatcagatttgactcatgtgaccaaaagaatatgacagaagtgacggtatgtgacttctgaatgtagctcataaaggcattgagctcctgccttgttctcttgagtcatttactctggggacagcagccaccatgccatgaggacactcaagccgtctgtggagagagaccaaggtccctagcctacagccatcaccaatttgccagccaagtgagtgagcctccttggatgtggatcctgaattcctgacctgcaggacctgtgaaaaagaagaaagataatacagaaagacaaagaaaaaagataataaataattattggctgggcgcagtggctcacacctgtaatcccaggacttcacaaggctgaggccaaaggatcgtttgaggccaggagtttgagaccagcctgggtaacatagtgagaccctgtctctaaaagaaaaaaaaggaaaagaaatttgctggatgctstggtgcatgcctgtgttcccagctactctggaggctgaggcaggagggtcgcttgagcccaggagtttgaggctgcagtgagccatgatcacaccactgcactccagcctgggcaacagagcaagaccttgtctctaaaaacacaaaaattatcaatgttgtaatcccgtaagtttagggtgttttgttatgcaacattagataactaaaacagatggtgccggggacccaggctctgtctatctttttactgcaccatacatagctttcacttcctagttctcttacagagcc

SEQ ID NO: 89168 - DNA, 622 bp, Homo sapiens
ttgcagaagcaaaactgactggaggtttgttttcaagagaatttttgtttcaatcacagaccaaaccagcaaagttgccacctccttttactcctgcgtataacataaacacatcgtatttgctttttcttccatagctttgttacttctgaggcctcattctggtaaatactggataatcttttctttctatccatctgtctatccatccatcgattcccttatccatccatcctcctctatccayctgtccacccatccattcatctacccttcctccctccctcccttctttccttccttccttccttccacctgttcctgttccttcatcctcccattaagacacagctgcccctacaaagctcagctgagggtctggctggagctgccaggaggggcactgatcccactacatccatctgccacgtcctaaagcattcgggtagtgacatcgggctaatttttggaacccgtagctgcacacctgttataggatggcaaccaatgtgctctcaggtgctaggcaggtaacttaaacaactaggtaggtaggcaaaaataagtctcagggcttcagtgaactgtggggttcaaaccactcctaagactttctaattca

SEQ ID NO: 89169 - DNA, 622 bp, Homo sapiens
ttgcagaagcaaaactgactggaggtttgttttcaagagaatttttgtttcaatcacagaccaaaccagcaaagttgccacctccttttactcctgcgtataacataaacacatcgtatttgctttttcttccatagctttgttacttctgaggcctcattctggtaaatactggataatcttttctttctatccatctgtctatccatccatcgattcccttatccatccatcctcctctatccatctgtccacccatccattcatctacccttcctccctccctcccttctttccttccttccttccttccacctgttcctgttccttcatcctcccattaagacacagctgcccctacaaagctcagctgagggtctggctggagctgccaggaggggcactgatcccactacatccatctgccacgtcctaaagcattcgggtagtgacatcgggctaatttttggaacccgtagctgcacacctgttataggatggcaaccaatgtgctctcaggtgctaggcaggtaacttaaacaactaggyaggtaggcaaaaataagtctcagggcttcagtgaactgtggggttcaaaccactcctaagactttctaattca

SEQ ID NO: 89170 - DNA, 550 bp, Homo sapiens
cgaggagaggccattggtcccacacatccctgcaccttggggtccagcagagattcagcatcatccatgttccttgtttcctcttctagactattaacactcctacctttyattaaaattcctgttactctaagtctttttgttgttgttgtttactataacatgctatagccctccttattgctgtcttctactcatgccctgggcttttcccctcatttaccgaaaagtttccagttaggttctctccagctatcctccttccatgccaattctgatattatcctcagagactttaaggcacaacaccatgactgcttggtttcttgacaggcacaatgagaggtgttgtacctctcattcccataagtctaccatgaatctggctatcatctgcaaaattatggattcaagaatttctctgaagttttctatatttctctctttccttagctacctttccccttgaatcacatttgcactttctctttcttcctgtcattctgcctactcctattttttattcctttccttatcctgtttgtatttc

SEQ ID NO: 89171 - DNA, 1541 bp, Homo sapiens
cttttggtaccaactttgtcttctcatacaagagctacttcttccagtggcaggtcacttgcaaattttcttaacctgccaccaatatcctcaaatcagaaatttattaaaatgtcacataaggtaaaatgaggrcagaaactgtgatttcacaccagcatagatccatcaatgagcaacctttgaaaacagctttggaagggttagacacccacttcattaaatccctacgcaaccctcatctctccctcttatccaaagattttatgagaaattgttcaatgactctttggaaccaacatataagcattcctggataaacatgttataagattctcatacagcctgtggattttcttatttttgactaagggatacttgttttctgctattctatgggaaatagcataaaatcagcagtaaagataagattcagtatctctagattcatgcattaccacattgaccaaaccagaaagtttgctgtatttaaattgtcttagggccaggcatgttggctcacacctgtaatcccagcagtttgggaggctgaggcaggtggatcacctgaggtcaggagttcgagaccagtctggccagcacagtgaaaccccatctccactaaaactacaaaaaattagctgggtgtggtggcgggtgcctgtaatcccagctactcgggaggctgaggcacgagaatcgtttgaacccaggaggtggaggttgcactgagccaaaattgtgccactgcactccagcctgggcaacatagcaagattctatctcaaaaaaaaaaactgtcttagaaaatgtctaaagataaaaatgtgttagacctctattaggtcatatggtataaattgcactgttatctagaggaaattataatacattggaagttatcttaaaggattcttatctataagctaaaaggataaatactagagcacttattggtaggtaacatagcatggtaaaggtactgattcaccagtagtcagctgtgtgactgaaaaagccacttggaccccctgccccaagagcaagcttctttaaattgcaaaaatggagatgatacctagccttaggagatgtactaaagacagaatgaggcaattaataattgttaacatatattaaggtgctgtgtgccacactctactactttgcacggttcacatcatttagtcctcacatgaccctaggaagtgctatgatgaccatccccatatattcgacatgctaagatataaagtgactggcctgatccacacagaaagtggtggccctggcatttgaagcccctgactccagagcctgcactcttaggactacatctacagagttagtatttattttttgcctcccagcatccattcttccaccttttggtaatagatccttaaattcttagagtccccctatctgtgtctaatcctggtaagactaacaatcaggatgttcatctctctagccatgacaaaagccaggctggatttccctcgtgacattatacatggagggacctgattcattccctc

SEQ ID NO: 89172 - DNA, 1541 bp, Homo sapiens
cttttggtaccaactttgtcttctcatacaagagctacttcttccagtggcaggtcacttgcaaattttcttaacctgccaccaatatcctcaaatcagaaatttattaaaatgtcacataaggtaaaatgagggcagaaactgtgatttcacaccagcatagatccatcaatgagcaacctttgaaaacagctttggaagggttagacacccacttcattaaatccctacrcaaccctcatctctccctcttatccaaagattttatgagaaattgttcaatgactctttggaaccaacatataagcattcctggataaacatgttataagattctcatacagcctgtggattttcttatttttgactaagggatacttgttttctgctattctatgggaaatagcataaaatcagcagtaaagataagattcagtatctctagattcatgcattaccacattgaccaaaccagaaagtttgctgtatttaaattgtcttagggccaggcatgttggctcacacctgtaatcccagcagtttgggaggctgaggcaggtggatcacctgaggtcaggagttcgagaccagtctggccagcacagtgaaaccccatctccactaaaactacaaaaaattagctgggtgtggtggcgggtgcctgtaatcccagctactcgggaggctgaggcacgagaatcgtttgaacccaggaggtggaggttgcactgagccaaaattgtgccactgcactccagcctgggcaacatagcaagattctatctcaaaaaaaaaaactgtcttagaaaatgtctaaagataaaaatgtgttagacctctattaggtcatatggtataaattgcactgttatctagaggaaattataatacattggaagttatcttaaaggattcttatctataagctaaaaggataaatactagagcacttattggtaggtaacatagcatggtaaaggtactgattcaccagtagtcagctgtgtgactgaaaaagccacttggaccccctgccccaagagcaagcttctttaaattgcaaaaatggagatgatacctagccttaggagatgtactaaagacagaatgaggcaattaataattgttaacatatattaaggtgctgtgtgccacactctactactttgcacggttcacatcatttagtcctcacatgaccctaggaagtgctatgatgaccatccccatatattcgacatgctaagatataaagtgactggcctgatccacacagaaagtggtggccctggcatttgaagcccctgactccagagcctgcactcttaggactacatctacagagttagtatttattttttgcctcccagcatccattcttccaccttttggtaatagatccttaaattcttagagtccccctatctgtgtctaatcctggtaagactaacaatcaggatgttcatctctctagccatgacaaaagccaggctggatttccctcgtgacattatacatggagggacctgattcattccctc

SEQ ID NO: 89173 - DNA, 2240 bp, Homo sapiens
ttggtacacttttatccaatggacatcatctttaatttgacttgctggctttattagaatattgctattgttaacattcaggcaaaacttaggtttccacttctattcttcctgcttttagatgaagattgcccatctttaaaaggtgacaacttcaggcagttaattttgtccactttagtttagtttgctagcttaagctctcagaaattattcaatattcaatttaacggaaggaggttttactgagrtggaaagcctaactctgcctcagtgtgtgagaaaagaaggattaaaagataatctatctccatttatctatattgtattacctccaaaaacgaaaaaaaaattctatttgtaaaactctgtgaagagcatgggtatactaggcattctttcctgttttttgatttgggtcaaaatgtatgaatgcatgtgagctatatggacataacaactttgagaaaattccgaataagttttattctcccagatcagagtttgtcagtgtgtagtccccagaccagcagtgtcaacatcacctgggcacttattggaaagggacattactgggatacatctcagacttttgggatcataaactgtaagaggagagtatggcctagtgatctgtgttctaacaaaccttttagatcattctgacacacgttgaagttttaaagccgcaaccctagttaactacatatagactttaaaaacaaattccctactaattccaattaattagggataaagatccaaatcaatcatgtagtatagtggcttaaaactcacaataacagaggattcttttcatgataaatttgtgatcatgcacaagaagattcttttcatgggcaatggaaatctgaagaatggagatggaggaaaagaaatcaaagagagaaactatttgcctggaagagagcaaaagtgtgtggaggtcaagagcccaacatgtgcacactgaaactcatgaaattttccccataatcagctatttctctggacctgcagggttctgtttttttatctgtatgcacagtctctaaactttggagtcctcatttcttgtattcaccttttcctttttcttctcatttaaacttcagttattttttaaattagaactcctgttctaatttaaactcctgttatttcatatatggatgtctgtatgtgacagattgtatttttcaaaagtggctgcagcaagatttcccatctcatgtgttcttcttatactgtgatcttgactcttcttctcttgagaggtgaggtctacttttcctcccgttaaacacaaacagacttgtataacagcttcaacaaagaacatacagtgaaaatgacttccaaggttagatcataaaaataccagacatatccaggttgctggtttgggatacctgcttttgaaactatgctgtgaaaaaattaaagcagcctggaggcaggcccataatgaaagagaccaagaccttgacctgcaaacccagccaagcttccagccaacagccagcaccaactttccagcaatgtgaatgagtcatcttgataatggatcctctagtccccagtagagccaccacatgtgacaactgtggagcagaggcaggccatacctgctgaactctaaccaaattacaaatttctgggcaaaataaatgattacagttgttttaggccactaaactttggaatcttttattatgcagctacagataatacattatattagcatttttgtaatctcctcacttctaatgtatcttgcaatcttgcacactaagttcataatactacattacccaatgaataatggtaacttatttagtgtacagttgtttcagccaaattcaacatgacgctaggcaattttataattgttatacttcttcagtttcatcattgatttatttacacatttattcctttagtaaaatatatttaataaatgttgattattataataaaatgtttgagttactggagagaaattcataaaaaagaacaaggaagaagaggaggagagaggggagaagaaggaagaggatgagaaagaggaggaggagagaaaaaagcagattctcaactaaggttgtcacacaacttgacaattttgcaaatgtgaatgggcattttttaaattagaatgcccaaaagatacacggttgtgagccatggattttgagcaatacttaatttcactgagcaggcctaaacaaactgtgcat

SEQ ID NO: 89174 - DNA, 2240 bp, Homo sapiens
ttggtacacttttatccaatggacatcatctttaatttgacttgctggctttattagaatattgctattgttaacattcaggcaaaacttaggtttccacttctattcttcctgcttttagatgaagattgcccatctttaaaaggtgacaacttcaggcagttaattttgtccactttagtttagtttgctagcttaagctctcagaaattattcaatattcaatttaacggaaggaggttttactgaggtggaaagcctaactctgcctcagtgtgtgagaaaagaaggattaaaagataatctatctccatttatctatattgtattacctccaaaaacgaaaaaaaaattctatttgtaaaactytgtgaagagcatgggtatactaggcattctttcctgttttttgatttgggtcaaaatgtatgaatgcatgtgagctatatggacataacaactttgagaaaattccgaataagttttattctcccagatcagagtttgtcagtgtgtagtccccagaccagcagtgtcaacatcacctgggcacttattggaaagggacattactgggatacatctcagacttttgggatcataaactgtaagaggagagtatggcctagtgatctgtgttctaacaaaccttttagatcattctgacacacgttgaagttttaaagccgcaaccctagttaactacatatagactttaaaaacaaattccctactaattccaattaattagggataaagatccaaatcaatcatgtagtatagtggcttaaaactcacaataacagaggattcttttcatgataaatttgtgatcatgcacaagaagattcttttcatgggcaatggaaatctgaagaatggagatggaggaaaagaaatcaaagagagaaactatttgcctggaagagagcaaaagtgtgtggaggtcaagagcccaacatgtgcacactgaaactcatgaaattttccccataatcagctatttctctggacctgcagggttctgtttttttatctgtatgcacagtctctaaactttggagtcctcatttcttgtattcaccttttcctttttcttctcatttaaacttcagttattttttaaattagaactcctgttctaatttaaactcctgttatttcatatatggatgtctgtatgtgacagattgtatttttcaaaagtggctgcagcaagatttcccatctcatgtgttcttcttatactgtgatcttgactcttcttctcttgagaggtgaggtctacttttcctcccgttaaacacaaacagacttgtataacagcttcaacaaagaacatacagtgaaaatgacttccaaggttagatcataaaaataccagacatatccaggttgctggtttgggatacctgcttttgaaactatgctgtgaaaaaattaaagcagcctggaggcaggcccataatgaaagagaccaagaccttgacctgcaaacccagccaagcttccagccaacagccagcaccaactttccagcaatgtgaatgagtcatcttgataatggatcctctagtccccagtagagccaccacatgtgacaactgtggagcagaggcaggccatacctgctgaactctaaccaaattacaaatttctgggcaaaataaatgattacagttgttttaggccactaaactttggaatcttttattatgcagctacagataatacattatattagcatttttgtaatctcctcacttctaatgtatcttgcaatcttgcacactaagttcataatactacattacccaatgaataatggtaacttatttagtgtacagttgtttcagccaaattcaacatgacgctaggcaattttataattgttatacttcttcagtttcatcattgatttatttacacatttattcctttagtaaaatatatttaataaatgttgattattataataaaatgtttgagttactggagagaaattcataaaaaagaacaaggaagaagaggaggagagaggggagaagaaggaagaggatgagaaagaggaggaggagagaaaaaagcagattctcaactaaggttgtcacacaacttgacaattttgcaaatgtgaatgggcattttttaaattagaatgcccaaaagatacacggttgtgagccatggattttgagcaatacttaatttcactgagcaggcctaaacaaactgtgcat

SEQ ID NO: 89175 - DNA, 2240 bp, Homo sapiens
ttggtacacttttatccaatggacatcatctttaatttgacttgctggctttattagaatattgctattgttaacattcaggcaaaacttaggtttccacttctattcttcctgcttttagatgaagattgcccatctttaaaaggtgacaacttcaggcagttaattttgtccactttagtttagtttgctagcttaagctctcagaaattattcaatattcaatttaacggaaggaggttttactgaggtggaaagcctaactctgcctcagtgtgtgagaaaagaaggattaaaagataatctatctccatttatctatattgtattacctccaaaaacgaaaaaaaaattctatttgtaaaactctgtgaagagcatgggtatactaggcattctttcctgttttttgatttgggtcaaaatgtatgaatgcatgtgagctatatggacataacaactttgagaaaattccgaataagttttattctcccagatcagagtttgtcagtgtgtagtccccagaccagcagtgtcaacatcacctgggcacttattggaaagggacattactgggatacatctcagacttttgggatcataaactgtaagaggagagtatggcctagtgatctgtgttctaacaaaccttttagatcattctgacacacgttgaagttttaaagccgcaaccctagttaactacatatagactttaaaaacaaattccctactaattccaattaattagggataaagatccaaatcaatcatgtagtatagtggcttaaaactcacaataacagaggattcttttcatgataaatttgtgatcatgcacaagaagattcttttcatgggcaatggaaatctgaagaatggagatggaggaaaagaaatcaaagagagaaactatttgcctggaagagagcaaaagtgtgtggaggtcaagagcccaacatgtgcacactgaaactcatgaaattttccccataatcagctatttctctggacctgcagggttctgtttttttatctgtatgcacagtctctaaactttggagtcctcatttcttgtattcaccttttcctttttcttctcatttaaacttcagttattttttaaattagaactcctgttctaatttaaactcctgttatttcatatatggatgtctgtatgtgacagattgtatttttcaaaagtggctgcagcaagatttcccatctcatgtgttcttcttatactgtgatcttgactcttcttctcttgagaggtgaggtctacttttcctcccgttaaacacaaacagacttgtataacagcttcaacaaagaacatacagtgaaaaygacttccaaggttagatcataaaaataccagacatatccaggttgctggtttgggatacctgcttttgaaactatgctgtgaaaaaattaaagcagcctggaggcaggcccataatgaaagagaccaagaccttgacctgcaaacccagccaagcttccagccaacagccagcaccaactttccagcaatgtgaatgagtcatcttgataatggatcctctagtccccagtagagccaccacatgtgacaactgtggagcagaggcaggccatacctgctgaactctaaccaaattacaaatttctgggcaaaataaatgattacagttgttttaggccactaaactttggaatcttttattatgcagctacagataatacattatattagcatttttgtaatctcctcacttctaatgtatcttgcaatcttgcacactaagttcataatactacattacccaatgaataatggtaacttatttagtgtacagttgtttcagccaaattcaacatgacgctaggcaattttataattgttatacttcttcagtttcatcattgatttatttacacatttattcctttagtaaaatatatttaataaatgttgattattataataaaatgtttgagttactggagagaaattcataaaaaagaacaaggaagaagaggaggagagaggggagaagaaggaagaggatgagaaagaggaggaggagagaaaaaagcagattctcaactaaggttgtcacacaacttgacaattttgcaaatgtgaatgggcattttttaaattagaatgcccaaaagatacacggttgtgagccatggattttgagcaatacttaatttcactgagcaggcctaaacaaactgtgcat

SEQ ID NO: 89176 - DNA, 1302 bp, Homo sapiens
gcatccctgtgatccagtcacctcctgctaggcccatgtccaacactggggattataattcatcatgagattagagggaacacatatccaaactatatcacacctttatgccaataaacccaaacaacagagttctattttcataattttatattgtatttcttcttgaggtctgtggcatagccatctcctgacacaaagaatacacatttgattgctgaatgagtaaaattccataatgagaaataggagaaccctgaatatgtagaatgcaattactagtatttatagtgtctgggtcctactgattctactcctgttggagaaagaaaaaaggggaggggagagtacatatgagagaacacattaaaagattaatgaaatgtttcrcttatggtaaaaaagtgataagaataaattcactcatctagtcatgtaacatttactcagcacttggctgattcctttccttagggagctcacagtcaatagagggtgtcatatgtcaaaataaataaatacagtttaaaatatgtaaaatatcattgaacaaaaaatgaacaattatatgtaattttgtgaaaaactctctttattttcaggaactcaaaataggatggccggtggcagaagcaaagagtttgtctggcaaggacacttaggaccagatgacagcagggcttaaaaatactttaaaatattttccatttgtccaaaagtgttttgattggtttggttttatattgccaagtgtaaaacctacaaattattccttattaatgcttgataaagtaccagttccaaacgaaatcttcacccaagctttttaactattatctttatgaactgcaacattcaggctttgttcagctcttgcaaataaggatatcaatttcattggaaatcaataagtaccaccgacaaagaaagagaataggaggaaaaagggaagaatgaaacagatttcagtgatcctcaagcacatttgtggggtgtttcttcctcacactaagatgaaacagaaaccaagcaggaactggaggggacactgtttctttccatttgaattaattttaattttaaagccaaattttatggaacttacctgaaaagtttttgtaatccactaaatcaaacataacgatggcaacagctgaccacgtgattatcagggcaatgaccagaagccaggctgcaggggagctgaacgtcgtcactatgtcttctgtgactgtcctcttcagcacttttccgggggatttgggcacagatccatttttgctgtctatcacagttgtggtt

SEQ ID NO: 89177 - DNA, 635 bp, Homo sapiens
agggaggtgggtagtatttttgttgaagagctgcaagaactctgcccagagaagtcgacaacctgctcaagttgtgcagctaataactacaaaagccaagactcaactcagatctgttgactctcagtattaccccaacctttatgccccaaaccaaaggatgcccttttcatttcagtcacgggtaaaatgaactttggcccattccgaaagatgataccagctatttgaacagacaggtacttgaggataatgaggtaattttttctaataagtaaagataattgtttgggtattaaaagctatgattttgtcataattctttttagtccaagtataatagagccagctctttcctaattctctaatggaatggcatttctaccccttacccaccccccaatccaaggcctctttcttctttgtgaattgctaaatacagttctgggctagtgggcagtggttcaaaacccatcgtttgaccctgcttgaacaatcaaaaacagatccagtgtcctaagataaaascactatacaaagcaaacattccctctcagtggctcctcggtaatgacccagcaagtattgtctatttcccgtgcctctcactatagccatcagggaccacttctact

SEQ ID NO: 89178 - DNA, 628 bp, Homo sapiens
tggttcttttaaagccaaaacattgtttttaaaagcccaaagctattcagtgtttgtgagtatggagatcrcttttgatgaagaaaattaattcccatgggggcagaatcctatcaacatgaaaatatataatgaggagctactataaatttagttatgcttctcaataactttgtatttcatggactccaacatacacctgcaattaaaggaattgaagagtagtctttgcctgtgtgagacatttagttcttctactctacaggccaggtatggtctgagcaacagcccttggggtctggcctgatcagcactcctatcctggtcttgtggtcatggcggccaccgcatgtggtgcaggtgggtctgctcctgccctatgcacaggatgggcatgtatggccacaccctggctgggcacagtggtggattaggacagggcacatgaggccaacagagcctggcaggggattcctgaatactgctgtgcagatggtgggagagaaaagattcctcttcctctggatagggagttttgagtatgaagcagatcacactgtgaacagaaggcatcactcccagtggggcagggctgaggaacggagcacaaatgccagaaggctggatc

SEQ ID NO: 89179 - DNA, 628 bp, Homo sapiens
tggttcttttaaagccaaaacattgtttttaaaagcccaaagctattcagtgtttgtgagtatggagatcacttttgatgaagaaaattaattcccatgggggcagaatcctatcaacatgaaaatatataatgaggagctactataaatttagttatgcttctcaataactttgtatttcatggactccaacatacacctgcaattaaaggaattgaagagtagtctttgcctgtgtgagacatttagttcttctactctacaggccaggtatggtctgagcaacagcccttggggtctggcctgatcagcactcctatcctggtctygtggtcatggcggccaccgcatgtggtgcaggtgggtctgctcctgccctatgcacaggatgggcatgtatggccacaccctggctgggcacagtggtggattaggacagggcacatgaggccaacagagcctggcaggggattcctgaatactgctgtgcagatggtgggagagaaaagattcctcttcctctggatagggagttttgagtatgaagcagatcacactgtgaacagaaggcatcactcccagtggggcagggctgaggaacggagcacaaatgccagaaggctggatc

SEQ ID NO: 89180 - DNA, 1421 bp, Homo sapiens
ttaaagtggtaatttagttaaaattaggtcctaagggtggggccctaattcaatataactgaggaccttataagaaaaggagattaagacacagatacacacagagggaggacgacatgaagacacgtggagaacattgacatctacaaggcaacgttaagaggcctcagaagaaacaagcctgctaaccccttgatctcaaatttctagcctccagaagtgtgggaaaattaatttatgttatttaacccacccagtctatgatcctctgttttgrcagccctagcaaactaatacagcccattttgtttttcatttttgggggggaaatttcatttccccataacctcgcattcttagtttcctccttcattaattcttgccctccacaaatatttactgaacatgtattatatacgtcatgttattggctaggttctagcaaggcaaagttgaataaaacattaccttttcccgatagaatttaagactacagtaaaagacaaacaaagaaatgaaaaaacattaaatgtaacagataaggctgagagcttcatttatgttgttccacaatacattcagtgcctaactcagggcacaatccataataagcactaaataaatacttgttaagtgaatgagggcatgcaaagagaaggagcatacaaactagacttgtggattaggaagggcatctgtattagtttgttctcatgctgctaataaagacataccaaagaccaggtaatttataaaggaaagaggtttaattgactcacagttcagcagggctggggagatctcagtaaacttacaattatggtggaaagaaaagtaaacatgtccttcttcacatggcggcagggagaagaacgagtgcccagtgaagggagtagccccttataaaaccatcagatctcgtgagatcaaactcactatcatgagaacaggataggggaaactgcacccatgattcaattatctccaccggcccctcccatgacacatggggatttattaacttctaagagaaaaaatgtttaagttgcattttaaagaggaaataggagtaaactatttgtaggtaggaaaaaaattccaggataacgaaacagcatgttttcctacaatatggtgtaaatcagcagaatacaattaagggactttccactgtaattggagcaaagaatgttaatgtagaagtgaaaaatatgagatttcagaattaggctgaccctttaccatctgggtccaatcttattgcttgtcttttgtccccaaaactaagaaaaactactaaagaatttatatacagcaagtgacattatggggccaatttaaaaacagaaaatcggtgattgcagatgaatgagatgagaaggagtgaaggcatgtaatacaacaaaggcagacagaaagaa

SEQ ID NO: 89181 - DNA, 1045 bp, Homo sapiens
aactggcccttgttttcaagatctggtaagagcacgggcaagctgagaggcagtcagcatgtagctaaaataaattctyactcattcttggattttttcttctttttttactagaatctgcgtatgtggtaagatcacatgagcacatctgcgtgaacacttgcagccagtgaagtgtggccgacgacgaagaagacaacctgcctccttcacgcagaccgaatggcaacggcatcccctgggggagccccagaggagccgacgaacctgccgtctgcactcttgcttgtgctgtttgcctttcgaaagggctcgctgcatcgcggccagtgcatcttctcctcccaaggccatgcttgatggctgaggtcccgtcccagatacagaccctgttgcccatgggtttctttctctctgtcgctaccctttctggggccccctccacttctccagccccacccacctccatgcccatttccaggaagggtaggacagagggcagcatcagcaagcatctcttcatttgtgaagcttacacatcctgggtgcttggaaaaagacctggttcgtgtctctctcctctctaatcaattcacaatcaataaatatttactgaacacctccaaagcacttagcactgagcaggtcctacagggatacaggccaataaaggcacagtaacatttagctttaagcccctatgctttacttgagcagaacaatccattggcaagacaaggcaggtgcttgtgtgatgtgaaatatacaagctagacttaacaagtccctctctgggctcccatagctaacagtgttctacaataatagtgaatagcattgattgaggctatgtggcagacactgctctcaagtgtcaactaagtgccaaaacagacaggaaccattattatcctcattttttcaaataagaaaactgaggcacagcctgaggtcacatagctgataagaagtagacatagcatggatcattcacccaaggtggtgtgacttcagagcctgcctgccctagccctggtatcattct

SEQ ID NO: 89182 - DNA, 860 bp, Homo sapiens
caacgtcaatcttgcattcttcttcccttacccctcctaagttaacttcctctgttttcctggtttcccctcttccttcaggatcccccaaggttctactcttttcagtccacatgctcaggtagagagctcttccccgcgctcatggtcgtatcccatggatagacaaaatggacccaaagtaaccaagtccttttttagccatctactggctgagtttgctaaagagcctactgacacctcatttcctgactgattctcccttcccacaacttccaagtcacaaagggaaactcactaagtctaggtgccttcatacaagaggaagttagaaattttgragatgcaagaaaaagaggagaaaaatatctgttctgtgtgtccagcctcaggtttgcctggtttgtcttggccacaagggacataggagacctcttcaccattgagctgagcccattgcattcttcagagattccacacaattttctggcatttcggctgtctcttgagccgggtcctgctgttcatttgatttttgtttcatttgtttctgtacacatgctttcaacacgctaagctcctctctccctctatcccttccctctctcctttccttcccatcctcccttcctttcttctgtccgtattcattgactgtctactacttgccagtgtccactgcggcactaagataaattaagttgcccataatcaagtgggagatgaacaggaaaaatgagtagtgactgtagaaaagtcacgttcacttggagtttcagtgtgatcaaagtccaaagcccccaaagaccctctcccaagatttgggggttgctgtggcaccttgcctttgccaaagttcc

SEQ ID NO: 89183 - DNA, 1339 bp, Homo sapiens
ttcctttgcacattaaacttcagtaaccctccaactggtacgggctcaaaatcaagtgcagcagcctggcattcaatgaaagacaatgtacagcagatttcaagttaagactctatccttactcccttcagcatccataccaactaacctacatttgtcttggtgtctcttgtccttgtgcatgattcacaagctacaaccttcagacttttgtacttgcaattagaacacccttctttcttcrtttcattcaagtcctaccttgtccttcaaggctctacttttaattccttttgcttggtgatgacacctgtatttacctctaaattaccacaacccagatactgcagtatcacttttattggcttacctctttttttcatagtaaaattatgtttttaataattataaaaatacaaacttactgattaaaaaactcaagtgttctggaatgtataattaaaaaaaaaagaaagaaaaattcagaaggatggtaaggtccaaaaagatgaacaaaggtaatatggcacagtctttcagggaatgcaactgctttggtgtggatgagtacaggatccctacagaggagtgatgagaagtgaggctggggagatggcaggatccagaccaccttaaattctctagcttccattgagtcttaatttatagatcattagagaaaaagcacatctttactaagcatctaggttgacacatagtcagcaatcaatgtatctttgttatattaatataaggtcttggggtcctaggctaagaaagcaccccaagtggatttcctaacattgttcatatagaaaaggcactgtctgagagagtctgcagtagaaagttcagggggtgctgactactgcagatagtcccaaaagcaagttccttaatcattttcccctcaaaatattgactgtgtgcctctccctgtatattggactgtacactaaagctaggcaggagaatgtgaacagattcattgcatagtgagctgataagggaaatgagaatacatgctggggagttatccagctaaagggcaactctctggcaatgtgctaaaaggagaaaagctcagggcactggtgatggggagaggaagagggaggaggaagctcatgagtggccctttgtcccaacactgaccttcccaacctgggaagcattttacaaagtagcagaattataagtttcaatgaacccaaaaggttattgagcgccccacccctctatttgcatttgggtgccatttggcctcactttgaactctcccttttacagggaattcatcctatatccaggaggccggtgtggagcagtggccagatgc

SEQ ID NO: 89184 - DNA, 1339 bp, Homo sapiens
ttcctttgcacattaaacttcagtaaccctccaactggtacgggctcaaaatcaagtgcagcagcctggcattcaatgaaagacaatgtacagcagatttcaagttaagactctatccttactcccttcagcatccataccaactaacctacatttgtcttggtgtctcttgtccttgtgcatgattcacaagctacaaccttcagacttttgtacttgcaattagaacacccttctttcttcgtttcattcaagtcctaccttgtccttcaaggctctacttttaattccttttgcttggtgatgacacctgtatttacctctaaattaccacaacccagatactgcagtatcacttttattggcttrcctctttttttcatagtaaaattatgtttttaataattataaaaatacaaacttactgattaaaaaactcaagtgttctggaatgtataattaaaaaaaaaagaaagaaaaattcagaaggatggtaaggtccaaaaagatgaacaaaggtaatatggcacagtctttcagggaatgcaactgctttggtgtggatgagtacaggatccctacagaggagtgatgagaagtgaggctggggagatggcaggatccagaccaccttaaattctctagcttccattgagtcttaatttatagatcattagagaaaaagcacatctttactaagcatctaggttgacacatagtcagcaatcaatgtatctttgttatattaatataaggtcttggggtcctaggctaagaaagcaccccaagtggatttcctaacattgttcatatagaaaaggcactgtctgagagagtctgcagtagaaagttcagggggtgctgactactgcagatagtcccaaaagcaagttccttaatcattttcccctcaaaatattgactgtgtgcctctccctgtatattggactgtacactaaagctaggcaggagaatgtgaacagattcattgcatagtgagctgataagggaaatgagaatacatgctggggagttatccagctaaagggcaactctctggcaatgtgctaaaaggagaaaagctcagggcactggtgatggggagaggaagagggaggaggaagctcatgagtggccctttgtcccaacactgaccttcccaacctgggaagcattttacaaagtagcagaattataagtttcaatgaacccaaaaggttattgagcgccccacccctctatttgcatttgggtgccatttggcctcactttgaactctcccttttacagggaattcatcctatatccaggaggccggtgtggagcagtggccagatgc

SEQ ID NO: 89185 - DNA, 1339 bp, Homo sapiens
ttcctttgcacattaaacttcagtaaccctccaactggtacgggctcaaaatcaagtgcagcagcctggcattcaatgaaagacaatgtacagcagatttcaagttaagactctatccttactcccttcagcatccataccaactaacctacatttgtcttggtgtctcttgtccttgtgcatgattcacaagctacaaccttcagacttttgtacttgcaattagaacacccttctttcttcgtttcattcaagtcctaccttgtccttcaaggctctacttttaattccttttgcttggtgatgacacctgtatttacctctaaattaccacaacccagatactgcagtatcacttttattggcttacctctttttttcatagtaaaattatgtttttaataattataaaaatacaaacttactgattaaaaaactcaagtgttctggaatgtataattaaaaaaaaaagaaagaaaaattcagaaggatggtaaggtccaaaaagatgaacaaaggtaatatggcacagtctttcagggaatgcaactgctttggtgtggatgagtacaggatccctacagaggagtgatgagaagtgaggctggggagatggcaggatccagaccaccttaaattctctagcttccattgagtcttaatttatagatcattagagaaaaagcacatctttactaagcatctaggttgacacatagtcagcaatcaatgtatctttgttatattartataaggtcttggggtcctaggctaagaaagcaccccaagtggatttcctaacattgttcatatagaaaaggcactgtctgagagagtctgcagtagaaagttcagggggtgctgactactgcagatagtcccaaaagcaagttccttaatcattttcccctcaaaatattgactgtgtgcctctccctgtatattggactgtacactaaagctaggcaggagaatgtgaacagattcattgcatagtgagctgataagggaaatgagaatacatgctggggagttatccagctaaagggcaactctctggcaatgtgctaaaaggagaaaagctcagggcactggtgatggggagaggaagagggaggaggaagctcatgagtggccctttgtcccaacactgaccttcccaacctgggaagcattttacaaagtagcagaattataagtttcaatgaacccaaaaggttattgagcgccccacccctctatttgcatttgggtgccatttggcctcactttgaactctcccttttacagggaattcatcctatatccaggaggccggtgtggagcagtggccagatgc

SEQ ID NO: 89186 - DNA, 784 bp, Homo sapiens
ctcagcattttgggtagtcaaggtgactgaattgcttgagctcaagagttgcagaccagcctgggaaacatggaaaaaccccatctctataaaacaaaatacaaaaattagctgggtgtggtggcttgtgcctgttgtcccagctatgctggggggctgaggcaggatcacttgagcccgggggaggtcaaggctgcagtgagctgagatcatgccaccacactccagcatgggcaacagaatgaractgtgtctcaaaaaaaaaagaaaaagaaaaagaaaaaagaatgtatgttatgatccagtgtgatgagcactgggtctatgaaaacagtgtctgagttgagttgaagagaacaaaaaaagggagaactaatcctgtgaaaagtacttagtttatgccaagtgctgaacaagtgatgttagttatctcatctaatttttcctttgaccctgtggagaagggattgatggtccctattttacagatgagcaacttgaagctagaagggatagaatcattgatttaaattatcaatccaataattagggggcttgtaggtgaatctcttctgataatctcaggttgaggtagaagggcatttcagcagagggatttaaacttgcagtgaccagagataagggtgggcagggcagagccaggggatgggagaggagatcattgggggatgcaagaaggggtaagattttggagaatgttataaaccacactaagaaacgggaaccttactctgaaggcaaaagataattatgaagggcttta

SEQ ID NO: 89187 - DNA, 784 bp, Homo sapiens
ctcagcattttgggtagtcaaggtgactgaattgcttgagctcaagagttgcagaccagcctgggaaacatggaaaaaccccatctctataaaacaaaatacaaaaattagctgggtgtggtggcttgtgcctgttgtcccagctatgctggggggctgaggcaggatcacttgagcccgggggaggtcaaggctgcagtgagctgagatcatgccaccacactccagcatgggcaacagaatgaaactgtgtctcaaaaaaaaaagaaaaagaaaaagaaaaaagaatgtatgttatgatccagtgtgatgagcactgggtctatgaaaacagtgtctgagttgagttgaagagaacaaaaaaagggagaactaatcctgtgaaaagtacttagtttatgccaagtgctgaacaagtgatgttagttatctcatctaatttttcctttgaccctgtggagaagggattgatggtccctattttacagatgagcaacttgaagctagaagggatagaatcattgatttaaattatcaatccaataattagggggcttgtaggtgaatctcttctgatartctcaggttgaggtagaagggcatttcagcagagggatttaaacttgcagtgaccagagataagggtgggcagggcagagccaggggatgggagaggagatcattgggggatgcaagaaggggtaagattttggagaatgttataaaccacactaagaaacgggaaccttactctgaaggcaaaagataattatgaagggcttta

SEQ ID NO: 89188 - DNA, 784 bp, Homo sapiens
ctcagcattttgggtagtcaaggtgactgaattgcttgagctcaagagttgcagaccagcctgggaaacatggaaaaaccccatctctataaaacaaaatacaaaaattagctgggtgtggtggcttgtgcctgttgtcccagctatgctggggggctgaggcaggatcacttgagcccgggggaggtcaaggctgcagtgagctgagatcatgccaccacactccagcatgggcaacagaatgaaactgtgtctcaaaaaaaaaagaaaaagaaaaagaaaaaagaatgtatgttatgatccagtgtgatgagcactgggtctatgaaaacagtgtctgagttgagttgaagagaacaaaaaaagggagaactaatcctgtgaaaagtacttagtttatgccaagtgctgaacaagtgatgttagttatctcatctaatttttcctttgaccctgtggagaagggattgatggtccctattttacagatgagcaacttgaagctagaagggatagaatcattgatttaaattatcaatccaataattagggggcttgtaggtgaatctcttctgataatctcaggttgaggtagaagggcatttcagcagagggatttaaacttgcagtgaccagagataagggtgggcagggcagagccaggggatgggagaggagatcatygggggatgcaagaaggggtaagattttggagaatgttataaaccacactaagaaacgggaaccttactctgaaggcaaaagataattatgaagggcttta

SEQ ID NO: 89189 - DNA, 760 bp, Homo sapiens
tggcagagaggacaatagtatatggaaaaaaaatttaaagactgagtcaaaaagtggtttagaaaaggcagacactgaatgcaaagttttatgaacatttgaacacttattttgtttatagcacaagaacgatgcacagtagtccccactttccagggaggatatgttttaagaccccagtggacgtctgaaaccacagatggtaccaaccctatatatactatggttttcaatctaataacctggacggctactgagtgactaacgggtgtatacgctggacaaaggaatgcttcacaccctgggtgggatggtgcaagatttcatcacactgctcagaatggcgtggatttacaacttatgaattgtttacttctggaattttctatttaatatttttggactttagctgattacaggtgactgaaactggagaagacaaaaccatggataagtggagactactgtattataaaaatataatcagaataaatgagccctttcaatgagctccaaaaatataattgataagaaaccattgggttatagttcagttggcatcattttctttgctttataaatggcacataaaataaagtgtctcttaaaatgaatsgcatcttgatgtgataaaatatagcatgtgactcagctacatgagactgcttttccagccaatggctagctgtaaaatactggctgtattctttaccttctccattcctaagatttcatgtctctatattgggtctatttctat

SEQ ID NO: 89190 - DNA, 901 bp, Homo sapiens
cacamacacacacacacacacacacacacacacacacacacatatgccccatactgaggagattaacaagtaaacaaatacattcaggataatgtatgtataatacattcaggataatgtttttaagacactgtttctctctctctctctctctctctctctctctctctccatatatatatatatatatatatatatatatatatatatatatttatttatttattttgagacagtgtctcacttcatcacccaggctggagtgcagtagtgtgatatcggctcactgcaacctccagtcacacccttccctccacctgcccacccattcccaccccggaccccaagctcaagtgatcttcccacctcagcctcagtctcctgagtaactgggaccatgggcacacaccaccatgtggcctggctatttttttgtttgtatttttagcagagacagggtctcgccatgttgtccaggctggtcttgaactcctggactcaagagatccacctgtctcagcctcccaaagggctgggattacaggcatgagccaccacactcagcctacatcctattttctttttttaaatgttggctccaatccaataagttgactttacaacctactaatggattatgacctgaagttagaaaactatggtgtagaagatctagagagagaccttcgattacaagtacatataacacaagctggatacttggatactgttttagactcttcactcatcttccacatccagcagccttctacatgtgtaagctctgtctcttacatagccctccagtccatcctccaagctgcagccagtgatcattctaaaatatgcctctgatggaaagtctgtaatagtcttcacttgtctacactataaaagaaaa

SEQ ID NO: 89191 - DNA, 901 bp, Homo sapiens
cacacacacacacacacacacacacacacacacacacacacatatgccccatactgaggagattaacaagtaaacaaatacattcaggataatgtatgtataatacattcaggataatgtttttaagacactgtttctctctctctctctctctctctctctctctctctccatatatatmtatatatatatatatatatatatatatatatatttatttatttattttgagacagtgtctcacttcatcacccaggctggagtgcagtagtgtgatatcggctcactgcaacctccagtcacacccttccctccacctgcccacccattcccaccccggaccccaagctcaagtgatcttcccacctcagcctcagtctcctgagtaactgggaccatgggcacacaccaccatgtggcctggctatttttttgtttgtatttttagcagagacagggtctcgccatgttgtccaggctggtcttgaactcctggactcaagagatccacctgtctcagcctcccaaagggctgggattacaggcatgagccaccacactcagcctacatcctattttctttttttaaatgttggctccaatccaataagttgactttacaacctactaatggattatgacctgaagttagaaaactatggtgtagaagatctagagagagaccttcgattacaagtacatataacacaagctggatacttggatactgttttagactcttcactcatcttccacatccagcagccttctacatgtgtaagctctgtctcttacatagccctccagtccatcctccaagctgcagccagtgatcattctaaaatatgcctctgatggaaagtctgtaatagtcttcacttgtctacactataaaagaaaa

SEQ ID NO: 89192 - DNA, 901 bp, Homo sapiens
cacacacacacacacacacacacacacacacacacacacacatatgccccatactgaggagattaacaagtaaacaaatacattcaggataatgtatgtataatacattcaggataatgtttttaagacactgtttctctctctctctctctctctctctctctctctctccatatatatatmtatatatatatatatatatatatatatatatttatttatttattttgagacagtgtctcacttcatcacccaggctggagtgcagtagtgtgatatcggctcactgcaacctccagtcacacccttccctccacctgcccacccattcccaccccggaccccaagctcaagtgatcttcccacctcagcctcagtctcctgagtaactgggaccatgggcacacaccaccatgtggcctggctatttttttgtttgtatttttagcagagacagggtctcgccatgttgtccaggctggtcttgaactcctggactcaagagatccacctgtctcagcctcccaaagggctgggattacaggcatgagccaccacactcagcctacatcctattttctttttttaaatgttggctccaatccaataagttgactttacaacctactaatggattatgacctgaagttagaaaactatggtgtagaagatctagagagagaccttcgattacaagtacatataacacaagctggatacttggatactgttttagactcttcactcatcttccacatccagcagccttctacatgtgtaagctctgtctcttacatagccctccagtccatcctccaagctgcagccagtgatcattctaaaatatgcctctgatggaaagtctgtaatagtcttcacttgtctacactataaaagaaaa

SEQ ID NO: 89193 - DNA, 1114 bp, Homo sapiens
acgtttcactataggctgccctgaaaccaaataatacaattttataagcaaagtatatataggtggataacatacttctgtctgttagtcatgacttaacaatctaatatgctccagtatgacagtgacaggcaattgtagcacctgagaatgtgcatccattcaggcatgtagctctgccaaagctctggttctttatgttctatgaaccttctcaacctgcgggtgtaaagcagtcagttgtctctgtctcatataygataggactactaatttagtttgggtccgaaagcaattcctcgatcttgctggggaagagaccaaaaggcccttgacatccaatcaccaggagccttcagctgagctctgcaggaagagccacatgctgcaagtgtgctgggaaaataattgaaaagtgtccgtggggaattaaaaactagatggttccagaaccactgtggaggttgcaaaaagactacaacccgaatttaaggatgtggaccaagaggaaaatctatgtcaagggcaactggatgtaaattcctgctgtgtttgtctttggtaaacattacttcactcgatggtaacatctcgttgatgatggtgttatcaccttgtactgtgcattttggagctgagatgtttttcttgctaatatcatatgcttgtatgaaatggtgtttgtggcctccattttgtgaaacagagtaagatgaacaggtgggatgaaaatgcttcttttacctcagttcctttgagacaggttgatgtttaacagctggaaacaatgtgttcattttgagaagacacgttttatataacgttttgttgtgattaattttttgtcagtaaaaaagacttcagtagaaagtcaatgcaggtacatataataagccaggttcttctgatacacaccatgtctgagtcaagaaatacagcgtgttatgtcttgcctctgtggcaaattttccttccaagggacgtatcttttcttctcaattattttcacacttaaagttagccaaaagatcaagaagtgatttttattttcaaggcaacaatgtcacagtaaagcaaaatgaattttaaagtgaccagagctacattatgaacc

SEQ ID NO: 89194 - DNA, 955 bp, Homo sapiens
atatattgagccgggaccgcagtttgaatctgttgggctgtaggcaggaaggcagcactaaggagaaatctagtgtttcccaaaagataatgaggacagtgggcctgtgtagaagggaaggggcaatgccagtcacctgtgtcacaactctgcctaaaatgggttttagggatgggatccacttctgggacaagtgctttgacaaagctggtatgggaataggaatcataccccctgcagtccctgtgagcccaggcaggacaacccactgacacagggcagaagggagcaagcgaggagcagagttctggacattgcacccctctgccgtgggcatggcacacagkgggaggcaccactttgactgaacaaaaataaatactcctctttatgatcacccggaaatgtggatttttccctttgtcactgtctaattagtggagacacctgagaattcaattttttatgggtttttgttgttgttttcgtcagggtcttgtttgttgcccaggctagaatgcagtggcatgatcgtagctcaccatagcctcaaactcctggactcaagcgatcctcccacctcagcctcccaagtagctgagattacatgtatacaccaccatgcctggctaattaaaaaacaaaaattgtagagatggggtttgcccaggctggtttcaaactcctggcctcaagagatcctcctgcttgggtctcccaaagcgctgggattacaggtgtgagccactacacatggccaattttttatgtttttaacattttggcaatgttcttcattaataattcctcagcaattttataataataatatattttccttttttcatatttatgttgattgaatttgtaaggtcgtgtatgtaaatacacagttttttattaacatacacacacatatacattttctcttaaaacgtttgtaaaggaaaaaaaa

SEQ ID NO: 89195 - DNA, 1881 bp, Homo sapiens
accctatgttcttcccagcacacattcttttgaagcatgaaagtcctctttgggtgctagggttttgggttcatgactatgttgatgagcctgtcaccttggttctctacttcatgtttccagaccgcatttaattgttccttgggcatgggagaratcacagaaggggctgacaaatacaaactggagttaactttggaaccatgactcttggattttacagaaccacaagtcctggtagcagctgaatccctttaatgtggctccattctcctttgaatgttcacttgttaatgtattgaggcctctgtgctcttaggctattgtgcaaatcagatcaatttcaatttgctattcaagagaggaggggttttgatttttaacataatgcacgtgacattccttgtctgcttcatctctgtttgttatgacagcccctcccccacatcctgttcttcaggtggagaatgaacagctatggtaagaataagtttactagtaaagtcttgggagtttcgaaacctgaatcctaggccacattggactttgagtgcactggaaggcataggcatattgggatagagcttaaaacaagaagcaactaggtatgcatcaccatgaactcataaatggcagccgaacattggctttccccaaccttccttcagaaccctggctggggctctaagtccaatgaattttccaattcaacccacattttcttttttttttttctttttcttttcttttcttttctttttttttttttgagacagagtctcgctctgtcacccaggctgcagtgcagtggcgcaatctcagcttactgcaagctccgcctttctcactgcaagctcacgccattctcctgcctcaacctcttgagtagctcggactacaggcacccgccaccacgcccggctaatttttttgtatttttagtagaggcggggtttcaccatgttagccaggatggtctcgatttcctgacctcatgatctgcccacctcggcctcccaaagtgctgggattacaggtgtgagccaccgtgcctggcctcaacccacattttcttcttgcatgaaattaatttagaactaaggaataaaaactaccctggcatctatttaaatggaagaaaaagtcaaagttttttttttaaacaatcttctctgagtatatgtagtcaatttatgtggacctaattttctcaaacattaggaaggccgcaactggaccatcagcccaagcatcatggagtccagcatcaaaatgagagttatatttgaattaataatttcattagaatcagcttttttagttttaaattcttaaatgtctttccctatattgcttgaaccatttttgaaaacgatattgaaaactactgagtgtgcctttcttttaaaggcaggcaaacaccaaccaagtattgtcatactgttgaagaagacaaacattgaaagctggaacatgactttgtagtaccacaatgttatgaggaaactttgaagtggttaaattatatggacgtgttttcagaatctacagctttcagtaggtattggaaatggaagctgatgatgggaacattcattgcatgggaattgaatcatagaaagatgattctgtggaatagacccaggcgatagcattatagtgaagctccagggttttttgatggacatttggaaaatgaaagcagagcattgggaaattcaggaatcttttcttagtagagttgtaataagaccaaacagatttttttccttcaccataaatgataggctttgtgcatcccccacaacacttacaatcatgatttaaaaagaggggaacttcctctccaactgtaagttgactgtatatattacatatgca

SEQ ID NO: 89196 - DNA, 1881 bp, Homo sapiens
accctatgttcttcccagcacacattcttttgaagcatgaaagtcctctttgggtgctagggttttgggttcatgactatgttgatgagcctgtcaccttggttctctacttcatgtttccagaccgcatttaattgttccttgggcatgggagaaatcacagaaggggctgacaaatacaaactggagttaactttggaaccatgactcttggattttayagaaccacaagtcctggtagcagctgaatccctttaatgtggctccattctcctttgaatgttcacttgttaatgtattgaggcctctgtgctcttaggctattgtgcaaatcagatcaatttcaatttgctattcaagagaggaggggttttgatttttaacataatgcacgtgacattccttgtctgcttcatctctgtttgttatgacagcccctcccccacatcctgttcttcaggtggagaatgaacagctatggtaagaataagtttactagtaaagtcttgggagtttcgaaacctgaatcctaggccacattggactttgagtgcactggaaggcataggcatattgggatagagcttaaaacaagaagcaactaggtatgcatcaccatgaactcataaatggcagccgaacattggctttccccaaccttccttcagaaccctggctggggctctaagtccaatgaattttccaattcaacccacattttcttttttttttttctttttcttttcttttcttttctttttttttttttgagacagagtctcgctctgtcacccaggctgcagtgcagtggcgcaatctcagcttactgcaagctccgcctttctcactgcaagctcacgccattctcctgcctcaacctcttgagtagctcggactacaggcacccgccaccacgcccggctaatttttttgtatttttagtagaggcggggtttcaccatgttagccaggatggtctcgatttcctgacctcatgatctgcccacctcggcctcccaaagtgctgggattacaggtgtgagccaccgtgcctggcctcaacccacattttcttcttgcatgaaattaatttagaactaaggaataaaaactaccctggcatctatttaaatggaagaaaaagtcaaagttttttttttaaacaatcttctctgagtatatgtagtcaatttatgtggacctaattttctcaaacattaggaaggccgcaactggaccatcagcccaagcatcatggagtccagcatcaaaatgagagttatatttgaattaataatttcattagaatcagcttttttagttttaaattcttaaatgtctttccctatattgcttgaaccatttttgaaaacgatattgaaaactactgagtgtgcctttcttttaaaggcaggcaaacaccaaccaagtattgtcatactgttgaagaagacaaacattgaaagctggaacatgactttgtagtaccacaatgttatgaggaaactttgaagtggttaaattatatggacgtgttttcagaatctacagctttcagtaggtattggaaatggaagctgatgatgggaacattcattgcatgggaattgaatcatagaaagatgattctgtggaatagacccaggcgatagcattatagtgaagctccagggttttttgatggacatttggaaaatgaaagcagagcattgggaaattcaggaatcttttcttagtagagttgtaataagaccaaacagatttttttccttcaccataaatgataggctttgtgcatcccccacaacacttacaatcatgatttaaaaagaggggaacttcctctccaactgtaagttgactgtatatattacatatgca

SEQ ID NO: 89197 - DNA, 1881 bp, Homo sapiens
accctatgttcttcccagcacacattcttttgaagcatgaaagtcctctttgggtgctagggttttgggttcatgactatgttgatgagcctgtcaccttggttctctacttcatgtttccagaccgcatttaattgttccttgggcatgggagaaatcacagaaggggctgacaaatacaaactggagttaactttggaaccatgactcttggattttacagaaccacaagtcctggtagcagctgaatccctttaatgtggctccattctcctttgaatgttcacttgttaatgtattgaggcctctgtgctcttaggctattgtgcaaatcagatcaatttcaatttgctattcaagagaggaggggttttgatttttaacataatgcacgtgacattccttgtctgcttcatctctgtttgttatgacagcccctcccccacatcctgttcttcaggtggagaatgaacagctatggtaagaataagtttactrgtaaagtcttgggagtttcgaaacctgaatcctaggccacattggactttgagtgcactggaaggcataggcatattgggatagagcttaaaacaagaagcaactaggtatgcatcaccatgaactcataaatggcagccgaacattggctttccccaaccttccttcagaaccctggctggggctctaagtccaatgaattttccaattcaacccacattttcttttttttttttctttttcttttcttttcttttctttttttttttttgagacagagtctcgctctgtcacccaggctgcagtgcagtggcgcaatctcagcttactgcaagctccgcctttctcactgcaagctcacgccattctcctgcctcaacctcttgagtagctcggactacaggcacccgccaccacgcccggctaatttttttgtatttttagtagaggcggggtttcaccatgttagccaggatggtctcgatttcctgacctcatgatctgcccacctcggcctcccaaagtgctgggattacaggtgtgagccaccgtgcctggcctcaacccacattttcttcttgcatgaaattaatttagaactaaggaataaaaactaccctggcatctatttaaatggaagaaaaagtcaaagttttttttttaaacaatcttctctgagtatatgtagtcaatttatgtggacctaattttctcaaacattaggaaggccgcaactggaccatcagcccaagcatcatggagtccagcatcaaaatgagagttatatttgaattaataatttcattagaatcagcttttttagttttaaattcttaaatgtctttccctatattgcttgaaccatttttgaaaacgatattgaaaactactgagtgtgcctttcttttaaaggcaggcaaacaccaaccaagtattgtcatactgttgaagaagacaaacattgaaagctggaacatgactttgtagtaccacaatgttatgaggaaactttgaagtggttaaattatatggacgtgttttcagaatctacagctttcagtaggtattggaaatggaagctgatgatgggaacattcattgcatgggaattgaatcatagaaagatgattctgtggaatagacccaggcgatagcattatagtgaagctccagggttttttgatggacatttggaaaatgaaagcagagcattgggaaattcaggaatcttttcttagtagagttgtaataagaccaaacagatttttttccttcaccataaatgataggctttgtgcatcccccacaacacttacaatcatgatttaaaaagaggggaacttcctctccaactgtaagttgactgtatatattacatatgca

SEQ ID NO: 89198 - DNA, 2786 bp, Homo sapiens
attttttcttttcttttttttttttttgagacagagtcttgctctgttgcccagactggagtgcaatggtgcgatcttggctcactggaaccactgcctctcgggttcaagcgattctcctgcctcagcctcctgagtagctgggattataggtgcatgccaccacacccaactaagttttgtatttttagtagagatggggtttcaccatgttgtacaagctggtcttgaactcctgacctcatgatcagcccgtctcggcctcccaaagtgctaagattacaggtgtgagtcaccgcacttggcctaatttttctttcagaaatggtggtctccctatattgcccaggctggtcttgaacccactgggctcaagctatcctctcacctcaggctcccaaagtgctgggattacaggcgtgaaccactggccctgggcctgttcttgttatttattggaatctgcaatagcctcctcatggatctccttgattctactcttacattctcacagtctatcctgaccctgcagctggaggtgtggagacatacacatatgtattttattgttggtgttagtttggggacctctgatgcacagagttagattatttgcagtgttcagtttaggactgaagctcattgttgagccatgcatgggtaggctttatttatttgttcagttagctagttagttttaataaactttttaaactttaatgaactctcactaatctaccmccaaaaacaccagctaggagctgggcgcagtggcttacacctgtaattccagcactttgggaggctgaggcgagcagattgcttcaggtcagaagttcgagaccagcctggccaacatgttgaaaccttgtctctactaaaaatacaaaaattagccaggcatggtggtggacgcctgtaatcccagctactcaggaggctgaggcagaagaattgtttgaacccaggaggcggaggttgcagtgagccaagattgcgccactgcaccctagcctgggagacagagtgagactcagtctcaaacaaacaaacaaaaaaacaccagctaggaacttgagtacttacatgtaacatatgcttccttatgccattaccttagttttcctgactcaagatcaccatcatcctgtctcctatgttcatcacttccttgcttccctttttaaatcatatttattgcatctgtatttattcctaaaagatagtatatttgaggtgtaggtatgctttaacttaaagaagggaggaaagggtgttgtgccatataaaatctttggagccaggcatggtggctcttgcctgtaatcccagcactttgggaggccgaggtgggtggatcacctgaggccaggagttcaagaccagcctgaccaacatggtgaaaccccatctctactaaaaacacaaaaaattagctgggcatggtggcaggtacctgtaatcccagctactccggaggctgaggcaggagaatcgcttgaacccaggaggtggaggttgcagtgagctgagatcgcgccattgcactccagcctgggcaacaagaacaaaactgtctcaaaaaaaaaaaaaaaaatctttaggacttactttcttcagttaataatacattcattcatttcatattgacaggtatcactacagctcattcattttggttactgtagtatattctattgaatatatatcctgtgctttatttcaatgctgtcccatggatgggaatttgggttttttacagaggcctccttctgccacacaatctaatcccatcagcctcctgccaataaccatgcatcatcatcacctcatggcccacaggatagggtcaaaattccacaatttggcttacaatattgtggaaatgatcaggattcattttgtttctccctccgtccttggtcttagtcatgaggcatttcttttggtctttgtacaaacaatgttcttttcttccttaggtcatctacctgacactttccctacctcctttctcccatgccttctctttcctctatgaagctctgtatgagcactcaacaccctccagcacttagccaagaagtatgctgtgggaggggcacgggattcatagagttctactagacttagtcagtggtctaccagtggaggcccagggctgtctgggaggtgttgtagaaggaggagtggggatcaaatgggagatgctttatctcccttcctctgcctcattgaaatagtggcatcactattcctgattttatggattgaggttcaagaaagattgcatttggaaaaagtgttccataaagataagtttgcaaaccagtgaatcaataattcatatggtcccctcaagccctgccattctataattaaaagtgagagaaccgaagagaaaaaaagaagcaataatttcatggctaagcatataaactctggagcagaccaactttgagtaaatcacttaatatctttgaggtttcctcagctgtaaaaggggtacgatattaaaatgaaccatatgaaattgccattttataagtaaaaaatggccaaatgtcagcaatttcatatgaatcgaaccaatatatgtaagtaaatcacagatctggagggcagagtaaatgagataatgcaagtattgtactgaggtagatactgctaggttttcaccaaacccatgtcttctcctaggcacacagctaaaatccatttccctgtcttcatttcagacaggtatggacaatggctgagttctaatcaatagaatgcatgagagg

SEQ ID NO: 89199 - DNA, 712 bp, Homo sapiens
gaaaaaccccatctctataaaacaaaatacaaaaattagctgggtgtggtggcttgtgcctgttgtcccagctatgctggggggctgaggcaggatcacttgagcccgggggaggtcaaggctgcagtgagctgagatcatgccaccacactccagcatgggcaacagaatgaaactgtgtctcaaaaaaaaaagaaaaagaaaaagaaaaaagaatgtatgttatgatccagtgtgatgagcactgggtctatgaaaacagtgtctgagttgagttgaagagaacaaaaaaagggagaactaatcctgtgaaaagtacttagtttatgccaagtgctgaacaagtgatgttagttatctcatctaatttttcctttgaccctgtggagaagggattgatggtccctattttacagatgagcaacttgaagctagaagggatagaatcattgatttaaattatcaatccaataattagggggcttgtaggtgaatctcttctgataatctcaggttgaggtagaagggcatttcagcagagggatttaaacttgcagtgaccagagataagggtgggcagggcagagccaggggatgggagaggagatcattgggggatgcaagaaggggtaagattttggagaatgttataaaccacactaagaaacgggaaccttactctgaaggcaaaagataattatgawgggcttta

SEQ ID NO: 89200 - DNA, 2176 bp, Homo sapiens
gagtttcctgaagaaatcaggaataaaatggtagtgctgataggtaaaattaaactcagtaattactccttaaacattataatttatattaagagaccaccagagtgggtttctctaaatgagacaccttaaaaattcaagtagaaatggtgaatgtcagtgtttcttagtcacagatatgctttagagccctcagtgaagtgtatgtgcctgtgtgatgtctgtgkgtgtgcatatatgtgtgtgtgtgttcactttggcaccccctctggacattttaatttaacagatctgggataggacctggaactctacatttttaaaaaagttacacagggcattctcatgggcacctgcatttgggaaccacaggtctatgctggatacactatacattgggccctaactgaagatgacaagtgaaataagtgagagagaggaagcagagaacgtaattttcaggtcatggacaaattttttactgtagaatatgaaggggtatatacaaaatgtcatgactatgacagcaataagtgtataaattaatgtaactcactggctcctcaacttccactccacaatgcaagtgtcattttctaaactgactgtagcacaacttgatgtgaaaaaaggccaaggttttctggtagataaaactgggcctgtactacatagctgttaatgaagcacatcatacgtctgtcattgggattcacacttgtaagcagataaatgtactccaggacattatgctaagtgatattattcaaatgtcatttccttaaaatttactctcaagtgtctcctttgaatattcatagcacttcatttgtaacaatatcagaaattctaccctcttcctttgaataaagggattaccaacctgaaggacattacccagaatgaaaaatacggcatgatttcacttatgtgcagaatctttaaaaatcaaatttactgaaacagagagtagaaaggtggttgccaggggtgggcgggaggcagagataaggatatgttggtcaaaatgtgcaaagtttcagttatgtaggatgaataagttctagagatctaatgtacagcatggtgactatagttaataatactgcattatattgaaaatttgctaagagagtagatcttgagttctcatcacacacaagcacaaaaatgaatatattaacttgattgtagtaatcatatcacaattgtatatgtatatgaaaacatcatgttgcatatatatacaatttttattaaagagtaaaaattaaaaaaagaaatgcatacttctagaccaattaattcaagatctctagggatgaggcacaaccatgtgagtaacatcatcttaaactgaaaaaaaaattccccatctctatataccactgctctgcacatgctatttcttattttaaacgcttcattggtcttttcatgacaaagtatgagcttgacaatctaggcctagtattgtgattggccacaatctggtttcacatttcatttcagtctcatattctaaactttcttttaggcattctaaattccacccgaaccgtgcagctcatcattctatgaatacggtttgcttttgttcatgctgtaccctccacctgaaatgtccttagcctctatcaactcactctaagatattattcagatgtaatctccttcttaaaagttactctcaaatatcttctctgaagagtcatagtgcttcattcataaagatatctggaattctacccccttcctttgaatgaggggattattaactcttcaaaggcagatatgcttagaaaggaagatgtcatctttcatctacaagactataactgcctcctaataggtcaacctgccacagtaagtagctaatcagtcataagcaagtcaggggaggactccccaccaccaccaggaatgtcaagtgaccatcaggtgatggtcaggtggttgttacattgtatttctaaaataataattggttgcagccagtggcagggaaaggcagtcttccaatagatagaataaacctgaaactggtgatcagcagctttccaataggatcccaggagttggggagtgggctcaagcatgcaaaatgacagagtttaactggcatatgaccttctaggaacattcagctggtaaaggaagaatgccttaagtgagc

SEQ ID NO: 89201 - DNA, 655 bp, Homo sapiens
  misc_feature (1)...(655): n = A,T,C or G
tgataattccacttcacagattaaaattctgcattcgctcctcatattttctagaataaaacttgaactccttaatttagccacttttggctcttggtgatcaaatccctacgtattttcctaccacccagtgactagtttggatacttgtcanttgcccaaatttcctgttggagttggggcctagggggagatgtttggatcaagggagcagatctctcatgaatggcttgggccattccattggtgataattaaactctmtctctgagctcatacaagatctggtcnnnnnnnnnnnnnnnnnnnnnnnnnnnnnnnnnnnnnnnnnnnnnnnnnnnnnnnnnnnnnnnnnnnnnnnnnnnnnnnnnnnnnnnnnnnnnnnnnnnntccctttttgccttccaccatgactgcaagctccttgaggtcatatcagaagccaaacagatgcctggctgtacagcctgcagaaccatgagcaattaaacttcttttcttataaattacccagtcccaggtatttatagcaattcaagaaggtactcatacattcagctacaaaatatactgaaaagccagcttcggacatcatctgagtcagaagtaacatttttccctgtctttcatcatagttgctcaacccatttcccacc

SEQ ID NO: 89202 - DNA, 1276 bp, Homo sapiens
aacatttaccattattaattaatatgttttcattaattaatatgtcttcatacatctccatatgtcttatttattttttcatcattatttacattttaatctttctttgtgtttgctctgttgttccttgtctaacttatttgttttctcaatgttttgttgttgtagctcagaaaggcagtagatgtttctccttttatttatttctcttacagcttgatctattttttggttatattattatatttactcagtgatataatttggctgtgtccccacccaaatctcatcctgaatttccacatgttgtgggaggaacctggtgggaggtaattgaatcatggggggcaggtctatcctgtgctattctcttgatagtgaataagtctcatgagacctgatggttttcaaaagaggagttcccctgcacaagctctctttcagcctgcagccatccatgtaagacatgacttgctcctccttgccttccgccatgattgtgaggccttcccagccatgtggaactgtaagtccattaaatcttttttttgtaaattgcccagtcttgggtatgtatttatcagcagcatgaaaatggactaagacagccaatttgaaatgtttgtatcttccattagtttttttgaacggacctttttaacgtgaaccttttagcattttgaaggcactctctttatgtgtaataatatttttgccttaaaatctgttttgtttgatattataataatatagctatgccagactattgaaattagtatttatcctatagttttttaatcataattttactctcaacatttttttctctatatactttagtgagtctgctttaaaaaagcatatagatgaattttgttatttttgttttaactaaagattttagctattaccatttattttgacatatgtaactttattttatcaaatcattctgtgctctttatttcttttttaatgttttatgcttyactcctgtgttcatggggttttttttagcttaaactttgttttttaattctagtctccctctgtttttgtttggaaattatttactttttctattatattagaggttattcttgaaatttgaacatatggactaaacttatcaaagtaaaaaattcatcagtatacttacctcctccccaagcaacataaatgccatagtacaatttaatcactggaaaacagtattttagtcctatcttgtgttttagccttcatattataatttccatttttaagtttttaatgt

SEQ ID NO: 89203 - DNA, 1276 bp, Homo sapiens
aacatttaccattattaattaatatgttttcattaattaatatgtcttcatacatctccatatgtcttatttattttttcatcattatttacattttaatctttctttgtgtttgctctgttgttccttgtctaacttatttgttttctcaatgttttgttgttgtagctcagaaaggcagtagatgtttctccttttatttatttctcttacagcttgatctattttttggttatattattatatttactcagtgatataatttggctgtgtccccacccaaatctcatcctgaatttccacatgttgtgggaggaacctggtgggaggtaattgaatcatggggggcaggtctatcctgtgctattctcttgatagtgaataagtctcatgagacctgatggttttcaaaagaggagttcccctgcacaagctctctttcagcctgcagccatccatgtaagacatgacttgctcctccttgccttccgccatgattgtgaggccttcccagccatgtggaactgtaagtccattaaatcttttttttgtaaattgcccagtcttgggtatgtatttatcagcagcatgaaaatggactaagacagccaatttgaaatgtttgtatcttccattagtttttttgaacggacctttttaacgtgaaccttttagcattttgaaggcactctctttatgtgtaataatatttttgccttaaaatctgttttgtttgatattataataatatagctatgccagactattgaaattagtatttatcctatagttttttaatcataattttactctcaacatttttttctctatatactttagtgagtctgctttaaaaaagcatatagatgaattttgttatttttgttttaactaaagattttagctattaccatttattttgacatatgtaactttattttatcaaatcattctgtgctctttatttcttttttaatgttttatgctttactcctgtgttcatggggttttttttagcttaaactttgttttttaattctagtctccctctgtttttgtttggaaattatttactttttctattatattagaggttattcttgaaatttgaacatayggactaaacttatcaaagtaaaaaattcatcagtatacttacctcctccccaagcaacataaatgccatagtacaatttaatcactggaaaacagtattttagtcctatcttgtgttttagccttcatattataatttccatttttaagtttttaatgt

SEQ ID NO: 89204 - DNA, 732 bp, Homo sapiens
atgttggttcaggataacattgatgggaaaacaaaatggattcctggccaggaccccactgtcggtgtggagtttgtacattgtcctcatatatgtgtgggttttcctctgagttctccgggtttctcacatatatccaaagggtgtgcacacgargtgcactgatgtgctgacatggtccagtgtgagtgagtgtgagtgtgggtgtgagtgtgttctgcgatgggaggcatcctgtccagcatgggttcccactgggcaccctgagctgccaggacaggctccagccactggatgcactgaattggaatatatgggtaaataattatcttaattgtttgtattaatctttcctaaatgtatgtatcattcacatttatttcaatgtttaacattaaaggtgttttggtctttatttagaagttcggtgatgtttttgtgaccagaaatacgctatggaacataattcttgtttctatcaattagcccacagtaaactttgttttatttagttttgtattggtttttattaaagtcacagttttcaagaacttatccaggatgttacgtgaagatagactgcacttagctgaaggttttataaaggctgaggtagcaattggtgaacaatgccctggaacagatggagagcatcctcttagatcaggctaagaaacagaagcacctaacaagataccccagttcaccgactcattaatttaccagacccct

SEQ ID NO: 89205 - DNA, 622 bp, Homo sapiens
ctgtgtggtaggagttggggggctccactgagtcagcctgcatccctcctcaacagggacctggaacggtaccaccagggtggccatcaaaaccctgaagcctggcacgatgtctccagaggccttcctgcaggaggcccaggtcatgaagaagctgaggcatgagaagctggtgcagttgtatgctgtggtttcagaggagcccatttacatcgtcacggagtacatgagcaagggtgagtcctgggcggccggggcagggggcaggggcactccggacagggcagggagcatgagcctcatttcctctcatgtctagaatgggcatcttcaaaggtggaatgcagtagagccaaattctctgttgccygggccggagtgtggtggtgcaatcatagctcacttcagcctcaaccttccaggctcaagcagttctcccacctcagccacccaagtagctgggaccacaggtgtgtgtcaccaggcccagctaattttttattttttgtagagatgggaccctatgttgcccaggctggtctcgaactcttgggctcaaggagtcctcccacttccacctcccaaagtgctgggattacaggtgtgagccacagtaattttt

SEQ ID NO: 89206 - DNA, 1112 bp, Homo sapiens
gggttccctaaaaccttatctacaaaaaccaccagcgagccagcaggtgaggtttgtggccccagggatctcaaagtgttgtccagagaccccaggaccctttcagggatctgaaaggtgaaaattattttcagaataatagtgacaggttagtgccattcatactctccttctttcacgcgtctacagtggagcttttcaaaggctgtgtgatgtggtgatgtcactaatgacagcttgtgagatatgtgctgcgtttcctctttttttttttctgagatggattctcactctgtagcccaggctggagtgctgcagtggcatgatctgagctcaccgcaacctccgcctccaaggttcaagcgattctcctgcctcagcctcccaagtagctgagactacaggcgcgccaccaagcccagctaatttttgtatttttagtagagacagtgtttcatcatattggccaggctggtctcaaactcctgacttcatgatctgcccgcctcggcctcccaaagtgcagggattacaggcgtgagccaccgtgcccggccatgtgctgtgttttctaaaattttctaaagcagcagctttggggaagatataagtgcgttttcagagattaacttggtttgcccccagttgttccactgggcttaggagccatcttctgtgatctcatcattgtccaatagatcactattttgaaatcctgaagttttccttgtgccaactggaaacacagaaatatgctattgactagttttataatagtatgctttagatcttctaaatttaaaaattttacctaaaattgctataactttggaatttaataatatttattttaaaaaatatcccatttaccatatatgttataggctcctgcaagggagaatctacccaaaaaaatgggcaaaagtggggttggtgctggggctggactgagccctaagtctggcacggccttcgcaaagctgccagtatatggaggagcctgctggcaacaggggagccgctgaccagcgctgcatcgcrctgcaagggcgtgtgtgtgtgtgtgtgtgtgtgtgtgtgtgtgtgtgtgtgtggaggggggagcagttcct

SEQ ID NO: 89207 - DNA, 1035 bp, Homo sapiens
acaaagtcatgtatggactggctgctgttctggtaccaacacaagtcatagagagaaatagatagtctaacggcggccaattgtgataacattttccacctgtccccaaatttctgctgtataaattgtttctttctcccggcgtcctcatctgtcttgattttccttcagcttttctcagccctgagcatgccttcttttttcagcaaccactaaggttcacagaatagactatgttactaaattaacataaaagctctctgtgtttacttaactactcaaatcacttatcttaccagaagcaaccctgggctaacaggggaaggacagtggctaagttttattgcaactctaggctgtagatgcactaaactcctgttagctataacccctgttatacatgaagggaagataattgtctcccaagttttcagttgagaagaagctctcaagyagtcttgcttgactagatatttaagttggctagtcagctcggtcagagtacattctaacaacccaacacctgtgacccagcatgctgaggggcccggcagattcctgacagacttggcccctcctcaggcaggcctggggactcctgcttttagaatgtaatttttcttcacctaacctttaaactattagttacctcatcaatccagaccaaactcagtagacatttcactaaaatgaatagagacagagaatatcactttcctgatcctgttcagcaattttcaagccgccttggcctcctattgggagccttcatgcttggtttgtttatgctctcagaagaatcagttttgaggtgtttattccagtggttaaatttgacgaggtgaagaaaagtcaaactctccccaatattgcctaggaagagtctaaaataattggtacgtatttcttacatgtgaggaaagaagagaagcttccatttctttataacagcagagtttttcagacttcttggccagggaaactaaaaaacaaatttgctttatcttcaaaaataaagatgcttatttcttcctt

SEQ ID NO: 89208 - DNA, 696 bp, Homo sapiens
tttgggtactttcggccattttattttgagaagactgtttagttgttgttagtgaaatcaaaagaaaaatagaaaataaataaaagtgatttaataaaaaggtatgctttgctggtttcctttaggttactggttgtttatttttctcttgtctcacatataatgaatctctttcactgtttaaaggtatcatattgataacaatgaaagactatttactgaacttattgatgtaattttgctcataattactaaatataaaaaaattaaaatattctcacarcattctaaagtaaaaatatttggaatgatttttacttacattatcatagatatatctgtgtagatatatcttattctatttattttatctaaaataatttattttgatattatttataaacaatattctattgcattagtatacaatgcaatacagattgcattgatttttaccctctagaaaagttcagaaagattttaaaacataagtagcctactccatataaaatttaagtacacatgggcaacaacagaaattggagactattagttgcagggcagagggagagaggcaagggttgaaaaactaattattgggtgctaagcttaatacctgggtaatgagatcttttgtacccaaacttcagtatcatgccctataccctaggtaacaaacctacacacgtaccctca

SEQ ID NO: 89209 - DNA, 713 bp, Homo sapiens
tttcctaggacattaagattgatacaatttcactatgcaatacatgggaccaccactgtatatgtggcatatcattgactacagaaagaagtgagaagcccctggaaactttaatgttaagagagcaacataatctgayttatgtatttcgattgactactctttgaaaaatgtattttcatggaagtgagtagcaagaatgacattttggaaagctattaatccaaaagggggatttggttgttcagattaggtggtaaccttgaagatgaaaataaatgaacaaaattgggatatcttttggcagcagagacattaggactattttatggatttgattggggggtgctgaggcaagagacatcagagatgtctcctaagtatttggcttgagagaatgtgtgaatagggaaacatgttatgatgtagaatggcctagcgtagcacatgagcatggtgttaaggaagcattatttctccttggggtatggcaaattagagatacaaattagacatccagtagtcccgtcaagtaaacaattaggttgcttttctaatctgatttagtttaaaggagcatctgagatctaccccaatgagatgctttcatgttactgctgttaaaacaattttatcagaatcctcagtttttataaattatccttttagcatataatataaatatttgtgtaaccatggacttggatgatgct

SEQ ID NO: 89210 - DNA, 728 bp, Homo sapiens
aggaaaagaagtcattatattaaaaagatacttgcacacatatgtttatagcagcacaagtcacaattgcaaaaatatgaaaccagcccaattgcccatcaataaatgagtggataaagaaattttggcatgtatgtatgatggagtaatactcaagtcataaaaaagaatggattaatggcatttacaacaacctgcatggaactggagattattattctaagtaaagtaactcagaaatggaaaaccaaacattgtatgttctcacttataagtggaagctaacctgtggggatacaaagtcataagaatgatacaatggactttagggacttgagggaaagggtgggaggagggtgaggcatcatatactacaaattgtgttgtgtatactgctcaggtgataggtgcagcaaaatctcacaaatcaccaccaaagaatttactcatgtagtcaaacaccatctgctttccaaagacctataaaaagtatatatatatatrtgtgtgtgtgtgtgtgtgtgtgtgtgtgtgtgtgtgtgtgtgtatagtaaaacaaaaacaaaacactaaaaaagtcttatgtaatataccgagttcagaaaaaaaaagacctgattaaggaataaaggactatttaagccactaaaaaaaagaaaagaaagaaagcgatgggtagaaagtttattgaaagggataataacagagaactttccaaacttacagaa

SEQ ID NO: 89211 - DNA, 728 bp, Homo sapiens
aggaaaagaagtcattatattaaaaagatacttgcacacatatgtttatagcagcacaagtcacaattgcaaaaatatgaaaccagcccaattgcccatcaataaatgagtggataaagaaattttggcatgtatgtatgatggagtaatactcaagtcataaaaaagaatggattaatggcatttacaacaacctgcatggaactggagattattattctaagtaaagtaactcagaaatggaaaaccaaacattgtatgttctcacttataagtggaagctaacctgtggggatacaaagtcataagaatgatacaatggactttagggacttgagggaaagggtgggaggagggtgaggcatcatatactacaaattgtgttgtgtatactgctcaggtgataggtgcagcaaaatctcacaaatcaccaccaaagaatttactcatgtagtcaaacaccatctgctttccaaagacctataaaaagtatatatatatatgtrtgtgtgtgtgtgtgtgtgtgtgtgtgtgtgtgtgtgtgtgtatagtaaaacaaaaacaaaacactaaaaaagtcttatgtaatataccgagttcagaaaaaaaaagacctgattaaggaataaaggactatttaagccactaaaaaaaagaaaagaaagaaagcgatgggtagaaagtttattgaaagggataataacagagaactttccaaacttacagaa

SEQ ID NO: 89212 - DNA, 728 bp, Homo sapiens
aggaaaagaagtcattatattaaaaagatacttgcacacatatgtttatagcagcacaagtcacaattgcaaaaatatgaaaccagcccaattgcccatcaataaatgagtggataaagaaattttggcatgtatgtatgatggagtaatactcaagtcataaaaaagaatggattaatggcatttacaacaacctgcatggaactggagattattattctaagtaaagtaactcagaaatggaaaaccaaacattgtatgttctcacttataagtggaagctaacctgtggggatacaaagtcataagaatgatacaatggactttagggacttgagggaaagggtgggaggagggtgaggcatcatatactacaaattgtgttgtgtatactgctcaggtgataggtgcagcaaaatctcacaaatcaccaccaaagaatttactcatgtagtcaaacaccatctgctttccaaagacctataaaaagtatatatatatatgtgtrtgtgtgtgtgtgtgtgtgtgtgtgtgtgtgtgtgtgtgtatagtaaaacaaaaacaaaacactaaaaaagtcttatgtaatataccgagttcagaaaaaaaaagacctgattaaggaataaaggactatttaagccactaaaaaaaagaaaagaaagaaagcgatgggtagaaagtttattgaaagggataataacagagaactttccaaacttacagaa

SEQ ID NO: 89213 - DNA, 728 bp, Homo sapiens
aggaaaagaagtcattatattaaaaagatacttgcacacatatgtttatagcagcacaagtcacaattgcaaaaatatgaaaccagcccaattgcccatcaataaatgagtggataaagaaattttggcatgtatgtatgatggagtaatactcaagtcataaaaaagaatggattaatggcatttacaacaacctgcatggaactggagattattattctaagtaaagtaactcagaaatggaaaaccaaacattgtatgttctcacttataagtggaagctaacctgtggggatacaaagtcataagaatgatacaatggactttagggacttgagggaaagggtgggaggagggtgaggcatcatatactacaaattgtgttgtgtatactgctcaggtgataggtgcagcaaaatctcacaaatcaccaccaaagaatttactcatgtagtcaaacaccatctgctttccaaagacctataaaaagtatatatatatatgtgtgtrtgtgtgtgtgtgtgtgtgtgtgtgtgtgtgtgtgtgtatagtaaaacaaaaacaaaacactaaaaaagtcttatgtaatataccgagttcagaaaaaaaaagacctgattaaggaataaaggactatttaagccactaaaaaaaagaaaagaaagaaagcgatgggtagaaagtttattgaaagggataataacagagaactttccaaacttacagaa

SEQ ID NO: 89214 - DNA, 728 bp, Homo sapiens
aggaaaagaagtcattatattaaaaagatacttgcacacatatgtttatagcagcacaagtcacaattgcaaaaatatgaaaccagcccaattgcccatcaataaatgagtggataaagaaattttggcatgtatgtatgatggagtaatactcaagtcataaaaaagaatggattaatggcatttacaacaacctgcatggaactggagattattattctaagtaaagtaactcagaaatggaaaaccaaacattgtatgttctcacttataagtggaagctaacctgtggggatacaaagtcataagaatgatacaatggactttagggacttgagggaaagggtgggaggagggtgaggcatcatatactacaaattgtgttgtgtatactgctcaggtgataggtgcagcaaaatctcacaaatcaccaccaaagaatttactcatgtagtcaaacaccatctgctttccaaagacctataaaaagtatatatatatatgtgtgtgtrtgtgtgtgtgtgtgtgtgtgtgtgtgtgtgtgtgtatagtaaaacaaaaacaaaacactaaaaaagtcttatgtaatataccgagttcagaaaaaaaaagacctgattaaggaataaaggactatttaagccactaaaaaaaagaaaagaaagaaagcgatgggtagaaagtttattgaaagggataataacagagaactttccaaacttacagaa

SEQ ID NO: 89215 - DNA, 728 bp, Homo sapiens
aggaaaagaagtcattatattaaaaagatacttgcacacatatgtttatagcagcacaagtcacaattgcaaaaatatgaaaccagcccaattgcccatcaataaatgagtggataaagaaattttggcatgtatgtatgatggagtaatactcaagtcataaaaaagaatggattaatggcatttacaacaacctgcatggaactggagattattattctaagtaaagtaactcagaaatggaaaaccaaacattgtatgttctcacttataagtggaagctaacctgtggggatacaaagtcataagaatgatacaatggactttagggacttgagggaaagggtgggaggagggtgaggcatcatatactacaaattgtgttgtgtatactgctcaggtgataggtgcagcaaaatctcacaaatcaccaccaaagaatttactcatgtagtcaaacaccatctgctttccaaagacctataaaaagtatatatatatatgtgtgtgtgtgtgtgtgtgtgtgtgtgtgtgtgtgtgtgtgtgtatagtaaaacaaaaacaaaacactaaaaaagtcttatgtaatataccgagttcagaaaaaaaaagacctgattaaggaataaaggactatttaagccactaaaaaaaagaaaagaaagaaagcgatgggtagaaagtttattgaaagggataataacaragaactttccaaacttacagaa

SEQ ID NO: 89216 - DNA, 651 bp, Homo sapiens
tcacttgttttcaagcctgttggatgtgagtcacttcatgaaacattcaaaaccctgcctacttctgacctaaatgttagcaaatgaaacaggagggctgggccctcccagatcaccccatgcaggtgctcacatgcttacacttgcaaaggaaagcagagcgtcctaactccagggctgaagtgtgtcagcagaagggagttggctgaattttttttttttttwaaaaaggatgatacatttggattaactatgttgatgaaatcatataatagaaaaccccatcctaggctggagctgggaagaaaggagcaaatgaagagctgttgtccagttctggggctctgatctcaaatggagggaggagtgtgatcaagggaaagagagtctaagaggcaggagccctcagtctgagctctgcacttactatctaaaggaccttgggcaagtgactttctgagcctcagctacatcatgtgtaaaatggggcaataacatatcaggttggaagcaagagtctaggttcaatgcctttgagtgcccttctagttttaagacctagagtagaattctgctggggatgaatgtttgtatacaaataagcacgagcattccttttaagaggaaaagaaaaaggaagggtagaggatc

SEQ ID NO: 89217 - DNA, 565 bp, Homo sapiens
acaggcatgagccgccatgcccagcctataaactatattcttatacatagtaagtgtgatataaatttaactgtcatcatcattatcactaccaccaccaccattacctttggtgtctttctttgccaataatgcaaattattctgggytatgagatcaatgggtactcagagtattgctctgaaagacctcagcattctttggaattttgcaattggtcaaaggtattgtatatgtaaactaaaaagtatctgagtcaggtctcaatcaatttagaagtttatttttccaaggttaaagacatgcccagaagaaaaaaacatggaatcacagaaacagtctgtagcctgtacttttctccaaagatgattttgagggcttccatatttaaaggggaaatgcagactggagggaaaagagggagagtctggtcactttactgaatccacatgttgccagggaaaagaagctggtagggcaatagacaattatgtatttatcttgtgctcagtaaatcagcactttacataagataaggtgaatatagagtagctacctgtggaga

SEQ ID NO: 89218 - DNA, 565 bp, Homo sapiens
acaggcatgagccgccatgcccagcctataaactatattcttatacatagtaagtgtgatataaatttaactgtcatcatcattatcactaccaccaccaccattacctttggtgtctttctttgccaataatgcaaattattctgggttatgagatcaatgggtactcagagtattgctctgaaagacctcagcattctttggaattttgcaattggtcaaaggtattgtatatgtaaactaaaaagtatctgagtcaggtctcaatcaatttagaagtttatwtttccaaggttaaagacatgcccagaagaaaaaaacatggaatcacagaaacagtctgtagcctgtacttttctccaaagatgattttgagggcttccatatttaaaggggaaatgcagactggagggaaaagagggagagtctggtcactttactgaatccacatgttgccagggaaaagaagctggtagggcaatagacaattatgtatttatcttgtgctcagtaaatcagcactttacataagataaggtgaatatagagtagctacctgtggaga

SEQ ID NO: 89219 - DNA, 900 bp, Homo sapiens
atgagtagaactagatacctagttctggatttcttcctctgtggttgtatggagtagcacatgggcactgtattttaaggactgtgttattgtgtgatggatctctgggtagttagacaccccacaacactaaaaacatagtagaagttattccccaaattacaaagcagctttaataccttgatactcccaaggcaaatatggatttttaaaattctcagatcactgttgaaacccaagacaggttcaaattcaatttggaaagaactccatttaaaactaatatttcagtcatgtagtataatcttggatttggtgcttctccacataacccacagggcttttttctggttcgtggtctgtaagctggatgttgatgataattattttcaggtaactctggcagccaatggaaagtcagccgactgcagtgttgaggaagaaccttggaaacgtgagaaataaggatatgagtctcagcaaattcttgaataaactccccagcgtatcctatggtaactgatgatataaacaagctttctttaaaaaggaaaaaaatgcgtatatttctrtgtttacttaatctgttagccgaggcttagaggagctcttgtgagtcagtgatgacaggcacggtgctgtgtctttgccaaataatgctttataaccgtctaattttctcacttgtattattatttgaatggatgctgctggaggaatcagttggaattgaagacacgttcttgccagcttcccttttctcccaagatgcagaaatgtggatgctcttttcccaggggacatgagtaaagcagtgtggtacactccagggacttgggaaaatgagcaaacacacagcgtgttattccttaaagtgttctccatgtctcgccttgttat

SEQ ID NO: 89220 - DNA, 1561 bp, Homo sapiens
aagctcttttggagttttgaagtctttggggtaacacagagacacccatgagtgacagcagcaggtttctgragaaagggatgttcttgagggaccaaaagagagatgcttccagattgagaggagagtagtcggtaaagaagtaatgagcggaggcacaggtgggtggcagggaggggcttgctctgcttcccacgcagttcccctgaaaggaggaaggtccctggagagagaaaactgctgcagagggagtctaggtggatggagccatagacggacttgcagggatccctgatccctggttcctagcctgacagggaaggaacagagctgaattattcccttgccttcccacatgatgcagggaaagcagagagaaagccactagagcttcagggtgcaggaggaagaggaaatgtgagatgatgcttaggagcatatgtcagtgaccaaagacattgtcgtgcttcaaacctgctcttcccagagcaacctgatttcataaatgctccttaggactgggccaatggactgaaattatctcaaccacctggtggaaagtgaaaagcagggggggtcctcaatattaaaattaagttctaagaaaaagttatattttttcaacagctatgttgtgagctgatttatagatgctatctctatgattgctgtgcttggagagattcagccccccagaaggcccagtgctttgccacctcttaggatccacactactgtacctcttttactgtcaatatcagaagggctcagccacaagcccttggaagcttagaaaatttgtccttcctaagaccccagaattgtctcaggatttaactcttgaggcaggccaccctggaacgggttcactctgcatgtgtctataaccaggtggacttttataaccagatcatgtccaacaggggtataaaaagatccaatcgcatttaggagtccagataaatttcctagtaaatcaggagacaggctacataaatgtctcccacagagtctatgcatttaagatgtctagaaatagatgttaagcgacaggactaaaagcactggatgaatatttttcaagagcctctaattcttacctaccttgctgcctcactatggctgctactatattcctatgaatataagaaaagttaccctaggtcaaggtataaaccatctgtggctaagacagctgatggtcatcaaaatccacattctcctcttccttctggacacagggtagactacatttcccagccttccttgaagtaagtgtagtcacataaccgagttacagccagtgggactgggggaaagcagtgtgtgctgcttccaggcccagcctataaccctcccataggcactgctccatgctctttgtcctttgccaagaaaagagtggtgatcacagtagctttggttgccatgatctgaggacagcagcactttaggtcacatcggtgaccaaagacatcagactttgagtgatatggtccctgccaacgtccaggcctctttctggtttcttgggtataagtgtgaagactgtgagagagat

SEQ ID NO: 89221 - DNA, 1561 bp, Homo sapiens
aagctcttttggagttttgaagtctttggggtaacacagagacacccatgagtgacagcagcaggtttctggagaaagggatgttcttgagggaccaaaagagagatgcttccagattgagaggagagtartcggtaaagaagtaatgagcggaggcacaggtgggtggcagggaggggcttgctctgcttcccacgcagttcccctgaaaggaggaaggtccctggagagagaaaactgctgcagagggagtctaggtggatggagccatagacggacttgcagggatccctgatccctggttcctagcctgacagggaaggaacagagctgaattattcccttgccttcccacatgatgcagggaaagcagagagaaagccactagagcttcagggtgcaggaggaagaggaaatgtgagatgatgcttaggagcatatgtcagtgaccaaagacattgtcgtgcttcaaacctgctcttcccagagcaacctgatttcataaatgctccttaggactgggccaatggactgaaattatctcaaccacctggtggaaagtgaaaagcagggggggtcctcaatattaaaattaagttctaagaaaaagttatattttttcaacagctatgttgtgagctgatttatagatgctatctctatgattgctgtgcttggagagattcagccccccagaaggcccagtgctttgccacctcttaggatccacactactgtacctcttttactgtcaatatcagaagggctcagccacaagcccttggaagcttagaaaatttgtccttcctaagaccccagaattgtctcaggatttaactcttgaggcaggccaccctggaacgggttcactctgcatgtgtctataaccaggtggacttttataaccagatcatgtccaacaggggtataaaaagatccaatcgcatttaggagtccagataaatttcctagtaaatcaggagacaggctacataaatgtctcccacagagtctatgcatttaagatgtctagaaatagatgttaagcgacaggactaaaagcactggatgaatatttttcaagagcctctaattcttacctaccttgctgcctcactatggctgctactatattcctatgaatataagaaaagttaccctaggtcaaggtataaaccatctgtggctaagacagctgatggtcatcaaaatccacattctcctcttccttctggacacagggtagactacatttcccagccttccttgaagtaagtgtagtcacataaccgagttacagccagtgggactgggggaaagcagtgtgtgctgcttccaggcccagcctataaccctcccataggcactgctccatgctctttgtcctttgccaagaaaagagtggtgatcacagtagctttggttgccatgatctgaggacagcagcactttaggtcacatcggtgaccaaagacatcagactttgagtgatatggtccctgccaacgtccaggcctctttctggtttcttgggtataagtgtgaagactgtgagagagat

SEQ ID NO: 89222 - DNA, 581 bp, Homo sapiens
tccaagtatttgcacttctagcaagttcccaagtaatgttgatgctaatggttgagagaccacactttcagaaaccctcatatgatgatgaacctctaggtattaccatccattttgacaatcttgtttcagatatttccccaatttttttcagagggtggaggtggtgagtgaaaggaactggattttttttttttttttttgagacggattcttctctgttgcccaggctagagtgcagtggcgtgatcttggctcactgcaacctctgcctcctgggttcaagcaattctccagcctcagcctcctgagtagctgggattacaggcgtgcgccaccatgctggctaatttttgtattttyagtagagaccgggtttcgccatattggctaggctgatcttgaactcctgacctcaagtgatctgcttgcctcagcttcctaaagtgctgggattacaggcatgaaccaacgcgcccagcctggaactggagtattttaaagcaaattctgacagcatatcatttcacctgttaatactaaaaaatttttgtaaacacagtaattaacagccttaattt

SEQ ID NO: 89223 - DNA, 581 bp, Homo sapiens
tccaagtatttgcacttctagcaagttcccaagtaatgttgatgctaatggttgagagaccacactttcagaaaccctcatatgatgatgaacctctaggtattaccatccattttgacaatcttgtttcagatatttccccaatttttttcagagggtggaggtggtgagtgaaaggaactggattttttttttttttttttgagacggattcttctctgttgcccaggctagagtgcagtggcgtgatcttggctcactgcaacctctgcctcctgggttcaagcaattctccagcctcagcctcctgagtagctgggattacaggcgtgcgccaccatgctggctaatttttgtatttttagtagagaccgggtttcrccatattggctaggctgatcttgaactcctgacctcaagtgatctgcttgcctcagcttcctaaagtgctgggattacaggcatgaaccaacgcgcccagcctggaactggagtattttaaagcaaattctgacagcatatcatttcacctgttaatactaaaaaatttttgtaaacacagtaattaacagccttaattt

SEQ ID NO: 89224 - DNA, 743 bp, Homo sapiens
gtcgaggcagatggattgcttgaggctaggagttcaagagcagcctgggcaacatagtgagactctatctctacaaataaaataaaaataaaataaaataaaataaaataaaatcattgctactgatgggtcaagagaaatgaccattggattcagcaacatggaaatgtcaaccaaaggaaaaaaacactagagaaaatgatctctaaatatgttgagtttacgcaggaatataaataaggattctaatctggaatgcacagaatggcaagccaccagtgcattccgtgagagacgagtgaaaggagcttttattagcaaaatagagatttacataaactgcctagaaacagagttcattggttccagaggttcaaaccagagttattgtcagttcwttggtggagatgccgttgccgggcaagtgttctttcgagaacatcttatctgagttactgcagttctaaagaatgtctagtgataaaccttatcgaaacaggatgtgctggctggcctagtggctcacgcctgtaacctcagcactttggaatgctgagatgggaggatcacttgaactcaggagttcaagactagcctgggaaacatagtgagacctcatctctactaaaaatcaaaaaaagtaggagatgcataaaggatcagaaagggtctttagaaagtactagaggcctgtgtggtggtttatacctataatcccagcactttaggaggcttaggcagga

SEQ ID NO: 89225 - DNA, 743 bp, Homo sapiens
gtcgaggcagatggattgcttgaggctaggagttcaagagcagcctgggcaacatagtgagactctatctctacaaataaaataaaaataaaataaaataaaataaaataaaatcattgctactgatgggtcaagagaaatgaccattggattcagcaacatggaaatgtcaaccaaaggaaaaaaacactagagaaaatgatctctaaatatgttgagtttacgcaggaatataaataaggattctaatctggaatgcacagaatggcaagccaccagtgcattccgtgagagacgagtgaaaggagcttttattagcaaaatagagatttacataaactgcctagaaacagagttcattggttccagaggttcaaaccagagttattgtcagttctttggtggagatgccgttgccgggcaagtgttctttcgagaacatcttatctgagttactgcagttctaaagaatgtctagtgataaaccttatcgaaacaggatgtgctggctggcctagtggctcacgcctgtaacctcagcactttggaatgctgagatgggaggatcacttgaactcaggagttcaagactagcctgggaaacatagtgagacctcatctctactraaaatcaaaaaaagtaggagatgcataaaggatcagaaagggtctttagaaagtactagaggcctgtgtggtggtttatacctataatcccagcactttaggaggcttaggcagga

SEQ ID NO: 89226 - DNA, 2255 bp, Homo sapiens
cttggtcggtgattagatcattaggataaagccctcataatgagattcatgcccttatcaaagaggcccccagagaccggttttgtctgttccaccatgtgaggacacaactagaagacaccatctatgaacaagaaagtgggcccacaccagacaccaaatccgctggccccttgatcttagacttcccaaactctagaactgttagaaataaatttctgttgtttataagcaacctaatttattgtgttttgatatagcagtcagaatggactacaacactaggagaatgaaaaagcaggctgggcttggtgactcacgcctgtaatcccagtactttgggaggcygaggcaggcggatcacttgaggtcaggagattgagaccagcctggccaatatggtgagaccctgtctctactaataatacaaaaattagccaggcatggtggcacacacctgttatcccagctacccgggagactgaagcaggagaatcgcttgaacctgggaagtggaggttgcagtaagtggagatcacaccactgcactccagcctgggcgacacagcagaactctgtctcaaaaaaaaaaaaaaaaggaaattcactagagaaatataatatagtaggcaaagatacaaataagattaaaactcagattttggtcaaatgaacaatattttgctgtggctttaaaactgcatttttccccaaattatttttctttctttcttcttttttttttaatacaaagagtctcgctctatcacccaggctggagtgcagtggcatgatgacatctcactgcagcctcgacctcccatgctcaagggatcctcctatcttggcctcccaagtagctgggactacaggcacatgccactatgcccagctaatttattttattttatttatttatttttagataaagtctgtcagcaagggtggagtgcggtggcatgatcacagctcactgaagccttgaactcgtgggcttaagcaatcctcctgcctctgccttccgagtacctgggactacaggctgcaccacctcacccgttttgttttgtttttttttgagacggagtctgtcgcccaggctggagtgcagtggcgcgatcttggctcactgcaagctccacctcccgggttcacgccattctcctgcctcagcctcccgagtagctgggattacaggcgcctgccaccatgcccggctaatttttttgtatttttagtagagacagggtttcaccatgttagccaggatggtctcaatctcctgacctcaggtgatccacctgcctaggcctcccaaagcgctgggattacaggcgtgagccactgtgcccggctaggctaaacttttttggaagtaatttttccaactcccaacataatttccaataaataccactgtcattacaatgattttgcaccatctttggaaatgcttttaaaatgggaagaaaatttcatttttaatcagaaaatatgaataaatattgcttactgttttatgtacttgaagttagaggaagctcattattaatcatgatctgataaaagtggagttttagaaaagtgaaacttatggaagcatggagagcagatggaggaagaaaatgctggtcataagttggaaaattatccatggtgcagtaatttaagtgagataaaaggatgtgtttgtttgtttatttacttgagacagggtctcattttgtcacccatgctggagtacagtggcgtgatcatggctcactgcagcctccacatcctgggttcaagcaatcctcctgcctcagccctccaagtggctaggactacaggcccgcaccactacgcctggctaatttttgtagagacagagttttgccatgttgctcaggctagaagtgtgtttaattggtcatgtttaatcagacagccatttaatatttataataccaaaaaaatgtttctcactgagaccatccacactactactatgtctattaggttttcctttgttcagatggtcctcaaagcatagtaatgctttgatttgtaagtgttttttaagaatgtgaagtgagtagtttttgaatcatttggcaagttcaatttttaaaatctgaatcattaatatgagtaatgtctgaacaaatcctggttacataactgctcctttcccaggtgtaacaattagtttatctgagttttaatcaatagctgggtgccctttgggactccaaaattgcaatttctaactt

SEQ ID NO: 89227 - DNA, 2255 bp, Homo sapiens
cttggtcggtgattagatcattaggataaagccctcataatgagattcatgcccttatcaaagaggcccccagagaccggttttgtctgttccaccatgtgaggacacaactagaagacaccatctatgaacaagaaagtgggcccacaccagacaccaaatccgctggccccttgatcttagacttcccaaactctagaactgttagaaataaatttctgttgtttataagcaacctaatttattgtgttttgatatagcagtcagaatggactacaacactaggagaatgaaaaagcaggctgggcttggtgactcacgcctgtaatcccagtactttgggaggccgaggcaggcggatcacttgaggtcaggagatygagaccagcctggccaatatggtgagaccctgtctctactaataatacaaaaattagccaggcatggtggcacacacctgttatcccagctacccgggagactgaagcaggagaatcgcttgaacctgggaagtggaggttgcagtaagtggagatcacaccactgcactccagcctgggcgacacagcagaactctgtctcaaaaaaaaaaaaaaaaggaaattcactagagaaatataatatagtaggcaaagatacaaataagattaaaactcagattttggtcaaatgaacaatattttgctgtggctttaaaactgcatttttccccaaattatttttctttctttcttcttttttttttaatacaaagagtctcgctctatcacccaggctggagtgcagtggcatgatgacatctcactgcagcctcgacctcccatgctcaagggatcctcctatcttggcctcccaagtagctgggactacaggcacatgccactatgcccagctaatttattttattttatttatttatttttagataaagtctgtcagcaagggtggagtgcggtggcatgatcacagctcactgaagccttgaactcgtgggcttaagcaatcctcctgcctctgccttccgagtacctgggactacaggctgcaccacctcacccgttttgttttgtttttttttgagacggagtctgtcgcccaggctggagtgcagtggcgcgatcttggctcactgcaagctccacctcccgggttcacgccattctcctgcctcagcctcccgagtagctgggattacaggcgcctgccaccatgcccggctaatttttttgtatttttagtagagacagggtttcaccatgttagccaggatggtctcaatctcctgacctcaggtgatccacctgcctaggcctcccaaagcgctgggattacaggcgtgagccactgtgcccggctaggctaaacttttttggaagtaatttttccaactcccaacataatttccaataaataccactgtcattacaatgattttgcaccatctttggaaatgcttttaaaatgggaagaaaatttcatttttaatcagaaaatatgaataaatattgcttactgttttatgtacttgaagttagaggaagctcattattaatcatgatctgataaaagtggagttttagaaaagtgaaacttatggaagcatggagagcagatggaggaagaaaatgctggtcataagttggaaaattatccatggtgcagtaatttaagtgagataaaaggatgtgtttgtttgtttatttacttgagacagggtctcattttgtcacccatgctggagtacagtggcgtgatcatggctcactgcagcctccacatcctgggttcaagcaatcctcctgcctcagccctccaagtggctaggactacaggcccgcaccactacgcctggctaatttttgtagagacagagttttgccatgttgctcaggctagaagtgtgtttaattggtcatgtttaatcagacagccatttaatatttataataccaaaaaaatgtttctcactgagaccatccacactactactatgtctattaggttttcctttgttcagatggtcctcaaagcatagtaatgctttgatttgtaagtgttttttaagaatgtgaagtgagtagtttttgaatcatttggcaagttcaatttttaaaatctgaatcattaatatgagtaatgtctgaacaaatcctggttacataactgctcctttcccaggtgtaacaattagtttatctgagttttaatcaatagctgggtgccctttgggactccaaaattgcaatttctaactt

SEQ ID NO: 89228 - DNA, 2255 bp, Homo sapiens
cttggtcggtgattagatcattaggataaagccctcataatgagattcatgcccttatcaaagaggcccccagagaccggttttgtctgttccaccatgtgaggacacaactagaagacaccatctatgaacaagaaagtgggcccacaccagacaccaaatccgctggccccttgatcttagacttcccaaactctagaactgttagaaataaatttctgttgtttataagcaacctaatttattgtgttttgatatagcagtcagaatggactacaacactaggagaatgaaaaagcaggctgggcttggtgactcacgcctgtaatcccagtactttgggaggccgaggcaggcggatcacttgaggtcaggagattgagaccagcctggccaatatggtgagaccctgtctctactaataatacaaaaattagccaggcatggtggcacacacctgttatcccagctacccgggagactgaagcaggagaatcgcttgaacctgggargtggaggttgcagtaagtggagatcacaccactgcactccagcctgggcgacacagcagaactctgtctcaaaaaaaaaaaaaaaaggaaattcactagagaaatataatatagtaggcaaagatacaaataagattaaaactcagattttggtcaaatgaacaatattttgctgtggctttaaaactgcatttttccccaaattatttttctttctttcttcttttttttttaatacaaagagtctcgctctatcacccaggctggagtgcagtggcatgatgacatctcactgcagcctcgacctcccatgctcaagggatcctcctatcttggcctcccaagtagctgggactacaggcacatgccactatgcccagctaatttattttattttatttatttatttttagataaagtctgtcagcaagggtggagtgcggtggcatgatcacagctcactgaagccttgaactcgtgggcttaagcaatcctcctgcctctgccttccgagtacctgggactacaggctgcaccacctcacccgttttgttttgtttttttttgagacggagtctgtcgcccaggctggagtgcagtggcgcgatcttggctcactgcaagctccacctcccgggttcacgccattctcctgcctcagcctcccgagtagctgggattacaggcgcctgccaccatgcccggctaatttttttgtatttttagtagagacagggtttcaccatgttagccaggatggtctcaatctcctgacctcaggtgatccacctgcctaggcctcccaaagcgctgggattacaggcgtgagccactgtgcccggctaggctaaacttttttggaagtaatttttccaactcccaacataatttccaataaataccactgtcattacaatgattttgcaccatctttggaaatgcttttaaaatgggaagaaaatttcatttttaatcagaaaatatgaataaatattgcttactgttttatgtacttgaagttagaggaagctcattattaatcatgatctgataaaagtggagttttagaaaagtgaaacttatggaagcatggagagcagatggaggaagaaaatgctggtcataagttggaaaattatccatggtgcagtaatttaagtgagataaaaggatgtgtttgtttgtttatttacttgagacagggtctcattttgtcacccatgctggagtacagtggcgtgatcatggctcactgcagcctccacatcctgggttcaagcaatcctcctgcctcagccctccaagtggctaggactacaggcccgcaccactacgcctggctaatttttgtagagacagagttttgccatgttgctcaggctagaagtgtgtttaattggtcatgtttaatcagacagccatttaatatttataataccaaaaaaatgtttctcactgagaccatccacactactactatgtctattaggttttcctttgttcagatggtcctcaaagcatagtaatgctttgatttgtaagtgttttttaagaatgtgaagtgagtagtttttgaatcatttggcaagttcaatttttaaaatctgaatcattaatatgagtaatgtctgaacaaatcctggttacataactgctcctttcccaggtgtaacaattagtttatctgagttttaatcaatagctgggtgccctttgggactccaaaattgcaatttctaactt

SEQ ID NO: 89229 - DNA, 2255 bp, Homo sapiens
cttggtcggtgattagatcattaggataaagccctcataatgagattcatgcccttatcaaagaggcccccagagaccggttttgtctgttccaccatgtgaggacacaactagaagacaccatctatgaacaagaaagtgggcccacaccagacaccaaatccgctggccccttgatcttagacttcccaaactctagaactgttagaaataaatttctgttgtttataagcaacctaatttattgtgttttgatatagcagtcagaatggactacaacactaggagaatgaaaaagcaggctgggcttggtgactcacgcctgtaatcccagtactttgggaggccgaggcaggcggatcacttgaggtcaggagattgagaccagcctggccaatatggtgagaccctgtctctactaataatacaaaaattagccaggcatggtggcacacacctgttatcccagctacccgggagactgaagcaggagaatcgcttgaacctgggaagtggaggttgcagtaagtggagatcacaccactgcactccagcctgggcgacacagcagaactctgtctcaaaaaaaaaaaaaaaaggaaattcactagagaaatataatatagtaggcaaagatacaaataagattaaaactcagattttggtcaaatgaacaatattttgctgtggctttaaaactgcatttttccccaaattatttttctttctttcttcttttttttttaatacaaagagtctcgctctatcacccaggctggagtgcagtggcatgatgacatctcactgcagcctcgacctcccatgctcaagggatcctcctatcttggcctcccaagtagctgggactacaggcacatgccactatgcccagctaatttattttattttatttatttatttttagataaagtctgtcagcaagggtggagtgcggtggcatgatcacagctcactgaagccttgaactcgtgggcttaagcaatcctcctgcctctgccttccgagtacctgggactacaggctgcaccacctcacccgttttgttttgtttttttttgagacggagtctgtcgcccaggctggagtgcagtggcgcgatcttggctcactgcaagctccacckcccgggttcacgccattctcctgcctcagcctcccgagtagctgggattacaggcgcctgccaccatgcccggctaatttttttgtatttttagtagagacagggtttcaccatgttagccaggatggtctcaatctcctgacctcaggtgatccacctgcctaggcctcccaaagcgctgggattacaggcgtgagccactgtgcccggctaggctaaacttttttggaagtaatttttccaactcccaacataatttccaataaataccactgtcattacaatgattttgcaccatctttggaaatgcttttaaaatgggaagaaaatttcatttttaatcagaaaatatgaataaatattgcttactgttttatgtacttgaagttagaggaagctcattattaatcatgatctgataaaagtggagttttagaaaagtgaaacttatggaagcatggagagcagatggaggaagaaaatgctggtcataagttggaaaattatccatggtgcagtaatttaagtgagataaaaggatgtgtttgtttgtttatttacttgagacagggtctcattttgtcacccatgctggagtacagtggcgtgatcatggctcactgcagcctccacatcctgggttcaagcaatcctcctgcctcagccctccaagtggctaggactacaggcccgcaccactacgcctggctaatttttgtagagacagagttttgccatgttgctcaggctagaagtgtgtttaattggtcatgtttaatcagacagccatttaatatttataataccaaaaaaatgtttctcactgagaccatccacactactactatgtctattaggttttcctttgttcagatggtcctcaaagcatagtaatgctttgatttgtaagtgttttttaagaatgtgaagtgagtagtttttgaatcatttggcaagttcaatttttaaaatctgaatcattaatatgagtaatgtctgaacaaatcctggttacataactgctcctttcccaggtgtaacaattagtttatctgagttttaatcaatagctgggtgccctttgggactccaaaattgcaatttctaactt

SEQ ID NO: 89230 - DNA, 2255 bp, Homo sapiens
cttggtcggtgattagatcattaggataaagccctcataatgagattcatgcccttatcaaagaggcccccagagaccggttttgtctgttccaccatgtgaggacacaactagaagacaccatctatgaacaagaaagtgggcccacaccagacaccaaatccgctggccccttgatcttagacttcccaaactctagaactgttagaaataaatttctgttgtttataagcaacctaatttattgtgttttgatatagcagtcagaatggactacaacactaggagaatgaaaaagcaggctgggcttggtgactcacgcctgtaatcccagtactttgggaggccgaggcaggcggatcacttgaggtcaggagattgagaccagcctggccaatatggtgagaccctgtctctactaataatacaaaaattagccaggcatggtggcacacacctgttatcccagctacccgggagactgaagcaggagaatcgcttgaacctgggaagtggaggttgcagtaagtggagatcacaccactgcactccagcctgggcgacacagcagaactctgtctcaaaaaaaaaaaaaaaaggaaattcactagagaaatataatatagtaggcaaagatacaaataagattaaaactcagattttggtcaaatgaacaatattttgctgtggctttaaaactgcatttttccccaaattatttttctttctttcttcttttttttttaatacaaagagtctcgctctatcacccaggctggagtgcagtggcatgatgacatctcactgcagcctcgacctcccatgctcaagggatcctcctatcttggcctcccaagtagctgggactacaggcacatgccactatgcccagctaatttattttattttatttatttatttttagataaagtctgtcagcaagggtggagtgcggtggcatgatcacagctcactgaagccttgaactcgtgggcttaagcaatcctcctgcctctgccttccgagtacctgggactacaggctgcaccacctcacccgttttgttttgtttttttttgagacggagtctgtcgcccaggctggagtgcagtggcgcgatcttggctcactgcaagctccacctcccgggttcacgccattctcctgcctcagcctcccgagtagctgggattacaggcgcctgccaccatgcccggctaatttttttgtatttttagtagagacagggtttcaccatgttagccaggatggtctcaatctcctgacctcaggtgatccacctgcctaggcctcccaaagcgctgggattacaggcgtgagccactgygcccggctaggctaaacttttttggaagtaatttttccaactcccaacataatttccaataaataccactgtcattacaatgattttgcaccatctttggaaatgcttttaaaatgggaagaaaatttcatttttaatcagaaaatatgaataaatattgcttactgttttatgtacttgaagttagaggaagctcattattaatcatgatctgataaaagtggagttttagaaaagtgaaacttatggaagcatggagagcagatggaggaagaaaatgctggtcataagttggaaaattatccatggtgcagtaatttaagtgagataaaaggatgtgtttgtttgtttatttacttgagacagggtctcattttgtcacccatgctggagtacagtggcgtgatcatggctcactgcagcctccacatcctgggttcaagcaatcctcctgcctcagccctccaagtggctaggactacaggcccgcaccactacgcctggctaatttttgtagagacagagttttgccatgttgctcaggctagaagtgtgtttaattggtcatgtttaatcagacagccatttaatatttataataccaaaaaaatgtttctcactgagaccatccacactactactatgtctattaggttttcctttgttcagatggtcctcaaagcatagtaatgctttgatttgtaagtgttttttaagaatgtgaagtgagtagtttttgaatcatttggcaagttcaatttttaaaatctgaatcattaatatgagtaatgtctgaacaaatcctggttacataactgctcctttcccaggtgtaacaattagtttatctgagttttaatcaatagctgggtgccctttgggactccaaaattgcaatttctaactt

SEQ ID NO: 89231 - DNA, 543 bp, Homo sapiens
ttattttattattttaaaatttgaatttgccatgattatgcaaactttytcactgtcagtaaattagttttcagggatgtcagcatcttgtttgtcttgttttcccttatatattaatgctatagtaacgctgactttgattctcaatttatttccttattttccctatgttggttacctatttctggtcaccaaattaccccagaatttagcagcttatattgactcacaatttttatggcttagacatacaggcatagcttagctgagagccccttgctcagggtctctcacaagccttcaaccggaatgtcagccagggcagcattgttcttaacgctcagtcgcggggaggatctatttctaagttcactcttgggtgctccccagctgttggctggagacatctgtttctcaacaagtggtcctctccataaggcaactcacaacatgcggctggctttcctcagagcaagcaagagagggtgcccaagatggaagccacagtctttttgaaatctaatcccaaagtgatatcccata

SEQ ID NO: 89232 - DNA, 543 bp, Homo sapiens
ttattttattattttaaaatttgaatttgccatgattatgcaaactttctcactgtcagtaaattagttttcagggatgtcagcatcttgtttgtcttgttttcccttatatattaatgctatagtaacgctgactttgattctcaatttatttccttattttccctatgttggttacctatttctggtcaccaaattaccccagaatttagcagcttatattgactcacaatttttatggcttagacatacaggcatagcttagctgagagccccttgctcagggtctctcacaagccttcaaccrgaatgtcagccagggcagcattgttcttaacgctcagtcgcggggaggatctatttctaagttcactcttgggtgctccccagctgttggctggagacatctgtttctcaacaagtggtcctctccataaggcaactcacaacatgcggctggctttcctcagagcaagcaagagagggtgcccaagatggaagccacagtctttttgaaatctaatcccaaagtgatatcccata

SEQ ID NO: 89233 - DNA, 2663 bp, Homo sapiens
acaaggtcattatttaccctcctttcacagaggatagcatagtatccatttgattggagataaaagatatttttaaaatgtagtcctttaaaagtcaaaatgataaaagttaaatattctaggtctgttataatctataacctgggtttaactggatctagaagagtaaatctatgtatagctaatcatgataatgactgctgtcaaaaatacaaataaacccaataactgaattcaaggaaatggtacatgtcaaagttggaaaaagaaaagctgtggttaaaacatggttattgtacaattattagatgacttatttaagaaacacctcttttgtcaggagaccagaagattatgtagaaccctgtccctttattagacattgtggtctgagctctgggtttagatagatggggaagactttgaatttatgatgttatgtgtcaaaattcttttttttttttttttttttttgagactgagtctcactctgttgcccaggctggagtgcaatggtgcaatctcagctcactgcaacctctgaattgttcaagcaattctcttgcctcagcctcctgagttgcgattacaggtgcccgccaccacacccggctaattttttgtatttttagtagagacgaggtttcaccatgtttgccaggctagttttggactcctgacctcaagtgacccacccaccttggcctccgaaagtgcttggattacaggcatgagccactgatgtgttaaagttctatgtgtggttctcttcatgtgtggaaaaagatggggccaggcatggtggctcatacctatagttctagcactttgggaggctgaggcaggtggatcctttgagtccaggaaattaagaccagcctgggcaacatagcaaaatcctgtctctgcaaaaaaattaaaaaattaaccatgcgtggtggtgcacacctgtagtcccagctactaggaaagccgaggtgggaggattccttgagcccaggaggtcgaggctgcatgagctatgactgcacctctgcactctagcctggatgacagagcgagaccctgtctcaaaaaataaataaaataagtaaataaaaatatgaacatttgtaagggtctaccattgcatgctttgcccctcatgatgtctcaggtactcatttcaggattctaatttgcaaccagttttgttttatggataatgttcttgttggaaatgcttccaaactcaggctgaatgcagagtgtgttacataagcacagattaaggccatgtctgcagggagataatgcattagaatcctgtagaaccagtgttttcatgtgttcatttggtgtaggcttccttccccactgccatggtgatatttgatgaaactagttggtggcttagttacaggaattacacctgaaaataaatcgcgaaagttcccatatgaagcacaagtttagccatatgtacttacaatgatgatggcaaaaataggtgaaaaacattgtagttatataatattaccatatttagaaatgctagtgatggtggagggagtaataatgacattatataataatgtatgtataatcagtgcagaaaaatttccgctatactccaaaagaaactaatgctttaatttacwtttggttcttatttgttctcccctccccccacagtctatcctttcaaaaaaagatgctaatgagtagtaaaggaaccagagctaaaaaaggagctgtcctcatctgtaaattcaccttccccaaagagctgcaagttgactgtttgcagttgccaaaaagctggggcccagcaataaagtgctcagcccccacagcaatctccttccttcagaggcggaactgctcatgataaatacttctgcctccacagaagcctccttgttttacctcctctccgctgttgccaccccacttggttctcgagggcagcaggcagagttgcccaagacttattgtgtggccacaaagagatggcagtcatgccagatggcaggttttccttgcttctacttacccagacaaacagacttaaagcagtctggtggtgaaacaagaattgttgtggccatgaagaaaagttcgtgtcaaaatgtattcatttcctttcattttcttccgagacgcagacaactttttaaaaaaaatctagtattttgttataagacttttaagcaaatgtactacttttatatgcatgttttgaatgcctatgtaaaaatgtaatgggcacattgcttacagtactctgatgagagcacaccgtttgtctttaaataaacctagatgtgatctttggtttgcatttagtttcaataagccaattattggcagatttttcactgggtggggccgaaacggcggcttattcattttttcttaagcatagatactcaagggggttaagtaactgcacaccactggcaaagatttgtaatcctcagtgctagtaaaggtgaggcacttacccctttaagtgaggagagatggcttccatttaattattgctctgtggcatttctgtgtaggaagtgggaggcactgcagatgctcggaggagttgggaggcccatgtgtttctgcactacctggtctctgtgccctcgcctcccttcagcctgccctctacatagcagcagaggatc

SEQ ID NO: 89234 - DNA, 1717 bp, Homo sapiens
ttgtactcttctagattcaaggtaactcagtttcataacgttctgctttatatctgaggggacttcaaaaagttcatggaaaaatagaaktaaaagataaaaataaaatataatttcttttatttctcaacataagctccattaagttcaagcaatgataccagccattcagtctatccctaaagaactgagggtcctgggaaattaaccatgtcttttttattagctgaagaaaaacaggtgcccttcagggatttttttaagattgggaaacaaaaagaagtcagaaggagccaaatcaggactgggagatggatacctaatgatttttgatagaaattctagctaaactgcccttgctttatgagaggaatgcgcaggggaactgtcacggtggaagaccctctggtgaagctttcccaggcgtttctctgctaagctttggatttctctcgaaacactctcataataagcagatgatatctttatttggccctccaaaaagtcaacaagcaaaatgacttgaggatccaaaaaactgttaccatgacctttgctcttgatcaatctgctcttgctgtgactgggccacttccacctcttggtagccattgttttgtattttgtcttgagggtcatactggtaaagccatgtttctgttacaattcttttttttttcttttatgtttgcaaaataattattttacagctcagcaaaagaaatattattggatattttgagcataacgactcagacaactatagagtttttgaatgagtagtgactattttgcatgacgactgtgcttttctttctgcatttgggtatcttatttaaatgtgtgttagtgggttggtttggctgccatgttaaattcttgttgtatctggtcattttctgaagatgatctctcccaaaatgatctcagtcctttcaaaatcaccaagcagtctttatacctgtctctgaattcaaggttttaaaagtctgtttttgctacaattctttgaagaaatgcttcaggatcttgatctcacttgtttgacatttccatcgaaagctctgcttttgtctgcagctgacctgggctggatggttttggtatccattgagtggaaagtgtgctcaactttaatttttcagtcagatttataaaagctgaaccaactgaggagcatattgtgttggctatcgtttctgctgttaatcattggtcctcttcaagtagggcatgaatgagataattttttcctcacgaagtggcatggtctgctgctgtaggtttcatcttcaacattgtcttgtcctttcttaaaatgaattatccatttgtaaactgatttccttggggcgttgttcccataaactttttgcaaagcatcaatgattgcaccattcttccacctaagctttgccataaatttgatgtttgttcttgcttcagttttagcagaattcatattgttctgacaggggctctatttaaactgatatccttcttagtgcctcaaactagatcctgttcagacatgttataatgatgagtttattttgttgcaaagatttttgaaatctatgcataatttttttcataatatgcattttccatcaactttttgaagacctcttgtgtgttaactcacattcattttaatagtctttaaagacgggcattcctgtttacacaaatgagcacaaagaaatccaatcaacga

SEQ ID NO: 89235 - DNA, 761 bp, Homo sapiens
ttactcatttgttacatcttattgtctgcctttcttttgagaatacaagcatttaaaagttaatgccctccctgaatgaggacagggactgtcccagatctttcactcctgtccctaagagcatggaacagtgcacaacacagacaccacaaactcaagaagtattgttgaatgaattaatgattaaaactaacattataagcataaatacccttaatatataattgctgtactttaaatgtagtactaacatgtgataatgcttctggatgagcatgctataaatactttgagcaaaacttatttgagatattttctccatatgcagatgaatacatatgatgccttggtgcttcaccacatcaaccccagaggagttgcaacttattgatgctattgacccagcttttctagctcacagctgtttcctggtatcatgtctgacctctggaataagacagggtttaagacattttattatttgtttattgtttttattttttttccttctgaagtgtggctaactgataaagtcaactataagattaccttgtattttagcaccaacatttctcagatctaggccctaaagggttaaacccttaattattgatgcaaataatagcaatttwttggtgcaaacgccttttgtttttcagtagaaaatatttgaaccttttatggctatcagttagaatcatgtttgaaattactagctttagtgtcaaccagtaactggaagaattgtggtttcaatcttg

SEQ ID NO: 89236 - DNA, 621 bp, Homo sapiens
acagtagcaaaacaagctggggtttgttaaaagtgtaaacatcygagccctcaaaacccaggtctgcagaatttcagagagcggggtccacctgcaatttcggagggcctcttatagagtctcattcactctaaagtttgtgaaccagtggaaattagctatctaaaaaggccaggcgtggtggctcatgcctgtaatcccagcactttggaaggccaaggcaggtggatcatctgaggtcaggagttcgagaccagcctggccaacatggcgaaaccccgtctctactaaaaataccaaaattagccaggcatggtggcaggcacctgtattcccagctactcgggaggctgagccaggagaattgcttgaaccagggaggcagaggttgcggtaaaccgagatcacaccactgcactctagcctggacaacagaatgagactctgtctcaaaaacaaacaaacaaaaatgtagtgacctcaattttatgtttattgtatgaaatatatacaaataaaaagaaggaaattaaaaccactcattctgatcctactttcctaagataatcattgttggcatttgatgaaatatccctctaggggtatgtgtgtgtgtgtgtg

SEQ ID NO: 89237 - DNA, 759 bp, Homo sapiens
actttttctaagaggaataaaaaattaaagaataaaaaattacttaagtgttccttgaaattttacttacaaatgagtctgaatacaactyggtctttatttaaactcctaaaacacaatgggttaatcttattctgaaaaagacagagcaagtcattaaaaaccatggttcaagttcgcgaatcattttgctgatgaataaatcatcttggatggataattacctcctctcatctacttccctgtcacttggcttctgctgagattaaacatccatctcaatgaatactaacaacctactactatggaccttagactattattatttttttctactcaaatattaagcataataagattaagtaacgaggggccaggcgcagtggctcacgcctgtaatcccagcattttgggaggtcaaggtgggcagatcacttgaggccaggagttcaagaccagcctagccaaaatggtgaaatcttgtctctactaaaaatacaaaaattagacagggtctcactctgggtgaccctgacccctgactgtcacccggagtgagaccttgtcccaacaaaaaaaaaagaaaaagttatctccatgtttttacccctagttttatttgggtaacttgttttgttgcttggtgttgacgtattgcttggaattaagaattatttgagacattgattttaggctttccctttcattgcagttcttaggtttgttgttgttgtaacgtgactcatttatttactttct

SEQ ID NO: 89238 - DNA, 759 bp, Homo sapiens
actttttctaagaggaataaaaaattaaagaataaaaaattacttaagtgttccttgaaattttacttacaaatgagtctgaatacaactcggtctttatttaaactcctaaaacacaatgggttaatcttattctgaaaaagacagagcaagtcattaaaaaccatggttcaagttcgcgaatcattttgctgatgaataaatcatcttggatggataattacctcctctcatctacttccctgtcacttggcttctgctgagattaaacatccatctcaatgaatactaacaacctactactatggaccttagactattattatttttttctactcaaatattaagyataataagattaagtaacgaggggccaggcgcagtggctcacgcctgtaatcccagcattttgggaggtcaaggtgggcagatcacttgaggccaggagttcaagaccagcctagccaaaatggtgaaatcttgtctctactaaaaatacaaaaattagacagggtctcactctgggtgaccctgacccctgactgtcacccggagtgagaccttgtcccaacaaaaaaaaaagaaaaagttatctccatgtttttacccctagttttatttgggtaacttgttttgttgcttggtgttgacgtattgcttggaattaagaattatttgagacattgattttaggctttccctttcattgcagttcttaggtttgttgttgttgtaacgtgactcatttatttactttct

SEQ ID NO: 89239 - DNA, 1283 bp, Homo sapiens
tgcatggcccatcacttcctcaatccccgtcaacagtggcccaccctgccggtcctcatgcccacctctccccagaagctccttggtccccttgagacagcccacccccaccaagcctgcccaaacctgcccccaccacacaggggctggggctctgccctggcctggttggactcaggacgcagggcctggccaccagccacacggccccagtcctccccagcgcacctgcccccagcttccctccccagcttccctcaagatggcccctctgcttgacttcctgtcttatggagagggtcaaggcttgcatccctcctcccactccagcttcaggggccatctacctgatgccactcccatccccaggcccctccactggagactcctgctagagcagccactgcacacttgccacccatgcctggaacccaaatagcgctgagcatcgcaagtgcttgggccagacccatggaggtgcctccactccctctatcccgtcccacgtcctgccacctcccacattcctttcaggggccagcccctctccccacctgtccagcccctcccctgggtgcccccagcctgctgcctcgcccctctgcaaagcctggccatgcccccttcccactaaggggcaagtcagacttgttagcctccggggtggagctcgcttcccctccaacctcactcccagcccctctgcctcccccactgagcctgactcggcagcatgctccaactgcagggcctcggcacggctcctccttggtgcagagctgtcccttggctcttcgtaggtccctcctcatcattttcaactcaaatgtcccctcctcagagaggtcttccctgcctggcctagctggagagtccccactctgggtacccctcagacacgcagccctgtctcacaggcttcacagcaaccagcggcactgagatgctcacctaggctgtgtccccctcctcgagggcaggaacctggtctctctagttcacggttcctaggaggggacctggcatatctgaggaggccaggagaaggtgctgcttgattgagctctctcgcgagagtggggcaggggcggagaggccagcacccaccacaggatgcacaggagcagcagctgatggagttggctaagtcctgctctccacccctcccacccagacaccccagggagggacatggtgacctgcagccctcagaaagccagcatggcagtgctaggcactcttcgtgaacctggaccctagctctcctgcccgkgaggaacacg

SEQ ID NO: 89240 - DNA, 667 bp, Homo sapiens
ttgtatggactgaatatctgtgtccccttaaaatgctaaaatcctaacccacaaggtgacaatattmagaggtaggggactttgggagttgattaggtcatgagggaagagtccttataaatgggattagtatccttgtaaaagaggagtgagagagctcctagccctttccaccatgagataacagtgaaaaggtgatcatctatgaaccagaaagctgactcttaccagacactgactctgttgacaccttgatcttggacttcccactctccagaactgtgggaaataaatttctattgtttataaaacaaccagtctagggtagtttgtcttagcagtccaaatgggcaaggcatttggcaaataaatagattgtatcatatttctaattaatattttcaggaagccctatccagtaatctaggcaatagagccagtatagacagttcagtcacatattttaggccccagagtagattccagaaggcccaattattcagttagtatgtctatactaaataaattacttaagcgctactctcctctttgcaagcacaatcatggacaaagacatataaaaataatcttttaaatacagatgaagcagtaacatcactgaaaagtttatttttgcccaatcacttgagtaaatttccaggaggag

SEQ ID NO: 89241 - DNA, 818 bp, Homo sapiens
cagcaggtgtgggcccggttcacccacaagacctaggctgggccccccccctcctggagggggcaggtgggggggggtggggagcaggcagaggaccatggttccttcccaggacgcaataatcacacactcacacatcccatcccaccccatcatgcaatacagcccccctagaacgttggcccaaggtactgtaatactcccaccccaagcagagtctccgtcccacctccccatcagctccctttgtaggtgccagccaaatggtgcagggaggggtggggctggtggtacagtttccaggacagggcaggggcgctcagctggagccactgatgggtccagagtccagtggaaagagaggtgtcagggagatgaggcctgcagggccagaggcactctggtatgggctttgttctgtttaatttgtgatctcttrgcatggctgggtctgatccaccccgaggggctggcgggaggccaagaccctccttgcatggtgtgtgtgtgtgtgtgtgtgtgtgtgtgtgtgtgtgtgtgtgtccctgtgtatggatggaggccaggacagccaggtttggaatgtggtggggagtgtttcaatgctcagtgatcgggggaggagccctgtgacctagcgagactttctcaggccatcatcattgaggacagagttctctcctcacacatcttaccccaggaaggctcagtccatggtaggctgcccctcccccaagacacctgtgccatcactccctggtaggattgggtgtctgtcctcggctcctcaggaactgaggatggatgagaggggcctg

SEQ ID NO: 89242 - DNA, 1032 bp, Homo sapiens
gatgtgatgttatgagacacacacatcatgaaatgattacatcaagtgaattaacatgtccattaccacataattatcactgttttgtggtgagaacatttaaaattttaaaatatatacaacatattattaactacggtcaccaggctgtgcaatagatcactaaaacttataccttctaatggaaactttgtaccttttgacctttgtacctttcgataactattggtgactagatagttataggtctgcttaagatgtttttaaggaacatttgaatgcattgctatgcaaaataagcaagctgtcaactaatatggcgatgtgataccatttctgtaaacataacattcacgtactttacatgtacctatatttctatacatgtgcctaggaaaatgtctaaaatattaaatacaaaactgttaacagcacctctgagtattcattaattgttgtattgtattagaatagattaatggatattttcagtatgaaaaaataatgayattgggtgctgtttttgataatcctagagatgaagtagaggttaggtaagtttcattaataattgcagacagccaggggatctttatccagtttcttttttgtataatcttccaaaatgaattctcctagattaaaggctccaaatgtaatttgttttctcattaggtcataaaagatcataatagaattctgatttttgactctaagctttcataattttatgcttcgatttgaatttaaaaattgccagtttgttactatctagctattttttcattttatcatattttctggtgtatccaagacaaaattaaaaatcataagcggctgaagttagacatgcctggatttgaatcctagtttttcaattttctttgccttgtgttcatgagcatgctacttaacttctttaagcatcatttacacaaatgtgctgaagttattttgagagctgaatgatacagtgtatctgccgtgcccagaacagtgtgacagagtaggcagtgagtatcccaccctttt

SEQ ID NO: 89243 - DNA, 654 bp, Homo sapiens
caatcacctggggatcgtttcaaaatttagacctgattcagtagatctagggttggagcggagatttgacacttctgacaagctccaggtgataccaatgccagtggtttaagctacagtttaaggagcgaagtgttgaaggagctgctgttttccacagtttgccaaactggggaaatggtgtttttctttctctgccgatggctgcatattattttgacatctgatggggtccacaataaagtgtctaaaaaatttcacgttggtaaattatggaagaaaatcttcaaggagagttcatcctgcaaccaggagtcacagtgggtcctgagtattttgaacactgtactactgtgagatcgcttcagtgttcctgctgggtcacacggctatacttgtttttcttttatgatcaaaatacrtaggaggagggaggggaaaagagacagagagaaagaaagagaaggggaggagagggagagaggaggatcattataatacaacttcctaacttctttttggaaacagcctaaggtagccataatttcttctggcagaaatgactgagagaatataaatgggaatcttttatagaggaagcccaagcagggcagaatatttgaaaccaggccagcataatcgtacagtgtctag

SEQ ID NO: 89244 - DNA, 671 bp, Homo sapiens
aaaacagtcctccacggcaaagaattagccagccccaaatgtcaatagtgctgaggtcaaaacaccctggtctggatggtagctctcagttaaccatctattacatgtactgtgtcaactagagtttattatacttatgaatcagggttcagggcctgttttggttctcaagtattgctgcacctctgtgggaggattacacttctctatccctgaagacgtcctttgccacgtgaattcctttggataaagaaatgtgagcatgtctcagatgctctcagtgccccactcacgtccctcctcyctgtccctctaatgcactccagccaacttgtaactgctagcatctatctctttgtctgagtgctttctcggaagctagaaggctactctctgtgtgtacacacgggctggaagtgctaggaaattaaaactcctcaggagtagccttcaacccatgtctggaaggtttggttgtgtaaatataccagctcccttgttcctcaggagggtaattctaaggcacatgatttgccctgttttccagaatttctccatgggactgaactggagttgtccacagtggtagctagcttgataacacatgttctcctgactgccttccttgtctcatttctccattccctgattgatgtttcctatatctccct

SEQ ID NO: 89245 - DNA, 663 bp, Homo sapiens
tcaatcagcagttaaatgcttactgagtttcttattcatactccatcttgccagaccagaaatctgagagagctggagctcccaaggcccaccctttggctgcctaaattaagactcccggggttcccacactctttttcccaatggcagtggagggtcttgggaaaactgtctggagggaatgccccgagtcctcctcccagtatctgttcaggcttggcacccttaggacctccccttctggaagattcagcagtgcatgtgtatgcttggagagggagggtggataaatgtggcatgaatctatttggaaggttttatacatcttgaagtctcaactttaggtgtttcaggggggtattaagcacaccagggcttaaatcatagaatatttcaaaatagccacctttttccaagcacctatatacctatatgttccagcactggtcaaatgacagatgactatcgttacaaccgtccaagataggtgctatcatacctactttatggtgggagtctatgaggaacctgaagctctgagaggccaagtcattaatccagtaagtatctggtcckagattcaaacatctctatcctccttcttggtgccaggtgtcccatgtgaaggtttgggtcagagtgtggtgctagcaggtggcagaa

SEQ ID NO: 89246 - DNA, 632 bp, Homo sapiens
gccatttctgagtagatctcacgactgcaggtgcaggttgcaggatgtgggtggctggtgagctgagcacagcaggaggccctggagatggaacccccgtgtggtagtagcatccaagctttgggccctccagtcaaggtggctatttcagttgggccacgagaaccatgtctaaaaaccccaggtccttgctgcaaagtcgtcactctggtcagagccacacaagtacttgcagacccgggcagtggcatcagcaggtcactgggcctggactgggatgaggagggctacagaggagggtgagcaatggtaaaagctaagacagactgagtgatcaccacctgtgaaaaactgttctacacacttcatacttctacttgatcttcaccgtgaccctaagaattgattctattattatccccaattggtagactaggacatcaaggcacagagaagtcaagtaacatttgcaaagtcacacagcaggtaagtcacagagccagaagcggaatccaggctgtctggctccacagtccatactcctaacctccagtatcagtaataaccagccaggctagtctcagaaatatctagacaatctattaggcytaaaaactcctatttgtcactgg

SEQ ID NO: 89247 - DNA, 2087 bp, Homo sapiens
atttattcattatttctcaaattctttggagctggacagggaagcggggcactactcacttggagactctgtattacacaatccgctataatatggtttgtctgtgtccccatccaaatcccatcttgaattgtagctcccataatctccatgtgtcatgggagggacctggtgggaggtaattgaatcatgggggcaggtttttcccatactgttattgtgatagtgagtaaatctcatgagatctkatggttttataaagggcagttcccctgcgcatgctctctcctgccaccatgtaagatatgcctttcctcctccttcaccttctgccgtgattgtaaggcctcccagccatgtgagtccattaaacctctttttctttataaattacccagtcttgggtatttcttcatagcagtatgaaaatggacgaatacacattacctctcccttgcccttgcattatacgatgcacatacttttccatggtccaggtttcttttgtgctctggaatttaaatataaacaaacaaaaccagtttattccattttctttccatggactatttgttagcgtgaataataaactaagaatgtgtatttatagcagtagtttcctatcagggggtcttcaaaggcctcgggtcctccagagttttcagatatactttagagactgtgctgagtcaagtgtggggtggggtggagggggtgggagtatgagagtaggtaaagtgagaagatcaagactccaggaaccccatctcagtttccaaaataacacttcaactttcgtttgtttattatgctgggctgccataaaagcatacatttaaagaaaggatttccactatttaaaactggcataataaactaataataaaactggcaggtttaaaaattactatttcctatcatctctcctgattaggtaaatatttagcaagtttattattgtacaaattattttattcgtgacaaaaagctgttttctctagagaattttctttcttcctagcatgaaagccataatctaaaaaacacgactcagggttataagaagtcaagtttggaactagcatcttggggctagagaacttctccacatagatgctcagtttagaaattctaccatcccttttagtgcccattcctttggttattttagaacttctaaagtctgtttatgagacaacatgggagtgagtctccttttcctgaattgtaatgcataagatttctaaagacttaaataggatccaatgatgtctaaataattatggacgaaatgctaagtgaaaatctggatgataaaagaagtcttctattagcaggaaaatgtttactctagctgatccttctcagaagttgctttcaccagcttcagaaacaatcaaccccagctgcccatctgctgactacaacccgtagtgcctatcttgtactctcctataggtcattatgtcttaaattctactttcctgcaccactcacagcaaacaatcacccttttggcttcttactggaagcccaaattgtaatgtctacaagtttactgtcttgtagaaccaatgaggcagttgaaaaagaagaaataaagttcctggcaaaaaaagctagttaaaagaaatggtacttactaagagattttgtcttaataacaaggaaaggctaaatttcagttgataaacatagcttcttcctggaatccacttgtatcacatgaaaccaatttctaagaatttagcagtatttttgttttaatattctgtcaggagcagtactcaacaaaaataaagccctagcatagtaaacctcaaggctggctatgtaatttgcagggggtagtgcaagatgaaaataaggggccccttgttcaaaattatttaaaattccaagaacgtgacagcagaacattaaaccaagcatgggcccttcttctaagtgtgactgcacaggctgaacactgcgaatatagtccttcctatgcttgcacctatgccgaaaatatcagaggccactgtcaatctgcacagacccgatagagctttcccgatcatcttcttacttccgtatctgccgtt

SEQ ID NO: 89248 - DNA, 894 bp, Homo sapiens
tataaactgagataatatatgtaatagtacttcgtaaaccatgtatgttcaacatgattaaagcctctgtttatgtttcaatgataaaattgtggagacaattcaccagaaacaacaaataaaattttataccatgcaattagaaagaaagatgggttctaagtagtaaaggtaatcttgtgtagactattaataaaaggaagttttgtctgaatcactgtggtagagacttccagtgcttacatttatcctgtctcttcttcttctagacacgtgggaagattacctttctctgatgtcttgggattgaactgagctatgtggctagttacaggccaataggctgttagcagatgtgacatctaacacaactaggctgcagtttgaaataaataccagtgcacagcctccagaattcctcccctgctaaggtgactgagaagacctcagctgaratggtgggaaaaaaaaatattcaagcagcttggataacgaagttcctaaatggaagaacattgtcccagagagtcacttgaacccagaatagatttacgtgatcagacaataaacctctatgacaccctgagtttattttgttttttgattttgttactgcagcataactcaacataccctgactggtatagtcatggagattatcatcaggatctcctatgctcctgcatatgacacagccagagttctgcagacatttaactttgggcatctaaatatcataaatgctgctaatcaacatgactttttttgtattattccattcaatcaattcactaacctgtctttaggctacgtcttcacaatgctagaaaaatcattggtttagtcaattcatcattaaacaagaaaaaaagttacttttcttcactccctcat

SEQ ID NO: 89249 - DNA, 717 bp, Homo sapiens
tagcaaaatattttgacttggggttttattcatggtatcgttatgctaactgtggtctctcattagtcttttaagaattacatctcacrctgttggttttattaaaagacttcacagctcactgaattttttcatgctatcttttctaacctattttttaaattgaaaaggtgatacatacacatagtctaaaaaattgatagaagaatatgagtggagaagcagagacaaggctttctctttcactgctgatttccagtcctccaagccacctccacagagttagccgttcctaccagtttgctttgtgtctttctgcaattttccacgcatctaggaacatatatatggatattcattctatgcatactgatttgtatcatgcatttttctgttttttgtttctttctatatcagctcatggatctccacctcattctttttcaaagctgttaggcttgtcttttacattctaatttaattttaagaagaataagaaacctatttttcgtttttgcctcctgctctgaccggccacaggccgccacacctgggacaggcctagtgtgatttaattacggtggccctgggaacatctcccagttacacaatattttttccttcctggcattcctgaggcccataattccctaattaacctgcatccctttgatttttgctttgcccatctgctcagatgtaaatattcctgggaat

SEQ ID NO: 89250 - DNA, 618 bp, Homo sapiens
gggatcctgatatgtctctttgcagtaagtttgtgaatctaactttccttcttttttgttattgaagacccagagtttcatctgtcagctggatacctccatgtgaatgtctcagttacctccagctcaacaagcagctgaacacatgatctttcccattgaacttggggtcagcctcccaagaagccaggctctaaatctcccagccatctctatcttctcctcttttagctccctttgctgcacaggtggcagacctcctcttcttttctcttccacayctggtgtcttagccctggttcctctaatatggacaatgagacaatgaaatagctcctcaactggtcttctcaagttctgtccttatccttgccctagcccccaattggtgccaaagaataatttgatggaattctacacccattcattacttaaaaataaataataaatacacaatcaagtaaacctcctatcaaactgaaaataaaaagacaactaacataacgaagattatcttagactggcagccaacatcatatttatcagtcaaatgttgcggcattctctttaaagccatgaacaggacaaagatgctcatcataattaatagcaagaaaa

SEQ ID NO: 89251 - DNA, 1036 bp, Homo sapiens
ggatagaaataatatgatttctactttgttaatgtccagtttattaatcttcaaacaaccaacattcctctaaatattcagacactagttacacaatgattaaataaagaacttaggaatttaacaaatttgatttctcccaaatttaaatattgattgcaaattgaattcatatgggcacgaatctagtcttataagatactcttggttgtttcaaatgagttaagaaagagctaaaacacataagcagcatttcaaagattgccaagctattttaattgtacctgattttaaaaagggcaccaatgtgctaacagcggtttaggtttgtgactccgttgtctgtattttcattcctctattgtattcttgtcattatctttaccattattgtttctctgctcaccaaacctaaccagggctgctaacaattcagtgctattgtgtgaatgagaaacagcagtacttcctcaagtaagaaaaaaaaagaaccgtattatttatttcctgttcataataatgacaacagtcattctaaatgaattatacaaatcaaattcctgaacataaaatgacagttcaagttttaaatcatgataattagaaaacttttgagctaaatgctttgttataaaatagttatgtgtacygccgtcctgaaaaccactttctgagggacatttttaatatttactagttccggtgttttgttttctgcagaagtagttgccatatttgtctttcttatgacactgtagaccttaagtacttttaaaataaattttaatgttgagtagtattgatgacaggtattggcaaaattaaatagaacctgatagttacaacatcttataaatgtatccaggtgactattgctggaaataaatttcagcacttcaaaaggagtaatactaaaggattttggttctgacgctacatcaaagttctaccattgtcttattcctcaccatagtcatcagtcaattttaatggcagaattcggtgtcgtcgttgcattcattttcattgtcatttt

SEQ ID NO: 89252 - DNA, 1036 bp, Homo sapiens
ggatagaaataatatgatttctactttgttaatgtccagtttattaatcttcaaacaaccaacattcctctaaatattcagacactagttacacaatgattaaataaagaacttaggaatttaacaaatttgatttctcccaaatttaaatattgattgcaaattgaattcatatgggcacgaatctagtcttataagatactcttggttgtttcaaatgagttaagaaagagctaaaacacataagcagcatttcaaagattgccaagctattttaattgtacctgattttaaaaagggcaccaatgtgctaacagcggtttaggtttgtgactccgttgtctgtattttcattcctctattgtattcttgtcattatctttaccattattgtttctctgctcaccaaacctaaccagggctgctaacaattcagtgctattgtgtgaatgagaaacagcagtacttcctcaagtaagaaaaaaaaagaaccgtattatttatttcctgttcataataatgacaacagtcattctaaatgaattatacaaatcaaattcctgaacataaaatgacagttcaagttttaaatcatgataattagaaaacttttgagctaaatgctttgttataaaatagttatgtgtaccgcygtcctgaaaaccactttctgagggacatttttaatatttactagttccggtgttttgttttctgcagaagtagttgccatatttgtctttcttatgacactgtagaccttaagtacttttaaaataaattttaatgttgagtagtattgatgacaggtattggcaaaattaaatagaacctgatagttacaacatcttataaatgtatccaggtgactattgctggaaataaatttcagcacttcaaaaggagtaatactaaaggattttggttctgacgctacatcaaagttctaccattgtcttattcctcaccatagtcatcagtcaattttaatggcagaattcggtgtcgtcgttgcattcattttcattgtcatttt

SEQ ID NO: 89253 - DNA, 1036 bp, Homo sapiens
ggatagaaataatatgatttctactttgttaatgtccagtttattaatcttcaaacaaccaacattcctctaaatattcagacactagttacacaatgattaaataaagaacttaggaatttaacaaatttgatttctcccaaatttaaatattgattgcaaattgaattcatatgggcacgaatctagtcttataagatactcttggttgtttcaaatgagttaagaaagagctaaaacacataagcagcatttcaaagattgccaagctattttaattgtacctgattttaaaaagggcaccaatgtgctaacagcggtttaggtttgtgactccgttgtctgtattttcattcctctattgtattcttgtcattatctttaccattattgtttctctgctcaccaaacctaaccagggctgctaacaattcagtgctattgtgtgaatgagaaacagcagtacttcctcaagtaagaaaaaaaaagaaccgtattatttatttcctgttcataataatgacaacagtcattctaaatgaattatacaaatcaaattcctgaacataaaatgacagttcaagttttaaatcatgataattagaaaacttttgagctaaatgctttgttataaaatagttatgtgtaccgccgtcctgaaaaccactttctgagggacatttttaatatttactagttccggtgttttgttttctgcagaagtagttgccatatttgtctttcttatgacactgtagaccttaagtacttttaaaataaattttaatgttgagtagtattgatgacaggtattggcaaaattaaatagaacctgatagttacaacatcttataaatgtatccaggtgactattgctggaaataaatttcagcacttcaaaaggagtaatactaaaggattttggttctgacgctacatcaaagttctaccattgtcttattcctcaccatagtcatcagtcaattttaatggcagaattyggtgtcgtcgttgcattcattttcattgtcatttt

SEQ ID NO: 89254 - DNA, 683 bp, Homo sapiens
ggatccaacrgaaactcggaaaaccaataattctgttgaatggtatgagcagttggttagctgagatatgtgtgatggtgaattttatgggtcaccttggccagaccatggtatccagatatctgatcaaactacagtctccatgttgctgtgaaggtattcattggacctgaataaaaatcagtagactttgagtaaagcagatcaccctccataatgtgagcctaacccaacccgaaaacctcagagagggaagaacgtctgcttccagactgtcctgggacggggctcaagactgcaatgtcaactcctggtgaatgtcccagtcggccagcccatgctgtggattacacacttgccagcccccacaatgttgcgggacaattccttagaattttctgtctctttcttactctctctctctgtatacatgcgtatgtgtgtatatatatgtacatacatatatgtaaaaagggacccagttgggtcccttttaccttcttgggcccccttacctgtgctcccgtggtctagaggatcagggagccccagcccgacacaaagagctcggccgcaaccgccctcaaaatggtagcccatggggcttgtgtcaatcactaagtcgcattgaagtccaaggtgctagggaggtaactgcccacaaaaaacaaccacattctttt

SEQ ID NO: 89255 - DNA, 633 bp, Homo sapiens
tatcccatcatgatatttattttgtaatacttgctctgcggttatctacatcaggacattttgtggctctgcagcatttattgggcactatattaagctggtataaactcagacaaaatgccaggcgaatgataaactagtgacatttctgagtttctctgtagaaaatgtctacaaaggctgcatttggctgattgtatttcagaaggctgatgttgygctgctatgtcactggtatactatttcagagtgtgatttgtttttattcatattcttgtctttagtgatctttaggttttatttcaaaatagctcttaaatgtgaaaacctacttaagatactggaagtatagatgtaggaggctgcaatgggctttgtcttgttttcatcaacaaagctcatctagatgacctgtgcaacttcgcctcatactccctcaatagcgaggaccacacatagaccaggactgaagtcttttcacctgcttataaatgtatacgcttacctttctttagcaccatctcatggcttttaggatcaaatacaaaacctgagcattacacaaaaggtgctttttgattgggcccctggtgtcttttcagttctcttttgctaatctactttggaaacact

SEQ ID NO: 89256 - DNA, 633 bp, Homo sapiens
tatcccatcatgatatttattttgtaatacttgctctgcggttatctacatcaggacattttgtggctctgcagcatttattgggcactatattaagctggtataaactcagacaaaatgccaggcgaatgataaactagtgacatttctgagtttctctgtagaaaatgtctacaaaggctgcatttggctgattgtatttcagaaggctgatgttgcgctgctatgtcactggtatactatttcagagtgtgatttgtttttattcatattcttgtctttagtgatctttaggttttatttcaaaatagctcytaaatgtgaaaacctacttaagatactggaagtatagatgtaggaggctgcaatgggctttgtcttgttttcatcaacaaagctcatctagatgacctgtgcaacttcgcctcatactccctcaatagcgaggaccacacatagaccaggactgaagtcttttcacctgcttataaatgtatacgcttacctttctttagcaccatctcatggcttttaggatcaaatacaaaacctgagcattacacaaaaggtgctttttgattgggcccctggtgtcttttcagttctcttttgctaatctactttggaaacact

SEQ ID NO: 89257 - DNA, 633 bp, Homo sapiens
tatcccatcatgatatttattttgtaatacttgctctgcggttatctacatcaggacattttgtggctctgcagcatttattgggcactatattaagctggtataaactcagacaaaatgccaggcgaatgataaactagtgacatttctgagtttctctgtagaaaatgtctacaaaggctgcatttggctgattgtatttcagaaggctgatgttgcgctgctatgtcactggtatactatttcagagtgtgatttgtttttattcatattcttgtctttagtgatctttaggttttatttcaaaatagctcttaaatgtgaaaacctacttaagatactggaagtatagatgtaggaggctgcaatgggctttgtcttgttttcatcaacaaagctcatctagatgacctgtgcaacttcgcctcatactccctcaatagcgaggaccacacatagaccaggactgaagtcttttcacctgcttataaatgtataygcttacctttctttagcaccatctcatggcttttaggatcaaatacaaaacctgagcattacacaaaaggtgctttttgattgggcccctggtgtcttttcagttctcttttgctaatctactttggaaacact

SEQ ID NO: 89258 - DNA, 873 bp, Homo sapiens
ccataagttaagcatacatttattcaacaaatgtttattaattataaatgactcatagatagtaactgaaaacctactgtgtgctagacaagggccaggaacacagagccatcatcctgattgaggttatattccagtttgaaggacatawcaatgaaaacaaaataatttaaatagcgctgagtgtgaaaaagagacaaagggtccagtgatgaagggtgcatgggatggtggaagggaggctacctgaggttgggtggttggaaaggcctctcggggtgagactgaatgatgagaggggagtttgctacagtccagtgaagtggagagagctggtatggacagagccagcaggattgaggagcacagggaagtacaggtcctggagcacagagagggcaggaaagccaggtaggacaggacaaaggaagtccccaccaggttatgtagggccaggaaggctgtggtaagaatctaaattttatactaaatgcaatgtggaggcactggcaggttttaggggagccatatgatctgagtctattatgtgccaaacactatgctgggtaaggagtgttgaagccacaagaatgggcttcacagacctccaactccagagagtgtaactgaccaaggccaccagtgctgtgctctgaagcttatcaccaagctagggctagggctccaccttccagggacttaccctgccaatgacagagtatagcagggatactaaggctgaaccattcctggaacgcaggggactcctctgccagcgactttggctccaagactcctgaacaggcttactgaaccttcctcagactgcagagtagtcacccactctttcttcctctctttgactgtcctata

SEQ ID NO: 89259 - DNA, 1554 bp, Homo sapiens
tgttggtgttgcaacagaagaccccaaattccaaatgatgataaattaatggatgtttgaccctgaaccccttgacaatgacaaccctaaaggcctaattaccacaaacaaatgatcctgagctctaaactctgtgaagaagttggagcagatccacatacatcgtgaccagaatccgaaccctacatctctcttcttaatgatcagataccttcaccctaataatcccaatgatacaagaagagtgacagagactacgctgagactttcttgttcccaaatgtaactttgactatgatcccaagggctctaaactctaataactccaatcttaaaccctaaaccctaaataatgataaaacattattaagatactcaactgtggctgggcgcggtggctcatgcctgtaatcctagcactttgggaggctgaagtgggcggatcacaaggtcaggagatcaagaccatcctgactaacacagtgaaaccccgtctctactaaaaatacaaaaaattagccgggcatggtggtgggtgcctgtagtcccagctacttgggaggctgaggcaggagaatggcgtgaacccgggaggcggagcttgcagtgagctgagattgtgccactgcactccagcctgggcgacagagcaagactccatctcaaaaaaaaaaaaaaagatactgaactgtgaggctaactctgaaactcctgatggacatcatcagactcttcaccacggcactccctaccctgggcccacgtgcatgcccatcacctgaggatgttattataaagtaatatgaactcacatttctaaaatagatttattccacttttgaaccgggatccaaaaatccacttgaggaccacgagccatgtttttctcattttaatcaccaaaattcatccggaattgaggtaaaaaataatgcagatttggtgctttatgagatgaaatataagttacccctgcagcagtaaagttgctcttcaggccagtgtgacattaagcatgttgaaaaagaggggggcaaagtcccaggagtagctacttaaaggacaagaattcatgtgggatattataaatgaattatgctcagggacaatgacttaaactgctttatcccctcaagaaggatgctccaaaaatgcatctcccagaaaattcaagatccagaatactgtcttttttggggggacatattgaaagataacattttagtttcaatggactayataaatgagattcaagtcctggtaataaagatgggtctgtgtaataatttcttcattcagaatttgtagaggaaggatattaaagcctacagacctgtcaccccaccaattctactagctgaaagtagatgccaagacgtaatgttaagtgaaaatagttggtgaaagatacatacatgatgatactatttatgtatcatacacacacaaaagttgatctttgtatatatataaaatccttacatatattaatagatacatagatctcaatagactctaagagatcttaagcctttttttttttttttttttttt

SEQ ID NO: 89260 - DNA, 1554 bp, Homo sapiens
tgttggtgttgcaacagaagaccccaaattccaaatgatgataaattaatggatgtttgaccctgaaccccttgacaatgacaaccctaaaggcctaattaccacaaacaaatgatcctgagctctaaactctgtgaagaagttggagcagatccacatacatcgtgaccagaatccgaaccctacatctctcttcttaatgatcagataccttcaccctaataatcccaatgatacaagaagagtgacagagactacgctgagactttcttgttcccaaatgtaactttgactatgatcccaagggctctaaactctaataactccaatcttaaaccctaaaccctaaataatgataaaacattattaagatactcaactgtggctgggcgcggtggctcatgcctgtaatcctagcactttgggaggctgaagtgggcggatcacaaggtcaggagatcaagaccatcctgactaacacagtgaaaccccgtctctactaaaaatacaaaaaattagccgggcatggtggtgggtgcctgtagtcccagctacttgggaggctgaggcaggagaatggcgtgaacccgggaggcggagcttgcagtgagctgagattgtgccactgcactccagcctgggcgacagagcaagactccatctcaaaaaaaaaaaaaaagatactgaactgtgaggctaactctgaaactcctgatggacatcatcagactcttcaccacggcactccctaccctgggcccacgtgcatgcccatcacctgaggatgttattataaagtaatatgaactcacatttctaaaatagatttattccacttttgaaccgggatccaaaaatccacttgaggaccacgagccatgtttttctcattttaatcaccaaaattcatccggaattgaggtaaaaaataatgcagatttggtgctttatgagatgaaatataagttacccctgcagcagtaaagttgctcttcaggccagtgtgacattaagcatgttgaaaaagaggggggcaaagtcccaggagtagctacttaaaggacaagaattcatgtgggatattataaatgaattatgctcagggacaatgacttaaactgctttatcccctcaagaaggatgctccaaaaatgcatctcccagaaaattcaagatccagaatactgtcttttttggggggacatattgaaagataacattttagtttcaatggactatataaatgagattcaagtcctggtaataaagatgggtctgtgtaataatttcttcattcagaatttgtagaggaaggatattaaagcctacagacctgtcaccccaccaattctactagctgaaagtagatgccaagacrtaatgttaagtgaaaatagttggtgaaagatacatacatgatgatactatttatgtatcatacacacacaaaagttgatctttgtatatatataaaatccttacatatattaatagatacatagatctcaatagactctaagagatcttaagcctttttttttttttttttttttt

SEQ ID NO: 89261 - DNA, 1554 bp, Homo sapiens
tgttggtgttgcaacagaagaccccaaattccaaatgatgataaattaatggatgtttgaccctgaaccccttgacaatgacaaccctaaaggcctaattaccacaaacaaatgatcctgagctctaaactctgtgaagaagttggagcagatccacatacatcgtgaccagaatccgaaccctacatctctcttcttaatgatcagataccttcaccctaataatcccaatgatacaagaagagtgacagagactacgctgagactttcttgttcccaaatgtaactttgactatgatcccaagggctctaaactctaataactccaatcttaaaccctaaaccctaaataatgataaaacattattaagatactcaactgtggctgggcgcggtggctcatgcctgtaatcctagcactttgggaggctgaagtgggcggatcacaaggtcaggagatcaagaccatcctgactaacacagtgaaaccccgtctctactaaaaatacaaaaaattagccgggcatggtggtgggtgcctgtagtcccagctacttgggaggctgaggcaggagaatggcgtgaacccgggaggcggagcttgcagtgagctgagattgtgccactgcactccagcctgggcgacagagcaagactccatctcaaaaaaaaaaaaaaagatactgaactgtgaggctaactctgaaactcctgatggacatcatcagactcttcaccacggcactccctaccctgggcccacgtgcatgcccatcacctgaggatgttattataaagtaatatgaactcacatttctaaaatagatttattccacttttgaaccgggatccaaaaatccacttgaggaccacgagccatgtttttctcattttaatcaccaaaattcatccggaattgaggtaaaaaataatgcagatttggtgctttatgagatgaaatataagttacccctgcagcagtaaagttgctcttcaggccagtgtgacattaagcatgttgaaaaagaggggggcaaagtcccaggagtagctacttaaaggacaagaattcatgtgggatattataaatgaattatgctcagggacaatgacttaaactgctttatcccctcaagaaggatgctccaaaaatgcatctcccagaaaattcaagatccagaatactgtcttttttggggggacatattgaaagataacattttagtttcaatggactatataaatgagattcaagtcctggtaataaagatgggtctgtgtaataatttcttcattcagaatttgtagaggaaggatattaaagcctacagacctgtcaccccaccaattctactagctgaaagtagatgccaagacgtaatgttaagtgaaaatagttggtgaaagatacatacatgatgatactatttatgtatcatayacacacaaaagttgatctttgtatatatataaaatccttacatatattaatagatacatagatctcaatagactctaagagatcttaagcctttttttttttttttttttttt

SEQ ID NO: 89262 - DNA, 700 bp, Homo sapiens
atttggcttatttttccatttttagcacaactttttgttttccttgaagttaaaaattgtccttctgtttgcttaggttttcaatgtatttttcatgaattcagcccatatttgtcccaaattctctaaacctttcatatgttcagtctcccccagcrttctatccattgtatctccttgaggacctgtctccggggtgactctcagcctggtgctggttgtcagcaggggtctgtcttcgtcatctcctggggttcatgtagcacacacacacactctctccatctttatttcctctttcctgcaaaccacaccttcctcttttggactgactttctgctactagcaggattgcaaattctgacttctcaggcaatgctgccctgtagaagtgaaagttccatgggattcaggaattcctgatttttcaagaaaatccagaaacccagaaacccagattattatcagaatctctggtttttaaaaactgtggtagacaggaaaagattgtcacttgtattggcttgtaggccaccacttggttatctctactctagttaactcagtctaactaaagttaaactggtcccccaggccatgcctatatccttttgctctatagtttgagattattaagactttaggccaggcgcggtggctcatgcctgtaatcccagcagtttgggaggctgaggcaggc

SEQ ID NO: 89263 - DNA, 700 bp, Homo sapiens
atttggcttatttttccatttttagcacaactttttgttttccttgaagttaaaaattgtccttctgtttgcttaggttttcaatgtatttttcatgaattcagcccatatttgtcccaaattctctaaacctttcatatgttcagtctcccccagcattctatccattgtatctccytgaggacctgtctccggggtgactctcagcctggtgctggttgtcagcaggggtctgtcttcgtcatctcctggggttcatgtagcacacacacacactctctccatctttatttcctctttcctgcaaaccacaccttcctcttttggactgactttctgctactagcaggattgcaaattctgacttctcaggcaatgctgccctgtagaagtgaaagttccatgggattcaggaattcctgatttttcaagaaaatccagaaacccagaaacccagattattatcagaatctctggtttttaaaaactgtggtagacaggaaaagattgtcacttgtattggcttgtaggccaccacttggttatctctactctagttaactcagtctaactaaagttaaactggtcccccaggccatgcctatatccttttgctctatagtttgagattattaagactttaggccaggcgcggtggctcatgcctgtaatcccagcagtttgggaggctgaggcaggc

SEQ ID NO: 89264 - DNA, 700 bp, Homo sapiens
atttggcttatttttccatttttagcacaactttttgttttccttgaagttaaaaattgtccttctgtttgcttaggttttcaatgtatttttcatgaattcagcccatatttgtcccaaattctctaaacctttcatatgttcagtctcccccagcattctatccattgtatctccttgaggacytgtctccggggtgactctcagcctggtgctggttgtcagcaggggtctgtcttcgtcatctcctggggttcatgtagcacacacacacactctctccatctttatttcctctttcctgcaaaccacaccttcctcttttggactgactttctgctactagcaggattgcaaattctgacttctcaggcaatgctgccctgtagaagtgaaagttccatgggattcaggaattcctgatttttcaagaaaatccagaaacccagaaacccagattattatcagaatctctggtttttaaaaactgtggtagacaggaaaagattgtcacttgtattggcttgtaggccaccacttggttatctctactctagttaactcagtctaactaaagttaaactggtcccccaggccatgcctatatccttttgctctatagtttgagattattaagactttaggccaggcgcggtggctcatgcctgtaatcccagcagtttgggaggctgaggcaggc

SEQ ID NO: 89265 - DNA, 700 bp, Homo sapiens
atttggcttatttttccatttttagcacaactttttgttttccttgaagttaaaaattgtccttctgtttgcttaggttttcaatgtatttttcatgaattcagcccatatttgtcccaaattctctaaacctttcatatgttcagtctcccccagcattctatccattgtatctccttgaggacctgtctccggggtgactctcagcctggtgctggttgtcagcaggggtctgtcttcgtcatctcctggggttcatgtagcacacacacacactctctccatctttatttcctctttcctgcaaaccacaccttcctcttttggactgactttctgctactagcaggattgcaaattctgacttctcaggcaatgctgccctgtagaagtgaaagttccatgggattcaggaattcctgatttttcaagaaaatccagaaacccagaaacccagattattatcagaatctctggtttttaaaaactgtggtagacaggaaaagattgtcacttgtattggcttgtaggccaccacttggttatctctactctagttaactcagtctaactaaagttaaactggtcccccaggccatgcctatatccttttgctctatagtttgagattattaagactttaggccaggcgcggtggctcatgcctgtaatcccagcastttgggaggctgaggcaggc

SEQ ID NO: 89266 - DNA, 733 bp, Homo sapiens
gggctctgggatgagacagaagccggaatatgaaggagttttaaggttcaaacacatccacaaggcaaccccaaaacaattttcagaggcttttttctctttctttcttttttaaattagattttcatatttcagagattaagaagctcaaaacattttctgtgataatctttcttagtgcctcaggacagccaaactggttttacttttattccctcagacctgagctttttgagcacttaggacaaatgaagccctatttcacaaagaaggaaaacgcacaaaacccaccccctcaaggcctgcactagattgaggccatgaggaaataacaacaacaataatgataacaatagctgtcagggctctgggaaggggtattatagacaaggtctctgaccacaaaagaggctgcacaaatccacataaaacaacctcaaaccagcgagrctgtaggccatgagctgaaccggggtgtgaggatattccagaggctgtcagagggccgtgtggcaatccaggagggctttatggaggagggaagtttctcctcccacagcctcagtgacctaaattccccctaacgaagggacaggccactggggcctggcctgggtgtgctggtcccctacagctatttcaggcaccccgtgctccatcaaggcaaagatacactcctaagtgacttttcaaattagattgtttggaattcctagccagtgcaattaatgga

SEQ ID NO: 89267 - DNA, 1173 bp, Homo sapiens
ctctcaatcttcctgcacattgacagtttagaatctctggtcagatgcatttattatataatagtgtgtgccaagtactcataagcaggaaatattatgtcctaactcccactaatgctaagccattctggtgacttatgcaggatccgaagggcgatacagggttttgcacatagaagggacctggtgcttcattcttctctgctggctttttcttcttttttttcaatattaaatccttgttaaacatttgtttggccaaaggattaacaaaaacaaataattctgccgtgcatagagttgagcaaagttcttaatttccctgaattgccatctgagcttcagtctttaattagaagccctcaagttgctggtgaccttggggaacaggactggggagatatacaacgattggtgtataacttgaatttttacagggcaaagtggacatgcaatttctttgtgaattagcaacttaagagtgaacaatgaagtggctatattttctgaattcaaacctgtgacatagaatatgatattacaactgtacttatggggatattataagccagctgaattgaacatttttgtcagcttacaaaataagctgtttatagtgatgattcccatgaaggactcttaagtggttgaggaacaatgttagaagcagactgatttttgtagagcatataattttatatctgtcacattgtgtaacatgtcctaggaattatcttttaaagaataaatagaatgtttcttagaaaattataaaataactttgcttaactctatgcaaataaatttggaaaatgtaataaactggaatggatgattcttctggaacatatgaaatgccaaaactaactttagaaaaggagaacctttaaatagaccacaaaagaaatagaactaatccccaaagagcaccaggcccgtttacaatcgaatgcaaaggcctgtgcataccttgttaatttagagtaacaaaaagagatccataacatctccgggaggaaacagaagcacctgctaactcctttgagtggagkaagtgggtgcggacagagaggaggcagggttttcaaaaaggcccctataaaattgtattccatttagatgtgtaacttggtcaggattccttttactcttaccataaaagcaggaactgtg

SEQ ID NO: 89268 - DNA, 3014 bp, Homo sapiens
agtctcctcaagcacaaaaaagaagaatgagggtcatgaagggatgatgttgagggtccaaaccagaggcaggtgagagcttgcaccttctcatgactggagagagcttgcatgacgtgttatgttctggaagacggttcagcaagtgcattaatttattttcctattttgttcatatatctaaatcaagatttcttaacctcaacattgttgacattttgtcatattgacattttgtgtgtgtgtgtgaggagatgtcctgtgcattgtgggatactgagcagcaccctggcctcaacccagtagaggccaagcaaaaatgacaagcaaaaatgcttttggacatttccaaatgtaccctgggtggcaaaatcacccctggttgagaactactgatctaaattcattcattcagtccaggggttctggtgatctggagagagatgtgttctcccttcaaggggcttgaagtctttagctggaaaattaaatgcaagtatttggacagtaaatgaatgaaggaaagaaagaatgaatgaatcctcgagcctggagaacctcagttttctcatctgaaaaatagagatcctctaaaaaaagacttattgagtccttacttggtgataagcatcasgtttggtacctgtttctttaggttgctgtgaggaccaagtgagatgatgcatgaaaaatgttcagtgcagtttctgatatattgtaagtgttcagtaaatgtttagcattatgaatgtttattattattaccattgttattatcagcatatatttaaagctttattgttttcaaagttatttttaaatgccacctctcttaatagtcataatgacttagtgagtcgttactgtttttctgccgtttcacagatgaagaaactgagactcagggaagagatgtatcccatcaatgccggtaaacggcaggcccaacactgaatctcgttaaatccaactgtttccacctcctccatattgtcttctaaaaagagaagaactggcaggagaaatgccacacggtgggaaatccacgatgggtatggttggaatcagctgtgcacatctgtttgttttttcttttccagacacaactgcttctagactattatgttatactactagaaaatggaaatccccacccaacttgtcatgtttgtgttttttctaaaacactctgatgcttatacaaacccacacatcctatcctaacctcagttcaaagagcctttgttagcagaggtactacgctttaaaagccacttatacttcatgtgcactgtacacgtggctgggtgcaattcagagtgaaggattctctgtcttgcttcataagcactcagtcttttccaagaaaacctttggctcattacaactatgtcatgtatcatatctaagatcccctattcaagtattgtgatgtgtacttgtgctagtttctacacaagagggaggtatttattaggccatgctgccaacaactccttgtaatatatgacttcactaaaatgaagttgataatgtgagatccttgtttgccaaaacttagtcctcaagattgagagttaaaagggacatctgacaaagacagtgaaaaatgccgtttgaaggtcaaagaagataaattacaatgtaaggaaatcgttatttccccatgaaaatgtgacataattgttctgaacgtcaaagttgaatttggaaaaatactgacatttaccacctgagtatcaacagcgtcatttcacccctatacagttagctgttcttcccgggccttcccactttattaccacaactttgcctccctccacctacacatacagaccaagaacacatttacagcttgtgaatatttcaacattgtggttttaaaaggtgcattaaatttatgctagatgttgtgtttctgatgtggataatgttacatgatggtataaagatctcctaagagctactcctattaatacattggcagatgaaatataagagtcggacaccattcttcattctcaaagaaggaatcctattacaatgatagagcttcttctaggagagtaccgggacctcttctgcctagaagaaacatgtttttcttttttaaataattatgagaaagaaaaaactagaaaggaaaattaaaattaaatgtacattttgggaagcaaataagttaaaatatcatgtgaagcctttaatttggaaaacctgggaggcgttccttgttaatttaaaattccctagataataaaaccctatgcatgaattacaaatattgtatcataatgtatactatacatttgcatagattatatgtctagcaaccatttaatggatgctccagaacacagtcttaagcctatatgtatcctgtccaagaacttaaaacaaaaacaaaaacaaaaacaaaacattgtttctggactctacgtggccaggaaatcacaagattttcttattctctattatcatgcaaaaccttaagcatacgcatatatggaaataagtcactgaaggtttctagaacaaatactctccactggtgactctgcccacatattatcatcactcgggcttcctagaagaagctgcctttttaattgttactcgtgaacatttaagatgaattgtacagacttctttttcataaagtcaaaactatagctgaacaatttcagtcttaaaagatcttctcagatgtttccaactgtccaattacagagggtaatattatatatttcagggtctggttgatgtaacttaaaaagctctatgaagcagttttggtcaattcacctaacctatctgagcttcaaatttctcacctatacaatgtcagtggtaatacttgataatgtttattgaatatttactatattccaggcactatgctgtatgctttcattaactcacttaatacttctaacaaccccttaaagtaggttttattattactccatttcccagatacaaaactaaggcttggcgattaagcaaattattga

SEQ ID NO: 89269 - DNA, 2867 bp, Homo sapiens
ctcytgggagtgaggatcacggacttcctcttcagtgaatggaaatcttacaacaagttcgcatcaacatctttgagccatttccttcagagaaatcaactgcttttcagaggactttctctctgtgaatattctctttcttcccacgtcccactgcctccaacccttcaactgaaagagaaaaagcaaaggcagcaagacaagtgtgaatcttgaaggtacgttggatggaaagcacatacacagggagcaaacacatatgcatctgagttgcagctgtatcagtaaccagctgtatgacctttggcaagttgcttaatgtctcttgtgtttccatttgtggttataaaataaaagagttggacaagaggatttcaacctacttttttcagccttaaatatctaggagtctacagcttagcttccttcttgagctcataaacccatccatgagattcttacttatgaaacaaaaactcatgaatgagaatagtgtcctatgatcatacgacactggaattcacttttaaaaaaaatcaagattacctgggtgactcgaacgtctattaaatcctcactaaagtcaagaggagatcatcgctcagtacgataattttaaactaatcaactcagtagtttgtggttggtagttgatctccaagtcatttccatcctctaataaattattctcttttccttatcctcatcttcagttgagatcactatagctgacactctggggtgaatcttcagtcagttaccaccaccaccaatcctgactccaggccaagggattttaacatagaaacacaaaacccatccttgaacaacaaaacatcaattctcacaggaagtagctcttgctttgttttaataaaaaacagtcttagagcacttacacacacacacacacacacacgcaaaccacacgtggaaaaaatgtgtcatttgtacctttgcctagaggaaaatgttgaaactgcaccttggttaatagaaatggaatcaccattgagtctctaagtgatttttctcagcaagtgggagaggcacagagtggagtactcagagagtcagaagaaatccgatctgaagtgacttggcattttggtgcacccagaactgaagtgctgggagtcagatttcaggaaatagaggggaggaatttgaactgcatggaagtgattacaagagagataatggacaattacatcagaactaactcaaacctgccaagaggctcagtcgctcttcattaataatggtgatgctggcaacaaatgaaatagatgagtgagaggccttgactgagcattgcttcagtttgcattctgccaacaagtttgcatgtggcaagctgtaactttactactcagagtcataaaagagctgggcaccattcccagaacattgctaacttttcttctttcttctgtggtccacatattataattgtatgatttttttccccaaagccattttcaactctggaaatggagggacaatgcaatgcacatgttactcaagtttagacctagttctcttctgatgagttctgcactgacgtttagctcctggcggaatggtgctggtttaaaaggtacataggataacctgcctcagtcacagatgaaacgatactagcactgcaactggattgaagcccatttaaacttcacaaggatttgattagctaaagatggcttcgtaagtcctggaccccaacccagccccctcttactcttggcgggtgatcttagtaggatgttagatatcagccaactcagcttcctttctgttcacccccaaagctctggggattaacctcattttcccctccctccctccatctcagagaagaaagtatcccttctctcctctaagccacacccaccatgtcctgaatcccatctcttccttcttgagtctgcaatgtgatccatgcatgcacctgtgtgaattcacaaacaaaattatgggatctccttccataggtttctccattccatactctctggcccccaagtgcccctttacctagttcttcaggtcagaaagatggttattatctgagttgtagcagcctgcatcttggactcactttcccagctctgtgcttaaagccacctgcagggcaaagccatgaagaaagaaagaaagaaaaaaagacacctgggaaattcattcccttgcaggtcactactccatgtttcaacttccctccacaatttgcctgatttgacctaattttcagagtcctctcccgcatcatttcctctctgactgaggcagatggttattatttaacttctcctctgggtctctgctcctggccttcaagcaagaccgccagctctttctaagacatctttgtctccaccttgcctccttagccacaccgcatcctgccctcttcttccttttcctttccaagctccttgaaaatgtactttctacatgaacttagactttgtttctggcataacagggcaagtccaccacagttgacctctcccactgattataactaaaaactctgggcaaaatacagaaaccagctccccagggaccctgaaaattaagccaaagcaggcaggcagattggggaaggaggttgaaacttggagaggcgacctgcaaaagaatgaatttctcaagtgcgtttttatccttttctcatgtcttttccctgagggcagccccagacacagagctgggaaggatcagctgggctgagtgctgaaacttagatgatagcctcaacattctggatgaaagacctgggaaaaggggccagaagtgtggagaggagagagttagtgaaggggatcccataatcctgtttatgaacccacacaagtgcatgc

SEQ ID NO: 89270 - DNA, 2867 bp, Homo sapiens
ctcttgggagtgaggatcacggacttcctcttcagtgaatggaaatcttacaacaagttcgcatcaacatctttgagccatttccttcagagaaatcaactgcttttcagaggactttctctctgtgaatattctctttcttcccacgtcccactgcctccaacccttcaactgaaagagaaaaagcaaaggcagcaagacaagtgtgaatcttgaaggtacgttggatggaaagcacatacacagggagcaaacacatatgcatctgagttgcagctgtatcagtaaccagctgtatgacctttggcaagttgcttaatgtctcttgtgtttccatttgtggttataaaataaaagagttggacaagaggatttcaacctacttttttcagccttaaatatctaggagtctacagcttagcttccttcttgagctcataaacccatccatgagattcttacttatgaaacaaaaactcatgaatgagaatagtgtcctatgatcatacgacactggaattcacttttaaaaaaaatcaagattacctgggtgactcgaacgtctattaaatcctcactaaagtcaagaggagatcatcgctcagtacgataattttaaactaatcaactcagtagtttgtggttggtagttgatctccaagtcatttccatcctctaataaattattctcttttccttatcctcatcttcagttgagatcactatagctgacactctggggtgaatcttcagtcagttaccaccaccaccaatcctgactccaggccaagggattttaacatagaaacacaaaacccatccttgaacaacaaaacatcaattctcacaggaagtagctcttgctttgttttaataaaaaacagtcttagagcacttacacacacacacacacacacacgcaaaccacacgtggaaaaaatgtgtcatttgtacctttgcctagaggaaaatgttgaaactgcaccttggttaatagaaatggaatcaccattgagtctctaagtgatttttctcagcaagtgggagaggcacagagtggagtactcagagagtcagaagaaatccgatctgaagtgacttggcattttggtgcacccagaactgaagtgctgggagtcagatttcaggaaatagaggggaggaatttgaactgcatggaagtgattacaagagagataatggacaattacatcagaactaactcaaacctgccaagaggctcagtcgctcttcattaataatggtgatgctggcaacaaatgaaatagatgagtgagaggccttgactgagcattgcttcagtttgcattctgccaacaagtttgcatgtggcaagctgtaactttactactcagagtcataaaagagctgggcaccattcccagaacattgctaacttttcttctttcttctgtggtccacatattataattgtatgatttttttccccaaagccattttcaactctggaaatggagggacaatgcaatgcacatgttactcaagtttagacctagttctcttctgatgagttctgcactgacgtttagctcctggcggaatggtgctggtttaaaaggtacataggataacctgcctcagtcacagatgaaacgatactagcactgcaactggattgaagcccatttaaacttcacaaggatttgattagctaaagatggcttcgtaagtcctggaccccaacccagccccctcttactcttggcgggtgatcttagtaggatgttagatatcagccaactcagcttcctttctgttcacccccaaagctctggggattaacctcattttcccctccctccctccatctcagagaagaaagtatcccttctctcctctaagccacacccaccatgtcctgaatcccatctcttccttcttgagtctgcaatgtgatccatgcatgcacctgtgtgaattcacaaacaaaattatgggatctccttccataggtttctccattccatactctctggcccccaagtgcccctttacctagttcttcaggtcagaaagatggttattatctgagttgtagcagcctgcatcttggactcactttcccagctctgtgcttaaagccacctgcagggcaaagccatgaagaaagaaagaaagaaaaaaagacacctgggaaattcattcccttgcaggtcactactccatgtttcaacttccctccacaatttgcctgatttgacctaattttcagagtcctctcccgcatcatttcctctctgactgaggcagatggttattatttaacttctcctctgggtctctgctcctggccttcaagcaagaccgccagctctttctaagacatctttgtctccaccttgcctccttagccacaccgcatcctgccctcttcttccttttcctttccaagctccttgaaaatgtactttctacatgaacttagactttgtttctggcataacagggcaagtccaccacagttgacctctcccactgattataactaaaaactctgggcaaaatacagaaaccagctccccagggaccctgaaaattaagccaaagcaggcaggcagattggggaaggaggttgaaacttggagaggcgacctgcaaaagaatgaatttctcaagtgcgtttttatccttttctcatgtcttttccctgagggcagccccagacacagagctgggaaggatcagctgggctgagtgctgaaacttagatgatagcctcaacattctrgatgaaagacctgggaaaaggggccagaagtgtggagaggagagagttagtgaaggggatcccataatcctgtttatgaacccacacaagtgcatgc

SEQ ID NO: 89271 - DNA, 1015 bp, Homo sapiens
gcattttgtaacagtgtttttcaaactgtagttatttcagtaccacttcagggtttttgccctgcctgtgtccagctctactatcatgtgcttaatatttttatttaaatggacttggtttttaaactatggaatcccacattatctttgtcctaagtgatgatatatctatgccaccatgaatttgaggtgctaactatattttttcaatacacattaacataagtagataactatcaaaattaaacatgtttaagtgttagttaaaatcgtcctgagtatccccagtggtacacttctcaccttctggagaaactgygctttctccagaaacagtatttggtatccctgggggaaaggctatgctctcctctgaagaaaagccttggaatgcagtttgatcacaattttgtggaaatgatatctgtgtgtgtgtgtgtgtgtgtgtgtgtgtgtgtatgaaaaagttctggatgtgtgtattgttaaggacagttagcgctacgtaatatggtataagattgagttgcggtttgttggtttgttttacaagtagcacctttacttcaaagtgacgattaactcatttgtctttttaaataacagcttttttgtgatataattcacatatcatcactgcttgaggaaagcaaccttgtagccaatgctgatattggcaataccttttcagagtatatttataataatcatcaaacttgtgtgatgttagtaaaactgttgtctatttgtttaaggtacattgtttccatagcctatctaagcttgcttggggttggcccacccccaaattatgccgcattgacataaggattattttgggctacaggcaattgagactcaacagatacagaaaaagttatctactctgttttgggttttatctgcttaaaagtaaggtatgggttgccctttgaggaagtagtctgccttataccagtgagggaagggctaccgttgtccttgaatatacagtcaacaccaatatgagcatgca

SEQ ID NO: 89272 - DNA, 1015 bp, Homo sapiens
gcattttgtaacagtgtttttcaaactgtagttatttcagtaccacttcagggtttttgccctgcctgtgtccagctctactatcatgtgcttaatatttttatttaaatggacttggtttttaaactatggaatcccacattatctttgtcctaagtgatgatatatctatgccaccatgaatttgaggtgctaactatattttttcaatacacattaacataagtagataactatcaaaattaaacatgtttaagtgttagttaaaatcgtcctgagtatccccagtggtacacttctcaccttctggagaaactgtgctttctccagaaacagtatttggtatccctgggggaaaggctrtgctctcctctgaagaaaagccttggaatgcagtttgatcacaattttgtggaaatgatatctgtgtgtgtgtgtgtgtgtgtgtgtgtgtgtgtatgaaaaagttctggatgtgtgtattgttaaggacagttagcgctacgtaatatggtataagattgagttgcggtttgttggtttgttttacaagtagcacctttacttcaaagtgacgattaactcatttgtctttttaaataacagcttttttgtgatataattcacatatcatcactgcttgaggaaagcaaccttgtagccaatgctgatattggcaataccttttcagagtatatttataataatcatcaaacttgtgtgatgttagtaaaactgttgtctatttgtttaaggtacattgtttccatagcctatctaagcttgcttggggttggcccacccccaaattatgccgcattgacataaggattattttgggctacaggcaattgagactcaacagatacagaaaaagttatctactctgttttgggttttatctgcttaaaagtaaggtatgggttgccctttgaggaagtagtctgccttataccagtgagggaagggctaccgttgtccttgaatatacagtcaacaccaatatgagcatgca

SEQ ID NO: 89273 - DNA, 1015 bp, Homo sapiens
gcattttgtaacagtgtttttcaaactgtagttatttcagtaccacttcagggtttttgccctgcctgtgtccagctctactatcatgtgcttaatatttttatttaaatggacttggtttttaaactatggaatcccacattatctttgtcctaagtgatgatatatctatgccaccatgaatttgaggtgctaactatattttttcaatacacattaacataagtagataactatcaaaattaaacatgtttaagtgttagttaaaatcgtcctgagtatccccagtggtacacttctcaccttctggagaaactgtgctttctccagaaacagtatttggtatccctgggggaaaggctatgctctcctctgaagaaaagcctyggaatgcagtttgatcacaattttgtggaaatgatatctgtgtgtgtgtgtgtgtgtgtgtgtgtgtgtgtatgaaaaagttctggatgtgtgtattgttaaggacagttagcgctacgtaatatggtataagattgagttgcggtttgttggtttgttttacaagtagcacctttacttcaaagtgacgattaactcatttgtctttttaaataacagcttttttgtgatataattcacatatcatcactgcttgaggaaagcaaccttgtagccaatgctgatattggcaataccttttcagagtatatttataataatcatcaaacttgtgtgatgttagtaaaactgttgtctatttgtttaaggtacattgtttccatagcctatctaagcttgcttggggttggcccacccccaaattatgccgcattgacataaggattattttgggctacaggcaattgagactcaacagatacagaaaaagttatctactctgttttgggttttatctgcttaaaagtaaggtatgggttgccctttgaggaagtagtctgccttataccagtgagggaagggctaccgttgtccttgaatatacagtcaacaccaatatgagcatgca

SEQ ID NO: 89274 - DNA, 1015 bp, Homo sapiens
gcattttgtaacagtgtttttcaaactgtagttatttcagtaccacttcagggtttttgccctgcctgtgtccagctctactatcatgtgcttaatatttttatttaaatggacttggtttttaaactatggaatcccacattatctttgtcctaagtgatgatatatctatgccaccatgaatttgaggtgctaactatattttttcaatacacattaacataagtagataactatcaaaattaaacatgtttaagtgttagttaaaatcgtcctgagtatccccagtggtacacttctcaccttctggagaaactgtgctttctccagaaacagtatttggtatccctgggggaaaggctatgctctcctctgaagaaaagccttggaatgcagtttgatmacaattttgtggaaatgatatctgtgtgtgtgtgtgtgtgtgtgtgtgtgtgtgtatgaaaaagttctggatgtgtgtattgttaaggacagttagcgctacgtaatatggtataagattgagttgcggtttgttggtttgttttacaagtagcacctttacttcaaagtgacgattaactcatttgtctttttaaataacagcttttttgtgatataattcacatatcatcactgcttgaggaaagcaaccttgtagccaatgctgatattggcaataccttttcagagtatatttataataatcatcaaacttgtgtgatgttagtaaaactgttgtctatttgtttaaggtacattgtttccatagcctatctaagcttgcttggggttggcccacccccaaattatgccgcattgacataaggattattttgggctacaggcaattgagactcaacagatacagaaaaagttatctactctgttttgggttttatctgcttaaaagtaaggtatgggttgccctttgaggaagtagtctgccttataccagtgagggaagggctaccgttgtccttgaatatacagtcaacaccaatatgagcatgca

SEQ ID NO: 89275 - DNA, 873 bp, Homo sapiens
ccactccagcttgagcaacaagagggaaactctgtctcaaaaaaaaggagtgaaccctaatgtaaactctgcactttgtgtgatcctgatgtgtcaatgtaggttcatagctgtgagtctggtggggggtgttgataataggggaggctgtgcatgtaggggagtagagggcatataggatatctttgtatcttcttctcattttcgctgcaaacctaaaactgctctagaaaagataaaatcttaaagtattccatctttattccacaattctgtttctcaagcagggctatatgtggaaaatctccatgagagaagctgtacgccttaattcattcatatctagccacaccgcagcctggattggttcattacattagctcacagtcatctgggaaaagcagaaaatattttaaacataatgactaacctggctttctgccctatatccatgagtttcaaaccaggagttttcaagctttttttgacagtaacattaagaaataaattttacatcacaacataagacacgtgtacctaacgctgaaatccttacgacatgcaatgcactttgttattttcttttctagtctattttatttattttaaagagtgctaactgccacccatgaaaccaattccatgatcactggacaggtcatgacctgtagtttgaaaaacaatggtttgggctacaggagcatccgctgcaggctgagccctactaatccggcagaaattcaaacacagctgagtagtttgaggtcaaggttgctgcttggccaactctcaccttaagtcctattctagtaattaagctcttgctttgtttcttgtactccaattctaatacagaatcactaytttggatcc

SEQ ID NO: 89276 - DNA, 698 bp, Homo sapiens
ggatcctgggtccccatgacctcgatggcgccaagtcccgagccctcggatactaagtatctcgccagcctattccagatgcgggcgccggtcgttgttaggtatcgtcccggagggccggkcgttggggaaagcttaaatgagctggtgtttcagtggagccggggagctcttgcttcagtgggggcggcgacagcaaagaagccgccttgggctctccttcggttgtctctgtaggtcctggacgggaagggtcgggcctcgtcgtcattgagccgacgattagctcgcccggccaaagggcgactgggcccgcagagaggggaggagccgcggggccagcccaccaggcaccgccccgggacgggcccgcaaggcaccgcccccgggacctcggcccggcccctgggccacggcaccgggtcccccaggattgggcgccaggtcccgccggccggctccggggcagcgcccgcgcccaggtgccagcccgtgggaaggtgaccctgggcgccgggatgacccgagccctttccggtctggcctgccgggcgcttccggccggaagggactccgcggagggtgggggaccgaagggaagtcccgcctctaccgcccagcggacgccgccgccgccgccgccgccgcgtacctagccaggtccctgaggggcgggcagatgaggcctaggggtgccg

SEQ ID NO: 89277 - DNA, 698 bp, Homo sapiens
ggatcctgggtccccatgacctcgatggcgccaagtcccgagccctcggatactaagtatctcgccagcctattccagatgcgggcgccggtcgttgttaggtatcgtcccggagggccgggcgttggggaaagcttaaatgagctggtgtttcagtggagccggggagctcttgcttcagtgggggcggcgacagcaaagaagccgccttgggctctccttcggttgtctctgtaggtcctggacgggaagggtcgggcctcgtcgtcattgagccgacgattagctcgcccggccaaagggcgactgggcccgcagagaggggaggarccgcggggccagcccaccaggcaccgccccgggacgggcccgcaaggcaccgcccccgggacctcggcccggcccctgggccacggcaccgggtcccccaggattgggcgccaggtcccgccggccggctccggggcagcgcccgcgcccaggtgccagcccgtgggaaggtgaccctgggcgccgggatgacccgagccctttccggtctggcctgccgggcgcttccggccggaagggactccgcggagggtgggggaccgaagggaagtcccgcctctaccgcccagcggacgccgccgccgccgccgccgccgcgtacctagccaggtccctgaggggcgggcagatgaggcctaggggtgccg

SEQ ID NO: 89278 - DNA, 632 bp, Homo sapiens
ccaccctcctttcggggtcagtcagtcaagtacgtctacaaactgaccattggctgccagcgtgtcaactcccctatcactttactcagagtccctctgagggttcttgtgctgactggtaagcaagggctcctggagggaagggctggggaagggcgatgccaaagcagaaattgtcttagagggcttgcaagagggactgcagggaaacttcctggtctcagtgacagtgctagggagttgggaagggagggagggttctggagatagagatgtaaacctcagccctggcaccccttacctttagccatctcatgttagaatctaaaaccctaacctctactctcatctcygttccctctcagcattacctctccactcattctttctctaggccttcaggatgtccggtttccccaggatgaggctgtagccccatccagtccattcttggaggaggatgaaggtgggaagaaagattcatggctagctgagctggctggggaacgcctaatggctgccacatcctgccgcagcctccgtgagaattctttcagaattgtcctaccccatccttcccctcattgttttcccatctcagagacagtctcctaaccaccacacacttctgt

SEQ ID NO: 89279 - DNA, 620 bp, Homo sapiens
tgattccttatacacactcccagacatacccacrtctagcctctgacccggaacagtttctcagaccttcaacctcttcctgtttcttagatgcactgacccctaaactcctaacagcttgatagaactccttccccacacctacctactaggaccctgtgatacactgatttttgattacttcatgctacctagacttgactgcctcactcttaggttattaggtacttaatactgctatcttcagctcacatctgtggtagtacccattgcttcagaaaaacccttaatcacagctccctgccctgtgacttttccctgtcttcctgaacacagattgttttcttctcattcactaactatatcctgtcattggcttttactcctgctagcttctgatgcttctaccttaatctttttcttccatagtgtccttgaagtggagattgcattttgaatttgtaacgtcccgagaaccaggattggtactcctaccccctgtggaacagcccgaacctaccacctggacaggacctgagcaagtacctgtagacaccttcagctgggacctgcccatcaaggtgctgcctactagccccaccctggcctcatatgctgcc

SEQ ID NO: 89280 - DNA, 620 bp, Homo sapiens
tgattccttatacacactcccagacatacccacgtctagcctctgacccggaacagtttctcagaccttcaacctcttcctgtttcttagatgcactgacccctaaactcctaacagcttgatagaactccttccccacacctacctactaggaccctgtgatacactgatttttgattacttcatgctacctagacttgactgcctcactcttrggttattaggtacttaatactgctatcttcagctcacatctgtggtagtacccattgcttcagaaaaacccttaatcacagctccctgccctgtgacttttccctgtcttcctgaacacagattgttttcttctcattcactaactatatcctgtcattggcttttactcctgctagcttctgatgcttctaccttaatctttttcttccatagtgtccttgaagtggagattgcattttgaatttgtaacgtcccgagaaccaggattggtactcctaccccctgtggaacagcccgaacctaccacctggacaggacctgagcaagtacctgtagacaccttcagctgggacctgcccatcaaggtgctgcctactagccccaccctggcctcatatgctgcc

SEQ ID NO: 89281 - DNA, 823 bp, Homo sapiens
aacgtatacattaatttaaaaacactgaacacaaaattggtggtttttatggtatgtaaattataccttaatgaagcagttttttttttttaaagttaaatgagatctagaactctagtcaggactgtgttaaaactgctaacgttggagttgttttcttcccaaaacaattcaaataatgctgctcgttcctattaggcaatacatatttcatttctagtcagcatgtggtgaggtgatcaccttattattttctttccttctgcatactccagatgcacttttgacttaatatcttcgttgtatcctcttaattaggttcttgctgtttccttgagaccataccttcagtagttcatgcctagtttaaatkttatcctccactcagatttaattcaaaccaccacattttaaatgccttatagtttatttctgtgaatgtaagaaacacatccttggcttgcttttacaaattcattactgaagagatggactagaggggccaacgattgattccaagagacaccaattgctctattcccctgcctgataatgagcccatacccagagggaatcggccagtgttaaatctcataatgacaaacagaaatgtgcagcgtcgttatcactaagccaacaccattaaaggccagtgtttattgacacttcaggtgactggatgatgcctctccaggccgagctaatgaggagaacctctccattacctcttatcgagatttagcagactccatagctacccaatgaaagtggaaattactgggcaagcactgacatttaccagagactggccttcagtcataat

SEQ ID NO: 89282 - DNA, 665 bp, Homo sapiens
attcaattagtgatttatttcttaatttgtcaaacattacattaacaaagtaacaacttttctatccatattatattgtggttacaaaaaatggatcaattatatttgaattaaaaaatttaattgccaccaaagaagagaaaaataactagagaaaaataaaagagatgtgtcaagaaggaataaagaggctgataacatgagatctcttctagctttgaaacatgtcttgtgaaatgactaaaattttaaaagctaggatcaagtattggtgaggagatgaagtaattctaagtctcatccattgctaatggggtatacattggtttaaccagtttggaggactgtttggtaatgtccaaatatttattaaagttaaacctactcctaagtcttatagcccagaaatttcaaacctaggtaaatacctaagagaaataagagtayatgtcttccaaaagatctatacaagaatgtgtatagcagccatagtcataactccctaaaactggaaatgacccaaatgtccataaaaagggaaatggatacatgtatcattacatatttatctaatgaattgctatgtcgctgtaagaatgagcaacccactgatacatgccacagtatcatgaatcacatagacagtatgctgcctgaaataagcc

SEQ ID NO: 89283 - DNA, 665 bp, Homo sapiens
attcaattagtgatttatttcttaatttgtcaaacattacattaacaaagtaacaacttttctatccatattatattgtggttacaaaaaatggatcaattatatttgaattaaaaaatttaattgccaccaaagaagagaaaaataactagagaaaaataaaagagatgtgtcaagaaggaataaagaggctgataacatgagatctcttctagctttgaaacatgtcttgtgaaatgactaaaattttaaaagctaggatcaagtattggtgaggagatgaagtaattctaagtctcatccattgctaatggggtatacattggtttaaccagtttggaggactgtttggtaatgtccaaatatttattaaagttaaacctactcctaagtcttatagcccagaaatttcaaacctaggtaaatacctaagagaaataagagtacrtgtcttccaaaagatctatacaagaatgtgtatagcagccatagtcataactccctaaaactggaaatgacccaaatgtccataaaaagggaaatggatacatgtatcattacatatttatctaatgaattgctatgtcgctgtaagaatgagcaacccactgatacatgccacagtatcatgaatcacatagacagtatgctgcctgaaataagcc

SEQ ID NO: 89284 - DNA, 1386 bp, Homo sapiens
gggccaagccaagccctggaggttagcttctacagtctgtccttaaagagagctcagggatgtctggacaggacctggagacagtgccctgggccagagacctctgatctctaggccagcagagtcaccatgcagacagatttatgagccttaggcaaaacagctggcattcctgtggccatctttctaccccttcctttccacatgaccatatccttggccagatcttcatgtccttagatggctgttgcctttgggtaaattggcaattaagataaatgagcatatttatcatggccttgtggttacccctcctgaagctctcagggtggcaagctgcctgaccctcctactatgaacttagtaactttaaaacagagagtatcttttcttgcccagctgaaatttcctccccaggcgacctacttttaggattaatatgcgggaaagtctgcagttttgttttcagtgagggtagttgtgttttcaaggaaagaggtagcgccttacagtcagattagccagctttatttctttcatcaaccctttactggctttctaaattttttcaagtaacttcacctctctgagtttcatttacctcattaccttcatcaggtaagatgacatatgaaaagyccttctcaagcaactgcaaagttccaattaatagaagaaattgtaatgactatctgtgtttgaagcggggccatttttcttatttggaattttcacgtattaaaaatatggatcctttacacctgtatgcctttactctccaaattgattcattctctagttcctctatctcattactaagttcaaataatcatcttcctacaaatcactcagtttagatgccttgaaggcttctttgaatacttgctcctgttcacacccgacagtcagtcatcaagccctgtggaacttgtccctggtcaacatccgttcttctccattcctactgccgttcaccacacgcaggccctcattgtcccctcctgggatctatatcctctcctcagcacctttttcttctctattgataccatagacaacttctcatctcatattctctaaactcaactttcaggatatcatactcttattccatagatcagaactttcaatgactttctccttctttacagctcttcataacaactctgaagatagattcagtccttctttttggaattgcctcttatttctttttctttttatgcccatcataaacctcccattggcaaaattaccatgaacattttcttgtgaattcattgccttggttcattggttcatggacgggcaccaccatgagccaattagaatctttccctgagaatctagaatcatggttaagaaggtatagatctgcctgatgct

SEQ ID NO: 89285 - DNA, 1386 bp, Homo sapiens
gggccaagccaagccctggaggttagcttctacagtctgtccttaaagagagctcagggatgtctggacaggacctggagacagtgccctgggccagagacctctgatctctaggccagcagagtcaccatgcagacagatttatgagccttaggcaaaacagctggcattcctgtggccatctttctaccccttcctttccacatgaccatatccttggccagatcttcatgtccttagatggctgttgcctttgggtaaattggcaattaagataaatgagcatatttatcatggccttgtggttacccctcctgaagctctcagggtggcaagctgcctgaccctcctactatgaacttagtaactttaaaacagagagtatcttttcttgcccagctgaaatttcctccccaggcgacctacttttaggattaatatgcgggaaagtctgcagttttgttttcagtgagggtagttgtgttttcaaggaaagaggtagcgccttacagtcagattagccagctttatttctttcatcaaccctttactggctttctaaattttttcaagtaacttcacctctctgagtttcatttacctcattaccttcatcaggtaagatgacatatgaaaagcccttctcaagcaactgcaaagttccaattaatagaagaaattgtaatgactatctgtgtttgaagcggggccatttttcttatttggaattttcacgtattaaaaatatggatcctttacacctgtatgcctttactctccaaattgattcattctctagttcctctatctcattactaagttcaaataatcatcttcctacaaatcactcagtttagatgccttgaaggcttctttgaatrcttgctcctgttcacacccgacagtcagtcatcaagccctgtggaacttgtccctggtcaacatccgttcttctccattcctactgccgttcaccacacgcaggccctcattgtcccctcctgggatctatatcctctcctcagcacctttttcttctctattgataccatagacaacttctcatctcatattctctaaactcaactttcaggatatcatactcttattccatagatcagaactttcaatgactttctccttctttacagctcttcataacaactctgaagatagattcagtccttctttttggaattgcctcttatttctttttctttttatgcccatcataaacctcccattggcaaaattaccatgaacattttcttgtgaattcattgccttggttcattggttcatggacgggcaccaccatgagccaattagaatctttccctgagaatctagaatcatggttaagaaggtatagatctgcctgatgct

SEQ ID NO: 89286 - DNA, 1162 bp, Homo sapiens
tgcatgaggctgtgaagtcagatatttagtaataaaagcagcagtgcctttttttgtatttacccattgacccccaccaaatgcaactgttttatattaagaaaatagtaacaattttaaaatctcagagtaaaatctatttcactacatgcttttccccccttgttctgatttaagcagtgtgtacttggcatctctacattgtcctagggacagtggtgttctacaatattatcatgtatgatgttttattggtgctttttattcatagtggcttcttaccagaaacagtaggaagaaacacatgaactgtgtacaagacatgaaacattgctgctgatatgttgttttttcacatgcttttgagttttcactttttaaacgagagccagcaagcaaaatagatgtggctgggtctgcctgtccgggcggctctttgcaccgagctctcaaatcctgtgtattgagggttcctttttggtactcaggattggagctacagctgggcccccctctctcccattcgtttgaagagacactgagggaaacaagggtttcttttgaggtgtccttggctgccttttacgggatgggagccttctccggatcttttgttcttctgcacctcttgtagctactgccggtgcaaggttgtagatgttattccccaggagcctgggctkgggggctgagctgggctgaatgcaaaagcatgcaaccagaaggcgggcaaggggaggaaaagcaggcctggcctcattggtcccctggagatgtctgtagcagtcagctccagcttgggcctggggaagcagcctgaccaaggcgctcaggtgtgcctgttacaagaagaacctgcagaaggataatttgcacatggagctgtgataacactaatgttgattttttttttttttacaagtcatcagagatgtttgcaaagtgagttttatttttttgtaattcctttatctttacttaaaggtgaatgtgtattcctctgggaggaataggaagaaaacaggaatgttaataatgtcgaacagaaaacttcctcccttattaatatataatcctcatgtatttatgcctaatgtaagctgacttttaaaaagctttcttttgttgcatgccctgtgcaggcatctgtattgtacatgca

SEQ ID NO: 89287 - DNA, 652 bp, Homo sapiens
ttgagttggcaactcaaaaggagagtattatgaatgtgaaaaaaagaaaacggatgctttattttgctttgagggagggaccgaagccaagtcaaattgagagctctaatttgggaatagtgttattacaggtcattgggagttggttacgcrctaaattgggaggccagtcacatgaggaggcagcagaggcagatcacatgggggacagttggggcccttttataatgaaattttgttttatttactacacagttgaaatgtacttatgtcattttgagaaaccaagtcaccttattggctgggagttgctccctgccctggcccatcagttgtttgataaataagccagttcttccaatctttgtgctttccggggcttgattttggcagtgggatctgtgcagtgattcatggagctgaccctgtgataggggttatacatctgcccttcccctgactgactccaaggggcttgatctcttctcctccaaaggctctacccattttagacctcaaggtcaagacatacagaaaacttctaacattatataaagaagtgatgacctttgttttttagattatcttccattttctcagcactgttcctcttaatgtcatcttgcaaaataagaaagagaaaagatggatc

SEQ ID NO: 89288 - DNA, 686 bp, Homo sapiens
tccccctacagccccctgctgtccatcgcggcctcaacccctgcagatggcagcctgcaccacaaaaaggcaacttagaggtgttttttttttttttccttccagttcttggttgtaattggattcaggctaaaacaaccacgtccccaaccaggaaaggagggcactggggcggggacggaggagaggctgtgggagaagggagggaccagaggagagagcgagagagggaaccagaccccagttcgccgactaagcagaagaaagatcaaaaaccggaaaagaggagaagagcaaacaggcactttgaggaacaatcccctttaactccaagccgacagcggtctaggaattcaagttcagtgcctaccgaagacaaaggcgccccgagggagtggcggtgcgaccccagggcgtgggcccggccgcggagcccacactgcccggctgacccggtggtctcggaccatgtctcccgccccaagacccycccgttgtctcctgctccccctgctcacgctcggcaccgcgctcgcctccctcggctcggcccaaagcagcagcttcagccccgaagtaagtgagcttcccggcccttcccggagtcgcgcccgccgggaggcgagcccgggggtctcctaggggacagcctctattcggagaggagggcttttgggatctccgct

SEQ ID NO: 89289 - DNA, 472 bp, Homo sapiens
ttactattccctaaacaatacagtctaacaactatttacttagcatttacattgtattaggaattataaataatcgagagatgatttaaagcatacaggaggatgtccacagatgatgtgcaaatgcaattttttatatatcagggacttgagcatctgcagattttggtatccgtgggaggtccctagaaagmacacacaataaccagatggagccagctgtatcctggtacctgggtctgtcctccctatggggtgaggcagagcagccctcttgataagtaattagatattcattagaaggtgatgagtcctcttgaaaaaaaaaatatgaaagagcagtagagaaaaatgggatggtgtctcaggctttaggattcaatgggacagtcagggaaagccttgctgagaagctcaggtttgggcaaagactcgaagggctgggattatggtagcaagacagggaatgatc

SEQ ID NO: 89290 - DNA, 733 bp, Homo sapiens
atcctagaattgagaataacagggaaagatgtctccctgtggctagaccagtaaaacaaatactccatcatgtgaactgaggagcacatgatccagttggcaaagagaggaaaagtttttaaaagatacacaaagcttgattgtcctcggaattcttgggggscaaaaaaagatacacaaagaagcagaggtaggagatagagtatatgctacttgggtatctgaggggtttccagctcccacttccactgtccttcctgaggcacagctgcattcccatccttagctttcagtaaggatctaacaatcctcaaatattgggctgtaacaatttcttaaaggtttggaatggtgcttagaaaccatttatcattagtaacaatgaaacagcaaactgacctcaaagtcaatcctgctcttcaaatgtttaaagctaatgtcttaatggtatgtactaaatcaagctactaaatgcacatatcctaggatacaatggtaatgataataaatattatcaattatgaaactagaattctttttttttcttttttcaccagtgttacttgccaaattaaactaaaattcttagatgtttatttgagctagaaaaacatctaatagaactaaagattgctttaagaaacaaatatatcatgattccaaaaacaaaaacaaacttaggaaaaaactgttaaatatagcatgctccagaaaagagatctttatactttgg

SEQ ID NO: 89291 - DNA, 733 bp, Homo sapiens
atcctagaattgagaataacagggaaagatgtctccctgtggctagaccagtaaaacaaatactccatcatgtgaactgaggagcacatgatccagttggcaaagagaggaaaagtttttaaaagatacacaaagcttgattgtcctcggaattcttggggggcaaaaaaagatacacaaagaagcagaggtaggagatagagtatatgctacttgggtatctgaggggtttccagctcccacttccactgtccttcctgaggcacagctgcattcccatccttagctttcagtaaggatctaacaatcctcaaatattgggctgtaacaatttcttaaaggtttggaatggtgcttagaaaccayttatcattagtaacaatgaaacagcaaactgacctcaaagtcaatcctgctcttcaaatgtttaaagctaatgtcttaatggtatgtactaaatcaagctactaaatgcacatatcctaggatacaatggtaatgataataaatattatcaattatgaaactagaattctttttttttcttttttcaccagtgttacttgccaaattaaactaaaattcttagatgtttatttgagctagaaaaacatctaatagaactaaagattgctttaagaaacaaatatatcatgattccaaaaacaaaaacaaacttaggaaaaaactgttaaatatagcatgctccagaaaagagatctttatactttgg

SEQ ID NO: 89292 - DNA, 733 bp, Homo sapiens
atcctagaattgagaataacagggaaagatgtctccctgtggctagaccagtaaaacaaatactccatcatgtgaactgaggagcacatgatccagttggcaaagagaggaaaagtttttaaaagatacacaaagcttgattgtcctcggaattcttggggggcaaaaaaagatacacaaagaagcagaggtaggagatagagtatatgctacttgggtatctgaggggtttccagctcccacttccactgtccttcctgaggcacagctgcattcccatccttagctttcagtaaggatctaacaatcctcaaatattgggctgtaacaatttcttaaaggtttggaatggtgcttagaaaccatttatcattagtaacaatgaaacagcaaactgacctcaaagtcaatcctgctcttcaaatrtttaaagctaatgtcttaatggtatgtactaaatcaagctactaaatgcacatatcctaggatacaatggtaatgataataaatattatcaattatgaaactagaattctttttttttcttttttcaccagtgttacttgccaaattaaactaaaattcttagatgtttatttgagctagaaaaacatctaatagaactaaagattgctttaagaaacaaatatatcatgattccaaaaacaaaaacaaacttaggaaaaaactgttaaatatagcatgctccagaaaagagatctttatactttgg

SEQ ID NO: 89293 - DNA, 651 bp, Homo sapiens
ggtacccttaggcccagatacaagcagagctactcctttccatttgttttccatttgaatttctgtgtgttcatttgagggaagggtcctgcactaaaaatgtttgaaaccgctgtattagaatgctctgtcacctacaacagtcttgttgttcatgtgggtagatactgaagacatatatatmaaaaaaatcaataacatagcagatacacacaggaggcagaatgaagggccaaattatattgactcactggaacaataggcaaatgataacattaatggggactcttaagaggagagaagagagtgtgtcctacatgaataaagatttagaattgttaattgatggtaagcattgcaaaatgagcatgaagtgtaacatcatggctcaaaaggtgaatgcaatcttaggtatcattaataaaaatataatttctaatataaaagcactcaataaaatggccaaatatatattaaaaaaccagtttgtattaccaataatcaaagaatacaggcagcaatttagggaaacagaagacagacattggaatgattcagacttgagctccaatcttcaagcatacacaagatacgtaacttcaggacatacagcttccagaatgtggacatcactaatgaggggatcctgca

SEQ ID NO: 89294 - DNA, 1101 bp, Homo sapiens
aaccacgagccaggaataagagccattgttcagaggcccctgctttaygtccttccttgttgtgctcaacttggacatgctgttctcactaggacctgaatggctcaaccaaggtgagagcaatgttttctttcactcaaacttttgttaatgcagcttaaaattataccttgaatagaatgtttactagccatgctgcactttgggttcataacaaacttattaactattgaacttgaactaccacttaaaaaatacagtagaaatgctcttaagtgacttatacttagccagctcctaagaccaacttagtcttatactcccctttccctctgaaaacacccactgcacactgacaatctatgactagtttacatgtgtatttctgcacccatgcagttccatgccagtcactgatacttgttgctttgcctatttctacttgttgtatctgttattcttattatgtaaattcattaaatattacatgaaccactgaaatgtgcatgccaaagagaaaaatgaggatgaatgctttgaaaggactagataaaagcaaaacactttaaagaaaggaactgctgaaaaattaggtgtgagtgaaacaactataaaaggctagggggagtattcagactacttaaaatctggctagttctcactctaaagaacctgaaactgttatttttagatgatggattcaaccgtggtttatgcaaaataaactgtttattaacctacattcagagtcctgtgcttacatccaaagattcacaagtgaagtactcttatacattttaagtaaaaaatgttcaaaaaatatataatgatttttaaatgattcacacttgaaccaactttttaaaattacctacacataccaactgtgtcatacgagagaatttctactaactgaagaatcatattaatcactcctaaaattaatctttccagattactggaatcttgtgaaatggtgacttggtcatccaccacactagctatgcctccaggtgtgcttatttcaatctggtaaacatgattaccagagcatcttactaaaaaaaaaaaatacgttaaaataagaatcaaaagaagact

SEQ ID NO: 89295 - DNA, 733 bp, Homo sapiens
gagctsggatccaccggctgctggggctggaagacggtgatgtgggcaaatcagtctgtgctgcggcagctcaaagtggggactcgctacctacatggcttcttgggacggcctggacttgggagctctgaaaggagtcttttaacaattaaacgtggtttccataaaatatatcagaagccggttacctgtgcacgtaatgaagctgatggatggagtcaatggccagcaccatttcaccaatgtagaacctcgccatatcttccggaagcttgtcttcaaatttgctgagcagggtcagtaaatcaccacccacatagtaatccatgactaagtactacaaattggaaagagaaggggagagaataccacatttagtcaccactaaacctgacagttacaggccagtcttccatggcgaggttctcaggctccaggtctggctcgtggcatctcagctgctcttctgtcacccaagaccctccttctggaacatgcgccccgatgcgtccacgacgccgccatcttcaggggtgcatatggcagagagtggacttcagtaagtgatgtatttaatcaatgggaggaatgatgaaagggcttgaggttggagagggcactctaaaagctagtgacccaaagcagaagcacagttaatagcccatcaatcctatgggtttaaaaataattctccaggccctcatgttatgtgaggacgacaccagaccagaga

SEQ ID NO: 89296 - DNA, 656 bp, Homo sapiens
actgcactccagcctgggtgacagtgcaagacgtccatctcaaaaacaaaaacaaaaaaaactacatctgaagaaactatttttggtcccaacaatctcccaggtcagtcagaagctttcgagtctcctttctcttcattctatctttcagattttctccccagctccttgggaggccgaggcggggagatcacttgagcccaggagttcaaagccagcctgggcaacatggtgagacctcatcttagaaagagagagaggaaaaaacaaactctccaaataatactaattacctcatccccaaaccaatgtataggtgcacaaaaaggtgaaatggaagctgctgatgttttggcaatttaggcaaagttaacaaaatgaagtttatcttacctcaccaaaagcacctcttccaattactttaattatttcaaagtcttctcgatgaagctgcatttctttcaccagctgtgtaaatggtttagctacaagtaaaacagtaaaaccaacaatttagtctaatcagttcatactatataaaaatttaattgagtggggtgttgcactaagttatacttttaaaaaagtttgtttgaaaatatttaatatctgacatgttttggaamgtgagcacttataccaatggacacagatgt

SEQ ID NO: 89297 - DNA, 839 bp, Homo sapiens
agttccataaaggcacccagccccctttagagaagacctggtcagtgtttctccacaggtggtctgagggtgctgggctgctccagccctgcgggatctgtcaagaggagagctctaggcctatctggccaaactacagccatgggcttgggacctgcaagtgtgacaagcatttggtgagctggcatgtattagaaagatcaagaacctctgcactgggggctggtaaatcaatatgcccacccagaaagcctcctgtgggctggaagacagcagctgccactttggcttatgggctgtttaaccctggcctctcacaccaaaagagatttcttccaagctcgagcagaagtatggggatatcagccgggcgcggtggctcacgcctgtaatcctgacactttgggaggccgaggcggggagatcacgaggtcaggagatcgagaccatctggccaatatggtgaaaccctctctctactaaaataaaaaaaattagtcgggcgtggtggcgggcgcctgtagtcccrgctactcaggaggctgcggcaggggaatcgcttgaacccgggaggcagaagttgcagtaagctgagatcgtgcctctgcactccagcctgggcgacagagcgagactccgtctccaaaaaaaaaaaaaaaaaaaaaagaagcatggggatatctccctcccaagacattttcaactgtggttccagctgccagaggacgccaggaatcagattctgtggcacagtgggagcttccattgtctcatttcacctctctttcttcctaacccctctcctcttggccccagtttccttttaaaatcgaggtgga

SEQ ID NO: 89298 - DNA, 738 bp, Homo sapiens
atattaccctttctttctttgaattcaatttattttgacctgaagatttcatactttatagttcttctgctataatcttcttaactcagatagtagcgtttcttctttctagtcattcaggtctcagctggagtgtccactcaggaattctcaagttgtatataaaataaatttactttattgcttctgtatttaataataaaaattttcctctaactttggttatatgacaacagtattgatgcttattagtcacagtcatattgctaaaaattatttcattctttgggaataatatatatatatatataatataaaacacatgtttaacttttcatgtttgggtaattttatatacaatattaatatactttattaattttaattgattctggtaaaaaatgtagtttttggaattattccttttaagaattaaaaatttttttctccattgcctaatatatgattgatagtttgtaccatgagtatattcacttaataatgcacaaattttaattcctttttaaaygattaagctagtcatttaattctaatcttatttcttggtctttcaaagattaatctatttctaatcctatttctttcttggtctttcaaagattaatatttccgatagtttcttctttttaagctgctctgactttatacattttcttgtataccacatagtaagagggttttattgttggtatcttaaaatacttttttttcattgca

SEQ ID NO: 89299 - DNA, 1666 bp, Homo sapiens
ggtcaagtcagggcttttaggatatccatcacccaaatagaataatgtacattataaccattaactaatttttcatcatccactccttccctcccgaaaattttggaactggagggtagacgttatcaataaatctccagggagatagagaagaaaccttttatgatttgactttgtccccctcactctgaaaacttttgcatgacagaaagagaaatgaattgtgtctagggaatggaaacatgatactgagcacctataatgatgcttctatgccaaattaagaattttggacaaatgttgggaaggggacacctttgaggaactccaggtagggaattttggaagtgttttttggtttgtttcttggcttttggggggtgggtttagagatgaagatccagtctctgtcatatattagcaaatcagtatggcaactaattgtgttgattggctggggatattcgggctgtttcgttaggtactgtgtgggcaatgatctgaatttcctttatttgtttttctttttttccaggagaaggttttaatgaatagatgaggcagcagttatttaaattcttgttttatcaggattcagatttgaacctctgtcatcaggtgggatgccaaggccaagttatgtcacttcatgggtttaagatcaaccaactcattcgagttgctagttttatgctcctgataaagactatgaaataccatttttgaagggctcaaatatagccttttgcaccaggaactcttagtttatttttgcagttcgagtggaattacgtggaagtttaatatgatttatataaatacagacaaatctaaatctcaataaacgatcacagatgaattaaagtactttcttctattcaaaagatttttatagatttccagtatggtcacatttgtgctcaagattgtgtattattcagctattattgcatagcaaagaccgtaaaattttaatagcatataacaataagtatgcattttttatacctgtgtataaaggttgtgtatatatatatatatatatatatatatatatatatatatatatatayatacacacacacatatacatatacatatacatatatgtctgtatgtgtatatatggtcggtctgatctaggttgagcatggctggacttacttcaaactgatggttgggtccacatgtctctcattattcttgaaatagatggctactcaggccatattcttcttatggcaatggcagaaacagagtgggacacaagaatattccatgtcttttcttaatttatactgcattacattggccaaagtgatttacatggcccggtccatagttaaggggtgaggatgtatactgcgcaccatgaggccatgccaagttatggatgtgtaacattattacaggggaatgaataattgagtacagtacttgaagctaccacactttcaagagaaaataattgtttaatgaaatgcacatcactttcttagaaacaataaagatattcagctttcatctatatataatttatttgtaatcagttacttcctatcattcatttcctatacattctcacagaccgctccttctcctagaatgtcttggtctttcttcttagcctgatacatctttactcatcctttaagctcagcatacg

SEQ ID NO: 89300 - DNA, 1666 bp, Homo sapiens
ggtcaagtcagggcttttaggatatccatcacccaaatagaataatgtacattataaccattaactaatttttcatcatccactccttccctcccgaaaattttggaactggagggtagacgttatcaataaatctccagggagatagagaagaaaccttttatgatttgactttgtccccctcactctgaaaacttttgcatgacagaaagagaaatgaattgtgtctagggaatggaaacatgatactgagcacctataatgatgcttctatgccaaattaagaattttggacaaatgttgggaaggggacacctttgaggaactccaggtagggaattttggaagtgttttttggtttgtttcttggcttttggggggtgggtttagagatgaagatccagtctctgtcatatattagcaaatcagtatggcaactaattgtgttgattggctggggatattcgggctgtttcgttaggtactgtgtgggcaatgatctgaatttcctttatttgtttttctttttttccaggagaaggttttaatgaatagatgaggcagcagttatttaaattcttgttttatcaggattcagatttgaacctctgtcatcaggtgggatgccaaggccaagttatgtcacttcatgggtttaagatcaaccaactcattcgagttgctagttttatgctcctgataaagactatgaaataccatttttgaagggctcaaatatagccttttgcaccaggaactcttagtttatttttgcagttcgagtggaattacgtggaagtttaatatgatttatataaatacagacaaatctaaatctcaataaacgatcacagatgaattaaagtactttcttctattcaaaagatttttatagatttccagtatggtcacatttgtgctcaagattgtgtattattcagctattattgcatagcaaagaccgtaaaattttaatagcatataacaataagtatgcattttttatacctgtgtataaaggttgtgtatatatatatatatatatatatatatatatatatatatatatatatayacacacacacatatacatatacatatacatatatgtctgtatgtgtatatatggtcggtctgatctaggttgagcatggctggacttacttcaaactgatggttgggtccacatgtctctcattattcttgaaatagatggctactcaggccatattcttcttatggcaatggcagaaacagagtgggacacaagaatattccatgtcttttcttaatttatactgcattacattggccaaagtgatttacatggcccggtccatagttaaggggtgaggatgtatactgcgcaccatgaggccatgccaagttatggatgtgtaacattattacaggggaatgaataattgagtacagtacttgaagctaccacactttcaagagaaaataattgtttaatgaaatgcacatcactttcttagaaacaataaagatattcagctttcatctatatataatttatttgtaatcagttacttcctatcattcatttcctatacattctcacagaccgctccttctcctagaatgtcttggtctttcttcttagcctgatacatctttactcatcctttaagctcagcatacg

SEQ ID NO: 89301 - DNA, 1666 bp, Homo sapiens
ggtcaagtcagggcttttaggatatccatcacccaaatagaataatgtacattataaccattaactaatttttcatcatccactccttccctcccgaaaattttggaactggagggtagacgttatcaataaatctccagggagatagagaagaaaccttttatgatttgactttgtccccctcactctgaaaacttttgcatgacagaaagagaaatgaattgtgtctagggaatggaaacatgatactgagcacctataatgatgcttctatgccaaattaagaattttggacaaatgttgggaaggggacacctttgaggaactccaggtagggaattttggaagtgttttttggtttgtttcttggcttttggggggtgggtttagagatgaagatccagtctctgtcatatattagcaaatcagtatggcaactaattgtgttgattggctggggatattcgggctgtttcgttaggtactgtgtgggcaatgatctgaatttcctttatttgtttttctttttttccaggagaaggttttaatgaatagatgaggcagcagttatttaaattcttgttttatcaggattcagatttgaacctctgtcatcaggtgggatgccaaggccaagttatgtcacttcatgggtttaagatcaaccaactcattcgagttgctagttttatgctcctgataaagactatgaaataccatttttgaagggctcaaatatagccttttgcaccaggaactcttagtttatttttgcagttcgagtggaattacgtggaagtttaatatgatttatataaatacagacaaatctaaatctcaataaacgatcacagatgaattaaagtactttcttctattcaaaagatttttatagatttccagtatggtcacatttgtgctcaagattgtgtattattcagctattattgcatagcaaagaccgtaaaattttaatagcatataacaataagtatgcattttttatacctgtgtataaaggttgtgtatatatatatatatatatatatatatatatatatatatatatatatatacacacacacatatacatatacatatacatatatgtctgtatgtgtatatatggtcggtctgatctaggttgagcatggctggacttacttcaaactgatggttgggtccacatgtctctcattattcttgaaatagatggctactcaggccatattcttcttatggcaatggcagaaacagagtgggacacaagaayattccatgtcttttcttaatttatactgcattacattggccaaagtgatttacatggcccggtccatagttaaggggtgaggatgtatactgcgcaccatgaggccatgccaagttatggatgtgtaacattattacaggggaatgaataattgagtacagtacttgaagctaccacactttcaagagaaaataattgtttaatgaaatgcacatcactttcttagaaacaataaagatattcagctttcatctatatataatttatttgtaatcagttacttcctatcattcatttcctatacattctcacagaccgctccttctcctagaatgtcttggtctttcttcttagcctgatacatctttactcatcctttaagctcagcatacg

SEQ ID NO: 89302 - DNA, 1278 bp, Homo sapiens
tgcatttatgttgctgcgaaaaacatggtcctttttatgaccacatagcattccatgatgtatatgtaccacatttactttatccaatccaccactgatgggcacctaggtttattccatgtctttgctattgtgaatagtgctgcgatgaacatccaagtccatgtgtctctcaggtagaatgatttattttcctttgggtatatatccagtaatagaattgctgggcccaatggtacttctattttaagttctttgagaaaattccaaactgctttccacagtggctgaactaattttcattcttaccaacagtatataagtgttccttttgctctgcagctttgccaacatctgttatttttgactttctaatagacagtctgaccgtgtgagtgaaccaacatgtttcttgatatctcagcttcaatatcatttgctcaatcttgttcctctcttcttgattttttttattcccaagattaaacacatttaacatttttatagttggcttttacatattaccaaatcagatacctaaatgtcacaaaattccttcttttactcctttgagacttatagtcagcccacgataaaatctgatgtttyttcatgtacaattcggtttacacttattccagttccagtgtgatttaatcaaaagttgtctagtttctagaagaaaatgcctatagcacagactttatatcttttccattaaaattatcttctttaattattattgtaaaaagttaatgaagttcatatctttatcttatagcatatggaaaagatctttgtatctttcaggattctgtatacattttctttttattctatgttgatactagtgggtgccctgctaattttaaaatttaccttcctttataaccacagtgactaatttcacttaccttcaccatccttctcttatctacttccaaccatcgagacaagacagcctttcagcactctttaaaataacccatgtgattttgcattctccagataattaaaccttgaaatgttcattaataaaaagtgtactatacctctttaacttcctagtactgtgaagagtgcttgtcacatggtaggtgctcaataaatgtgtgataaataataactccaaagacaatgcttattaaatgccagacctttcatgaggagctttaagtgaatcatctgttttaatctttccaacaacccaggaggaaactaaaacttataaatattaaataagtgaaccaaagtcaaaggtaagtaaaataattagta

SEQ ID NO: 89303 - DNA, 860 bp, Homo sapiens
cataaaatctctaaagattcttccagtcagtaacagtttcaattccttaaagttataccaaaaatgtccacagctcaaaaatgtccacagctattaaaatgagggttaggtgaggtgtgaatagaacctgtatccatatgcaggcattctatattagtcagggttctccagaaaaacagaaatgatggatatatatttagagtggtatgtattatcatcatctctcagtatacacatgggagattgattccaggacttcctgagtatacaaaaatctgcacatactcaagtcccacagtgatcctgcrgaactcatatatattaaaaaaaattgtccctttgaatacacagtttttgcatcccttgaataccgtatttccaatcttcttttggttcgaaaataatatgtgtataagtggatgtggacagttccaagccatgttcaagggtcaactatataagaaattgactcatgtgattatgaaggccgagaagcctcacaatcttccatctgaagttggagatccaggaaagctggtagtgtaaattctagtctaagtccaaaggcctgacaacctggagaatcactggtataagtaccagtcaaagggcaagagcagactgatatctcagttcaggcagtcatacagagagggaattcgaccctcctctgtgtttttgttctatttgagctctgaaggggttggatgatgtccactcacacttgggagggcaatcttctttcctcagtccaccaatttaaatgcttatctcttctgaaaatatcttcacagacatatccagaaatactgttttaccaagtttctgggcatccctttggcccagtaaagatgatgcat

SEQ ID NO: 89304 - DNA, 661 bp, Homo sapiens
ttatttatatgtggtatttcaattttgtgccgtaagcctagtggcatcaattttaagatgtaggctttacacatattgtaatgtaggtgttaacattctttaagagtcttaacaagaaaattattagtttctcggtaagctttcattccccaaatatgtagtgaatacctattctgtataagaggacaagagcaatatgaaatgattggctatgccattctgggatggttttatcataatactaagaaaaaaatactctcctggcattccactacagtccaatccaggcttgaaccctcagaagaaattatgaattgtggaacacagcaaactacctcctctgtgcagggctaaccacttctcccttaagatcctctcctagcgtggaacagcgtggtatctgcagccatcaccccagatagtggttcttgagtttgcatygttgatatgtcttctggatagtgctgccctacagagaacccatcttgttttgttcccattcacatttccaggacagagcactgcccagatacatgttaggtgcacaaatatatctcttgaattacattaagtgccctattacagtgatctgccatagatatttggtatagcaacagcattgaacatttaaccactggtaaaattaatatgaaacacattg

SEQ ID NO: 89305 - DNA, 2275 bp, Homo sapiens
tcggttgcaagtaagaaaatactgtataaacactggtttaaacaaataagggtttagatttctcacctaagagaaaggccagagacaggcagtttctcgtatgggttcagctgctcaacagtgtcatcaaggagccagactacctctctcttttcattccatttcctttggcatttgtccttatgtctgttgcctcattatcccaaagtggccaccatcgttttggacctcatgtctttattcaagccaagaaaatagaaaagcggcatgctataggatctgtccccccttaaaaggaaagaaggtgctttccttccaatyccctcagaagacttctgtttacatcttattggccagaactatgttacataaccacctgtagatgcaaggtaggctaggaaaatttgtattttgctttttcaatctatgtaatttatgtaggtgatacagaaaaaggtagaccaacttccttttagtggctaccgttgtatatccaaatgaaaacagaaaaatgtaattgtccagctatcattagttttgttttttcttcttttgttgtctaagtttttgatttctcaaaaaacagcaaaaaatgtttctattgaagattatctaggtaagccataaattcacctaaaacttgatctacttttttccttctctgagctatatctggagtatatgtttccatggattaggacaatatggctcaagggaaaaaacataatttaggtgaatacattgtgcaaaagacatgcaaaatccctctaggttttgcatacaagaggtttaagttatatcattctaggatgacttagggcatttggtgtagagtaccaagccaggagtccagtagaacattctcaattgcaaatggttgaatatccaactccagatggcttccttaagcaacaaaaggagtttcttagtttgagcagaggttgatccagtgagtcaataatgtcaccaagaaatgtgtgtgtgtgtgtgtgtgtgtgtgtgtgtgtgtgtatgtgtgtttccatgtgtcttttctgccatctatatcagtttcaccctaaggttggagagtgactcatgctcacatgatggctgccaacaattacaaagttaatctttttctcatatacatttaaaatttgacaaagagataaagagatatcttgttcttatctcagccatttagtttgctaccatgtttcaccctgttctgactgaatcctaattgatcgatcacatgcttaccctggaatcaatcactgtgacaataagagcacaatgatctgactggcttctaccaactaaggctcatccctgtaaccagtgatgggatgaatttcatctaaaatgtaaaatgcatagctacatagagagagggggtgcgcctggggtgccttgcagcaaccacaatttctactagatcaagattcctgcattgcttctctaccatttgtgaggacaggaccccatgaaacttggattcttcttctataacatacgaatggtaaaacctactcaatccatgccttggcgcccttaaaaggattaaatattaggtgactattacttttaatggcaaaaaccacaattacttttgcaccaacttaacaatataaataaagatactttgtaaactaaaatttttggcaatgaaatttaagtttctggatgaatttccattatacacactgggcagctgctgcataaccacctagatttacttggccttcccattcctgtttgcaccacacaacttccagtggcaggcatctatgtccctttgccctgagtgttttctctaggcaccggccctctctgcccgtgtggaagtcaagtcacaagggcgagggaattagcatccttttccatagccctcaatcaggctagcctgtgagtgacagaatcaaggaatcattccttgcttccgagatgggatcattctggcgtgtttttcacagatcacagagtggcacagcatgattaaactctgggtgcccactccggtaactggcttgctatcacatcttatgttggcttccttccctcccagtcttagtcccacccctgcttactgggaccacctcccagataaagttcttgcgctcatatccttgtctcaggatcagcttctggaggagcccaaatgaagacatagaaccaactagaatcacatgactatgagaatgctaatttgacatgaaaagtatattccagacattttattttaaaacacacacagtgattctttttaagttctttctgtgtgttttcattt

SEQ ID NO: 89306 - DNA, 593 bp, Homo sapiens
aagaatggggtcagcaccagttgggactgaggttcaaagctaacacttcatttccagtttgccaaactaacacatatgcgactgaaagatgtgccgtgctctgaaaagtccttaaaatagacagatgttagcatttctctctttcacatttcctcaaatgaggcaaatccaagrtgtaccgaaacaaaatagtactacctttgacgcttatgggccaaagacattataaatagcccattcagctaaaagtccagctgttgccaaaacattttttttaagacccttggttctaaggagcacctactacaagctagacattttgcatctattacatgtatttaagtaccctgaggccggcagcacaatgaccacttaggaaatgagaaaatgagggaagaaatgagaaaatgagggctccaagagattatgttttatgtccaaagtcacagggctagtgaggatacagataaaattcccaagaatatagtcacttgccctgatgcctcttttgcccttgaaaaagtgcatatcccagctgtggaaacactgcttcagtgaccaccaacagggtgtttcccgtgaagaacaattca

SEQ ID NO: 89307 - DNA, 593 bp, Homo sapiens
aagaatggggtcagcaccagttgggactgaggttcaaagctaacacttcatttccagtttgccaaactaacacatatgcgactgaaagatgtgccgtgctctgaaaagtccttaaaatagacagatgttagcatttctctctttcacatttcctcaaatgaggcaaatccaaggtgtaccgaaacaaaatagtactacctttgacgcttatgggccaaagacattataaatagcccattcagctaaaagtccagctgttgccaaaacattttttttaagacccttggttctaaggagcacctactacaagctagacattttgcatctattacatgtatttaagtaccctgaggccggcrgcacaatgaccacttaggaaatgagaaaatgagggaagaaatgagaaaatgagggctccaagagattatgttttatgtccaaagtcacagggctagtgaggatacagataaaattcccaagaatatagtcacttgccctgatgcctcttttgcccttgaaaaagtgcatatcccagctgtggaaacactgcttcagtgaccaccaacagggtgtttcccgtgaagaacaattca

SEQ ID NO: 89308 - DNA, 564 bp, Homo sapiens
gtcagcaatatctcactgtccaggtggttccaaaaaatacatcgtcaccatggagctatttttaccattgcccagtatttctatttcctctgtggtttgcaaggatgggcatcacttctcagtgacacatgagcctctcggagttccagggaggctgacatrtttcttgtagcttaccccatccttctgcctgtcctatccttgaactttcttccacgcagcctaagccttatctattcttgaaaacagaattcaaacatctccccaacagaaagtgaatgtctaattttctgggcctccccgaccttgtgtcgaaatttcttggcaggcagggaatgctttccctactgtggtgctgaaaattcttcaagggcagaaggagtaggccgtcttcctcttgcagaagacattgtcagagcagaaaaagcagatggtgcagggagaagggtgtgtcctttgcagccagagtttgaacttgagctaggtgacttaatgagtaaggcaaatgatcggacctctgagcaaaatttcctcctctgtaaactgagtatcataatcccagta

SEQ ID NO: 89309 - DNA, 564 bp, Homo sapiens
gtcagcaatatctcactgtccaggtggttccaaaaaatacatcgtcaccatggagctatttttaccattgcccagtatttctatttcctctgtggtttgcaaggatgggcatcacttctcagtgacacatgagcctctcggagttccagggaggctgacatgtttcttgtagcttaccccatccttctgcctgtcctatccttgaactttcttccacgcagcctaagccttatctattcttgaaaacagaattcaaacatctccccaacagaaagtgaatgtctaattttctgggcctccccgaccttgtgtcgaaatttcttggcaggcagggaatgctttccctactgtggtgctgaaaattcttcaagggcagaaggagtagkccgtcttcctcttgcagaagacattgtcagagcagaaaaagcagatggtgcagggagaagggtgtgtcctttgcagccagagtttgaacttgagctaggtgacttaatgagtaaggcaaatgatcggacctctgagcaaaatttcctcctctgtaaactgagtatcataatcccagta

SEQ ID NO: 89310 - DNA, 827 bp, Homo sapiens
gccttggcattttatcttcaaggcacagaggagccagtgataggtgaattttgaccaggggagtgctttgatctggtttaccatctagaagcatcatagggggaagctgagagtggtcaagagcattgcctggacttgggaaccagaagcgggtaatgggagcctgcatgaaggttctaagaggagagaggaaagaagtggcaaggagaaggtggacaagcatgctggggaggcaaagctggctggccttggtgacacagtggatgtgggtgtaatgaagagagggatgacccctgggaacacagaggctgcagattggataggaaggggtagctcyagagagagaggtcagcaaggaggaagttaggagtgttgggctgagacacactactcctgatctggaaggggggtgatatggatggagagaaagagcctgtattggtatgttttcatgccactgattacaagacagggtaatttataaagaaaaagaggcttaatggactcacagttccatgtggctgtggaggcctcacaatcatggtggaaggcaagaggcccatcttacatggtggcagtcaagagagaagtgagagccaagcaaaaggggaaacccctcataaaaccatcagatctcatgagactttttcactaccacgagaacagtatggaggaaaccgcccccataattcagttatctcccactgggtcccttccacaacacatgggaattgtgggagctacaattcaagatgagatttaggtggggacacagccaaaccatatcagggcccttttttctaaaatatttgggagaaatctcccac

SEQ ID NO: 89311 - DNA, 2607 bp, Homo sapiens
cgggttcaagcaattctcctgcctcagcctcccgagtagctaagattacaggcatgcaccactgcacccagctaattttgtacttttagtagagacagggtttctccatgttggtcaggctgtctcgaactcccaacctcaggtgatccgcccgcctcagcctcccaaagtgctgggattacaggcgcccggctgcttttttcataaattgcaaattcttgatttaaattctcgattttcatcttttgtgcataatttcttctatttttaatgtattcataatcagtacttcaacatccctcttgactaacttcagaatatgaggcatctctgggtctgcctctattgtccatttttccttctggttactttttcttcttctttgaaggtcacatttttttaaaattgtgtgatgactgtttggtgtaagagatccataaaggctatagatgatgctattttccaccagagagttttcctctttccccagcaattgggctggatcatggctggggtggaccttacgtaggttcagcccacctctggtttatatctggtctttgaacatggccctcctggatgtaaagtttctctatttcctcaattctatgaacgttagctcatcttgtcctttgttgattccacagcttttcaatgtctatagagtataattttggtaacttttccatttttttcctaattgttacagcaggaacccaggctgctgtgacctactgcattctatacagaggtgaaagttggacaagccattttgttgttgttcattgctgttttcccagtacctgggagaatatttagcacacagtggatgctcaaaaatattattggattgagtccaaatattggactttgaatagaaaactcagatttaagttttgattctagctctggggaccatggaactgttatttcacatctctgaggctcagtttcaccatctgtaatatggtggtaataatatctttctgcctatagagttgtgaaaagaataaaaagagagcttatatataatgtacttagcacatcggagatatcaagcaaattgaatacctaagatgttacttattctacttttcctactctgccatgcatttaagttatttgagtgtaatgatgactgtggtggtgaagacaaagggtgtgagacataattaaaagatagaattggagatgttgagataagggagaagcagaagctgagtataaagtccaactttctgcaccgtggcctcggagctggcattccctgggccagttatgggtgggtttcacacttttctattgcctagggttccttggcctaatgacagagttcatcaacactgtacaaatgcacgtgcaatggagtggtgtttccatttgtgtggtcacagtggggagtggggagagaaattctaagagataaaccccggcatctttttttaagatgacttgaaacccatctagtatgcagactgtgggggccaagtgctattagccactatcaggaattattcatcaagtctagtcatgtgagaggggcttggaagcccttgcagtttctaatcaccactggtgtgtgaaatagattttaattagcatacaggttgtaggagtctttgatcagtcctgccatttggatcatataactgacccaacagtttgagattctctaagccctagtaataaatagcagggagaagaagaggcttagaatgtaataatcatggctcagcctcgggtttgggatgataaagcttcttgctgaatatatgcaggccttcttgatcctgggcattaaacaacttttctctctctcttctctctctctctctctctctctctctctcctctctctctctatctcactgtatgtgtgtaaaataagtttggggaattattttctaaatatcaacatttagggggctgggggttatttgttaaatatcaacatttccaaaaaaatacaggtgtcttcaaatcaaccatttttgatagccagagatcacagtgtgcyggcagtatgatgggttttcttagcaaactgaggtaatcacactaaccactttcatggcatttcccaggggaccagcgtttccggaggcatcaggcggaaggcagagatctaggatctgattgaaaaaaacacctgcaatcaaatgcattctcaaaccatttatctaggtacaggtgtgagcatagatttaggtgtaggcataggtataggtatatgtatagatatagatgtacctaaatctataatccttggagattctttgtcatctctgaatctctgccttctcatctctaaagtgggtttaataacagtctctccctgatggagttactgtaaggattaaatgagataccataatctaaaaatcctggcagagtatctttcctctttcatgtttttcatttttgttgttgttgttgttagattgtttgtttttgagatggagtcttgctatgttgcccaggctggagtgaagtggcgcgatctcagctcactgcaacctcccgtgttcaagccattctcctgcctcagcctcccaagtaactggtagccgggattacaggcatctgccatcacacctggctaatttt

SEQ ID NO: 89312 - DNA, 1465 bp, Homo sapiens
tcctagcttagactttatagactataacactctgagagagagacacacacacacatacagagagagaaacaaagggaatgtatgtgtaagaaagttcattttgaaagatagctagatataagattcttatatatatatatatattttagtactttatggcatccctcttcattctggctttcattgcttctgatgagaagacagctgtatatgactgtatctagcttgccctgtgagtgagtgagctgggcagggatgggaccttgtgttcttggcctgacatgcctggagtagagcctctaccctgtgagtcggtgcttggttgaaggaaggagcccagaccttagccatgcttgcctggaatagagcttttacaacacagagttggtggggatgagaaaagctggtggcctacccctcatgagcagcaattgtggtcctagactgggagctggagagagaggaaggagccctgccttcttggcggcacctgcccagagtagatatcctgtcaacgctgaactkggaggcagtgtggaaggggagcaggccatgatccaaatgccacagacttgctgttcttaacaagatttattagattttcttggataaatgtttctccactttctgtatgcccttagggcagtttccagaaacttttaatgttttcctttgtttttattatttttagtagttatggttgttttcctaggaaagagtctgctgagctccttgcattgctatttcagaagtgtcacctcttccccaccaccaagaaagttagttttaactcccaaagcaaagttcagggaacctgaaagtttttgaccaagattatatggcaactagtgtgttgctgagaatataatgctgctgaacattaatgtatatggctctttctttagtcaccaatatagaacctctatattctaatgatctgacataaaatataactctatttataactctccaatattcatttaaaaactgaactatcagaaatgatatttgtggaagattgcatgaaggatatgtaatttacttgatacattgttttgtttgcccaacctattcactttccagggaactggcaccatgtcccctggcctcatctaggccacctagttatcatataaaatggcttccaatgctgcatgattctattttttggccatagttgattggtcctgggctgggcccctgacccaagttgggtcagtccaagttcttccccaggaattctgaaattgaacttgataaaaatgtccttttcttcccagtaaaggttttggatggaaagcccagagctgtcagcagttgtgtttcctaccacatgatccagagaagtggaggagcttggtctatggagagagagaagaatggagtagatgttcagagacatcttgactaggctttttctgaggcccagtcacactgtttcccatgtgtggaatggatcacttca

SEQ ID NO: 89313 - DNA, 596 bp, Homo sapiens
ttttctccgcaataccactaactaacggactatatatttagtatgcatttgttcattgtccgtcttctcaactagaatttaagctccatgagataggggtgtagatttctctaattctactatcgtacttgccagcacaagatgtgagcattgagtaaatatttgtagatgaggccgggcatggtggatcacacctgtaatccctgcactttgagaagctaaggtgggaagacaacttaagctcaggacttcaagatcggcctgagaaatacggttagaccccatttctaaaaaagaaagaaagaaagagagagagagagagagagagagagagagagagagagaargaaagaaagaaagaaagaaagaaagaaagaaagaaagaaagaaagaaagaaagaaagaaagaaagaaagaaagaaagaaaagaaagaaaagcaagcaagcatggtacctacacctgtggtcccagctacctgcgaggctgaggcgggagaactgctggggcccaggaggtcgaggctgcaaccagctgtgattatacaactgcacttcagcctcggtgacaagagtgagaccctgtctcaaaaaaaaaa

SEQ ID NO: 89314 - DNA, 596 bp, Homo sapiens
ttttctccgcaataccactaactaacggactatatatttagtatgcatttgttcattgtccgtcttctcaactagaatttaagctccatgagataggggtgtagatttctctaattctactatcgtacttgccagcacaagatgtgagcattgagtaaatatttgtagatgaggccgggcatggtggatcacacctgtaatccctgcactttgagaagctaaggtgggaagacaacttaagctcaggacttcaagatcggcctgagaaatacggttagaccccatttctaaaaaagaaagaaagaaagagagagagagagagagagagagagagagagagagagaaggaaagaargaaagaaagaaagaaagaaagaaagaaagaaagaaagaaagaaagaaagaaagaaagaaagaaagaaagaaaagaaagaaaagcaagcaagcatggtacctacacctgtggtcccagctacctgcgaggctgaggcgggagaactgctggggcccaggaggtcgaggctgcaaccagctgtgattatacaactgcacttcagcctcggtgacaagagtgagaccctgtctcaaaaaaaaaa

SEQ ID NO: 89315 - DNA, 843 bp, Homo sapiens
tggagaacccctaattcctggaagtttctttaggccaatatttgcttctgaaaatttgtcttctcaactactgtaaaccagtcctgtcgtggttcatttctattaccatggacggcatgctattggattggaagtgatttgcaatttccaccttcactgtttttagtttgcaaatgtgatgattgatcctgatgtttctggtactaatgattagtaggatggtcaggatctagagcacctggacagatcaggagtccatctgggacagcaataccaacttctttttctaactagtcttgtgaaaaaaaaaaaaaatcaaaacctaagtaagtgaagcatcatgtttcagaggcacrgaaagtacttctggagttgagatgtcatggattctactctttatttctgggcctttggtgatctcacccaaaacacccctggccctgcctggatctctgtttccctgtttgcgaagtaaaaagtttacacctcctaagcttacacaaacactttcagattataagcataattgccaaatataatatacactactatttctcaatctcaacaacaagcatgccaaaacagtggcaggaaaccacaaagctaaaaatgaaaaaaaaaaaaaattaaaggtcaagaactacagcattgactcctactcagtttagcctttgctttctcaaaggatgatgtcactaaaacactgtgggctttggaatctgataaatcaaagttcagcccactaagtggcaagtactttcaatccagggactgagtatcattaacattgtgtcctcgatgcctccaggagttcctgattcagcatcactcccccatggatca

SEQ ID NO: 89316 - DNA, 631 bp, Homo sapiens
ttgcccctcagtctcccctgaggtaagccatacaatctcttttccccaaggttggtctagaaccctttttccccaaagccagctgtaaaacctaaaaatattactctaacctctctccacctcttcctgagtcacgattggccattaagagattaagaccttcattccagagggtcctaccccatactgaggagggaaaagtgtcgcacagagggatcaagaaacatctaaacagacaggccttgctgagttgtcccacccaatctattagcattagattatatactttttgtataatcgtatttctatgtggtggttcatataacctaaataaaatatacttcatataacctaaataaaaatatacttcatataacctaaataaaaacagatcgttttctctgtacctttgattcttccttctgaaggctcccatgctatgtaaaactatcaaatacacttgctatgcctttatcttgttaacctgtcttttgataaaggggtttcagccatgacccttatgatagagaggaaagggaacttccctttttcactcctagagaaacagaaggtccagggcagaaaggtgaggaaaaaygccttaagtacaggaaaagagaatgaaagctgg

SEQ ID NO: 89317 - DNA, 726 bp, Homo sapiens
atttgctgtttgctttgagaagtcttgtcactactcttgaagaaaagggagaaagaaaattagcatttatatctttcctcctttgtggtaaactgtattctaggcacttcacatatattaattaactcagttaatcctcacataatccttagggaatggctgttatctgcgttttacaaacaccccagggagaattggtaacttgtctaatgttatayggctaatatgtgcaagacaacggttagaacacaggctaatttgactctaagacctgtgctttttaaatgtcagttatcttctgtttatatctgtattgcagattataattaatgtgttaacatacattcactgtagaaccagcggttttttttttccctgttgttgttacttgtggaatctacatatgagggttgtgacctaacttgtttcctgggaagcatcataacattctatcataatatgatgcaggagtagataataaaacctgccatgtctatttcttgtggagagggcaagtgtttaataaaaagccttcagcataaataatgagaggttccagagtgatttctagcagagccttttgtttgtcaacatttgaacattattctccaaaataatggctcaggtttgagaggtagtattgacaatttcacttgtataccagaacatgcacagtggtagaagataattatgctagaaataaacaatattttttttttttattga

SEQ ID NO: 89318 - DNA, 644 bp, Homo sapiens
taatggtttaataatatgacataaagtacaatatcttgctacactgtttagctgaggatcaccatttctctctgagttttgtaaacccagtgtaaagattgacatayaatcagttacaagatctttgatgtcactaataagaggacctcactcataacattttcacttgaataataaatttgtcaatatatgtaaagtgctttgaaaacatctggcacaaattaagtgccagaagtattagttcccactaccatgactcttaaattacattcttaggtcacctgaacatccgtcgaaagacaaaatgttatgtaacacccctctgcatagactctgggtactcttttaatgccttatcatttcctataagaaaagacagcaaatgctaattcattatagtaaggtgacaaattagtattaaaattgtactatatttaaaggaattgccttcaagggaaaattcatatgaaaaaagtgagaataattcaaccctacagtctgaatataatacatcatggtaggcatagttacctcagggttaaaatatacataaaacaaacaaacatagtgcagtggactgaatgtttgcatacccccagaatttacatgtcagcatcctaacctgtaaagtgatagtgttcaga

SEQ ID NO: 89319 - DNA, 574 bp, Homo sapiens
taagtgcttcccacctgctggctgatttgattgatcctcccacaatcatagcgggtgatatggtttggatttgtgtccccacccaaatctcatgttgaattgtaatccctattgtgagagaaggggactagtgggaggtgattggattattggggcagatttctcccttgggactgttctcatgttcatgagtgagttctcaagagatctggttgtttaaaagtgtgtagcatgtccttgtttgctctcttcctcctgctccagccatataagacgtgccagcttcccctttgccttctgccatgattgtaagtttcctgargcctccccagcctcctgtacagcctgtggaaccatgagccaattaaacctcttttctttataaattacccagtttcatgtatttatttacagcagtgcaagaatggactaatacagcaggtatgatacccataagacagatggggaaattgaagcttgagagacgatttgcctgacaacaaagctagtcctcccaactcctgtgctaaacagactcccatagcttctgtaactacccagcttctaccatagc

SEQ ID NO: 89320 - DNA, 1468 bp, Homo sapiens
acttcctgctgcttggcgcctgctgtgtgtctaagctgaggatgatggattttctgtgctcagggccatccatgtgtgtacgcagccctgatgttgtgtgkgtatcctgcatcctgaagtgtaatttattaggtctaatccctgtctggggtaacggtaagtcttccctctagaaatgctgaggaggggggaatgtgctcattattatttcattaggacaccactgggtattccaggagtcccagagtagatatcacatgttcctcgggtgatttagaggagacagcctggggcctcgttcctccaaaactcgggaaaaaatatccacagatttccataaatatgtcctggcctctcttctgattactaaattcctttcttttcacctcatgccaattttgtctttccacataagtacaatatacaaacatttcaaaagaaagcatgggatatttactgtttcctcaacaatgcaagcaatagtttcagaagctaatgtcagcctcaaaagtttccaacctcaaaacttgtgtttctgcatcttctctctgaaatcagctttgatgaaggctaccaggacaagatagcatttcatagattctccttctttgtccagctcagcctgtctaaatgcagagtgaggggaaaggcatagaattatcaagagatgcccaagctctgtttccccaagaaggatccacactctctcaatcatctagccttgtccttcattctccagcccccttcccatgtgcatggtaagcttaacatacccaacatgatttgaatgtcactggattccaattccccaactcacaaggtagatgttcttcacatgagcatttcaactcagataccttttgggtcctttcccttcccatcctattgaatggagcctgcaactgatttgatttgagaatgaatcatggaggttacttttcttgatactgccaagtgcttgcaccctgcccacagttgcccaccatcaccatggaccttgcaactttgtccatcactaccagaagcagctggactgggagtgggtcacaggggggctgaggattcaaaaccttggggtcaaatcctaacacaatagcttggtaactagatcccttgggaaaatcatttcccctctatgagcctcagtttcctcatctggcaaatgggaatctttgtacctacctgaccgggttgtgctgagcagcaaatgaaataatgcatgtgaaagcagttttcaaactgcaaggggcaacttggggccaaatgcggtggctcatatctgtaatcccaacacttagggaggctgaggcagaaggattgcttgagctcaggagttcaagactagcctgggcaacagagtgagaccccatctctactaaaaatcaaaaaagttagttggatatggtggtgtgtgcctgtagtcccggctactcaggaggctgagacaggagggtcacttgagcctggg

SEQ ID NO: 89321 - DNA, 1468 bp, Homo sapiens
acttcctgctgcttggcgcctgctgtgtgtctaagctgaggatgatggattttctgtgctcagggccatccatgtgtgtacgcagccctgatgttgtgtgtgtatcctgcatcctgaagtgtaatttattaggtctaatccctgtctggggtaacggtaagtcttccctctagaaatgctgaggaggggggaatgtgctcattattatttcattaggacaccactgggtattccaggagtcccagagtagatatcacatgttcctcgggtgatttagaggagacagcctggggcctcgttcctccaaaactcgggaaaaaatatccacagatttccataaatatgtcctggcctctcttctgattactaaattcctttcttttcacctcatgccaattttgtctttccacataagtacaatatacaaacatttcaaaagaaagcatgggatatttactgtttcctcaacaatgcaagcaatagtttcagaagctaatgtcagcctcaaaagtttccaacctcaaaacttgtgtttctgcatcttctctctgaaatcagctttgatgaaggctaccaggacaagatagcatttcatagattctccttctttgtccagctcagcctgtctaaatgcagagtgaggggaaaggcatagaattatcaagagatgcccaagctctgtttccccaagaaggatccacactctctcaatcatctagccttgtccttcattctccagcccccttcccatgtgcatggtaagcttaacatacccaacatgatttgaatgtcactggattccaattccccaactcacaaggtagatgttcttcacatgagcatttcaactcagataccttttgggtcctttcccttcccatcctattgaatggagcctgcaactgatttgatttgagaatgaatcatggaggttacttttcttgatactgccaagtgcttgcaccctgcccacagttgcccaccatcaccatggaccttgcaactttgtccatcactaccagaagcagctggactgggagtgggtcacaggggggctgaggattcaaaaccttggggtcaaatcctaacacaatagcttggtaactagatcccttgggaaaatcatttcccctctatgagcctcagtttcctcatctggcaaatgggaatctttgtacctacctgaccgggttgtgctgagcagcaaatgaaataatgcatgtgaaagcagttttcaaactgcaaggggcaacttggggccaaatgcgktggctcatatctgtaatcccaacacttagggaggctgaggcagaaggattgcttgagctcaggagttcaagactagcctgggcaacagagtgagaccccatctctactaaaaatcaaaaaagttagttggatatggtggtgtgtgcctgtagtcccggctactcaggaggctgagacaggagggtcacttgagcctggg

SEQ ID NO: 89322 - DNA, 1468 bp, Homo sapiens
acttcctgctgcttggcgcctgctgtgtgtctaagctgaggatgatggattttctgtgctcagggccatccatgtgtgtacgcagccctgatgttgtgtgtgtatcctgcatcctgaagtgtaatttattaggtctaatccctgtctggggtaacggtaagtcttccctctagaaatgctgaggaggggggaatgtgctcattattatttcattaggacaccactgggtattccaggagtcccagagtagatatcacatgttcctcgggtgatttagaggagacagcctggggcctcgttcctccaaaactcgggaaaaaatatccacagatttccataaatatgtcctggcctctcttctgattactaaattcctttcttttcacctcatgccaattttgtctttccacataagtacaatatacaaacatttcaaaagaaagcatgggatatttactgtttcctcaacaatgcaagcaatagtttcagaagctaatgtcagcctcaaaagtttccaacctcaaaacttgtgtttctgcatcttctctctgaaatcagctttgatgaaggctaccaggacaagatagcatttcatagattctccttctttgtccagctcagcctgtctaaatgcagagtgaggggaaaggcatagaattatcaagagatgcccaagctctgtttccccaagaaggatccacactctctcaatcatctagccttgtccttcattctccagcccccttcccatgtgcatggtaagcttaacatacccaacatgatttgaatgtcactggattccaattccccaactcacaaggtagatgttcttcacatgagcatttcaactcagataccttttgggtcctttcccttcccatcctattgaatggagcctgcaactgatttgatttgagaatgaatcatggaggttacttttcttgatactgccaagtgcttgcaccctgcccacagttgcccaccatcaccatggaccttgcaactttgtccatcactaccagaagcagctggactgggagtgggtcacaggggggctgaggattcaaaaccttggggtcaaatcctaacacaatagcttggtaactagatcccttgggaaaatcatttcccctctatgagcctcagtttcctcatctggcaaatgggaatctttgtacctacctgaccgggttgtgctgagcagcaaatgaaataatgcatgtgaaagcagttttcaaactgcaaggggcaacttggggccaaatgcggtggctcatatctgtaatcccaacacttagggaggctgaggcagaaggattgcttgagctcaggagttcaagactagcctgggcaacagagtgagaccccatctctactaaaaatcaaaaaagttagttggrtatggtggtgtgtgcctgtagtcccggctactcaggaggctgagacaggagggtcacttgagcctggg
